United States Patent Application Publication US 2008/0113342 A1 - sequence listing, part 9

SEQ ID NO: 30243 - DNA, 110492 bp, Arabidopsis thaliana
gtgtgctgtaaagaaagaaagaaagaaagaaagaaagaaagaaagaaaggaaggaagaaagaaaggaagaaagaaagagagaaagaaaggaagaagggaaggaaggaagaaaggaagaaaggaaggaagaaagaaagaaagagagaaagaaaggaagaaaggaagaaaggaaaaaaggaagaaaggaaggaagaaagaaagaaagaaagaaagaaaggaaggaaggaaggaaggaagaaaggaagaaagaaagaaagaaagaaagagagagagaaagaaaggaagaagggaaggaaggaaggaaggaaggaagaaagaaaggaaggaaggaaggaaggaaggaaggaagaaagaaagaaagaaagaaagaaagaaagaaagaaagaaagaaagaaagaaagaaagaaagagaaagtcctctaggctcgtgtacatttttttttggagacattttctaaattgaggttcctccactcagatgacattagcttgtgtcaaggtgacataaaactatccagcagagctggccaggatattatcataagctattttgctaatatctgtagcccctgataggcttcattaggtaatctcacactcaagtacatacagaaagcactaagtggcatcggtcttcaattttgaggagcttgggagttggctcagtaggtaagaatatgaatttaatcaccagcacctacaaaaaaagctagccatgtccctggaaccccagttctgtgaaaaggtgggaacaggagaattactggggctaggtaactgccagtctagccaaaagctgcaagctaaagatttagtgagaaacccttctcaaaaaagtaaggcagagagtgccagagcaggacattggtctctgcaagtgcaagtttgctcatataccacacacatgtgtatgtgtacacacacacatgcacatacatgtatacatacacacatgaatgaatgcatgcctatatgcaggcacacatacacttgtcccaaaatcttattgggaaataagcgaagaacttcaatgggcatttctgaaaaattatatatgtgctagtcaccttttataacaaacaagtgagatgatgaacatctagaaaaaagtttctgttggacccagagttctggagttcttggtctgtgatcagttagctctgttactttttgcctttgttgaaactgtttacctcatggccagaaagagaagagaaagggcttagtgaaggacctttatgtcactattaggcacaccctcaaaggcaattgatgtctccgggtcctttctttcctcctttggtgttctggccataaggtgtgttttgcatcacacgtcacaccattcgagtgccatgcattgtgcccaaaagcaagggggggcaactgatcatgaagaaacccccaaaactgtgagccatacagatctttcatcattacaaattaattgtctcaggtatttataatagcaatggaagggtgactaacaatcacaagggttcagcaccatcaatcagcagagaaatcaagaccacaatgagctttcttcacatccattaggatggtgctaaaaataataattaaagaaaacaggttttggcaaggatgaggagagattggaacatctgtgtgttgttgatgggattataaatgatgcaattacaatgaaaaacagggtatggttccccataaatcaaaacaggatgtgatccagcaatcctgcttctaagggtattcaactggaaacagggtcttaagttggtgcttgcaaaccaatgttcaaacaaacacaggattgttgttagtcctgtagaagcaactcccatgtctatcagtagatggactcatttatgcatgtggcacatatttagtgggctactatctggagctacaagggaaagaatgcctgccatacactgcagcatggataaactttgagtgcttatgccaagtgaaataagtaggttatgaaaacataaaaacggtatgatttcatgtatgaggtttttaaagtaatcaagaacataggaaaagaaaggagaatggtggttaccagggttaccagatgtggtgtatgacgcggtgtggctatttgatggggtgtagtttttcagttttacagaatgaaattcttctgtagatctggtttgttttttttttttttttacaacagtacaaatatacataatgcttctgaattgtgcagttaaagtggctaggacagtcaatgctatagccaatttttttttttttagaagactggactgatggcccatgacttggtgactacacaactcaacctatctcctgaattttactgtcttgttctgtgaggactgccttgacatcacttgcataactgtcatcttgaatcaaggaatttctttccctcctctgtaccaatggactttcttgtttttctactcttttttggcccaccattcagctatacagactgaatcctctaggagctttctatgaatttttgttttacggcttcagtagtgaaacacttgctcagaatattcaagaccctgggtttgattctcagcacccaaaatttagcttctttaaaaaatacatttttatatgtgcctgtcttaaggttccttctttccttccttccttccttccttccttccttccttccttccttccttccttccttccttccttccctccctccctccttccctccttccttccttccctccctccctcctttccttcttccttccttcctaacctcttccttccttcccccttccttccttccccccttccttccctcctccctctttgcttcctttcctttttgccttctcacttgaaggtttggcttaccattaaaatctatgctagaaatctaagccttccatctcaatatattaaaagttttgctcattctcatctaatttccagtgctgctaagaaattactgtgacctttcctatgatatatcttttacctctctgtcctctctttccccatctgagctttccctttcttacactagcataaggaaattttatcattttgctggtagtattttctcatctattgaactaactagacaatcactggccctctttaatcactcaggttctacaaagtggaagactggcatgttgttttatctatctatctatctatctatctatctatctatctatctatctacctacctacctacctacttatcacaccccccacacacacacaattagatgtaacagaaaaggtcgttgttgttgttaacttcctggtgtttggatagtgtaatggctattcctggttgtcaacttgactatatctggaatgaactacaatccagaattggaaggcacacctgtgatccagatcttgaggatggaagacacaagtttctgacctggatcttggcatggagattttgaggcatagtggccatgaaaagctgaggcccaaacaaggaactacacacctttaatcccaggagattgaggcaaggagatctctgagttcaaagtcagcctgagacaaacaagactaagatccaggcatggtggtacacacctttaatctggactacaccttttgctagaggcctacataaggacattggaagaaggaagattcacttttctttaactgcttgcacttacttgccagcacatctgttagaacctacttctacagaagaccagctaaaacaactaacttcatgggactaaacaactactagattcttggacttcacatccacagctgcccattgttgggatagttggactatagattggaagtcatcacaataaattccctcaatatagagagatattccataaattctgtgactctataggaccctgactagtacagatagttttaaaaatatagcgaaatcatgtgtttaagtcaccatattaactcagaaatcccctaaatagaactttttttttttttttagaaaagaagattcaactcacaacacaggatatactttcccatttacatgaaagagaatagatggctttcatgcgatgtggaaaaaaagatgaaggcgggagctctcctagttcccactggacccttatgtggtggatggtttctttttaaaaatccataaaatgaatagtttgtgaaggactaatattaacgacccagtgtaaagcagtgacctcagtcagtgtagtagcacacacctacaacacacctacaacatacctacaacacacctacaacacacctacaacacacctacaacacacctacaacacacctacaacacacctacaagttgtggttacttgagagggttaggggagagggtcattcaagcaaaggagctcaagattagctggggtaacagaatgagactccgtctcagaaagtacatgtatgaaatcatatttaagagagagaatacaccataggttcatgtgccccttacccagactatcgccgattttagtttgccagtggtataaccaagttacaaccagtcatatgacgtgtgtggaaaggacagaactctataatcgactttgtatcctataaaatacgtgtctcaagatgggcatggtgacgtgctcctgtaagcccagtaatcaaagctgaggcagaactatcaaacatttgaggccagtctttgctacgtaatgaactcaagagcagcttggctatgtagtgaagccctgtgaacaaaatagtcattatcacaacaaacaaacaaaaaacaaacaaaaataaataaaattacttcttttacttaagccactctgcttctgcatagagaaacaacctacaacttaactattaattcaaaagaagagaagcactaagaaagggagcaggcaagaccttggctctgatgttggtataatcaggctcaccacatcttcctgtgcccctccttacctcacaccttcccctctagcttataataggactcccaggatcactgaaatcctgaatgcatgtctgattcacatcccacacagccaaagcttcttcaaatctggtctggtgaagccttctttctttttcaaatatttgtagcaaggaaataagaatatgatgaatctacccaaactgactaggttcaacttctagttctcctactgactgccaaattaactcaccctctctgaaccctaacttcctcacttagaaaatgaggataaaaatgccaattgctttctaagctgtatggagagtgatctgatacttgtaattgccaactgagaccccaccctagaccagagatggttcctgatcaggtggctacagaaggcatcaaactacagtttcttgcccccatggagctttagtctagtgagaaaggcagattctattttctgaaaacaaacaaacgaacaagtcaggagtggtagtgcacacctgtaatctcattcctggtaaatggaggcaagaggattgtgaaactgaattcaaggtcatcctggactgcagaatgagaacttttcaataaaataaagtgaaaatagataagtaagtacaaacaaaaatttacagcttgcaaataattatatgttgtgagacatccatagaagataaatacatataaaataaagtttatactaggggaagcattttatttttattttttcaacaaattctcatagcaaagatagaaactcaatgattttgaaaggcaatccatcagtaaaagctcccccttgactaatgctgatttgagagtatgttattgtatctcagaagaaattgtcccctttaaaatccatagcaagcagctatctgatttgcatcctacacagccaagcctttttaaaatctggtcctgtgagaccttcattctttttcaaacatctgtggcagggaaatgagtgtaatgatctatacacctaaactgactaggttcaacttcttgtttccttcttccatggaacaagtcataggttatcttagtaagcagatggcagattctagtgtgcccattctttggagaaaaagaagcgctgtcatgttacttcttaccctaaactaaagcagggtgccacataccttccacagcaatcagagcacgtttagcattcactacacaaggaagagcactgcacaccttggatagttcctactgtcacagtggttcttggggatactcccagctgccccagggaagacctcagagccctcagtcagtctcagcctttggacaatagtttgtgtgactcgattatctaaagcacacttgccaaactactctgtaccacagaccccagccaattacttatcccagactctgtgtaacataggttgtaacttaaaaacttttaatccctaatgtataatagtgtgaaatgtgagttaaggtccccaagaccaccaatctactactactatcctcacagatccaatggactataaatggctagaggctttcagtttctttgagttattcaggagtcaagactcaatgaaaactatgggggtctgtagtctccaatcagaatctggccctggtctttatggtcagaggatttccccagaagctcagtaaaagagagagaggaagtgagtaaagcccttcccttccttagagtcatgagatctctgctatttcctatctgagatgctcagattagaaatgtccaggagaatggacaagatagaaggtggaagttaccttatattaaagagaacataaaatatacatcatcagtctgagcgcagatccttgtacatgtgtgaaaaactgatgcagtgtgctgggcaaggtaaggtgggttagggagctctacagagcccaagacacatttcactcagtcgttaatttttactgaggagctgccatttgccaggcagtatgctagactataagccaacaacagtatgcaaaatcagacctgttatctgctcttaatggagtatttacacaggtgagtgggtcagttattggctaataagcatacatacaaggaggcactctgggagtacctgtaactggaccctaaaaactagaagcaactggggaaggtgaactgacaaaagagagatctaacctgtttggaaagataaagaggtgggacatgggaaaatctactttgtaacatttctagaactcttagcttacctttggggtgaggtttgttactggagattactctatatgaggtagagaaacattagcacttttaagtaggaaatgttgaaacattacatttttttgcatttacttagagagagagagaagggggagggagtgagagagggagggagggaatgagagagggaggggagggagagaaagagagagagagagaaggaggagagagagagagagtcataggacaacttgctgaggtcattgctctcctccaccatgtgggtttgctgggtagtgagtgcctcaaacccatcgagccatctccccaaccctgtgaaaacacctaaacaggcatctcaagtggtctcacttcccatttattttatttctacacaaatgaaaatggtctgctgttaaaaaccaatgctttcttctattttgttgattaaaaacacaacatcagattaatttttgcatagcatatatcagaaacaattattaaagggaagggctttgagggttttttttttcctggtcaaaagacacttgtatctttattctattctttttttttaattgggtattttctttatttacatttcaaatgttatcccctttcctgttttccctccttcctggaaacagcctatcacatcctccctccccctgcttctatgagggtgttcctccacacacccaccaactcccacctcccttcccttgattcccctaaactggggcatctatagagcctttataggacctctcctcccattgatgcctgacaaggccatcgtctgctacatatgcagctggagccatgtgtactcctttgttgatgacttggtccctgggagttctgggggttctggttggttgatattgttgttcttcctatggggttacaaaccccttcaactccttcagtcctttctttaactcctctattggggacctggtgctcagtccaatgattggctgtgagcatccacctctgtatttgtaaggctctgaccgggccttttgggagacagtcatatcaggctcctttcagcatgtacttagcatccacaaagtgtctgggtttgataactgtatatggaatgaatcagattcttccacatgtgaactatttttaactggatttttgctgcagctaatttttgtttacaagtgtctttacattttagaaattattatcatcattattattattataaaataaaattattgcattgttgtattgtccaaatttctcccaataaaaaaatagcagcacagaaagtgtaaagctaaagggtggtacaaataatgagagggtcgggagggtggtgtgcttatgaagttcttctggaacctgaggctaatgtggtgccaattcagcactgtgtggtctacttctaggcacagtatgagcatttcataggcagtgctgtctttcttttttttaaaagatttatttattttatgtatatgagtacacactgtagttgtacagatggttgtgagcctttaggtgattgttgggaattgaatttaggacctctgcttgctctggccaaccccacttgctcctgcccaaagatttatttattattataagttcactgtagctgtcttcaaactcaccagaagagggcatcagatctcattatgggtggttgtgagccaccatgtggttactgggatttgaattcagtacctttggaagagtagttggtgctcttacccgctgagccatctcaccagcccagcagtgctgtgttttaagacacagaaaaggaaacaagaatatcacacccaatggctcaaactcagtggttttttttttttaagatttattgtttaaattatatgtatgtgtgtatatatgtgtgcacatgaatgggagtgtaggcgtacagagaggccagaaaagggtgtcagaccctctgaagctgtagttacaggcagtcgtgagtgatgtctgatgtgggtactgggaactgaactcagcagcaagccttcttcactggtcaaccatggctccccaaaacttggtgttaaacttcatattttatagcactctgtagacatataggtaaaaaggaaggcttttatttaagttcacatatatgaagtgaagatagaagaacagtattcataagtgaatgtccttccataggttaagactggcttctttgcttttcttgctttgtttgttttgaaatctatatctgagggaatttgggtagaaaagaatgcttaaattttcaccgtagccaaagaccatgagagaaggctcccttgcacatctactcccaagcattacagatttgcagtgctaaagagtcagaattcttttgtttgagtaaatttattgtcagtgggaaaattgcttcttattgagtttgaatcttctagaagttttcctacaagtctagttttaagaacctggcaatcttggattcgaattctgctttgctgccttctacttgtatgatcccagtgacttttctgaatttgagttacctgtctataaaacatgaatgatttatatatgactagaagggcttaacaaacgtttgctggctatggaccaagctggcaatgggccaggtgtgggaggatgaagatgaacaagagaacagtttcttactcttgcaaagcacttagtctagcagagaaatgaataagaaatcgttgtaatgccacaacataatctctacacatggagatgtatagagagtggggacatctcacctgggcttgggtttctagctctcctttaggtctgtctctccttttcttctagcctgttgtcaacattgtctgttctacttcttgcagtcagtagcagcggtgctaactaggctgaaaagggaaggaactaaccactgttggtgtctatctttaattgctagcaaaatgacctctggactcataatagtaaagagtatatgctcaaatatttcctttaactttgctgacagaagcaaagaggagaactggttgaataaatggcaagacgcaatatatcatatattatttataaaagcaaaagccatgctaactgatatggatggattacatagggaaagaagccccaaagaactggaattaacaatgtttttcctccaaagagtacagccagctgcaaaggcattgccaccaatctttcagccattagattcctttctggttgaagttttccctccccaagggaatgcaattgtttttcaatctaaggcattctctgtcattattaattccaatggattgaatcataggctctcaggagattctagccttcaatgttaatagctccctaaacagaagcatagttcactttttggaaatgaatgggccttcccatcaggagaagcaacttacagggctttaacgtatgtcttgctaaagtattttttggctttaaagcagaaaaaaatatgcaaatcaagttgaatcactaaaagtcccctgaagtcaaaatcaaggcctgtagtcagtgctgctgtctgaaatttaaatcaaattcaattaaagatttacagtgtctgagttagtgtctccatgtttcctttcacagccttttctaccagatactacaactcctcttttcaaacccaatcttagggaatacgggctgaattaaaggttcagagacaagaactctgctgtctatagatagtggagaggcagctcatctgtaagtggctttacatacattcctggcccctggtctacacactgacgagagcttatttctgcatagcagttaaggtcacggcatcctagcttccaacctgtgctctgtcttttctagatggcgcactttggtgtgttctttaacaattttaatgctctgagttcccacctgataggctcagtttctaaccacagcttcctcagaaaggtgtacagaggcatagtgagacctctaaaatgtgacctcctaggagactcagctgggacagtggcctgaggtacatctacaaagaggacagagaggcatcagaggggggtgggggagagaaagcaaagaactagcattaaggagtggtcaggatcaggagcttcacagatgctacttgaagtacatgtagaccacacaagcttttataggggctagcaatggggagtcattaggaacacactgatgatatttgagagggagactgtcttagtgttctgttgctgtgtcgtggccaaggcaactcttacgaaaaatagtgtttagttggaaacttccttacagcttcagaaacttagtccattatcatcatggcaagaaggtgtaagtagctgagaacaacaccctgtttcatgaactcagagcagaacactgggcctgttatgagcttttgaaaccttgaagtccacttccagggacacacctcttctaacaaagccacacttattccaacaaggccacacctcctaatccttctcaaatagtgccactccctggcatttaattataatgggggtcattcttactcaaactactacagggaacaaagcaaacagtcagaatttctagcattattcaatacctaggagccatgtaacgactttatgggagtttaaaggtagctgggtgatggctcatgcctataatcctgggacactgaagcagaattgccatgaatttaaagactgatggacatagtgagatcctttctcagaaaaaaaaaaaaaagtcaaaaagctcccaaaggtcaaaataaggcagtgcattacacaatagtaatacacaatacagaaaacctggaaaacagaaaaaattgtaaaaagaaaaaagtcttgattgttttaacttatagctagacctacaatttttctttgtttagtttatttatatcaagggttgatgagcataatccttcttgttctctgatgaacagcctgcatttgccaaggtcttgaagccccataccttgaatgaaggaaggatctgagaatgttcttgtgacatctgagcagagtaaataacccattaagctcaaagagtgaaaccagattccttttgtagctgctccagagctgtcagttgacagataataaaatttaaagtggttctcaaatatctgacagaaggctccacctttcttaaaataagatgcacattagaactctagtgaaatctgcttttctcttcctcttatcaggctggtaacgatcaagaatctggttgcctgaggtgttgatgaacacactggggaacctcctgggagggagtgtcacattggtgcagcttctgtcactatctgtcaaacttgcccagatcttttgagtcagcaataccatttctaggaaacaattccaccgatacaagaaaaaacacactcggacaagattattcactataggtttggctgtaatgacaaaagattggaaacaacctaaaattccattgatgggctgtgggtcagttaaatgggatacaagggctacaaggaaagggccagtcctgtatcacctattgaatggtttctaagacatactccatagagaaagatgtcataggaactaattcctcactgtatatgcaatgagtgaaaatagataatagaaaaggaaattataaattcatagaatatttctagaaggaaccacagaagtcaatagtctatctaataatggttgggcttagtagatgtgatttatttttcaccgtgttccttctgtacattctgaattttttgttataagtatgtgtaatttatgcaaaaactacaaaggtaaaatataacattctgaaacgagatgaaacctctgagccatgtattagcaggttttttgctttggtgctggggttaactctagagcctcaagatgttctatcagcaaggtattactctcccaccctttgttttaaagacagacttttactgagtttgccaggatggtctttgaactcgctttgtattctaaatagaccttgaacttgcaattcttctgcctcagcttctcacatagctggtagcagcttttatttttgagtaaccatgctcttgtgttgtttagtttgattcttttgtttcatattttcccccttgtcctgcctccatgagaactgaaaaacagcagttaccaccaactgacagcttagtacaatctagtaatggtccgatggatatgacttcatttaattctcacaacttctctcagatggttaattatgtctgcaaaatcccagaaatcctgggtataagaaatgaaagcatcttggcaaaaccacacaacaaataaagcgtggagctggattatagaccaagcctacctcgaaaatgtaggctctttctagacaactgtacaaccagtgatgcagcatcagcacatatattttgaatgatgctttagtcttcttttatagtttttgaatcaaaggaacttagtattttatgtggtttttaaaaccacacagtactgcatgaatgaaccagctagatgctcttcacctcacacaggctccaaccaccaagagataaggtacaattgctattcccattttccaagcaaaaacaatgaaagctgatgttaaaaactccccagtggagctcagtgtgtaaattacagaacaaagatttggatctaggcagtttggctccatgatctgccatcaccacactgcctggaaatacagttgtacagtgcatgaccctaggggagagaccagaggagaaccttcactattcctggaaatctgcacaggcttcctggaagattgaggcaggatctgagtctaaaatattaaggcatagagacattacaatatccaaaagacgtcattctaccctgcactgaaacagttctggaaagatcaacatgctttgtggggagggaagagacggaaattgtagcacagagcctcatatgacatgtctgggaattgtgccatgtaatagaactgagtttctgtgagggatttcaaattttactcaatattctgaagtctagctaaaacacagttaagtgttgaccaggttcttatcatcagtaggtactgtcgaaagcagttgggggttggatttaatggcattgtttgtttttataaggcagcatcctagaaattagcaactgagctgcagcaaagatgaatcagatgtgatgccgagaataatattagaagtggtgccatgccactctagtgaacttgaaagcaaggcacagttcaacaacaaacagtcttttggggactctcaaagtcctcatggctctgctcatcttgtcttacaaacggcctcaaaattagccttttctttctcatcctcccagaccaggatgaaacaggtgcacaaacctagtcctaaacaggatgaaaacctaatcccaagatgtctctgtattggtcaaatttcttcatggtgtaactatcctttagtcttaatatggcttgtaagagctagacttgacctctgcccatgcaggcaagatccatttccaggctggacaaaatccaagaacatgtgtagaacaaggtctaccctgcatatttcctaattctcctttaattcagctggatgcttttatttggggggcacggaagaagcagcatactttgaccacaacaatctttttaaaactacacttatttattttatgttcatgggctcattgtacatgtgccatggcatgtgcatggagatcagagaacaatttgtgggaattgtccctctcctaccatgtgcgtcctggggtttgaaatgggctcatcagaatgatgagtgaggatataaagtgggttcatcagaatgcctttacttaatgagccacctcaaccaacctccacaagaatctttaatcaaacattctttaatatgtttgctgtgtctttttcttatgctcccaaacagtattcacataataactaatctctatgttgaattgattgtaatgtcaaaatacccctgcatttccttggccagctgacgtatggggagatatttaacaactcactgaggaagggagggaagtaggaggaggggtctgatttgtagctcctgccaacagttacattataaatattttcatcttgtctaattctaggttgccaccaggagtaactggatacagagttgggaagtgataagcacagttttctcttgagcctaattgaaccagccagctctagtgggtgtgcccactgcgttctatcctctcaggggaatatgactgcaacatcctccaaaccctgcttcctgacttcaatcctgggatctttattctgccccctcagataacactattcccactatttcatagcactattccctgtttgatccatcttccttggctcttctttctttttactgccacctagttttcaatgtccttggtcctgccaaagaaagttattgcttttaataataatacagaatatccactggaatttcagtgaacaaagaacatgttttagcatgatcatttgatatatatatattacaatattacataaatactagaagtttatttgtatgtatctgaagtttatatgagtaacagcttttatctgacaatcttattcctgacccacccaaacattgatcttaggtaagttactaaacctcttagacattcttaatcatcagggaaatgcaaatcaaaacaaccctgagatttcacttcacaccagtcagaatggctaagatcaaaaattcaggtgacagcagatgctggctaggatgtggagaaagaggaacactcctccattgttggtgggattgcaagctggtacaaccactttggaaagcagcctggtggttcctcagaaaattggacatagtactaccagaggatcccgcaatacctctcctgggcatatatccagaagatgtcccaaccggtaagaaggacacatgttccactatgttcatagcagccttatttataatagccagaagctggaaagaacccagatgtccctcaacagaggaatggatacagaaaatgtggtacatttacacaatggagtactactcagctattaaaaagaatgaatttatgaaattcctaggcaaatggatggacctggagggcatcatcctgagtgaggtaacccaatcacaaaggaactcacacacaatatgtactcactgataagtggatattagcccagaaacttaggatacacaagatataagatacaatttgctaaacgcatgaaactcaagaagaacgaagaccaaagtgtggacactttgccccttcttagaattgggaacaaaacacccatggaaggagttacagagacaaagtttggagctgtgacaaaaggatggaccatctagagactgccatatccggggatccatcccataatcagcttccaaacgctgacaccattgcacacactagcaagattttgctgtaaggacccagatatagctttctcttgtgagactatgccggggcctagcaaacacagaagtggatgctcacagtcagctattggatggatcacagggcccccaatggaggagctagagaaagtatccaaggagctaaagagatctgcaaccctataggtggaacaacattatgaactaaccagtaccctggagctcttgactctagctgcatatgtatcaaaagatggcctagttggccatcactggaaagagaggcccattggacttgcaaactttatatgccccagtacaggggaatgccagggccaaaaagtgggagtgggtgggtaggggagtaggggggagggtatgggggacttttggggtagcattggaaatgtaaatgagaaaaatacctaataaaaatattaaaaaaaaagtaggggctggagattgaacacttgctctttctgtttgcagcacatacgtagtgctttacaatacccataacttcagttctggaggatccagccccttttctgacttccttgggcaccagtcatgcatatggcacaaatacatatgtgcaggcactacacaaaaacaaaaaatagaaagaaataaatccggttttaaaatgaaaaaaaaaaagaagtttatatcctcatctttgaagtgacattaaatgattcagttcttcttaaagataacccaagggcatttcaatctgcagaatgagctttttgtcttgagcacatccttacccttctaacttagtttggcttgcacctgtctgttatatgagaccagcattgcacttaggcagacatctacctggtggatgcttgagggcccagcttgctgtggtgatagatgcggtgctgaagatgagaaagaagcttgggtcatctctctggcttccatctatgaggtagaagggacattttattttctacattgcacattatagtctcatagctcatagaaaataaaatcacacagttcatggtttataaaaaatttgaaactcatgatagtagttttcaataagcatttacatttactatcaaccatgaaagatgggaagagatgcaaggtctagctccttgagtaaaggaatttttatatgtaggaatggaattagatcttctactaatcttgagttaatgcctgatgaattccagacaaaaatgggttgttgtttccttcttttagccccttttggttctgttctctccaggagaacccacttgtgctcagctcctgctgctatactactaccttcagtctgtcatggaacataataatattatctttctggaactgagtgttcctacaacattgataaataattttccaaactggtctccattaataaaattgtgttgccaccatttagcaaggtttactcttgtaagaagaaacaatctgctataagtttaacaaatcccccatttgggtttctgtggtcatggtagcttcgtttttcatttgaggtttaatattgtttataaaattcttaaataacttagacaagaaaaagggcattcctagtaattggcattcaataaatatttgtttgacttatctggcaatctttatttactcaaagaagtttagaaagagtgaggtaacccaatcacaaaagaactcacatgatatgtactcactgataagtggatattagcccagaaacttagaatacccaagatacaagatacaatctgcaaaacacatgaaactcaagaagaacgaagaccaaaatgtggacactttgcctcttcttagaattgggaacaaaacacccatggaaggagttacagagacaaagtttggagctgagacgaaaggatggaccatctagagactgccatacctggggatccatcccataatcagcttccaaaaggtgacaccattgcatacactagcaagattttgatgaaaggacccaggtatagctgtcttttgtgagaggctatgccgtggcctagcaaacacagaagtggaagctcacagtcaactattggatggatcacagggcccccaatggaggagctagagaaagtacccaaggagctaaaggggtctgcaactctataggtggaacaacaatatgaactaaccagttaccaccaccaccaccccaccaccccactcccagctcgtgtctctagctgcatatgtatcagaagatggtctagtcggccatcattggaaagaaaggcccatcggtcttgcaaactttatatgcctcagtacaggggaacgccagggccaagaagtgggaggggggaggggcttggggggcaggatatggggggacttttgggatagcattggaaatgtaaatgaagaaaaatacctaattaaaaaattcatttaaaaaaaagaaagaacacaatagagtcaaaagataggtcttctcgtgacttcagaaagcatatcaaactatcacaactggtacatataactgtatcttttaaaggattttaaatcttagtatttgctgaaatacttagtgtttactatttcagcatctcatctgagttccgagaagttgtggattctctccttatccacatcagccccgcctcccccacggtcagctccttgctgcctgcttgtgatagttcttactatcaagatacgcagtttctcttgcacaagcaagactatcatactaggtaacttagtcccctgggaagatacaaccagatcttaagtaaaaagagagaaacacttcaatggtaatatccttttatcaataatccatttgtcactttgtgaaacaggccccagtaatgaatttcaagatgaagtaatgtgacatatgaaaagaagagtgataaggtcagcctttgtccatgaaaatgatctatacatcttgccatccctgaataccaattagctactaatgcccactgcgagtccaatcaggactagtctgtgttccagaccagctgaaaagcaaatatcaagtcaagctgcaaaatgtgcatggtgtcaaacaaccagcataacttaataatttagagatgccattactgcatgaacaaacaataagttaacctttgggaaatcagtgattattttcaatgtgtattatcaatactaagctatgaatacattccctgtgctttgtgaacagtgagcatctatatacttcacttgatgcttcccttctgaactccaactagtttatattcagagagttactctgtgttgtatatgcagagaaatacaagaaagaaagaaaagccaagccaggtctggtggcatgaatttgtaattctaacttttcagaaagctgagaatcactactaacaatctgaaagaacaagaaccaccaacaataattactaagaaatgtgctattttattgcactggcatgttttcacacagactctaacttcttgaatttgtttattttgcctgaggccaccaagatcctggacatgtaaaaatggaaagcatcctaaacagctgaaattagtttactgaattttctttgggtatgagcaagatgatggcatcagactttcaagataacattcaagagttatttctcaattctgaggacatatcaggcaacagcccatgatgagtagattttggggtgttgagtggagagctgtagaatcacacagtgtggacagactgttggagcagggaaagaaattggaaagtgtaatatgtggagggcttaggtaggaaaacactgtgctctgacaccctcctgttagtcatcatctcaatgtttgaatctgaaaacagttgtactactaaaatacaacccacggatttagtaatgtagaaagaaaagcgaacaaacaaggacaatttagggaaactctccattcagccaaaagatttgcaacctcattctgtctgaaatctgcattccattcagtaaggctattcagatcttcacaaatctagacaaaagaacagctacataatacctgggcctgagtctccttctaaatacaacttgcccaagactacatacctgggtcccagagtagcttccctagagctgcaatgaataaactagtcatagaggaatatttatcctgtatttacagagccatgagagaatctgatgcagccagcagctgttgcttaggcaccaaacctccaaacagatcttttgccatttccaggcactgtgatcccttgtaaagctgactagtgggaaagtcaggcctgctctctggtcactcactaccttgagttcctgaattttacctacatggaagaaatctggtttcctggatacggaatctcaataagtcatcccacaagagcccagaccttcaccaatatggaggagtcacaggccctgtcagaatagtgacagcagacagatagccctggctctttgaatacttcaaggttatccagcacagaagggacagcattgtagagatgtgacaatagtaggtctgtgggtcaaggaatctctctctcccctgctgtaccaccctaccccaccacatatcacatatacacagagcaagtcacacacacacacacatacacgggagggatgggagagaaagagagagagagagagagagagagagagagagagagagagagagagagaggagagagagagagagagagaatattcagcaatttcaatgtatcacctgtaaattttttttttggccttaacttgcttaccaggatctgaattcttctgtaacactttaaatcaatccaggtagatctgcgatgaagcaactagacctagtgtctcagatgtggagagtgtttcacacatccaaagttttttgtggaaatggttcaatatgaagattaggcctttcctaccttcatgaatccagcttgcaagactacagcagagactttattcagaggaactaagacattagcaaataactgataaaaaggaagggaggtaaaatacatcacagtcaggccaaaagaatcccctggttttgacacaacatgtgatgctttcaactagttcctactaccttaattttaagggaaaattgatactttgcatgcttagtttctgctcatggctctgaaccgagagaactgagatctttggagaagccaaagtggtttaagtgacttaccagaataaatgagctggtttctcttagctgaggtttcctaatggtgaagcacaagtagcagccactgaaaatcaaccccacagagagaggcaagcacagaaagtcagcccaagggatcttcccggaccggggagagttcaggatatcaactcgatgtcttatcaccaaccagctcggagaggccatcttatcgacacttagggatcagagcactctcattaagataagacagaaatgtgtagcaggtccttaggcagggagactgttccttgctatccatagagccactcctaaaatgcctgggagtttctagttttctagggataagatatctccatgcatagcaaaataacaagagcaaagaagagatgaaatcatagggcagatttgaattaaacttagcatagaagatctaggtttagccctgttgcaggttggaaaaatctaaaactgggtcaagaagttgttaggtactacactgagcaacactgaggctgtaaggccagaactgaaactgaactgtctggcagctatcaagaggttagggcaattagcctggctctcctttaaaattagccagtgccttccaaataaacacagcacccttctccctaacagtcgctctccaaataacaacaatacgttttctcactacaagacattttctagagcctctctcccagaagaagctgttaaattaaccattgtttcactttgcaaacatcttctgccttggtgacaaatgaaactacgttctaaaatcaactgcaagttctctagtaccagtaacttctcttttctctttgagatacgctttttagttaaattgcagacctagtcatctccaaccccagccaaagagcacatcacccaagcctgagagtgtggaaagcatttctcttctagagaggtaaatgtccttcttccacttacctgaaatgtactaataaactctggaatccatcagcacatagaaaagtgcatgtgagtagtaattcagagggatacaatcagccccatacaaaagaagagaactgtgatacacacattctatccctgatctcttgatttgcatctagcttagcatcaggagatctaggtgtagccctgtttcaggttggaaaatctaggctgggtcgagaagttgtgaatgcaacttcttgcaatgctgaagtcctcaaatttttagttagtaatgacaatgtatactagcctttcttgtttattaaaacatactaaaatatgaatgagatttggggttaagtaagtgcagctaaggaaatgtgtgcctcaagttttgctgtgatcttaaaactgcagaaaaaagtgtacgtacacacacacacacacacacacacacacacacacacgaggagtttttcaaatgggaaacccatcaagatacagagaaaagaatctgtgatggtagaaacagagtttagagttactgtgctaatattttggtttaggaagagtctttttctcccataatcaaatgccaatcaaaggcagtggtactaacaaagatctatgctggtggcatacaaagggacaacacagaatcaccctaccttccaacccttgaatatctgactagtagaagctcaagctctggggttgtcaaggccatttatgcctgagaatcatactcagaaacttgaaggatagcgttatgttgtaggctgtaacttctcacataaaaacacttaacagaaggcttcggggagagtctaggagtaaagcacagctgggtaattactaagtaagggacgtagtttgagcatggttttttttctgcacgtgtgaaggtgcagtgtcattctgtatattcagtgccaactgaggctataagagggcatcagaaccccaggaacaagagtcacagaaggtttaaaaccaccatgtagaaactgaacccacaacctcttcaaagagcagtaaatgcaatcggaagttatagagttggagcttatactttcttagtcatcttcatggcagctccgtatgatgatctattattattctcatgttaaagagtaaataaacaagaacacagatcttgagctaacttagccattgtcaaacagctagcaatggagttgggcttctaattcaaattgttactcaaaggctatggtctccacgtgtacccttggaaagctagatagacagcatccagaccattaacatacagtgtgtacctctatgtataaatatgtatttttacacacatttatgtatgaaatgtatatgtataaatatatgagctgagaaagcctcttccagatgaggctgacaagagttccactaaaactaccggggtttaggcatctcctgtgggaccattcttctgatgtcttgtttaaacatttttatcatggatgtatgctcccgacttaaaaagcaccttttttaaaaaactaaaaacagaaatctgaatgttgtagtaagtgtaacaatcttaagtttattcagtaatttaaaaaaattgttaagcggagaaaagaaactctgtactaacagaggcctgagaaagcacacggcagggaataggggaaatggcttccttcattgctggacacagactgagctccaggctgtttcagctgcctttttaaggctcaagggcactaaaagtaaaaccatcctgcttcctctccccattttcattttcacctaaaatcccctagtccctttgtgaagaccagggcttcacacggtgaaagaatggtggactcacttctttcaataggctgacctagtatgtacactaagtccacccatgttttaactttcttcctagtttattccccttctgatttcttcacaagaatcaaccggcttttcattttaatctactctaatcgcctgtgtgtttacactgggttacattctttagagtgtacttatattctccttttgcattctcaatataaattaatctgctagatataaagctgttctctttattttagtgtaatttttttcttcacattgaattctaggagaaactatgctagtgatatataattcttgaactattaaacatgggagcataagaaaacaagaatcttaaggcaatctgcagagtgaagaagctgattgtgatcctgagagtgtgttttgtaaatggttttggattttatgtacagagcctactttcagcctggaatcattctgaatgctagctagatatctggagacaggtggacagaaaaccaggaactagtctgaaaaagaaactaaccaaagggaagaagtctgtttaagtttgacccagcctagaagacttgagcattggaggggttattcagagtgagacgtaccaccttcagattcaaatcctgtcatccagtagaagggagcttcaaacacaagctagctaagatacaatgaggtccttcttcgatatctttatcttccatataccatgaatcaaagaaacttcaacaacatgaggactgcaacagaccttcaagcctccttgcatgacctggaaatgttttggggtgtcctggcagcagtgggatcagcactaacagataagggcaactctcacagagactaaaggtcttaactaagaagatagccaagagaccactggggagaatgcagagaataggcttggacttggaagccaagattgcttgacaacagacagaagatatttctgtacttcacccactttacccacctggcaactcctggaaacaactgcacaaaatttggaggtgaacaaaccattagaaacaactggtcctgacaagacacaggaaaaacaagcaatatgcaacattactgtctgttgtccaggttgggtgctgggggtgggagagggagtgtgtgtctttgtatgatctgaaaaaactcaggtcagaacatctgtagatccttacagacatacaaaagaatcctagcctcttattcatgtgtgtgtgtgtgtgtgtgtgtgtgtgtgtgtgtgtgtgtgtgtgtatgtgtgtgtcgtctgtcatgcgcgcgtgcctgcgtttaaataacatcagctttagcttctctttctccttataaaacattgtgaatttcagttttctttcccatcaagacatgctcaagtgctgagtcacttttaaagaaaaaaaagaagagtgctcatgcttcttagggctagcctcaaggatgacttaagcacactttccccttcctagttgtgattctttcgatgctaaacgacgtcacattgtgcaatcttaataaggtttccaatcagccccacccactctggccccacccccaccctccaacaaagatttttatcaaatgtgggattttcccatgagtctcaaaattagagagttgactcctaataaatatgagactggggatgtctgtagctcattctgctctggagcccaccaagaacgatagtcaattccagaaaccgctatgaagttcctctctgcaagtaagtgaaggcagttccttgccctctggcggagctattgagactgtgagagaggagtgtgaggcagagagccagcattgtgggttggccagcagccatcagctagcagcaggcgcccaactgtgctatctgctcacttgccggttttcccttttctccacgcaggagacttccatccagttgccttcttgggactgatgctggtgacaaccacggccttccctacttcacaagtccggagaggagacttcacagaggataccactcccaacagacctgtctataccacttcacaagtcggaggcttaattacacatgttctctgggaaatcgtggaaatgagaaaagaggtgggtaggctgtgaaactgatgaagacccagtgtgggcgtccattcattctctttgctcttgaattagaaattctctgctgggatctagggcccttaggatttgaagctaaaggtcagactagactgtgttctctctttctcacctctttgctggttttgagtggaggttgggaaggggttcctttcctgtctggaagatacagaatgtgactgcatttctagaaaattcacagtgggccattctctgttccaatttagctattgcttcttaggtggggattccttttccctcattattcctttttccttatctctttgccttcatttatcccttgaagtctacaaggaccagaaagtgctttttggctgaatgtagtaagttctgtgtgtgtgaaatcaggatgctctagggtcagcccagataagatgcatattgtatagagcccaataaagtgctaacacacacacacacacacacacacacacacaacctagattaggctgggcatggtggtggatgcctcccagcacttgggaggcacacgcaggaagatctctgtgagttagaggccagcttggtctacatattgagttccaggatatccaagactacattgagagatcctttctcaaaaaaaaaaaaaaaaaaaaaaaaaaaacaacaacaaacaaacaaacaaacaagaaaaaaaaaacccaaccaaccctacctagattaaaatatctcccatctttaaatgaaaagtattttgactctgcttgacagaaaggaaaaaaaaaatcacaaacaagattaatagcctaggtctgggtgtgtagaaccaactttgtaatcttgggaaaatcctcaactatttagtactctttatctgcataattatggagttacagataatggcacagacccttccagatggaatattctgtgacttaaatttatttgccccaagatatcatcaaaatttctgtcctttaccaagttcctactctatgctgggcagtttttatcgttgaatccttgagacaaatgtataagagggacatcaataattctttattgaaacataggaaatacttaggagagtaacaagcttaaagccaagggactgagcctaagggtgcatttttatttattgggctgcttagtagggttctaagaaggtatagcttcccttttctgtgtcctggctatgaaagagcatgacttggccctctagtggtgcttgttgtaagaggtgtttaagtgattgctctggtaatcttttgcagttgtgcaatggcaattctgattgtatgaacaacgatgatgcacttgcagaaaacaatctgaaacttccagagatacaaagaaatgatggatgctaccaaactggatataatcaggtagaaacttgtcacgtttactttcaacaattcttcaaggttctctcttgcacgtgatacctgcatttgtacagtcccagtcaggcaacaaagatggggggatacatccaataccacttggatgtaactggcctgcagtagcttgaatacaaaaggagattgagaggtacctcagcagctgctagggtgagggaaagtttaccaaccagtgctataaatgttcactcaatctatgtccatcaggagctaaatgtttaaagtctctattctcatcttggctttgaggtgttagatgattaaaaaaaaaaaacattttttttgtctaaaaaagtggaagagtagatataaaacatgttatgtaaacgtcatgaggaaagtaacttacagatttaattaaaaagcagtttatttaaacaggtaaaggcccactatgctgggattcttcaccactgttaaatgttagaagtcatagcaagtttagctagttcatgagccatctcttctctggctgcccctggaaggatccaggcctacactccctactgagaacactcttcacacccctctccttccagccggtgagatagtctacatcaggtctcaggacaagtcagacaagaacaagagtacaggaagggcactgcaggatagaagggaaggagtgagggtcagaagtggattcccactgccacactctggggtagggggtggggggatattaagtggtgcctctctctacttgtccagataattcaggaggtcagctgatgctgcctgttgtctaattctgtagaagatactgaacagcaggaatctttttttcaattttttattagatattttcttcatttacatttcaaatgctatccccacagtcccctataccctcccccccctccccgctcccttacccaccaactcccacttcttggccctggcattcccctgtactggggcatataaagtttgcaagaccaaggggcctctattcccaatgatggctgactaggccatcttctgctacatatgcagctagagatatgagctctgggggtactggttagttcatattgttgttccacctatagggttgcagaccccttcagctccttgggtactttctctagctcctccattgggggccctgtgttccatccaatagaagactgtgagcatccactttttgccaggcattggcctagcctcacacgagacagctatatcagggtcctttcagcaaaatcttgctggtatatgcaatagtgtctgggtttggtggctgattatgggatggatccctaggtggggtagtctctggatcttccatccttttgtcttagctccaaactttgtctctgtaactccttccatgggtattttgttccccattctaaggaggaatgaagtatccacatgttggtcttccttcttcttgattttcttgtgttttggaaattgtaccttgggtattctaagtttctgggctaatatccacttatcagtgagtgcatatcaagtgacttcttttgtgattgggttacctcactaaggatcatactctccagatacatccatttgaccaagaatttcataaatccattgtttttaatagctgaatagtactccatttgtaaatgtaccacattttctgtatccattcctctgttgagggacatctgggttctttccagcttctggctattatgaataaggctgctatgaacatagtggagcatatgtccttattaccagttggaacatcttctgcgtatatgcccagaagaggtattgctggatcttccggtagtactatgtctaattttttgaggaacagccagactgatttccagagtggttatacaagcttgcaatcccaacagcaatggaggagtgttcctctttctccacatccttaccagcatctgctgtcacctgaatttttgatcttagccattctgactggtgtgaggtggaatctcagggttgttttgatttgcatttccctgatgattaaggatgttgaacattttttcaagtgcttctcagccattcagtattcctcagttgagaattctttgtttagctttgtaccccatttttaatggggttatttgaatttctggagttcagcttcttgagctctttgtatatattggatattagtcccctatcagatttaggattggtaaaaatcctttcccaatctgttggtggcctttttgtcttattgacagtgtcttttcccttacagaagctttgcaattttatgaggtcccatttgtcgattctcgattttactgtacaagccattgctgttctgttcaggaatttttcccctgttcccatatctacgagggtttttttcccactttctcctctataaatttcagtgtctctggttttatgtggagttctttgatccacttagacttgagctttgtacaaggagataagaatggatcaattcgggctggagagatggctcagtggttaagagcactgactgctctttcagaagtcctgagttcaaatcccagcaaccacatggtggttcataaccatctataataagatctgatgtccttttctggtgtgtctgaagacagctacagtgtacttacatgtaataaataaataaaactagattatttaaaaaaaaaaaaaaagaatggatcaattcacactcttctacatgataaccaccagttgagccagcaccaattgttgaaaatgctctctttttcccactggatggttttagctcccttgtcaaagatcaagtgaccataagtgtgtgggttcatttctgtgtcttcaattgtgttccattgatctacctgtctgttgctgtatcaataccatgcagtttttttttatcacaattgctctgtagtacagcttgaggtcaggcatggtgagtccaccagaggttcttttattgttgagaatagtttttgctatcctagtttttttttttttttttttgaacagcaggaatcttattctcaaattgaatctattcctagaaagaactgacttccttttccattttacttataggaaatttgcctattgaaaatttcctctggtcttctggagtaccatagctacctggagtacatgaagaacaacttaaaagataacaagaaagacaaagccagagtccttcagagagatacagaaactctaattcatatcttcaaccaagaggtgagtgcttccccatctctcatgcagtgtgggaaagaggacacccggcacctcagggtagcggcactttttccagacagctgctcagaagggagagagtctgaacaacagttcttgattataaggccttgctttgttttactttggggttttgtttgaggttctcttttgcaaagaacatcaatacctgctttaaactgtattaatagaatgttactaattgcgtaagaggtatgaaaactatgacagccatacatagtcacccattatgagagcacagagacaaaagtgactttaatatttaatccttggcaagtgacatttttgtaaccagagttctaatgcagagaagtagccaaaagctaaaatgtcagggaaggaagggatcaagggcttctggctaccattagccagaagaatggtagatatggaggattaatgactcagagtgtgggcgaacaaagccagatgcaataagaagggcctggaatgaaaccctcttgctaaggctgcttttgccacttgtagtttcttgccttaaaccagagagtttcccaatttaatgtgcacaggaaccacttagggtcttgttccagcagggtcttacttaggaggtctaggaagggaactaagattcatttttgtaaacagctgcttgtttatgaccctgctatatagtattcaggctcctaagtagtggggcaagccttccagttagtcttccccatgccagtgggcccatggaagggtgtttccagacttcttcatgctaccacactaagagactctcaacagagtctgaatggaaaccacgaaggaacacatttgttttagattcctctgtgccacctttactgatgggagcttctgttttccagtagaatacagtatgttagcatggatgcttggataacagacaaataagatggtggtgctgacctctggacgcttactctctagtggcagacagaacagtaaggttagaattctgttgctattaaaaaactaataataatcaccttgaaaaagaatggagttgttaggcatgggtctctctcgagtaagcttggaacaaaagcatctcccctggcttgggtgagtcaaagcagatggacttagctcgtctcattcattctaaattagaacttcttcccacagcccagaacacgccacaagaaaaaaaaaatgtgcaatatttaaccagtctttgttttttcctcctttaggtaaaagatttacataaaatagtccttcctaccccaatttccaatgctctcctaacagataagctggagtcacagaaggagtggctaaggaccaagaccatccaattcatcttgaaatcacttgaagaatttctaaaagtcactttgagatctactcggcaaacctagtgcgttatgcctaagcatatcagtttgtggacattcctcactgtggtcagaaaatatatcctgttgtcaggtatctgacttatgttgttctctacgaagaactgacaatatgaatgttgggacactattttaattatttttaatttattgataatttaaataagtaaactttaagttaatttatgattgatatttattatttttatgaagtgtcacttgaaatgttatatgttatagttttgaaatgataacctaaaaatctatttgatataaatattctgttacctagccagatggtttcttggaatgtataagtttacctcaatgaattgctaatttaaatatgtttttaaagaaatctttgtgatgtatttttataatgtttagactgtcttcaaacaaataaattatattatatttaaaaaccagtgactgaaagacgcatctcagctggtaaagttcttacccaacatgagcaaggtcctaagttacatccaaacatcctcccccaaatcaataattaagcactttttatgacatgtaaagttaaataagaagtgaaagctgcagatggtgagtgagagatgccatgagaaagcattgcatataccacattagttaatttcaggtcttgtacattcttttctggacatgagagagtaagggatctaactaagccaccttttggaaacataaaacataatctctgatttgaattcaagtctacctccctctaggtccatttttaacttttagttgtaatttgaagacagatatagaaaaatctcaaaacattttaatatgaattatacacttagagttgatgtcacagattctgagaccatgggactacttagataagatatagctccaaaagataaaagcgccaaaataatatccagaagttctgcctccctcgtctggagtctccatgcactgcatacctcctattagtgtctgccattatatatcataccttaaaactgaaggagctttctatccaactagcatatgggtccctcaagaaagcagactctagtgttttaaccttttcgtgctatatataggtaaggagcctgaacaaaggagacccctataagtatttgctgaatgaaaagagaatagttaatcacagtataacaaaagtcagttcttggtaaatacagagcatttgggtgacattacagtgatgtgttattgtcttttaaaaaaagtagaaaagaatggaaatgaaacattttaaggatttctaaataaggggcagatacaagagtattttgggttttagcccagactatactgtagggggaaagcctgtctcaactttatcccaatttcatatatgtatgtccatatatgtgcatgtatgtgcacatgcacacatgggtgtgtatgtgtgtgtgtatggtgattatgatgatgatgaagagatgatgtctataacttaatgtggttcttcctatttctgtacaaaactgagaatttggtgccaattctctctctctctctctctctctctctctctctctctctctctctttttcttcttcttcttcttcttcttcttcttcttcttcttcttcttcttcttcttcttcttcttcttcttcttcttcttctttttattattattttatgtacattccagccattgcccccaggatcccctcccacagttcctcatcccattcctctttccccttgcctccgagagggtgctcccccctaccagacctccctcttccctggggtctcaagtctcttgaggattaggtgcaccttctcccactgaagccagaccagacagtcctctgctacatatgtgcctgtggccctcagaccagcccgtgtatgctgcctcattggtggctcagtctctgggagttccctggggtccaggttagttgagacttctgatcttcctatggggtagcccttcccttcagcttcttcaatccttcccataattcaaccataggggtttccaacttcagtccaatgattgggtttaagtgtctatttatgtctcagtcagcttcggattgggtctgaggacagccattttacactcttgtctgtaagcacatcatagcatcagtaatagtgtcaggccttgaacaccctccagccccctgtcatgagatggatcccaatatgggctagtcattggaccaactttccttcagtttcttctccatttttgtccctgcagttcttttagacaggaacaattttgggtcagaaattttgactatgggttactaatccagtccctctacttgtggtcctgtctatctactggaggtggactctctgagttccctctccccattgttgagcatattggctaaggtcaccccccccccattgagtcctgagagtctctcacctcctgggtctctggtactttctagagggttcccctacccctcaccatccaaggctgcatatttccattcattctcctggccctttggtcttctctcctgtccaaccccaatctaatcttgttccctttcccctttcactcccctctctcacccaggtcccttcttccctctgcctctcatgattattttattccatatctaagtgggattaaagcatccccacttgggtctttctgcttgttacacttcttatggtctgtgggttgtatcctacatattctgtacttcttggctaatatctatttatcagtgagtatataccatgcatgtccttttgggtctgggttacctcacttaggatgatattttctacttccatccatttgcctgtaaaatttgtgatatcctcatttttaatagcttaataatattccattgtgtaaatgaaccacattttctgtaactattctttggttgagggactgccgtggactggacttagtcggtccctcaacccacaagaaaccagagtttcagtactcatgtgggcaaggagatggcaaaaaaatgacagacactgacacacagagagtgctgtatctgaatataatttctcaaagcgagcatcagacttatattacagaagaaaacaaataagttatgtgacacataagccaaggtacattgaagttatctgacacaaaacagaaaaattcataaagactgacaggaaccaggcagtggttgcaactgagataaaaggcagccctttctaaagtcagccattaggaagccaggtgaggatttcacaccctagttacaatttatgctattccactgagccttgtgaaagcttgtaccaagggggttcagctcttgcttatgaataatgcaatactgtagttccaccttaaaccacatccctccttcttcctaggccattgtaaattcctgcatatgagagtgaccggctgtaattctaagcttactttgtagaacttgccctgagatttttagctcttatccagtaaaatactgcaagaaagcatgcaaaaccctccacactaactcagggacaaatctggttatggggggggctggtgagatggctcagtgggtaagagcacccgactgctcttccgaaggtccgaagttcaaatcccagcaaccacatggtggctcacaaccacccgtaatgagatctgatgccctcttctggtgcgtctgaagacagctacagtgtacttacatataataaataaataaatctttaaaaaaaaaaaaaaaaaaaagatttaaaaaaaaaaaaaataaaaataaaaaaaaaaaatctggttatggggcaccagagactctccaggagacaagtttctgtgaaactttttgcctcaggactgtgtccaagcttttgggcttgccacgcagacttcactggagtgggtgtggcaagagacatctgagttgtttccagatttgtttctggctattacaaataaggctgctatgagaatagtggagtacgtgtccttgtgatatggtggggcatcttttgggtatatgcccaagagtggtatagctgggtctcctagtagtactatgtccagttctctgaggaacctccagattgatttccagagtggttgtaccagtttgcaatcccaccagcaatggaggagtgttcctctttctccacatcttcaccagcatctgctgtctcctgagttttttatcttagccattctgattgatgaaaggtgaaatctcagggtagttttgatttgcatttccctgatgaataaggatgttgaacatttctttaagtgcttcttggcttctgatatccttctgttatgaattctctgtttaactctgtaccccatgttttaaagaattttttattatatatatatatatttgagacagggtttctctgtatagccctggctgtcctggaactcactttgtagaccaggctggcctcaaatctgcctgcctctgcctcccaagtgctgggattaaaggcgtgtgccaccacgcactgcttattatatattttttacagtccagtcactgccccctttccagtctgctctcccacagttcttcatcccattcctcttcccccctgtcttcaaggggatgttctctagaacccctgctaggcctccccactcccagaggcctcaagtctctaaggttgggtacctgttctcccactgaagccagaccaggcagttgtatcccatttttaaattgggttatttgttttgttttttggaggttaacttcttgagctctttatatattttagatattagcactctttcggatgtaaggttagtaaagttttttcccccaatctgtaggttgccaatttatcctattgatggtgtcttttgttttacagaagctttttggtttcatgaggtcctatttgtcagttgttgatcttagagcctgagccattggtgttccttacgatcaagaaaatttcccctgtgccaatgagttcaaagctccttcccactttctcttctattagattcaatgtatctggttttatgttgaggtccttgatccacttagacttgaactttgtgcaaagtgataaatatgggtctattttcattgttctgcatacatacatacatacatacatacatacatacataaatacatacatagttataccagcaccatttattgaagatgttttcttttttccactgcatgattttggcttctttgtcaaagattaagtgtacataggtgtgtgggtttatgtctgggtctttgattctattccattgtctatctctgtacaaaacagtttttatcactgtacagcttgaggtcagggatggtgattttccccagaagttctttgttgttgagaattgttttggctatcctggattttttttgtttttaattatgaagttgagaattgctctttccatgtctgtgaagaattgagttggaattttgatgaggattgcattgaatctgtagattgcttttggtaagatggtcatttttactatgttaatcctgctgatccatgagcatgggagatctttccatcttctgaggtcttcttaacttctttcttcagagacttgaagttcttgtcatacagatttgtcacttgcttggttagagtcacaccaagatattttatattatttctgactattgtaaagggtgtcgttttcctaatttctttttcagcctgtttaccctttgagtataggaagactactgatttgtttgagtaaattttatatgcgaccaccttgctgaagttgttaataagctctaggagttctcggtggagtttttggggtcactgcagtatgctatcatatcatctgcaaatagtgatagtttgatttcttcctttccaatttgtatccctttgatctccttttgttgtctaagtgctctagctagaactttgagtactatattgaataaatagggagagagtgattgttctgattttagtgaatgatggttttgatgtgttcttggattcaatttatgagaattttattgagtatttttgcatcaatactcataagtaaaattggcctgaagttctctttattttttgggtctttggttttgactgagacagaagcagatacttacttacacccaataattggactgaagttggggaccactatggttgaattttggaaggattgaagaagctgaagggaagggcggccctataggaagatcagaagtctcaactaacccggaccccaaggagctcccagagactgagccaccaatgaggcagcatacacgggctggtctgaggccacaggcacatatgtagcagaggactgtctggtctggcttcagtgggagaaggtgcacctaatcctcaagagacttgagaccccagggaagagggaggtctggtaagggggagcaccctttcagggcaaggggaggaagaatgggatgagaaactgtgggaggggatcctggggggcaatggttggaatgtaaataaataaataataagataaaaagaaagaaaagaattggcttgaatgcaaataaaaaaaaattcttaatgcctagtgtgggacagctaccactaagtcattggttaaaagtgtcacagacactaagatatcaggcttctgactagtcatcttcagtattataggttatattttttgtcttttcaaataaaactctagaattagtttgtcaacatccataaaattactttcttaaatttagattggaattttattgaatatatagatgaaagtgataagctgatattatggagtcattctatttatgaaaatggaatgactttccatttctttagttctttcttaatagctttcattcaggtttttggtttgtgttacatagattttaacatatgcttttgatagttttatacctgctttattgttttcctggatgataatataaatggtattaagttttaatgtcaaatttcattagttcactgatagtaagtactagtattttttaaaacttattttatgtatatgagtacactgtagctgtcttcagacacaccaaaagagggcattggatcccattacagatggtggtgagccaccatgtggttgctgagaattgaactaaggacctctggaagagcagtcagtgctcttaattgctgagccatttctccagcccagtactagtattttttagttgaaattatttttgttcagccaggttcagccatgtggcacacacagtgaaactccagaactcaagaggctgagaatggaggactgaaagtttcagacaagttttggttacagatttcaggtcaccttggattattcagtgagctctgtctacaaattcatacattcattttatttattttttgatgtagcagtgaaaattacaagcttgaatagtgtttttctaatcctgtttttattaggagcctcatctacctttctagtgtgattttacagtttacaaaatatttggtactgccaaatattgggcgtggtcgcacacgcctttaatcccagcacttgggaggcagaggcaggtggatttctgagttcgaggccagcctggtctacaaaagtgagttctaggacagccagggctacacagagaaaccctgtcttggaaaaaaacaaaaacaaaaacaaaaacaaaaacaaaaacaaaaaaaatggtactttacaaatagtaacatatagctataggccaatgagagatccaacttgccaaagtagaaaacatgtacacattcaccttttgctgccagcccttgccatctcctccagagtgggaagaaacaaaggggttgccaaacaaaagcaactgaattgatgctaagaaggtaaatgtacatctctgttttcatctctcactcaaatttcagagtactgtaggccacgtgggatactggaagagtttgggtatttttgtctcgtccttctccccactagaggggagggaaattttaaaaaccacaaatatctaaaacatatccataccaggagatccaacacaacagttctttataaagttcaaagaaatacatgccctgtgtgcatacactcaagagtttagttaatactttaaaatggacaatcaactaacgcagacatcttggaaggcagatatcacaaataaaaagcaaaaaatggccattttaggacacaagatacactaaattaattgaagttacataacagagaggacaactgaaaaagagaactgagaatcaaagtaactcaacaaagtgtcggtctcccaggtccttctgagacctgtctgcacaggtcagctcgcagactgcggaggagagtgagcaagcaggtgagcgagcagactgcagaagcgacactgcttctgggacaagccctgttttgggctgcagacatcccgggcaccttcttcgccagaggagaggtggccgcccaggagggctctgaccaccagagcaggtgagggagccatcttgagtcttgggtccctcagagaccagtctgtgcaggtgagcacacagactgcagaggaaacccatcttctgggacaggccctgttttgggccttcatcttcagcaaggaggcaggtctgaacgccagacctctgtgcaccttccctgcaagaggagagattgcctgaagagagtactctgaccacagagactcagaggagagtaggattcccaggatagctgacagaggctaacaaaatcacaggaggaacaggctccatgcagagacaactataataactaacatcagagattaccagatggcgaaaggcaaacgtaagaatcttactaacagaaatcaagactgctcatcattatcagaacccagcactcccacctcagccagtcctggataccccaacacacccaaaaagcaagatttggattcaaaatcatatctcataatgctagtagaggaccttaaaaagggcattaataactcacttaaagaaatacaagagaacactgctaaacaggtagaagtccttaaagagaaaacacaaaaatcccttaaagaattacaggaaaacacaaccaaagaggtgatggaattgaacaaaaccatccaagacctaaaaagggaagtagaaacaataaagaaaacccaaagtgagacaactttggagatagaaaccctaggaaagaaatcaggaaccatagatgtgagcatcagcaacagaatacaagagatggaagagagaaacacaggtacagaagattccatagaaaacatgggcacaacaatcaaagaaaatgcaaaatgcaaacagatcctaactcaaaacatccaggaaatccaggacacaatgagaagaccaaacctatggagaataggcatagatgagataaacattttcaacttaaagggacagtaaatatctttgacaaaagtatagaagaaaacttcccatacctacagaaaaagatgcccatgaacatacaagaagcctacagaactccaaatagactggatcaaaaaagaaattccttccgacacataataatcagaacaacaataatcagactcagaaaatctcacatcttgcaaacatggtcctagatttacttcagtagatttcacatgttgtagatgtggttctagaacctttgaccatggaatagcaccagaagacctgatttcttgtactgggaaatataatattgcttcatcagatttcaaattataatgtggggagcctgagatagaatttgctggattttccccttgaagaagttgcccttgatataactttggaaatctgacactttgcaggtgtggccctgaaatcaatggcgatttgacaactggcggctcttggcccagattcaaatcctcagatttcacagttggaatctgtgtcccctcaactaactcatttggtgataaactctgaagctctggctctggttttgccttttcaggatctaccactcctagagaagactgttgtactaaatccacagataacttaccttgtgactctagtcctgtatctatttgcatagacttcaacttcaggcaatgtcaattcggtgtttgctgtgtattcatgcagattcatttctgattggttagtaatctttggttcccttgtttgatgctcaggatttactatatttatggattcaattactggatttgatgacttgggaggtacactcactttttgagcttcatttgatggctgtgataagtcagtcttatcttttgctttcctcacagggtcggttacctctgaatgtgaatctgggattattcccattgaatccataacctgaagcaatgccatcggagtgacctttattctgtctgtggctgaacatggtggcttgggtgtcagctttgcatgagttccttgtgccttatgtgacttcatcctttcttctggaagacctatgaccctctgttctatattcagctctaacacttgctttggatcctttttctgtaaagtggtttcttcctgaattgcattaacttctacatgtctggaagatggcctgtccattgatataaccaaaggatagtatctaatgatttggtggtcattctcagattctaactgcttgttggaggtaagtggccatgacattctggcttctgtcctatttacttcagaattgactccgatgttcacatgtagatgaatcgatggaacacctgaagatctgttggtacttggcttggtgctctgagggatgggtgtaggtaactgagtgtgggggatctcttgttcaggaactccttgtacatccatcagatgattgagtgttttccatgacttcttcacaggcagaggtaccacttgtttctgcagagtagaaaccttctgagacatatgtccgtgctgctctctcctgactaacagatctagggattgtaaattagagctaataaaagagccatgagcttgtaagggaggaaggacagcaaaattctggaaaagatctgacttctcagtgtgggtcagctgaaaggtaggcagtggtgtgcttcagttcctggactcgggcaattccttttccggggaatcggggacaatattgccctggatttgccaagttgttctttcaggaaagattggaagataagacaggatccagctgttgttggaggattcagaggatatgctgtagtcagtagaacgtttcctatttttacagtaatggcaatgtgggacactctcatgagccatagtgtcagagatggaagaagacataccatgggattctggtaaatccggttccaaaagtgttgctctaaaaacaaagagagttttcttttcattttctttcgaatgagtagtgggaaaattaggacaaaggaagacagtggtaattccaagtccaaaatatttttggccaaagggatgtgagggtggaaaagggatgctattcacaagcatcagttacttctgtaaagaatccctctaccaaagctcgagtctaagtggatcaaagaactccacgtaaaaccagagacactgaaatttatagaggagaaagtggggaaaaccctcgaagatatgggaacaagggaaatgttcctaaacagaacagcaatggcctgtgcattaagatcaagaatcgacaaatgggacctcataaaattgcaaactttctgtagggcaaaagatactgtcaataagacaaaaaggccaccaacagattgggaaaggatttttaccaatcctaaatctgatagggaaataatatccaatatatacaaagagctcaagaagctgaactccagaaattcaaataaccccattaaaaatggggtacagggctaaacaaagaattctcaactgaggaatactgaatggctgagaagcacttgaaaaaatgttcaacatccttaatcatcagggaaatgcaaatcaaaacaaccctgagattccacctcacaacaatcagaatggctaagataaaaaattcaggtgatagcagttgctggtaaggatgtggagaaagaggagcactcctccattgctggtgggattgcaagctggtacaaccactctggaaatcagtctggctgttcctcagaaaactggacatagtactaccagttgatccagcaatacatctcctgagcatatacccagaaggtgttccaactggtaataaggacacatgctccattatgttcatagcagccttatttgtaatagccagaagctggaaagaacccagatgcccctcaacagaggaatggatatagaaaatgaatgtggtacatttacacaatactactcagctattaaaaacaataaatttatgaaattctcgggcagatggatgtatctggaggatatcatcctgagtgaggtaacccaatcacaaaagaagtcacatgatatgcagtcactgataagtggatattagcccagaaacctagaatacccaagatacaacttccaaaacacaagaaaatcaagaagaccaacgcgtggatacttcattcctcccaggaatagggaataaaatatccttggaaggagttgcagagacaaagtttggagctaagatgaaaggatggaccatccagagactgccccacctgggatttcatcccataatcagccaccaaacacagacactactgcatatgcaagcaagatttttgctgaaaagaccctgatatagctgtctcctgtgaggctttgccagtgcctagcaaatacagaagtggattctcacagtcatctataggatggaacaaacagggtccccaatgtaggaactagagaaagtacccaagacctgaaggggtctgcaaccctataggtggagcattatgaactaaccagtacccccagatcttgtttatctcttagcagactgttgatagtgttgagttcacatcaggagaggtcctcaaacaccttcaggccatgaattttagtgtctggattgatggtcccatcattaaaggtaaagggaatactttgattaaactcttaggcttcaaacccaccacaaggccagattgtggtggtgtgtgcctgtaagtgctccactctagaggctgacataaaaggactagaatgagttcaaagccagcttgggatatctaagtttccagccagcctggactactgaatgaaagcacatctcgaaagtgcctcctgttcaatttagaatttccatgtgatgaaagatcttaaggatggtgtgtagacggagagaaaaaatagagccaaaaaaaccccagaagatacagtaatgagaactcccgaaggaaagggaggggagaatgtagccagaccttacttgcagatcagtaacactgaaatataagggaactcagcactgcctgctcaatttcccatgaatgtaaaaactggtcagtttcacgtttgtgtgcgtgcgcgtttgcatgttaggatacatgtacaggggtatgcctgcttatgggacctgtgtacatgaaggtccaagtcaacctcaagtgtcattcctcaggtgccacccacatccgtttgtttgtttgtttgtttgtttgtttgtttgtttgtttgttgtttgagacaaggtctctctttggtctggggattgtcaggaagtctaaattggctgggcagtgagccccaagaatacctgtctctaccttctacccctggtgctgggattacaagtgtgtgcctcggaacacagatctcttacataactgtagggagcaaagtcaggtcctcatgcttgcaaagcaatcaagtactttaccaactcacatatcttctcatcccttaaaatgactttgaagcagtctgttctttgacttaataactagaaagttgtgagaactgagaagcattgatatgtcagtgttatgactgcagaagcccaaaaaaatagctgaattaagtacattcaaaaatgccaagtacggaaaggagttctaaagcctgccccaaataaaagagttatcatatccaagtgagcaggaggcaaagaactggtgtgctattagaaatactgggcaccaggaaacagaataacattcttttatgtgctaaaagaaaacagctgcctatctggatttagacagtgaaactactcaaaaatttaacatcaagtgaaatttttcatcaagcataaacacagtacatctactttgggatggccagaacttacagaatgacaatgattataaatatttgggattcgttcaatgaatctttggatggttgctatgacagcgacttgcactgtaatatccaaaatgaattcaagaccacccagtaccttcccccttcgaaaaggactttccaaactgaactaacaggcaaagtacagagccagataaggaagctggctgactaaacaaatgtaaaaacatagttttagtggtcaaaacgattaagcctgaagctaccaaaacaatattagctgttctcagagaaataaccataacaagattagcaatcctcctgcccaccctccaccacaccccacactgaattctgacaaagaccacaaaccaccctgaccttattgcgagaattcctgtgacagtaatacctgtgactgacccataagttcaaaatgtactattactttgctgaccaaatcataataacccaccatgggggcaaacaaagtgagtcactaggccaaagggttacttagtcactatacaaaccaaccaatgcctaaaagggttacttgctactgaaagataataaaacttgagacctgtgattcatgcaatttatgtcaaatagcccaaagagttgtttgtgagctttgaaacctggggctgagaacatagcagaacaggccaggacatgcccaggcaggcccgtcattaagacattcctgaggctgcttggccataaggataaagagaatgacatgtcaggactggcccagcacctccctatctcctgcccttctgacctaagttaaatgttatctgcatgtacagtctgctgatatttaaatggaccaatcatgtgaaaccgcgccaattcctctcccggccccagacccttttctataaaaacccctagctttcaagcctcgtggtcgaatccactgtctcctgcgtgagatacatttcgacccagagctctgccattaaactacctcgtgtatttacatcaagaaggtctgttcatgattcttgggtgcacgccgaatcaggagttgagtgggggtttccccactaggttctttcactacaccaatgaaaaccctgttgctcaaatctgccccttacaaaggtataaaaagtgtgttctttctttgttctgggtgtctcctctggcctgcgtgctgagaggggagtccccaacatgttggatcaataaaaatcctcatgctttttgcagcaatggcggcggtctctgtggcccttgtgagtgagggtcttttgacgaactacaccagcacgtcagcgtttactacagcaatgttcaaaactacgctatagaatcaactatgtcacaacagtggaggaaatggattttaaatatgtgtgcatacacaatggattctttctgtcatgaagaagaacaaagttacaccatttcagggaaagggatgcaactggagctcctattaagcaaaataagccagctcagaaagaccaacatcaaatgatttttctcatttgtaattcctagattttatatagatgtgtaaaatcacctatgtcaccaggcctttgaagtagaaacgaaattacctagaagagtaaatggaactaatggggagcgaggaggagcaaagtggggaggaatggggggctgagctcaatgttcagcctaacatctgaaaatgttctcctgtaacacagtgccatatatagtagatttacacagtgaaattaaaatagtgcatgatggtctaaacataacacaataatcagtacattataccataataataacaaagcagagaactgccatggacgtatcaatggtgcaggaaaagaaccctttctacaacctacaaccctttcttatcccactttcattcccgaaagtacaagagtgcaatagctgtagctgtctggaagaaaatattctgtaacatttcagttcttacttcttgcattctttctgccccttttctacagtattttctgagccttggggggagtaatatagatgtcctatttagtgcttagctctcagaagctcattattattggcactttcaccagttataacatctattcatgttttttaaaagacactcacaaatcagaaataccagacaacttccttcaacatgccttgggtccaatgttgtaatcctaaccacaaggtaacagtagttaccttgttagtgggaggtaggttagtgggagttagctacggcatgagatgcaaaactacaaaacgttgtagaaagtgagtagtaaataagatgttccttgttcaggattagaaggtttgatgctaaaattgcaacagtatcaaagcaatctatagattctataggggtgctgtataatccctatctgtggctatttggggtgccgcttggcaggaatctgacgttggccatgacaaggaagtaagctcaggcaggaatctaacatcagggcatgataaggaagtaagtttaggcaagcatttaactttaggctataatagggaagtaggttaaggcaggaatttaatcttagggtggaacaaaagaagtaggcttcaggcaagatctggggtttgaacaaggaagtgggctcaattattttggtcattatgactagccccctttaaacagctgtctcgggaataatcacaggactttgcttactgccttgctagctccttattgtactgctcacccttaatacttgcatgtaaataaaaaggtataaaagtggattggaaacattaaatttgccttcagtctcaggactgactggggtcatgttacagagttgtctaactgtcttttcctttttaatcctcactcctgcactggagaacctgttggctgactgagggggcttggtcacctctccaaacaccaatgaacttttttgcagaaatgagaccccatcctaaaaataaaggaaccacaaaggtcctcaagagccaaaaggaaatcttgaaaaaagaatagttaaataactcagtttctgggggctggtgggatggctcagggggtaagagctctaactgtttttctgaaggtcctgagttcaaatcccagcaaccacatggtggctcacaaccatccataatgagatctgatgccctcttctggtgcatctgaagacagctacagtgtacttcagtataataataaataaattttttaaaactcaatttctgtttttaaaactgtgtacaaactaatcaaaaataattgtacaactggcacagggacagacttttagggtcaatggaatttaacagtgaaaatcagctgattctctgcaaaggcaccatgaccattcaatgcaaaaataaataaataaataaatacacattaataaatggttgaggcacaacttgaagaccacatgtaaatgaatgaagttgggcctttacttcatctcatatttaaaaatgaatttgagagggctctgactgctggagtaggtgagagagccatcttgtgccctgggtccctcagagaccagtctgcacaggtgagagtgcggagtacagaagctacacagcttctgggacaggcagaaacaacacagcttctaggacagaccccatttcaggctccagacatcctgacaccttccctgccagaggagaggtgtctgcatggtagggctctgactttcagaggaggtgatagagccatcttgtgtcctgggtcccttggagaccagtcaaaacatccaggaaatccaggacacagcctttgaaggatgaagatacaagctgagcctggcaggcatctggaatttcacagtaagtgatgactatacttaactggtaagtcagtaagttatgctggctatcagttatctcaaatgcttagaacctggtaaaaaagtctgccgttgtgtggatttaaaaaaatgtgtttaagacaggaatgcaacacctgaaattctgtttacagaacttccattttcaaaggctttttcttcctaagctgacctaaaccgctcagcaaccgtcacattcttaaaactgtgctggtgatgttaaaaacagacccttacactgtacaagagatgtatcaagtgctcagtggaactacactgtgtttttaatcaggctcaacttaggagataaatgtctgttcttgtcaaaagtactatgagaaaaatacaagcacccatctagggtgcacacggtcccatcacacctcatctgatgaagcgttcctgtggttatgtgatgcgccacagacacacatcagtcttcagatcgataatggcagaacttaaaatattcacttcaaagaagtctaaagttcttgaagatctgacagcaaagctgtcaaacgggaaaactatgatttcaagcaaagtttcataacaaagtgtagaggaaaccacataaacataacatattccttgtcataaaaataccaacattttaaaaaataaatgagtgtaagtgaaggacactgggggaggatatttctttgttcccttctttatgagaacagtcttgggatagcattaaataaaagaaaaataatttaaatggataaaatactcaacactgaaacaaagcacacagatctacagggtcaacagcaaagtcaaaatggaagttaatctcccaaagcgtcatctcccaagggtactggtttcaggtcaccactggggcactgtgataaagatggcggaaatggaaagtacaaaacccaaaaaagtggaacaaataaaagagatgtagagccgatgttagtctccaaaaattaaaactgttcaacgtgtaactcaaaccatcattcttcataaaagtgtatatatgtaagatacatatacatatatatatgtatgtatatatgtgtatatatgtataagcactatttattgtatcatgctgtattattttaagacaaagtatacatatataaaaaaacattcgtggtataaggataaagtctgtagtttatttagattttgaaatgcaacaaaaaatttcccatcactcatctagctgaaaaagaaattgcagttactggaatcagtaagcacttccgctttgtaaaactgtcgtgagtagtattcacttaaatgtaacgtaagtaagcaattaaaatgcccatttctttagtttcttggggtactgtttaattatccaatctatcaaaagtctagaaagagaagaattaaactaggttttacagttcaaagatatcccaactttcttttattgccaaaaagcaaaattgtcaattacaagatgattatgacacaaccatatcaaacctaaaaaaaatctatgattttaacttcgagaaatcaaaaaataccagattaattctaagtgttctatgtcaacggaagtgtataaaatacatttatttaaaaatcataaaaaatatctaagtttacctgtacaaagaaactgacaccgatatgcatacttccatagagaagtgaatgcttcagcggttgtgtgttttggtaaaaggtttgaaagtatgcatagtttaaaagtaattaggcttttaaataatggagtcttagactatcagatttttattactttttcttcacaaaagaaaacccatgtcaaaataatgcaaaatgaaaaccaagggtatatggcatatcatttttaaaggtggtttctttttattcccccctataggacaaactacatatttaagccataatctcttgacattgaaactttaagttcactggctgtgacgtatcctcggattccctgctgaagtgcaatactatgctgaaaaactcagaaacagtatgaggaagtttcacacaattactgcgctcctaagaatgtacaatgttatcagttaggaaacaattgtgccaaagtcttttttttcttttatcttggtgtgggtgaatagcaaggttctgatctaaaacaggtaatgcatttgcttctctaacggtgaagacgcataagacagtttaaggaatgctgactagccaaacaaaatgcagttattggattatcttgctattcttatcagcttgctatgaaagcactgctcttagaactgtacagcactccattttacagagcaattactcttgagtaatctgttctaaagtgccagtattatttacacatttttttttttagccaaaagtctggctagttgtggcatctggtgaagatgtcatcccagctctattatcatttacattcaccaagagaaattctgaaaattcagcacttgtccctggtccccaaaggttcacctgtccattggcagtgctaaactgagttgctattccagctctggatccatgatatggagcacagaagagctgctcaaaggagctcatttggtaagcctggtggacaggctgtgcctcagctttcttctgagaagtgacttgatccaaaaaagtctgctgttgacgtggcagaggcgtggtttgtctcgtcacctgaaaagggaaatgggtgctgtgagtcactgactattagtccaaagtgagacttatctggagttgttcttagtggagaagtcattcgaatcaggacactttaaagcagattgcttcccaaactgtgagtgggcatcacccaatcagctgaaggctttaagagcagagaccagaactccctgtagagaagaattcttccacaggagtgaagcacaaaaggtacccattttcctagtctgccctttcctgcatgtttgggactcagaacaatgacacgggtgtgtgtgtgtgtgtgtgtgtgtgtgtgtgagagagagagagagagagagagagagagagagagagagagagagagagagagagacagagacagagacagaggcagagacagaggcagacagagacagacatacacagacatacagacagagagagacagacatacagagaggcagagacagacatagagacagagagagagaacagcaatctggtctctgttccagattttgaagtacagaactaaaaaatcccttgtgactccaattaatgttgagggtgtctgttaagcgagatacaaatatagattcgcttctattttttaattgaggaagctggaacaatcttcattctaaaatctaattaagacctgaccagtcccccctcagcccatgacctgcctctgtccccaggcctcctggtccgaccttgataggattacaaagaaaatgctgttcctacagggagatggtaagagggtggcatgcccactcgggctgggggaggcaaactgctccacttcaaccatcagctcaccaggagcttgcgatggaggcgatggccaataggagggggcgggggtgagcgtggcagctggcagttgttctgttggatcagacaacttgtggctgtgccctgcgcaagcctgtgactggcagagccagtgtgagaagagacaatccttcctaatcatttttttttttaagatttatttatttattatatgtaagtacactgtagctgtcttcagacactccagaagagggcgtcagatctcgttacggatggttgtaagccaccatctggttgctgggatttgaacttcggaccttcggaagagcagtcgggtgctcttacccactgagccatctcaccagccccgataatcaagagttttgaccggacctttgagtacgcatcgggatagtgaggagcacagactatggcgctgaaatggattattaaggaacttagtgttttgttccccccttctaagatggctatccatcgtagagaaggggagaacaaaacacccatggaagggtgttctctctctctctctctctctctctctctctctctctctctctctctctctctctctctccctccctccctccctcccccttctcatttttgtcgctaccttgcccttctgtctctcaaaaaacctcatgtagaactgttttgcctggtatggtccttatgaagcttcccaaatatcacaacattggtgctgaagatttcgataatcactaggcagaggagctgcagagcccaggcgaccatggagaaccaaagccacatgaacagccgccaccgccatcactgctacaccaagtggactctatcctctgaaacctgccatcatccacttcctagatttccactgctgctgcagaccatcgcctctgtcgcttcgcgactcacagacttctaccatatgacctgtgctgctgcgatctaccacatgccccgggatgcaccgaacacacagttccacacttcctgctacccgactgcagaagcctgcaaacacacactggcatattgattggtacggagtttctccagttggcaggagggaccatatatgcccagatagcaaatggccagcctctttggggctaaggggttggctttcaatgccctggttcttataagcagcctcctggctgacctacaaggacatagccccttggtgactttccttcttgaaagcagtccataaatacctccaactcttgctggtggctgaaaattgctggtaccaggttaaattgctttctgacaatttctgggaagttgtagccataggctctagttattcacatgatgacctgaatcaaggtttctcatacagaccctaagagagcacaaatgccagcccaggctactatacacagcaaaactctcaatcaacatagatggagaaaccaaaatactcaggacaaaaccaaattcacacaatatcttttcagaaatccagcccttcaaagaataataaagggaaaactccaacaccgggagggaaactaagctctataaaaagcaagaaagtaaactttcaacaaacctaaaagaagatagccacatgaacaaaattccaaccctaacaacaaaaataacaggaagcaacagttacttttcattaatatcgcttaatatcaatggactcaattacccaataaaaagatatagactaacagactagctacaaaaacaggacccaacattttgctgcacacaggtaacccacctcagggaaaaagacagacactacctcagagggaaaggctggaaaacaattttccaaggaaatggtcccaagaaacaaactggattagccattctaatatcgaataaaatcgacttctaacccaaagatatcaaaaaagacaaggaggaacacttcatgcccttcaaaggtaaaaatcttccaagatgaactctcaattctgaatatcaatgctccaaatgcaagggcagccacattcattaaagaaactttagtaaagctcaaagcactcattgcacttcacataataagagtgagagacttcaacacccactctcatcattggacagatcctggaaacagaaactaaacagagacacagtgaaactaacagaagttatgaaacaaatggatttaacagatatctacagaacattttatcctaaaacaaaaggatatttcttctcattacctcatggtaccttctccaaaattgaccatataattggtcacaaaacaggcctcaacagatacaagaagattgaaataatcccatgcaccctatcagatcaccatgaactaaggctgatcttcaataacaacataaatataaaactcacatttgtctggaagctgaacaacactgtactcaatgataacaggaaataatcaaacttagggctctaatcaacccaatagaaacaaaaagaactatacaaagaatcaaccaaatcaggagctggttctttcagaaaatcaacataatagacaaacccttagctagactaactagagggcacagggacagtatactaattaacaaaattagaaatgaaaagggagacataacaaaatctgaggaaatccaaaaaaatcatcagatcctacaacaaaagccaatactcaaaacaactggaaaacctacttgaaatggacagtttcctaaacagataccaggtaccaaagttaaatcagaatcagattaacgatctaaacagtctcatatcctctaaagaaatagaaacagtcattaatagtctcccaaccaaaaaataaaggccaggacgttatgggtttagtgcagagtttgatcagaccttcaaagaagacctaattcaaatactcctcaaactattccacaaaatagaaacagaaggtactctacccaattcattctatgaagccacaaaggctctgatacctaaaccacacaaagacccaacaaagaaagagaacttcagaccagtttgcctaatgaataaaggtgcaaaaatactcaaattctcacaaaccaaatccaagaacacatcaaactgatcattcatcatgactaagtaggcttcatcccacggatgcagggatggcttaatatacagaaatccaacaaatgtgaatcaaaacaaccttgagattacacctcacacccctcagaatggctaaaataaaaaatttaggtgacagcaaatactggcgaggatgtggagaaagagtcactcttctccattgctagtgggattgcaagcttgtacaaccactctggatgtcagtctggtggttcctcagaatattggacatagtactactagaagatacaacaatacctcttctgggcatatatccatgctccactatattcatagcatccttatttataatagcccaaagctagaaagaacccagatgtccctcaacagaggagtgaatacagaaaatgtggtacaatggagtactactcagctattgaaagcaacatattaatgaaattcttaaacactcctccattgctggtgggactgaaagctggtacaaccactctggaaatcagtttggcaattcctcagaaaattgtacatagcaagtgtaaggctactctgggagggattttaagggtgattcctgagggactccgaggattccttcttgaaggactatgaggacttctttttgatgggctgtgtggggtccttgagtgactgtgagggctcctccttgagggactgcatggggtcctccatgagtgactgtgagggctcctccttgagggactgcatggggtcctccatgagtgactgtgagggctcctccttgagagaatgcatggggtcctccaagagggactgtgagggctcatccttgaaggacttagaggattcttgaggatcttagaggctttctagaggaactgcgaggcctattacctgaagagcttcgaagttccttcaagaaggaaccctcaatgtccctcacagaggcaccctcaaaatccctcccagggtagcttttacaatcgctcacggagtagcctttgaagtacttcagggagaagccctcgctactccatgagctactgtaatggctacactgggaaggattttgagggtgcctccttgagggccttcgagggttcttcttgaaggactgtaaggacttctttttgatgggctgtgtagggtccttgagtgactgtgagggcgtatccttgagggacttcgagggttctgccttgagggacctcaagggcttctacctgaagtacttcgaaggctactccatgtgcgactgtaatggctactctgggagggattttgagggtgcctccttgagggaaatcaagggttccctcttgaaggactgtgagttctttttgatgggctgtgtgggttccttgagtgactgtgaggagtactccttcagggactgcatggggccctccatgagtgactgtgaggacttgttgcctccttgagggccttccaggacttcatttgatgggctgtgtggggtccttgagtgactgtgagggctcctccttgagagactgcatggggtcctccattagggatggtgcgggctcatccttaaagaacttcaagggttccttcttaaaggactgcgaggacttctccttgatgggctgtgtgggttccttaagtgactgtgagagctcctacttttgggacagcatggggtcctccatgagggactctgagggctcatccttggaggacttcgagggctccgcctttagggactgtgagggctagtacctgaagtactttgaaggatactccatgaatgactgtaatggctactctaggagggattttgagggtccctccttgggggcctttgaatgttccttcttgaagggttgttaggacttcttttgatgggctgtgtgggttccttgaatgactgtgagggttcctccttgagttactgtaacctccccccagcctgaagcaggctgagccagaccttgacctttctgccaccaaggagattacctaggatagaaccttcctccctagatcactctattgctcagccactcccactgttgcccttcaagatacctgctgggagactacaccccatcctgcacactgtccactgcagctgggctcctgaaagaacctagtggggaaacccccactcaattctcgattcggcgtgcgctcaagaatcacaaacagaagaccatcttgatgtaaaagcatgaggtagtttaatgacggagctccgacacatatctcccgcaggagacagaggtgtcgaccacatggtggagccataatggcggagctccggtttgaaatgtatctcacacaggagacagtggtttcgaccacgaggcttagaagctaggggtttttaaagaaaaggggtggggctggggggaattggcccggtttcacatgattggtccatttaaacatcaacagactatcagaagggcgggagatagggaggcactaggccagtcaggacatatcttgcccgggcatgtcctggcctgttctactatgttcttagccccaggtttcaaagctcacaaacaactctttgggctatttgacataaattacatgaatcacatgtctcaagttttatttcctttcactccaagaatgaattagtgggaatgggcctcctcccacccccttataagcacatttgccattaaacatttgagctttgatcaggaatcttgacttagctccatttttctctcaactgccaagttcccctctttcagccctggcctgccactcaggtgtaccctgtccatgtgagctgcgtgacggtttgcaacaatctggtgccgggaccgggacctgaggaaggtcaggaagacgctgaaggaacgctgttttgtgtgaagctccacgggaagaaaaagaaaaggatagtatcaggcagcaaagcaacaggtacacatggtagccctattaaagtgttgctagaggcgcgggaggatactgtctaagcgtgaatcagtgctaacccagtgctggattcacttaggtcagcagcaaattatcagaactacgaactgatcaggcggttgtccgaagcttttaaaagctgcttctgcttcaggcgagaggaaaagggttttaaaaagaaatgaatcacgccattgtccgcagttttcaagagttgcttcgggcaagaggagtagggcttgaagtacaattgttagaaaattttttagataggatagattcttgttgcccaaggttcaaggaagaaaaaacattagatatcagaacctgggagaaaattggaaaagccttgaaaatcactcaggcagataatttcaccctttgcctctgggcgctcataaaagatgctattgaaaggtgatctcgcaggggtcagatagtacccaggcagagcttgatgaatctcaggaagagtgcctgtcagagagggtcttctcagaaaagggtcctctcaactctaaatttgatatagtctgatgatgagctaattttagacaaagaagatcactcagaaagaggagcagccaaatattttgaggaggattggcctccttgccaagtctcccgcttcacctgtagcctccaccatgggagatgctactcagagggacacgcaactaagcaaattagagtttgaagttaggccgcagaaattgactaatgagcttcgggagctaaaaaggatgtcagatacaggaaggagtaactcttctgaaatgtaccaagcaccgctaggaaaagctgtgagtcaggctcatgggagaggacaggatacatctgatgtgctagtctttcctgtcatcgtggtaattgaccagcaagatactagaaacagacaataccagactttgaatttcaagttaataaaggagttaaaaacagctgttgtgcaatatggtccttcagcccctttcacacaagcattactggatatggtcacggagtcacacttacccccctagattgaaagactatgtaaggctaccttgtcaggaggagatttcttgctttgggattctgaatggtgagatgcagtaagaaagctgccactttaaatgatcagaccagtaatccagactgggatagtaacatgcttctgggagaaggtccatatgaggaccaggctaatctgactggttttcccattggagtgtatgtgcagactgctgcggctgcccgccacgcttggggacagttaccggttagaggggatgttggtgggagtttagccaacattcggcagggtcctgatgagccttaccagaactttgtggaaaggctattaatagcagctagtagaatccttggaaaatctgacacgggaagtccttttgttatacaattggcttatgagaacgctaacgcaatgtgtcatgctgctatccagccgcacaaaggacaaacagatttagcaggatatgtccatctttgtgcagagatcggccgtcatgattatcagggtttggcttttggtgccgcattgcaaggttctagcggaaatgagggaataatgcatgttttaagtgtggaagtttgggtcattttaaaagtgactgtcctaagaacagaggtgccaagagtgggcaaacaggccgtgtcccaggaacatgtccccggtgtagaaagggcaaccattgggctaaggtgtgcaaatccaagctaggcattctgggccatccgttgctgagaaacgagaggaggggccagccccaggccccgacgtacccacagaaaacagcttatggggccatgaacctgctgcgcagccagagatgtttttgaacttgtcagagcaaaaccaggaggtgcaggattggacctctgttccaccacccatgcagtattaagcccagaaatgggagtccaaactctgcctactggagtctttggacctctacctatagaaacttgtggatttcttttaggacaaagcagttctattgtaaaaggcctgcagatttatccaggtgttataaataatgattatgaggaagaaattaaaatcatagctgcttcccgtcatagtgttataactgtacccgctaatcaaagaattgctcaacttgttttaattcctctacatccaccaccatccagatttgttaagaatgagagaggacaaggtggctttgactcctctggtgtgaatagggttcaatctattactaatcaaagacctaaccttaaactggcatttgatataaaaagctttgaaggattgatagatactggagctgatgtaacaattattagaggacaggattggccttcagcttggcctttgacggatatgcttactcaccttcaaggaattggttactgtagtaatccaaaacgaagctccagattgctaacctggagaggtggggaaggcaaatcaggacaaattcagccgaatgttatgtcgattttgcctgtaactctatgaggaatagatctcttgtcacagatgggtgtttataatgtacagtcctaatgagatggtgactaagcagacactcagacagggacctttttctggacatgggctaaaaaagaagggactaggaattaaatcttttgaagatcctaaacctcactctaacacaagaggtttggagtgttttcagtaatagccattatcttgcctgcatcccacgctgataaaattcaatggcttaatgatattccagtgtgggtggatcagtggtctttacctaaagaaaaaatagaagccgcctcttcgatagtgcaggagcaactagaggcaggacatttagtagaatctcagtccccttggaatgcaccaattttcattatcaagaaaaaatctggtgaatggagattgttacaagatttaggaaaagttaatgaaaccagggtatctatgggacctttacaacctgggcttcagtccacagcagccattcctaagggatattataaaattgtggatcttggttccgggactctaccgaacttaggaaattagtctgaacaggtgagagggtgcgccacagaaccggacagcttctgggacaggcggaggcacagagccgctgaggcagcaccctttgcgggccgcagacagccggccaccctctggaccagaggacaggtgtccgcctggctcggaaggcctcagcctcaggagcagcgggcgccaccttggttccgggactccaccgaacttaggaatttagtctgcacaggtgagagtctgcaccacagaagctgacagcttctgggacctgccaaagcaacacagcttctgagaaaggtcctgttttgggccttcttcttcggccaggaggaggtccaaacacaagatatctgcgcaccttccctataagagagcttgccagcagagagtgctctgagcacggaaactcagaggagagaatctgtctcccaggtctgctgatagacggtaacagaatcaccagaagaatctgtctcccaggtctgctgatagacggtaacagaatcaccagaagaacaatctccaatctctaaacagagtcaactataataactaactccagagattaccagatggcgtaggaatcttactaacaggaaccaagacaactcaccatcatcagaacccagcactcccacttcgcccagtccagggcaccccaacacacccgaaaacctagacccagatttaaaagcatatctcatgatgatggtagaggacatcaagaaggactttaataactcactcaaagaaatacaggagaacactgctaaagagttacaagtccttaaagaaaaacaggaaaacacaatcaaacaggtagaagtccttacagaaaaagaggaaaaaaacatacaaacaggtgatggaaatgaacaaaaccatactagacctaaaaagggaaatagacacaataaagaaaactcaaagtgaggcaacactggagatagaaaccctaggaaagaaatctggaaccatagattcgagcatcagcaacagaatacaagagatggaagagagaatatcaggtgcagaagattccatagagaacatcggcacaacaatcaaagaaaatggaaaatgcaaaaagatcctaactcaaaatatccaggaaatccaggacacaatgagaagaccaaacctacggataataggagtggacgagaatgaagattttcaactcaaaggaccagcaaacatcttcaacaaaattattgaagaaaacttcccaaatctaaagaaagagatgcccatgaacatacaagaagcctacagaactccaaatagactggaccagaaaagaaattcctcccgacacataataatcagaacaacaaatgtactaaataaagataaaaaactaaaagcagtaagggaaaaaggtcaagtaacatataaaggcaagcctatcagaattacaccagatttttcaccagagactatgaaagccagaagagcctggacagatgttatacagacactaagagaacacaaattccagcccaggctactatacccagccaaactctcaattaccatagatggagaaaccaaagtattccacgacaaaaccaaattcacacattatctctccgcgaatccagcccttcaaaggataataacagaaaaaaaacaatacaagaacgggaacaacgccctagaaaaaacaagaaggtaatccctcaacaaacctaaaagaagacagccacaagaacagaatgccaactttaacaacaaaaataacaggaagcaacaattacttttccttaatatctcttaatattaatggtctcaactccccaataaaaagacatagactaacaaactggctacacaaacaagacccaacattttgctgcttacaggaaactcatctcagagaaaaagatagacattacctcagaatgaaaggctggaaaacaattttccaagcaaatggtatgaagaaacaagctggagtagccatcctaatatctgataagattgacttccaacccaaagtcatcaaaaaaggcaaggaggggcacttcattctcatcaaaggtaaaatcctccaagaggaactatcaattctgaatatctatgctccaaatacaagggcagccacattcattaaagatactttagtaaagctcaaagcaaacattgcacctcacacaataatagtgggagacttcaacacaccactttcaccaatggacagatcatggaaacagaaactaaacagggacacagtgaaactaacagaggttatgaaacaaatggatctgacagatatctacagaacattttatcctaaaacaaaaggatataccttcttctcagcaccccatggtaccttctccaaaattgaccacataataggtcacaaaacaggcctcaaccgattaaaaaatattgaaattgtcccatgcatcctatcagatcaccatgcactaaggctgatcttcaataacaaaataaataatagaaagccaacattcacatggaaactgaacaacactcttctcaatgataccttggtcaaggaaagaataaagaaagaaattaaggacttcttaagagttcaatgaaaatgaagccacttcatacccaaacttatgggacacaatgaaagcatttctaagaggaaaactcatagctctgaatgcctccaaaaagaaactagagagagcatatattagcagcttgacaacacacctaaaagctctagaacaaaaggaagcaaattcacccaagaggagtagacggcaggaaataatcaaactcaggggcgaaatcaaccaagtggaaacaagaagaactattcagagaatcaaccaatcgaggagctggttctttgagaaaatcaacaggataaacaaacccttagccagactcactagagggcacagggaaagcattctaattaacaaaatcagaaaagggagacataacaacagatcccgaagaaatccaaaacaccatcagatccttctacaaaaggctatactcaacaaaactgaagaacctggatgaaatggagaagtttctagacagataccaggtaccaaagttgaatcaagatcaggttaatgatctaaacagcccgatatcccccaaagaaatagaagcagtcattaatagtctcccaaccaaaaaaagcccaggaccagatgggtttagtgcagagttctatcagaccttcaaagaagatctaatcccagttcttcacaaactattccacaaaatagaaacagaaggtactctacccaactcattctatgaagccacaattactctgatacctaaaccacaaaaagaccccacaaagatagagaacttcagaccaatatcccttatgaatattgatgaaaaaatcctcaataaagttcttgctaaccgaatccaagaacacatcaaaacaatcatccatcctgaccaagtaggtttcatcccagggatgcagggatggttcaatatacggaaatccatcaacgtaatccagtatataaacaaactcaaagacaaaaaccacatgatcatctcgttagatactgagaaagcatttgacaaaatccaacacccattcatgataaaagtcttggaaagatcaggaattcaaggcccatacctaaacatgataaaagcatctacagcaaaccagtagccagcatcaaagtaaatggtgagaagcttgaagcaatcccactaaaatcagggactagacaaggctgtccactctctccctacctattcaacattgtacttgaagtcctagccagagcaattagacaacaaaaggagatcaagtggatacaaattggaaaggaagaagtcaaattatcactttttgcagatgatatgatagtatatataagtgaccctaaaaattccaccacagaactcctaagcctgataaacagcttcagtgaagtagctggatataaagttaactcaaacaagtcaatggcctttctctacacaaaggacaaacaggctgagaaagaaattagggaaacaacacccttctcaatagtcacaaataatataaaatacctaggtgtgactctaactaaggaagtgaaagatctgtatgacaagaacttcaagtctctgaagaaagaaattaaaaaagatctcagaagatggaaagatctcccatgctcatggatcggcaggatcaatatagtaaaaatggctatcttgccaaaagcaatctacagattcaatgcaatccccatcaaaattccaactcaattcttcaacgaattagaaagggcaatcggcagattcatctggaataacaaaaaacctaggatagcaaaaactcttctcaagtataaaagaacctctggtggaatcaccatgcccgacctaaagatgtactacagagcaattatgataaaaactgcatggtactggtatagtgacagacaagtagaccaatggaacagaattgaagacccagagatgaacccacacacctatggtcacttgatctttgacaagggggctaaaaccatccagtggaaaaaagacagcattttcaacaaatggtgctggcacaactggttgttatcgtgtagaagaatgtgaattgatccattcctatctccttgtactaaggtcaaatctaagtggattaaggatctccacataaaaccagagacactgaaacttatagaggagaaagtagggaaaagcctcgaagatatgggtacagggaaaaattcctgaatagaacagcaatggcttgtgctgtaagatcaagaatcgataaatgggacctcataaaattgcaaagcttctgcaaggcaaaagacaccgtcgataagacaaaaagaccaccaacagattgggaaaggatctttacctatcccaaatcggacaggggactaatatccaatatatataaagaactcaagaaggtagactccataaaatcaaataaccccattaaaaaatggggctcagaactgaacaaagatttctcacccgaggaataccgaatggcagagaagcacctgaaaaaaatgttcaacatccttaatcatcagggaaatgcaaatcaaaacaaccctgagattccacctcacaccagtcagaatggctaagatcaaaaattcaggtgacagcagatgctggcgaggatgtggagaaagaggaacactcccccattgttgatggcattgcatcagtctggcggttcctcagaaaattggacatagtactaccggaagatccagcaatacctcttctgggcatatatccagaagatgccccaaccggtaagaaggacacatgctccactatgttcataccagccttatttataatagccagaagctggaaagaacccagatgcccctcaacagaggaatggatacagaaaatgtggtacatttacacaatggagtactactcagctattaaaaagaatgaatttatgaaattcctagccaaatggattgacctggagggcatcatcctgagtgaggtaacccaatcacaaagggactctcacaatatgtactcactgataagtggatattagcccagaaacttaggatacccaagatataagatataatttgctaaaaacattaaactcaagagaacgaagaccaaagtgtggacactttgccccttcttagaataggaaacaaaacacccgtggtaggagttacagagacaaaatttagaagtgtgacgaaaggatggaccatctagtgattgccatatccagagatccatcccatgatcagcttccaaacgctgacaccattgcatacactagcaagattttgctgaaaggacccagatatagctgtctcttgtgagactatgccagggcctagcaaacacagaagtggatgctcacagtcagctattgaatggaccacagggcccccaatggaggaactagagaaagcacccaaggaactaaagggaactgcaaccctataggtggaacaacaatatgaactaagctgtaccccggagctcttgtctctagctgcatatatatcaaaagatggcctagttggccatcactgcaaagagaggcccattggacttgcaaactttatatgccccagtacaggggaacgccagggccaaaaagggggagtgggtgggtaggggagtgggggtgggtgggtatggggaacttttggtatagcattggaaatgtaaatgagctaaatacctaataaaaaatggaaaaaaaatgtaataaaattgtgatagatctgaagaattgtttctttactattcctttgcatcctaaggattgtgaaagatttgcttttagtgttccttctataaattttaaggaacctatgaagagatatcaatggacagtcctcccacagggtatggctaatagtcctaccttatgccaaaagtttgtggcacaagccattcatcctgtgagacaacaatggcctatgatctacatcattcatttcacagatgatgttttgatggcgggaaaagacccccaggatttgcttttgtgttatagagatttacaaaaagctttatctgagaaaggattacagatagctcctgaaaagatacaaactcaggatccttataattatttggggctttagacttactaatcaagtgtttttccccagaagatagttattcacagagacaactttaggactttgaatgattttcaaaaattgttaggtgatattaattggctttgcccctatttaaagcttactacaggggagttgaaacctttatttgatattattaaagggagttctgatcctacctcccctagatctttaacctcagaaggattgctggccttacaactagtggtaaaagctattgaagagtaatttgtcacttatatagattactctttgcctttacatctgttaaatttttaatatgattcatatgcctacaggattgttatggcaaaaatctcctctaatgtggatacatttgaggatttctcctaaacgtaatatcttgccatattatgaagcagtaactcagatgattatccttggaaggaagcaggcactaacttattttggcaaagagccagatattattgttcagccttacagcataggtcaagacacttggctgaaacagcacagtacagattggttgcttgctcaaatagggtttaaaggaactatagacagccactaccttcaagatagattgataaaagttttgaatgtacatgaggtgatatttcctaatatgacctctttagaacccttacacaatgctgttctggtgtttactgatggctcctctaaagagcgagctggatttcttataatcaacaggtaatcataaagactcctggcctatcagctcaattagcagaattaacagcagtactgaatgtctttcagtctgtgagtgaggcttttaatatttttactgatagtttgtatgttgcacaatcggtacccttattggagacctgtggtacgtttaactttaatacaccagcaggatccctgttttcacaattgcaaaacagcattctagcccgaaatacccgttctatattggctacatacgatctcattctggtcttcctggacctttagctaaagacaatgattgcatcgacagagctcgcataggagaagccttaatttcagatcctgttgctttggccaaacgtgatcatgaaaattttcatctctctagcaataccttaaggctccaacataagatcactaaggaacaggcaagaatgattgtaaaacaatgtcctaaatgtattacattatctccagtgccacatttaggaattaatccacaaggtcttatgcctaatcatatttggcaaatggatgtaactcattatgcagaatttggaaaattaaagtatatacatgtttgtattgacacttgttcaggatttctttttgcttctctgcatactggagaagcctccaaaaatgtaattgatcattgcctaaaagcctttaatgccatgggattgcctaaacttattaagacagataacgggccatcctattctagcaaaaattttacttcattttgtaaagaatttggcatcaaacataaaattggaattccctatagccccatgggacaaggaatagttgaacgtgttcattgcacttttaaaaattggcttttaaaaacaaaacaggggcagttatatccccaaaggtcaccaaaggcacatcttgcttttgctttatttgttctaaattttttgaaaactgatgttaaaggtcagtctgcagtggatcgccactggcatccagttacttctagttcttatgccatggtaaagtggcaggacccattaactaacgaatggaagggtccagactgggtcctaatctggggaaagggctcggtctgtgttttttttttttttttttttttttcacaaaaagaagatggagcaggatggctgcctgcctgaaagattagtttgtcaactggataaagatcctgaatcctccagtaagtatgactcttattaaagctaaaaatcctctttaaccgaaaagttaatttggagcacagcctcctctcctagaaagttacagcctttctgtgattctcgaagtcacctccccacaacgggagctctaagtctaagcatgaccattgctaatttgcaattgaatggagtacctggacttcccccaaagaagcttttgtactgttgcttttcactgtctccactttgtttttcaagcaggtcagtcctgcccttcatccttactgcagcaggtgtgcaccctcacctccaacagcacaggtggcagttattaaatcttcatgaagaagcattctaagtacatattgtggttttggtctgaatcgggaataaggtttgctatgagggccagacagtctaagacgggcatccagatctcggaatcatatcagtctaaaaagaggcacatgccaagaggccgtggtttactaataatacaccacagagccatgtaaaaaaattggaggcaaaggttaatgtcttataagtagcagtcttaacaacagggcaggacatagcatatattaaggctagaaaggcagaagtttcagatattagcaaaagtcacttggacacttggaacattgatgaattggccagagataaaaaacaaaacaaacaaacaaacaaaaaaaacctaagtgcattgaatctcctagattgggagatatatatattcaacttgctattattggcactattctattagtaaatcgttgtgtttagagcactcctgaatataaaaagaaagggggagaatgctacacacactacagtgaagtttgcttggcaggcagaggtgcctgggagcactcacgaggcagagtttttcacagaaactcacctcctggaactttagtgttctcataacctgtatactcataccctatccccacgttagtctggtgtatggctccacgtgctctcttttagtattatcttattataagtgccttttaagattgaattctgacatagctaagccttggccactgttccaatgtcctagaaaatgcttgaagccgaggagcttggaagagacaatgaaactaattaggcattacaaagaatgagatagaatagctcagggctagtctacagagtatttacttgggacagtagccagtcttacccagacaagggtattcaccatggcctagcgaataggtgggtttacaatgagaaaaagttagggaatcccactgagacaggtttcttcactagacccaaagaaatcaggcagaactatagagcataaattttatgcctcagtccagcttatttaatattaataacggaggaaattgtaacctcccccagcctgaagcaggctgagccagacattgacctttctgccactaaggagattacctagggtggagccttcctccctagatcactctattgctcagccactgccactgttccccttcaagatgctgctacctgctgggaggctgctgagctattctggaacttcaccctatcctgcacgtcgtcaactgcagctgggctcctagaatgaattggcgggaatgggcctccccctcccccctttataagagcatgtgccattaaacatttgagctttgatcaggaatcttgacttagctccatttttctctcgaccacctagttcccctctctttcagccctggcctgccactcaggtgtaccctgtccatgtgagccatgagctggctcacaacaagttactgcatggggtcctccatgagggactgtgagggctcatacttgaaggacttcgagggttccttctggaaggactgggtggacttctccttgatgtgctgtgtggggtgcttaagtgactgtgagggctcctccttgagtgactacaagaggtcctccatgaggaactgtgagggctcatcctgaaggactttgtgggttccacattgagggactacaaagacttctccttgatgggctgtgttgggtccttgagtaactgtgagggctcctccttgagggactgcatggggtcctccatgagggactgtgagggctcatccttgaaggacttagagggttcctccttgaacgactgcgaggacttttccttgatggactgtgtgtggtcattgagtgactgtgagggctcctccttgagggactgcatagaatcctctatgagggaatgtgagggctcatccttgaaggacttcgagggttctgccttgagggactgcaagtgcttctacctgaagtacttcgtacgctactccatgagtgactgtaatggctactcttggaggtgtacacagaagtggatgctcactgtcagctattggatggatcacagggcccccaatggaggagctagagaaagtacccaaggagctaaagggatctgcaaccctataggtggaacaacattatgaactaaccagtaccccggagctcttgactctagctgcatatgtatcaaaagatggcctagtcggccatcactggaaagagaggcccattggacttgcaaactttatatgccccagtacaagggaatgccagggccaagaagtgggagtgggtgggtaggggagtggaggggagggtatgggggacttttggtatagcattggaaatgtaaatgaggaaaatacctaattaaaaaaaaaaaaaacggtgatattcatagcatcactgaaagcactctaaacagccatttccattttaatcgttggatgtggattatacccttcaatctgaaagtcttcaactttgaaatcatcgattgtctcaacttttcgaaggattttgagctttgggaaaggtcttggttctcgctgtagctaaaaaacaaaatcatggcattattttacattcattcctgtgtctcctcatgaaaccaatacagtattttaccacagggtactattttacaggagtgcaatattgtacttcttttctttctgcaacattagggactgcacctcgggccttgcgagatctacgaaagtaatctacgattcagctgcagcccagcttcttattgtgagacagggtgttggtcagttatctaagcttatgttgagcccagtctgtagcctaggcaagccttggaatgctcctactccaagagtctcttaactagctgtgatcatcggctgaagccaccagataactcctgataaatatactaaacttagggacacagttgtttactcatgccagtctagttttttcccttaagggccacgaaacgtagacactcactcttactgccatctccattcatttgatggctactgtgttatagggattaaaacagacagcctttttaaagctcagacctaactgcttactggacttaagcatcaaactaaagtcaaacatttatactttgattcttcaagtaaaattatgagttaaaatgacatatctctgggcttttctccttggtactggtatgtaacaccttacgattttcagtgcttatggttgctaaggctggttatggtctcatccctgctcacccccgttattaaaagccctacagttggagcacttccatataagacagcatcaaccagagtgactgtgagacaaaggatgccctgccatccaatctgttgtcaagagaaggcaccaagctcaaaaagagacctaacaggtatatttcttacctgaattttcagcggctctatatgattcaggtaaatatgtgcatctcccaaagtgtggacaaaatcacctggctaaaaatgtctcacaggaaaaaaacacaacagttaatattttcgtttcaattctttttaaagcacatcattttaaaacagattaagggcaggtgagatggctcagtgagtaaagccatttgtcaccaagactgacaacctgggagccactgtcctctgatctctacacacatacaatggaatatgtgtgcccccacatacacaataacacactatataacatgcaaatacttcaaatcgtcccaaagcaggaattttatcagtgtggcttttgagaagagctaatttacaaaagtttttttaagttgtacacgatggctcacacacatatttactgctctcgttggcattgtgaacctagaagagcagggagggcctaaaaatgaggtggactaaagtctcatgcaatagccagctctatccagagcatcagacactctattctctgagcgttaagaagagtcacgtgagtaaagtatataatcaaagtcaagctgcatatggcaaaaacatgtttttccataaaggtatataaataacagctgaagtaaactctctcctatctgctacacatgagaggagcatgaacacacattccaagaacaattctctttttgaaaaaactaaagtcacaagactcttgttttttcacaagcacttagaaatcttaggtcttcattcttggactgtgtgacaataagttagagctaatgtagactttgagaccatgtctcaaaaacaaaaacaaaaactctccccccctacagacacacacacacacacacacacgcaacctatgtgaatgttagttttcataggcaacaagaggccagaaagctccaaggaggattataaggtaatccaattcatgtcttatttacatgtataaaattctaatactaatcagactgaattccctgctatgaggtcaatgtgttgcattggctctaactatgccttccgaaagaaactcacctgcaggcctgtgatatgtgcaatcatgtaggtgagcagagcatagctggcaatgttgaagggcacgcccagacccatatctcctgacctctggtaaagctggcaagacagttccccattcaccacatagaactgacagagggcatggcaaggaggcagtgccatcaggggaagatctgaggagacaaggggtttgatatatctatgagaaaggtaaaatagcaaacaagccaaccatgaaaacagccagcaggttacacacctcaattcataccttcaaagactattttcccaaccatccagcagaggccatggaaacttgtccattagctatctgcaagtatacacttatgctgaagcaatgctctcccatctgagctaaaatgaaggattagagccactgttgatggcaccaaataaaagggaaattatctcatatgcaaaggccataggaaacatgcatgtgagatacatctgttattaagttattataaatacaaatgtcctttcctgggtactcactatacccttgtagagtttagttttataatctagttaagcgttaacacttgaaacttcatctgctccaaattaaaaattaaaatcataggtgtttttcacaggcaattcaaaattacacttcaaatgctcatgtaatataaaagcataaagaggatcacatgagcctaacccccaaaatatgaatgtgaaaataagagcaaagtgtgattgagttgctcaagggtacacaatcaactacatgattagaggcagttccagtggccaccttgcttccttttggctaactagccagtttatccaaaggaaaatgactgggatgctgtccaccttttgggttccaggcacacatgatgattcttctgtcatcagggttggttttgatggtgtcaatcactttttgcagctggtctactccttgtcccgagtaatctgtagaattgtcaggagaatatatgtatacttaagtcccaccagacacacacagcctctcatgtggtgacactatcagcattcactcattgccactccctgacacatggttctaaaaaacacagcatattctgggtatttcccagatcttgctgggtagttcaagatcctttctgaaaccatgtctatcttaaagagcttaagttcttttcttcataactctttcaaatatttagtctgtacaatgtcacttcctccacttaaaactgttcctgcttctaactgctattggaataaggtttaaatgtgtcacccaagagctcatgagttgaaatgcaattttcatttttaggtagaaatttaatccaggggctagagagatggctcagcagttaagagcaccgactgctcttctgaaggtcctgagttcaaatcccagcaaccacatagtggttcacaaccatctgtaatgagatctggtgccctcttctggagtgtctgaagacagctacagtgtacttacatataataaataaataaatcttaaaaaaaaaaaaaagaaatttaatccaattatgcagcctttaaaagatgattaggattaggaagtcattagggtggagttccgttgagtgaattctgatgactccataagaagaaacactcacttctcttatcaccgaatagtgtgtcaccttggaattctgaagactatcatcaaaatgtagacatcaggaccaccagcattgagattttaccacagcttcctgaactatgggtttagggtaaatacacacacacacacacacacacacacaaattcacatgtgattgggtaaaggaatgtgggagccgtgaaaaactaaacatgcaacatccaaaaactaattcacaatcaaatgcataaagaccccaacatgacgagctctgaagagctccctgtattgtatgttggcacttcactgcagccatggttctaaatactcaacacactgtgcactgtacatgtgtataacacaaacattgccggaaacacttgagcttggattcgaggaaattaaatattataaatggtggcatgttattgtacatacagtctactgcttttctagaatcataatgatctagttctgaaaaaacaaagctctcattatttcctgactctgtcatgtattcaaattaatatatctttggttttgtgggagttgttcttaatatttaaaggtatctaatattgtgtgtatgcgtgtgatgtaagtgtggagtggtgcatgtgtcagtgcacatggggagggcagaggacaattttcagaaatttgttttcttgtcctgccctctaagagactgaacttaagttgttaaggcctgtataacaaaagtttttacccactgagtcatcttactagcccaaattagtgtatctttagattgtattatgttaagaatctttggttttagccgggcgtgatggcgcatgcctttaatcccagcactcgggaggcagaggtaggcggatttctgagttcgaggccagcctggtctacaaagtgagctccaggacagccagggccaaaacaaaaaaaaaaaaaaaaaaaaaaagaatctttggttttgcaatttaacttaggtttcgtaaaaacaccactcaatgaattctggcttgggatgagaagaaacgccaatttctcaaatgacaaccatacttctggccttttgtactacatatttctgtggtgtaagttctcatccttgacatgtataaaatctaactatccatagactctgaaaatgccctacaacctatattaagccgatttaattctctgtgtgaaaattaacaagcataactatctcattagtgtgtaaatttgttttcatctttaataaatgctaaattacatttataccaaagaattgtcataaagtaaatttttaatgatttacttcatttggcttgtatatttactatatacctggggctacataaaaatttattgggcaaaaaagagccacagagaagtttaggaaaccttgatctaagtaaacctcttttcctcaaagctatttagcgttagatattctagcttagtaacaaaaatgtcaatcatctacaatctcagcagttttagattctcccagtgtccccacgagatgtagtttttgtaactactaaccacccttgttaccctttcaacacaatctactattgtcccatagaacagtggatcttaaatagaaaatagatttcacagatattctaaataatggtaccgtagacaaggtacagaacaaattgtatcaattattgcttgcaggggaaacaataaaaacacagggagactgtttatattaaagaatatttttcctgtgaatctagcatgattttgaatgaaaatttaaaaataagacaataagttgggttttgtggtacacacctctaatcctagcactcaggaggcagagacaggtagatttctagaagtttggatctagcctggtctcatagtatattctaggacaaccacagctacacaaagaaaccctgtttcaaaacaaacaaaaagcaataaagtaagcatggtggcacatgcctggtcccgccagctaaaaggtggagacagtcaaaggagttgaaggtcagctacagctgtgtaagactttcatcctccgctactttaaaaaaaaaaaaaaaaaaaaaggtaaataaatcctagcacttgagaagggtgagagggtagatgcaggcagatctgtacaagttcaagaccagccttgtctatataattagttccaggccagccaaggctcttatagtgagaccctgactcaaaaataaatgagtatacgcaaacataaaaatttactattaaaactgactttacattttactatattcatttattttgatatgtgtggcatatgttacagtatgtgtaggtcaaagaacctgtgagaatcggttctctccttccaccatatgggtcccaaggatcaaactcaggtctttaggcttggaagcaagcacctttagctgatgagccagtcacactattcataaccatcacactattcatttccagaacttttcaattactctatgcccattaacactaactctccatcatattaattcccaaatcctaacaacctcttccactctactttctacctttaccaatttgcccatttctagtccataaagaattgcacaacttctaaaaaaaaaattacgagcattaaaaacatctcaattgcagacaaatacaactttagactttactgaagaatctgtgcgctaggcctgttttagtgttctgttgctgtgaagaggcaccaagaccctggcaactcttgtttaaaaaaaggggaaaaaatagcatttatttcagaggtttagtctattatcagcatagtgggaagcatggtagcatgcaggcagtcatgatgctggagaagcagctgagggttctacatccagatgtgcaggcagtaggcttagaggctctgggcttggcatgggctttgaaacctcaaagcccaccccaagtgacacttccttcgacaaggccacacctcttaatcctggtgacaagcattcaaatatatgagcccacaagggccattctccttcaaaccctcacaaggccccaaattctcccaattaactaggagctgtgactgacccttcagaagaaaagcatactgtccaggtttctggcgtctgcccagccagtaatttattacttcctgcgcacatgagcgcacacactctagtgagacattaacttgtcctggggagaaatgacaaaggctgaaggcaggtctctgtgacactcaagcaggaccaagagaggaagatgccagtcataaaatgagatgttttcttcacctctgttcccacagagtaggaagaaagggggaaggcgctacactgagacaaacttgctagtgcctcagccctgcagagaaatgatcgtgaaagacagctcctgcacgaagtcccagatgaacctccatctatcctatacccttacaaaacaaacctggcgctatttgccaatgacaaggcttagaaacttccaagcatccaatcatgaagaaataaatgctagccaccaagcgtttactgggattttgtgcaatttaattgtaacttctccactgtaacccagcacagcttctcagaaaacttatcagctccccaagatgtaaatttaccccccatactctacaatggatttctgagaaagaacactcaggaaacctgaggcattgttctctcctcacctgaatccatatctttgtactctgctccaaaatgcctccattggaaaccataaactgggcccaggtccccttcctgtcgggcagaaaatcccaagctgtccagaaaatctcgggatccattggcatcccagattctcactccctttgaggacaattctttagcatttgtggatccctagggaagaaaaaaagagagagagagagagagagagagagagagtgagtagaacaggaataagagggaattctgagctactaatgtcatacccaccacacactgtccatgtacagcctatctttatacaggctggtcctggccagacttccttattagaaattccctaaaggtttttcttctattccatcagcttttaaaaatctttgtgtatatatgtatatatgtagttgtaagcatgcagttcttgccttctaccttgttcctgttgctgcaccaccaacccaggctagctagcctatgaacttccaatagattctcctagctccatggtccatccctcccagaaaaattctgagattagatggcactaccaaatagggctttttatgagaattccagggatccaaactcagtctgtaagatttatatggcaagtgcttttatccattgcaccatttccccagccttttaatttttttcttttttccccgtgagactgagtttctctatgtatccctgaaagtcctagaactcactctgtagaccaggctagcctcaaactcaagagatcctcctgcctctgcttcttgagtgctgggaatcaaaggtgtataccatcactgcctggctttaattttctaaaacctccaaattcctaatatattcctacctcatctgacagttttgaattgctgaatcaaacatgttccatgtctatgaataatgctgcaagtgaacttgtttactaatactccctgtacagtctgttcatgtatcatgtctggctaaagaatttatagtgacaatcagtagttagcttttctggaaatgcttcagtcacactaaactaagtttgaattctatttcattcatctatgtgaccccataaaactgtatttacctcatgtatattttatataacattatgtttatcttatattttgactcattagattggctccatgatatcctaacccaagtatgatcctgcagccaagtatggagagatcctgccccacccctttggtgatgcatatactcaggcctgggcctgatccttctattaattcttcttgtgactgctttagcctcatcttactgaagaacaccttagcagaatttaacacacatgtcaaatgaggaagagttaatactagcaaaatgcttggtgcttactagacattctatgacatggcttacattctatcttcacccaggtgacaactgcaatacggataactgactttcctttcctctttcttctttttctttttttcttttttcttttgcctgcacggatatctgtgcaacaagtgccatctaggacctacagagacaataagagagcactgatcccctggaactagttacagatggttgttagtcttcctggaactagttacagatggttgttagtcttcctgtggagactggaacaagtgctctcaaccacagagccagatttccagcccctgtttctattaggtttcttttaactttttcactcccaattaataacttctcaatctttgttttgttttccaagatagggtttctctgtgtagatctggctgtcctggaactcactctgtagtccaggctggcccaactgcttgggctaaaggtgtgtgccaccactgcctggctaacttctcaatctttcatggtgtgcttttaaagccccccctttcccatttttggggctgggctcaagctattttatggatgtttagaatttctgaggatttaccttgaatcagaggctgtcagttcctacatagaactaagacagactaaatacactgtcaacccgttctagaatgggtaagcaatctagggtctggtaggtccaagatgatgtcagtcacactgagtgccctagagtttactgattttgtgtgtaagtgtgttgtgcgtgcacatgtgtgtacctgagcccatggaaaccagaggatacctgctctatcacttcctacctttcccttgaaacagggtctctgtttaggctagagcttgtttaggctaaactagtagccagcaaaacaccaaagatcctatgtccaccctcccattatagcactggggttagagatacatgcaatcacacccagcatttttaaattttatgtgtataggtgttttgcctgcatgtgtctatacaccatgtacatgcagtgcccaaggacagcagatgatactggaactagagtaacagatgcccaacaagagcaacagatgctcttaactgctaagccacctctccagtcccacacagaatttatgtgactgctggggactgaactcaggtctcatacttgtacaacaagccctctttacctactgagccatcaccccaaggactctaaagaaggagttgtagtatggcccagaactcagcttgtcttctggagttctctcacccagcactagacagagcctcacttgttctagacgaggacacacaggaggaacttggggctgtcatcacatattcaaggtacctacttgactctttggtctctattgatccagtaaacaatatatactgagtacataccatgtggctggctatgttctagacctatgaatacaatagcaagtagcaaaatagattctctaattttgggaaactcacaagacattgtacttaattatctctccattaatttccagaaaaatcaggaaaagctgatttagaggccagctgatgatgtttccctataaagagagacaaagaagtgagaagggagaagaatcgatcttgattaggtcaaagctgtctcagtgggactggactaaagggacagactcatacttcatagggaaagaaaaggtagtaagtactgggagtggcaagtgccagaggcctgggcagggatatcccagagttttcagattagtgaggaaagcaggataggtgggagggagaaaacagaactggaaaatgaaccagagaagtgggaatggctaccagctgcaagcttgacttctaagactgggattatgaagcctgacagcttccaatagcagcactacccttaccttgataaaccacaacaactcctccaaaacacccttccagaacactcgtttggttgtgagcagaggaaattcatctgaaaaacagtttgtcatacagttaaaacgtgggaaaacacagcaagccaccatccagctttctccgaggagggcaagtgcctgggacccaagaccctggagcagctgcaggaaaagagagctcctgcccagctacccagcaagtcagtgaggacaccacagttctccaggggatacccatgtggcaaaaagtccccaaccactaatcagccactgtgaatgctatcactgggctgtaatgacatcacacaaaatgtcgcctcagacacagcctaaaagcacccacacacacaccaagtccactatgccatgggcatagaggtgatatcaatcatgtaaaaactgaacagttttcaaatatctggaaagcaaactgacctagtatatacaaacagaattgtttactcctcggaatggctatcagggaacattgtgacctccacttcgcaggtacccaaaggaaatgcacaagtgtccacagcttaagaggcaaaggggtggtgcaggtgaggcaacccacaaggcaaagtaaaatgctcaggttagtggtgtagtctgagtgaaggttttgcaatcagagcactacttccagctttaacatcatcgaaaagctgaatgaacactagagaggtaaaggacaaaaacaaaacacaactaaacttaaaaaaaaaaaaaaaaaaaaaaaaaaaacctgtccacagtctaagcagaggacgtgaattaaaaggtctgtggttcatcagggtccacaattcttgggaggtcctttaggctggaccaatctgtgcagtagaagctgtagtttacagctccagaaaatgtttgagactaagcaaatgtcctaagagtggccatatccccactcaaagctactctctactccagtgtcaggttgctcttcatgtttcctgaataccaccattagcacccccatcctcagccaacacctaggaggttctgtgcccttccgggccctgtggttgattccatcctttgctcctcaacagcctcttgttactctttaaaagccaaggctgcagcacttgggaggcagaggcaggcggatttctgagttcgaggccagcctggtctacagagtgagttccaggacagacagggctacacagagaaactgtgtctcgaaaaaccaaaaataaaataaaataaaataaaataaaataaaaaagccaaggctgttggaaggaaaaaccccacagttcccgcctaaggcccggggtctccccctttcccgcgcagccgtagcaccgcccaagccattttcgctccaattttaaaagcagcaaaggggaacaggagataaggggaggaagaggaggagcaaagtcaagacctcagagcaggatttggacaagctcccgcaggtttcttcccactccctccctctgggccgcacaactggttgaaactggattcgggagaaaaggtttatcagggactaaggtaaaaggcagaccttcagaacctggtttacttgaagtagttgtcacctgggtcgcgcacgggaagtttaggactcctagaacctcagagcccgggttagggctatccaagaacgctcgcccggcgtctccgcgtgcccagcttgcctgccggacgtcctcccgctagtgcagaccagccccagttacctctcaggctgtatcgtgcctgcatgccgaacaccgacagggtgccagtgcccgtgcggtcctccttcttgaagccgcagcgcaaaatgtgctccacctgcctcaggtactggagttctccatgccgtggggcttccgcgctcagctgctgagcatcggactgcagctcggagccaaccaccagcataacggagcagtctggcagcagtgtagtcagcgacaaaaccaggaccttcctggcgctcttttcctccaacaccagcccgcctcttcctgctgggaaacttccggccgccagaatccgtggcagaccccgcccccacgtgacagaagtggttacagcttgcaaggcaaacacctgcccactttctcaaatctgtatttaccctattatggcattaagagcctataggatcagggtgtggggatgcatgccattaaatcccagctcctgggagattgagtcggctagaggatctggagtttaaggcaagccttcacttcatagcaagttcaaggccagcctaggtacttgagacccagtctcaaaaagagcctttggcttatacgatacttgtacttggatctttatgtagtttgagaaccacagtaattttggcttcatagaatgaattgggtagaggaccttctgtttctgttttgtgggatagtttgagaattggaattaagtctttttgaaggcctgatagaactctgtgctaagtcctgggctttttttgtttgggagactattagtgactgcttctacttttttaggggaaatgggaatgttaagatcattaatctgatcctgatttaactttggaacctggtatccgtctaggaaattgtccatttcatccatgttttccagttgtgttgactatagctttttgtaatacaatctggtgatgttttggatttccgctggttctgttgttatgtctcctttttcatttcagattttgttaattaggatgttgttcctttgccctctagttagcctggctaagggtttatctatcttgttgattttctcaaagaaccagcacctggtttgattgattctttgaatagttctttttgtttccacttggttgatttccaccctaaatttgattatttcctgctatctacttctcttgggtgaatttgcttcctttagttctagaacttataggtgtgctgtcaggctgctagtgtgtgctctctctagtttctttttgaggaactcagagctgagttttcctcttaggagtgctttcattgttctcgtatgtttgggtatgttgtggcttcattttctttaaactctaaaaagtctttaatttctttatttcttccttaaccaagatatcattgagtagagtgttgttcagtttccacgtgaactttggctttctgtaatttatgctgttattgaagatcagccttagtctgtggtgatctgataggatgcatgggataatttcaatatttttgtatctgttgaggcctgttttgtgaccaattatgtggtcaattttggaggagggaccatgaggtgctgagaagaaggtatattctttgttttaggataaaatgttctgtagctatctgttaaatccatttgtttcataacttctgttagtgtccatgtgtctctgtttagtttctgtttctttttttttttttttttttttttttttttaagatttatttattattatatgtaagtacactgtagctgtcttcagacacacaagaagagggagtcagatcttgttacggatggttgtgagccaccatgtggtcgctgggatttgaactctggaccttcagaagagcagtcgggtgctcttacccactgagccatctcaccagccccctagtttctgtttctaagttctgtccattggccagagtgggatgttgaagtctcccactattattgtgtgaggtgcaatgtgtgctttgagctttactaaagtttctttaatgaatgtggatgcccttgcatttggagcatagatattcagaattgagagttcatcttggtagattttacctttgatgagtatgaagtgcccctccttgtcttttatgataactttgggttggaagtcaattttatgcgatattagaatggctactccagtttgtttctttggaccatttgcttggaaaattgttttccagcctttccctctgaggtagtgtctgtctttgtccccgaggtgggttttctgcaagcagcaaaatgttgggtcctgtttgtgtatccagtctattagtctatgtctttttattggggaattgagtccattgatgttaatagaaattaaagaaaaatatttgttgcttcctgttatttttgttgttaaagttgggattctgttcttgtggctgtcttcttttaggtttgttgaaggattactttcttgctttttctagggtgtagtttccatctttgtgttggtgttttcccactattatcctttgaaggtctggatttgtggaaagataatatatgaatttggttttttcatggaatactttggtttcaccatctatggtaattgagagttttgctgggtatagtagcctggactggcatttgtgttctcttagtgtctgtataacatctgtccaggatcttctggctttcataatctctggtgagatgtctggggtaattttaataggtctgactttatatgttacttgacctttttcccttactgcttttaatattctgtctttatttagtgcatttgttgttctgattattatgtgtcaggaggaatttcttttctggtccagtctatttggagttctgtagttttcttgtatgttcatgggcatctctttctttaggtatgggaagttttcttctataactttgttgaaggtatttgctggccctttaaattgaaaatcttcattctcatccactcctattatccgtaggtttggtcttctcattgtgtcctggatttcctggatgttttgagttaggatctttttgcattttctttgattgttgtgtccatgttccctatggaatcttctgcacctgagattctctcttccatctcttgtattctgttgctgatactcacatctatggttcctgatttcttttctagggtttatatctccagagttgtctcccattgggttttcttcattgtttctacttccatttttagatcttcggtggttttgttcaattccatcgcctgtttggttgtgtcttcctgtaattctttaagggatttttgtgtttcttctatctgtttagcaatgtttgcctgtagttctttaaggactattacctgtttagcagtgttctcctgtaattccttgaggaatttttgtgtttcctctctaagggattaacttgtttagcagtattctcctgtaattccttgaggaatttttgtgtttcctctttaagggcttctacctgtttagtagtgttttcctgtatttctttaagtgagtcattaatgcccttcttaaaatcttctactaccatcatgagatatgtttttttaaatctgagtcttgctttttgggtttgttggggtatccaggacttgctgtggtgggtgtactgggttctgatgatgcccagtggccttggtttctgttagtaagatactctttttttttttttgtccaatttttattaggtattttctccattaacatttcaaatgctatcccgaaaatcccctataccttcaccaccacccccccccagtcccctacccacccactccaatttcttgacactggtgttcccctctgtactggggcatataaagtttccaagaccaaggggcctctcttcccaatgatggcctactaggccatcttgcagctagagacatgagctctgggggtactggttagttcatattgttgttccacctatagggttgcagatccctttagctccttgggtactttctctagcttctccattgggggcccctatgttccattcaatagctgactgtgagcatccacttctgtatttgccaggcactggcctagcctcacaagagacagctatatcagggtcttttcagcaaaatcttgctggcatatgcaatagtgtctgtgtttggtggctgattatgggatggatacctgagtgaggcagtctttggatggtccatcctttcgtctcagctccaaactttgtctctgtaactccttccatgggtgttttgttcctaattctaagaagaggtaaagtatccacacttcggtcttcgtttttcttgagtttcatgtgttttgcaaattgtatcttgggtattctaagttactgggctaatatccacttatcagtgagtacatatcatgtgagttcttttgtgattgagttacctcactcaggatgataccctccaaattatccatttgcctaggaatttcataaattcattgtttttaatagctgagtagtactccattgtgtaaatgtaccacattttctgtattcattcctctgttgagagacatctgggttctttccatattctggctattataaataaggctgctatgaacatagtggagcatgtgttcttattaccagttggaatatcttctggatatatgcccaagagaggtattgctgaatcctccgatagtactatatccaattttctgaggaactgcccgactgatttccagtgtggttttacaagcttgcaatcccaccaacaatggaggagtgttcctctttctccacatcctcgccaacatctgctgtcacctgaatttttaatcttagtcattctgactgatgtgaggtggaatctcagggttgttttgatttgcatttccctgatgattaaggatgttgaatattttttcagatacttcttagcccttcggtattcctaagttgagaattcttcgtttagttctgtgccccatttttaaatggggttatttgaatttctggagttcaccttcttgagttctttatatatattggatattagtcccctatctgagatccacttagatttgaccttagtacaaggagataagaatggatcaattcccattcttctacatgataaccgccagttgtgccagcaccatttgttgaaaatgctgtcttttttccactggatggttttagctcccttgtcaaagatcaagtacccataggtatgtggttcatttctgcgtcttcaattctattccattgatctacctatctgtcactatactagtatcatgcagtttttatcacaattgctctgtagtacagctttaggtcaggcatggtgattccaccagagattcttttatcattggaatagtttttgctatcctaggtttttttgttattacagatgaatttgcaaattgccctttctaattgttgaagaattgagttggaattttgagagacttgaagttcttatcatacagatttttcacttccttagttagagtcacaccaaggtatttggtgactattgtgaagggtattgtttccctaatttctttttcagcctgtttatcctttgtgtagagaaaggccattgattttgttagtaagattcttacgtttgcctttcgccatctggtaatcactggtgttaatgttcatgctctctctggctggagcttgatcctcctgtgattcttttagcctctgtcagcactcctgggagtttaactctcatctgagtcccgatggtcagagcactctctgcaggcaagctctcctcttgcagggcaggtgtccagaagtctggagctctaatccacctcctgagtcctggggtcagagccctccctgtaggccgactctcctctggcaaggaaggtgctcaggaatctgggtctcagctctacctcctggccaaggatgaaggccctaggtgaccctgtccaaaaagctccattgcttctatcacccacgtgctctccagttatcatgaggtcctaggtgtgctaggggtcctgtggtgtggagatacctctgggtccctcgacaccctcggccaggttcacacagaagatggcatggctggccctaacctgaatggatcccagcctctggttgtgtggtgattcctccgtcccagttgttgctggcacaagaccctccttgattctttggagctgatgttgtgttacactcacctgtgatcccgaggtgcttcagctccagaccctaacaaccaaattcttcccactgttaaggactacagatatcagttacaaggctgctgcaatgttcttgagatactcggtgtgccccatgtgcaacactgcctggtaggcttcctgctgtcttcatctcatttatcccctagaagtagtacataatatattgtacacaacatgcttggcataaaacatagcttatgcaagacttcctaatcccaaacatatctatttccttatcttctgatctggtcctctctctcaagacctgtcactcaagaacaacctgctggtccaggtcaccctagtgtcacaaagaacattcagttcctagtcatagtaatttgtaatatatgttatttgatcaatggtgtataaataataattacaatagtagtgaaagacccacaacgtgaggacccccctatgttctgacttaggagaggcaacaccccaaatcactcatgagaaacggtcttgctgcaaactgcaagaggtcttttaattcaagagcgctctcgggcccatggtcatataccacgcaggggtagaggaccgtggcgccccgagtaactgggtaagggggtatttaaaggaagaaaccacaactcaaggaagtggggagggcgttgttggaaaataccaaagatgccagttcagagtcacaaggaagtgccaagtcacaagagtcacaaggaatacctggtaattgtttgggttatctttcaagacagtttctaagagcccctaacaatagcacattctttgaatgaacactctttgaacctaggaagcaggtgggtggaggaatgtcgctatcagttttatgattagcataccttggagcactgagtcacagaggtcacattcccaaacctgggcctaaaggcctagaattttgcttttatattttttcagtagcaatccagaatgaatattgacacatgttgatttggtgttacagagggttttttttgttttgttttgttttgtttttttagtttttgaatcttagtttttagacatttagtattattgatcatcaagagatatttaggcttagggcatagccagcataggtgagttgcacacacgcagtcccctggcctccattgtctaactctggacttgccctttcattttgaggagacttgcaggaccccaagggtatccttcttccctgtggaggcccatgggagccccaagaacaagactggaacactgctccaccaatcccttcccagttgggccccctggagccacagctaggagaggtgatttgcttgtggcactatagggccaaccaccctctctgccttcttgaggggtcctgctggcatgaggaccaactagccaacaccagggaaaacgactcaaggacagtgtaagaacacaattaacaagaggtaggacagctgggcagtggtggcacgtgcctttaatcccagcacttgggaagcagaggcaggcagatctctgagttcaaggccagcctggtctacagagtgagttccaggacagccagcactacacagagaaatcctgtctggaaaaaaaaaaaaaggagggcaatatggcaccacaagagcccagcgaccctactacagctatccctggatatcataacaaaactggagtacaaaaagatgatctgaaatcctatattataaagacaatagagatatttaaagagaatatgaataaatcccttaaaatatataggaaatacaatcaaacaggtgatagatatgaataaaactgtccaagaactgaaatggaaataaaagcaataaagaaaacacaaactgaggcaatccaggagatggaaaacctaggaaaaataacagcaaactacagccacaagcatcatcaacagaatacgagacatgaaaaaaatctcacgcataaaggatataatggaagaaattgatatattggtcaaagaaaatgaaaaatctaaaaagttcacgacacaaaacatctaggaaatttgggacactatgaaaagaccaaacctaagaataataggaatagaagaaggagaagtttcccggatcaaagtcccagtaaagatcttcaacaaaatcgtacaagaaaatttccctaacctaaagagatgactataaacataaaagaaggttacagaacaccaaatttattgaaaaagaaaagaaaatccccccaccacataataatcaaaacactaaatgtacagaacaaagaaagaatattaaaggctgcaaggggaaaaggctaagtaacatataaaggcagacctatcagaattacaactgacttctcaacagggattctaaaagctaaagaaccctaagggatcacagatatcagttcagactactatacccagcaaaatcttccatcaccatagatggaaaaaccaagatactccatgacaaaaccaaatttgaatatctttccactaacccagccctacagaggatactagaaggaaaacaccaacttagtgaggataactaagccaataaaacataagaaataaataatttcacaccattaaaataaaaaaagaaaatctctcttactcactctctcttacccccaccctcccaaacgtgctcacacacacacacacattgctcattaatgtctctcaatatcaatgcatccaattccccaataaaaagacaggataacagaatggatgtgtaaacaggatccattattctgctgtatacaagaaacttacctcagcagcaaagatagacattagctcagactaatgggttagaaaaaggttttccaagcaagaagaccctagaaacaagctggagtacccattctaatttgtaataaaatagactttcaaccaaaagtaattaaaagagtcacttcatactcatcaaaagaaaaatccaccaggacaacttctcaattctgaagatctatgccacaaatgcaaagacaccatatttgtaaaagaaacatcactaaagtttaaatcatacaacatcaaaccacacacattaatagtgagaaacttaaacaccccactctcaccaatagacagttcatcaaggtggaaactaaccagagaaatgatgaaattaacagaggttattattcaaatggacctaatagatattgatagaatatttcgcccaaatgcaaaagaatataccttcttctcaacacctcacagaaccttctccaaaattgaccatataatctgtcacaaagcaaacctcagcagatacaagaagatcaaattaaccccttgcatcttaccagatcaccatggattaaagctggacttaaacagcaacagaaacaacagaaagcctacatattcatggaaactgagcaactctctactcaataatcacttgatcagggaaggaaattgaagactttctagaattcaatggaaatgagggcacaatatacccaaacttatgggatacaatgaaagcaatgctaggagtaaagttcatagcactaagtaccttcataaagaaattgaagagttatcatactaattatttaaaagtacacctaaaagctgtagggggaaaaaagaagcagacagacccaagaggagtagacaggagaaaataatcaaactcaggactgaaaacaatcaattcaaaacaaagagaacaatacaaagaatctagaaaatcaagagctgattctttgaggaaatcaagtgatagacaaaccctcagtcaaactaactaaaaggtagagagacagtactcaaatgacaaaatcagaagtggaaaaggagatataacaacagacacttcaaaattcaaagaatttcattaggtcttacttatttcaaaaacctgtactacataaaattggaaattttaaatgaactggatgattttgtaggcagataccaattaccaaagctaaatcaagatcaggtaaattatctaaacagtactataaccccaccccaccccccaaaaaaagaaagaaagaaagtcattaaaaatctcccaaagagtaaaagcccagtgccagatgattttactgcagaactctaccagactttcaaagaagagctaattctaatgctccttaaattattacacaaaatagaaacagaaggagcattgccaaatcattccatgaggccataatcattctgatacataaactacacaaagactgaacaaagaaaattacaaatttctcttatgatccttaatacaaaaacaaacaaaccctcaatcaaacacttgccaactgaacctaagaacacatcaaccaccatgatcaagtcatggtggtcatcctaggcatgcaggggtggttcaatatatgaaaatccatcaacacaatctaccatataacaaactgaaaagaaaaaaccagatgatcatctcatgaaatgctgaaaaagccttggacaaaatccaacaccccttcatgttaaaaagtcttgaagaaatcagggatccaaggtacatacctaaacacagtaaaggcaatctacagcaagccaatagccaacatcaaattaaatagaaacttaaagcagttccactaaattcagagacaaggcaaggctgtccactctctccctatttcttcaacgtagtacttgaaattctagctagagcaataagacagctaaaggagatcaagcagatacaaattggaaaggaagaattcaaagtatctctgcttggatatggtatgacagcatacataaattgctcccaaaatcttatcagagaactacagctgataaacaccttcatcaaaatgactggatacagaattaactcaaaaaaaatctgtagccctccttttcctaaactataaacaggttgagaaagaagtttgggagataacacccttaaaaataatataaaaaaagatataaaataccttggtgtaactgtaaccaagcaaatgaaaaacctgtatgatgttggacattgggctaaacacatacaatctggtctccagtcgagctgaggtctgaaccccaggacccggtgatgataattcacctacatgggacagaaggagttctctcatgtctcctggaccctggcacctgttgaagccccacagccccaacaggagaagagtggctgttagtcaattaggcaatgtcccaagcttctgaccttcaggctagactccacccagttacctagcaacagtaaagataacaacccaccaccataagaggggctgcttggccctacctcactctcttactccccttacactcttcttactctcttcttgctctcctctttctctcctctcctctccctctctttctctctctctctctctctccctctctctctctctctctcactcactgtcactctctcactctcactctcactctctagcctttctaatctctcctccttttcctctttcctcttggccatggccggtctctctctctctctctctctctctctctctctctctcccttttctctttccctctgcctttctacaataaagctctaaaaccatagactgcctctattcatcaagctctctgcacttggatgatggaatgggctttcacctaatgagccatttctaatctcccgatggaaggccttcctgtgctctagtcaagggggaacctctctccctcagccctctctcctgtaaccccggggctacagggtgtcaccccagggcccctggtcgggggttgccccttgtccaccccccatcaagtggggttcagtggcttagatgcccacctggggccaagtggaaagcgtctggcagcccccccccatgtccgccttcccagagcataggaggaactctggccggacgtgggctatcctccctgccccctttcccctacaccctttagttcccacagtatgacaagaacttcaactccctgaaaaaataaattgaagaagatctgaagatgaaaaggtcacccatgctcatggatcagtagattaacatagtgagaatggccatcttaccaaaagcaatctacagattcaatgcaattcccatcaacattctaacagaattcattacaggccctgaaagaacaattttcaacttaatattgaaaaacaaaaattccaggatatctaaaaagtcctgttcaatagaagaacttctagaggtatctccatccctgatctcaagttgtactacagagcattagtaatacaaactggatggctttggcatagaaacagacaggttgatcaatggaatcaagttgaagatccagaaataaacccacacacctacagacactgatttttgacaaaaccatacaatggaaaagggagagcatcttcagcaaatgatgttggtctaactgaatgtctaaaagtagaagaatgcaaatagatccacattcatcaccctgcacaaaactcacatctaagtggatcaaaggcctcaacacaaaccagatacactaaatctaatagaacagaaaataaggaataactttgaactcattggtacagcagacaacttcctgaaccaatggcccatgctgtaagatcaataattgataaatgggaccttatgaaattgaaaattttctgtaaatcaaaggagactgtcattaggatgaaataacagcctacagattgtgaaaagatcttcatcaaccctatacctgactgaaagctaatatccaaaatatatagagaactcatgaagttagacatcaactcaaataactcgatttaaaaatgaggtacagagctaaacagaattctcagcagaagaatctttaatgatcgagaaacacttaaagaaacacttaaagaaatatttaacatctttcatcatcagggaaatgcaaatcaaaatgactctgaatttcaccttacacccatcagaatagctaagattgaaaactcaaggacagcacatgctagcgaggatgtggagcaagggtaacacttctccattgctggtgggagtgcaaatttgtacaaccattctggaaatcaatttggctgtttctcagaaaaatgagaatatttctacttgaagatccagctgtaccactcctgggcatatatttaaaagatgctccacagtaccataaggacacttgctcaactatgttcacagcagctttattcacagtagccagaaactgaaaacaacctagatgtccctcaactgaagaatggataaagaaaatatgatatatttacaaaatagaatactactcagctattaaaaacaaggacatcatgaaaattgcaggcaatggatgaaactagaaaatatcatcctgagtgaggtaacctacactcaaaagaacatgcgtgatatgtacttataagtggatagtagctgtaaagtacaggataaccacactacaatacacagacccaaagtaataaaataacaaggagagttcaaggtaggatggttgaatccttctcagaaggggaaatagaatagatcctgaagttagatggagaaggggaactgggtgggagaggggagtgggaggggaacaggtgtgaaggctggtgtagggagagcagaggagagagaacagaattctgtggtgggtgggtggggatccagggtactattggagggacaatagctgagacttctaacagtgtgtgggggttggtgggtggtatgggggattctgaagtagccacttattttagccaggcaggactcccacaggagggataaggacagcaacacacccacaaaacctttgattccaaatgtgtcctgcctacaagatatgcagggacaaagagcagagacgtaggaatgaccaaccaatgattggccaaaattgagagtcaccccatgggcaagagccaattcctgacacctgcactgttatgcttgcagacaggagcctagcataactgtcctctaagagcctccacccagcagccaatggaaacagatgcagagacccacagccagacattaaacagatcttggagagtcttatggaagagttggggggaaggactaagagacccaaagagaacagggactcgatagaaagaccaacagagtcaactaacctggacccctaatcaaagagtgagcatgggctggacctaggtcccctgtacatatgtaacagaagtacagctgaccttcatgcagttccccagtgattgaagcaggggctatccctgaatctgtggcctgcctgtggatctcgttcccttagctgggccactttatctggcttccatgggaaagattgtgcctagtcctgcagtgacttcatgtgctgtggggaggggtcggcatggacattgaaagactccatgcggagccctttgctcaggccctgggacaatagcagacctccaagaactcacgagagaccaagcttgatgcaaaccacacgaggctttattcggggaaagccagagctctggggatgactcgtatcccacgcaggggtagaggagtcgaccctgagagaaaaggggtcccagtttttataggtccttaagcgggaaaggagaaggggggaagtaggggatttccagatctaaacaatgtctattctaaaataattcattcctcaagaaatgggtatggaagggaaacaaggaaggagtctaatgaaggtgcagcaactccggattggccctgactgtggttgctggggagattttccgactctttcccagcaaccaatatcacaaacacctgccagtgaggtgcagcagtgggcacacacctgggttcaaggaaacggtcaaaacattggcagacacacaggttcgaggagcggccagagcattgtgtacctctatttttctaaatcagtgaagctagttctactaacaatgaaatctattttgccaatttcagggcatctgtgaccttatgcattctgtcaggatctttcagacataagacaggatgacacttctcaggagaaggggaggggagaattggggaagaatctgtataaggggtactgggaggagagagggcctaatactgggaagtaaagctaatttattaattaattaaaaagaaatatctaagtataaaaatacattatagataaaaatttggggactggagagacagctcagcagttaagagcactgactgctcttctgaaggtcctgagttcaaattccagcaactacgtggtggctcacaaccatctgtaatgagattggagctctcttctggtgtgtctgaagacagccacaatatacttacatataataataaataaatctttgggctggagtgagtggggcaggagtgatcagaggtcctgagttcaattcccagtaacgatatgatggctcacaaccatctgtacagctacagtgtactcatatatatcaaataagtaaataatcttcttttttggtttttcaaaacagggtttctctgtgtagccctggctgtcctggaactcactttgtagaccaggctggcctcaaactcagaaatccgcctgcctctgcctcccgagtgctgggattaaaggcgtgcaccaccacgcccggcaaataaatatttttaaagagataaaaatttcagcgggagctggtgagatggctcagtgggtaagagcgcccgactgctcttccgaaggtctagagttcaaatcgcagcaaccacatggtggctcacaaccatccgtaatgagatctgactccctcttctggagtgtctgaagacagctacagtgtacttacatataatcaataaataaatctttaaaaaaaatttcagcggaatgtagagtgaaaataaaattttggggagaaatgtaagaaaattaaaagaaaggacaaaagaaaggatgtggcaattcattattctaaaattatctcttaaattctgagactagaacatttggtggacctcccagccagagttagtaatacccttgaggtcacttaagattcaaggctgctataaacataatgaagcatgtgtccttattagagcatcctctgggcatatgcccaggagtggtattactaggtcctcaggtagtactatgcccaactttctgaggaaccgccagactgatttccagagtggttgtacaagcttgcaatcccaccaacaatggaggagtgtttctctttctccacatcctcaacaccatctgctgtcacctgaatttttgatcttagccattctgactggtatgaggtggaatcacagggttgttttgatttgcatttccctgatggctaaggatgtggaacatttttctaggtgcttctcagccattcgttattcctcagttgagaattctttgtttagctctgtaccccattttagaatagggttatttggttttctggagtctaacctcttgagatatatatattacatccactccagtattgataagtgtgacaggccccagaaaacctgggtactgtccagaggcaaaaagttcacggaaacttagtctcctggaatcgtggcatcctgtataaagaatgctccaatgtccttgctttagttggtaaacatatctgtgtgctttcccttaatattgctttattataagtgctcctaaggattgattttttgacatacagctaagttagattctaggcagtccttgatccgaccctgggcatggatagctaagtcactgccctacccaggaatttaccattatctaggaagaaggaagtttgtgacctaagaaggaaccagaatagatatttagaactatagatagctgagttacatccttatacaagtatttacaatgggctagggggaaggtggactatacaatagactagaataggaactatggcaagggcatgaagcccttgcccctggcttctaagattaagtggaccttaggtggagctgtttttgatcccagttgttaacattgaattttatcccagttggttcttgccagtccttccgtttgtttgcattcctctgttttgtgtaagattccagtaacctctttgtaccttgctggtatgtcacccaacttccctattttcttctgtataaaaaatgtgatgctcgatttgacaaattacattcagatccacactcccttgtgagtctgtctgccaattcccgctgactccttgtccacctgcaaccagagacccattccacgcagataggagacccaaaaaggggatagtctgcgagattatatatgaatgaatgatattagcctcctattggatttaggattggtaaagatcttttcctaatctgttggttgcctttttgtcttattgacagtgtcctttactttacagaagctttgcaatcccagatgtccctcaacagaggaatggatacagaaaatgtggtacatttacacaatggagtactactcagcaattaaaaacaattaatttatgaaattcttaggcagatggatggatctggagggcatcatcctgagtgaggtaacccaatcacaaaagaacacatatgatatgcactcactataagtggatattagcccagaagatcagaatgcccaagatacaattcgcaaaacacatgaaatgcaagaagtgaaagaacctagtggggaaacccccactcaattcccgattcggtgtgcacccaagaatcacgaacagacgaccatcttgatgtaaaagcatgaggtagtttaatgacagagctccgggccaacacgtatctcctgcaggagacagaggtgtcgaccacatggtggagtatctcacacaggagacagtggtttcgaccctgaggcttggaagctaggggcttttatagaaaaggggtggggctgggggaggaattggcatggtttcacatgattggtccatttaaacatcaacagactgtcagaagtgcgggagatagggaggcagcaggccagtcaggacatgtaacgacggtcctgcccgggcatgtcctggcctgttctgctatgttctcagccccaggtttcaaagctcacaaacaactctttgggctatttgacatacattacatgaatcataggtctcaagttttatttcctttcagaaggaagaccaaagtgaggatactttggtccttcttagaagggggaacaaaatacccatggaaggagtttcagagacaaggtgtggagcagagaagcaatgaccatccagagactgacccacctggggatccatcctatttacaatcaccaaacccagacactgttgtggatgccaaaaagtgcttactgacaggagcctggtatagctctctcctgagaggctctgccagtgcctcataaacacaggtggatgctcacagtcatccattggactgagcataggatctccaatgaaggagttagagaaaggacccaaggagctaaaggggtttgtataggaagttcaacaatttgaattagccagtacccccagagctcccagggactaatccaccaaccaaagagcacacatggtgggactcatggctccagatgcatatgcaacagaggatggcctagtttgacatcaatgggaggaaaggacctttgtcctatgaaggctctatgcctcagtgtgggggaatgctagggccaggaagctggagtgggtgggttgttgagcaggggaaggggaggttatagggggagggtgttttttggatggagaaactaggaacggggataacatttgtaatgtaaataaagaaaatatccaataaaaaagatacttattcaggattaaaaaaaaagtctgtcatagatagaactctttatgttaatttgtaggtacagcgatttcacaggagtgccctctcaagtgactcacttggctagacacttggtttcatgtctgactgtgacactttcactccattgatgagcaaagggtagcagaaaagctggaatcttcacaaagtcactcagtgagctgtggcagaggcaggatcgtcaccccatattcccagcctgggagttcctggtccccatcacttgccctacatggacacaagttcttctgcttcctggtggggattcaaccaaacccctttgctcttggccctctgcattataccctttccaggaaacctgagctgtaaagctaaggtgaagaaaagtcggaaaaaaagaaacaaaaggaaagaagctcccctccccaagtgggtggcaagtgctagctacttcagctcctcagggagccttctgctctgcctcacgtccaccttcatttcacagtccgtttgcctcactcccgtgaaccctgatgcccgcgtttaggatggtgtcagagccatggccacctagcagtgtgggaaagcccaggttatggagcaagagtctgcagatccaggccaggcgtctgggcgtggtggctcacgcctttaatcccagtacggaggcagaggcaggcgtatttctgagttcgaggacagcctggtctacaatgtgagttccaggacagccagggctatacagagaaaccctgtctcaaaaacaacaacaacaaaacaaagtaagagtctgcagatcctgctgtttgccaatgcgaacacacctgggagccaagccccaggagtcctggtcctggtctggtgttttcagaggcctcctgattggtcggctctctgggggcgtggccgcacactggtacttcctttcaagcttgggctaggcgtccggaacccagagtctcagaaaaatgacaattcggatcgctagactacaggccagaggttgggagagctcggctcttccaaggaggacagcagtggcaagccaggtatgtcagcgtgtggcagctcagagttgcgaatgccgcccgcctatcacaagcttgttaaagtttgtttatgggtacgaacttcacacaggaccaaactaaccagtgtctccagagctccctgagactaaaccaccaaccaaagaaaacacatggtgggactcatggctccagctgcctagtcggtcatcaatgggaggagaggcccttagtcagcctgtgaaggttctatgccccagtataggggaatgccagggtcaggaagcaggagttggtgggttggggagcagagggagatgggagaggataagggattttcagagaggaaactaggaaaggggataacatttgaaatgtaaataaataaatatctaattttttaaaaggtgagcatatttagcagtaagcctcagaggctgaaaacattctaggcctcgttatgattatttagaggacttaggcctaggttagcagatggaggcaagaagcctaattacaacaggagaataaatgatactttgacaaacttaaaaatcatatttctaaaaatataaatgagagtgagacttgaagatggatagactcaggggtgaggggatagaaagagcgcctcagggactatattagttttggagcaggacatggcagaggacaaagagaagaatgagaggaacagtttggggacagacaggaagagaccatgggtatcttgtcttccatctgaatgatagaagggatgcatggaacatctctaactgctgagggctgagaactagagcccagaggagaaagaactaggtagttcaaacaagcaaacaaacaaacacaatgaatcaacatcctccacaacactgatttggtcctgtgggaatttaagcaccaggttgccattctttttccagatgcctgaggtgcaaatgttaatgtaaactactgttttctaaacattaccatctagcttaattcctttctcctaaaatggtgtgtaggccaggaaaacttttctgttttcgttgtccttctcttggaaaaccaacctattaaccgttattactatttgcctcaagatctagaatttaactgctaagatccgactgtaattgatgagccaagggaacaacctacaggctgtctctgaaatggagactggggaatggaagagaatcagagttctacgtcatctttgcctgcatatgagttcaaaaggattctggtcaaaaaagatcacaaacaataaaaccacatttgttgtctgtcaagattagcacgtacatttaatcccagcactccagaggtagaggccggccaatctttatgagtttgcagccagcctggcctttatagggagttccagattagcctacctagtgaaactgtctcaaaacaacacccctcccaggagaaggaaaggggggttgggggaggatctgtgtgagagagcgactagaaggagaggtgggggacgctgatattgggatgtaaagtgaataaataaattaatgggaaaaaaacccacaaacccacccacatttgtataaagtagataaggtcattgttatgtgcccaacctgccctctagtgtttcattttaagtgctactaaaatttcttaatctcaaaatatctgcttaataggattaagaactgttatcaaatgaacagaataagactaaatctctgacagggatgaaaatcacatagtagaaaagtgaaggtccttccagaagttagtggcaatttctctggggagagctgcaatatcaatggtaaatatacatactgtatttcaagttctgtttgttaaatggggcattgtactggctagttttgtgtcaacttaacacagctggagttatcacagagaaaggagcttcagttgaggaaatgcctccatgagatccagctgtaaggcattttctcaattagtgatcaagggggaaaggccctttgtgggtgggaccatctctgggctggtagtcttggttttataagagagcaggctgagcaagccaggggaagcaaggcagtaaagaacatccctccatggcctctgcatcagctcctgctttctgacctgtttgagttccagtcctgacttccttggtgatgaatagcaagcagtatggaagtgtaagccgaataaaccctttcctcccccaacttgcttcttggtcatgatgtttgtgcaggaatagaaaccctgactaagacaggcatgaacagaagagaacagttcaaatgtcatataaaatgtgatcactatgttattgctaatatagctgctgttacattaatgtattaaaagatatttaaaatgttaattagtacagatttattataacagatattcataaagtagataaatattttaaatcctttagatttaattttattaaaatatgcatttaatcttgtcttgataaagtttaaagtgtttgtgtttgggatatttataactaatgtaagctatatttttttttcttctttctttattgttaggtacaacatataaatatataacaagcaagaacataaaaagcttcaaaaaagaaaaaacaaaaacaaaacccaaagaggtctttaaaatttttctggaagtataaaaccatgagagtgctcagaccaagggtgatgctgcaaggccagaggcagcaggaggcagacaagcacagcttctcttccagagcctgcacctaacagtgtttctatcagcagctggatgctctacaggggagccacccaaacggcactctcctttgacagggaggcgaagaggaagcagtcattaaaactctttctttctgccccaaaccaaggaaaagaacatagtctctcccaagctttcctgggcatgatgccccgaacctgacatttacccaatctgtccaacccagttcctaaccaaagccagaaggtgcccaaagttttgagggggaggggaagaggctagtgtgttatgaaacagatctttatttgaagtcatcattggtgccgtttcttgctgtttatttgtttgctagcctgttcttccagttgcatggctaggcgcaggccttgatgacttctcgaaggcctgagaagtgcttagcctgcttagcctgcttagcctgctgtgtcagggcagattctgccttgttcaccaaggtctccaagtcatagtctggctgatccgtcatctcagagagctcaagccagcttggtccttgctgtgtgatctccctgagctcttccagggccctctcttccagctccctgatctgagtcatggcttcattaaagctggacatctgggaagacagctcctcctcttcattgccagccagagaagtcccattagagctggcttccatcacttctgtttccatctgaaccgactgctctccactgggcccactgtgggggcttagctccttgactctgtctgtgtatctcagcatgttcaacatgtattcataggagcttatgcctggtgagatcatagtggtcatgcaggtccttgagttctccccagtgaacgaggccctcagcagctgtgtcaacttgctctcacagaacggtgtatgagccttgttctttcccagagcccggatacattccttcagagccaggagagacttgttaatttctgcactctccatgtgagtctgccggtcagcgatagaagtgtcagcccctcattcattccatgccagatccaccaaagagaatttgccatgtaatctcccttgagctcgaagaagaatctggaagcaggcatgggagcaggaggaattggagttggcaaatgtttgtccagaagtcctgcaggctctgcccatgttgatcatcttgacgacatcatcagcacaggtagccagatactcctgcagtcccacagcctgcacctgctcacagcctgcacctgctgcctgctgtcctccagcacatataacttggcctgtttgttgaggagatcaaacaccttcccattgtagatcacgaagaatgtcacataaacttccaggtttaagttccagtatggagactgattcttcagaaggaagacatcccgagaaaccattgtgtagatccctttggatgtgttctgacttttaccagacaggtctccacccactgtgtgtgtcttcccactgcctgtttgtccataggcaaagcatgttgcttttcccacttcaaaaattgcctgtaccagtggccttgctgtgaacctgaatctgataaacaggagagacaggaggactgagaattttggacataaaaagtctccatgacatacatcaattctgcctttagacacccttactgttgataagaaaagccaatgaaatttagactctatagtgctatgatccctattattcattggcttggctttctagtacacacacacatgatactatcatagttatgattattgaggcaggtcttgctatgtggcccatgctgcctgaaattctcaacactattgccccagtgtctgtgtactacaatgcccagcttcatgcacatacttaactgtcaggaagaatgtaaatgaaataggactaaatgagtttgtttggctttgaactgatagtttatgtgtccttgtgtgctagacattttagcatgaagtgtttaaagtaataactttag

SEQ ID NO: 30244 - DNA, 607 bp, Arabidopsis thaliana columbia
ttttaagagattttgacaaagaagaagaaaaatggtcttgtaaagattaaagatattagaaacctgttagtgaagaaaagagaaggaagaagaagaagagaagcaagaagataagaatagccgaggaaaggataaatgttgagtccctttgaagttgcaaatttaaacaaagtacttattccgacgacgctggtttcgaccacgagcattgccgtcaagaacacggcctctctccgccaaggacttgcggttccggccattattggcattggtagaaaaatttgttgtggaatgtgagtctttaatttgttatccctttgttacttttctttatgttacaagtaaaaggaaatgtcaatttatgggtccaataattgttagtttcttgagtttattataagattccatattctttgggccaatcatatatatacaattagggagttctctcccatctaagatgtcacatcaacaaaacaataaatgattaaaattaaaattaaaatgtattaagaatatgattcaattcaaatctgtttataataaatgacaataattttaaatacataagacaagagttaagtatataatacatgaatcatatata

SEQ ID NO: 30245 - DNA, 910 bp, Arabidopsis thaliana columbia
aaaaagcattggttagcaacataatgcgttgaactgaattaaaaccatcggacaagttaatttgaagtgactgatttaaagaaactacttccaatttaagttgcctaataacctaattatgccagaaactttgttagaatgtcgactcgatggttagacattaatctgcaaaacttttaggaaaatgaattaaaataaaacctgaagataacagcgaggatgaaggtaagagcaggaacaatattgcctatggcggaggctaaggttgggttgctgtattcgatgcctatgcctcctgtaataacatacattgatctgttctttttttgttttgaatttttttcagccaaagatcatatattagcaacagtttagtggatgataatttcataaaaaatattggaagaaggaatgttgtatttggatattaccctagaaagccaagaagtccaatcttagagagtattgaggcacttagtggaggaagtgatcttgacctgtattaaaacatacaaattaaataaaaatctatacaaaagaatggtcatagaaagattaaagttatttgaacctgttggtgaagaacagagaaggaagaaggagaagagaagcaagaagataagaatagctgaggaaagggtaaatgttgagtccctttgaagttgctaccttaaacagagtacttagtccgacgatgctggtttcgcctgccagcatcgccgtcaagaacacggcctctctccgccaaaggcttactgctccggccattggaaatggtagaaaggtttggtgttgaaatgtgagtctttgatttgttatcgcttaatttgtttgcttttcatttatgatagtactagttagaggggaagtggtgtattgtgggtcaataattgttgttcttgaatttatt

SEQ ID NO: 30246 - DNA, 582 bp, Arabidopsis thaliana columbia
cactgtaacacttgtcacagttctatatattgctaggtgggcagcataacttcaagtttctgcatggatttgcctttattttaaggcttttctaaaactcaatgatctgcaaattgatggagagtaaattccatgttctactatagaactcaatgatctgcttattgatggagaataaatgttcttttatagaactcaatgatctgcttattaatagagataaagtatcttttataagacttgtctaatgataactgattggaaaatgcattaaaacatgtagttaatcctctttgcatagctcttgaaactcttcctgttagcgaaggcacatcattgtgcaacgcttgatgggtcgaggctcgagcaaggcgagaaagggagagagagataaggcaccaaaggtaagtcatcacgaatctcactgagatatgatattcagtgggacattttgttctaacttacaatattctgcattaaaaagtccaacgtgcagactgtatcttccctcttttaacaggtaagtgctctttcgcttcaaaacaaggtatgattttcgtaatatttcttgatggagtttag

SEQ ID NO: 30247 - DNA, 860 bp, Arabidopsis thaliana columbia
  unsure (1)..(860): unsure at all n locations
ttctagattttgttttattgaatcataatgagccattagaccatctaacaaagctctaaatcgaagaattataagaaggaaaaaaaaagttatttacgacaaattctttatgcatgtgatgaggaatgctcataaactgtaaaaatcgttccatgctgaaaatcaggcaaaatatccaagatttgcatataattcttaaagatcaaaatctttgagtgtcgaacataaatttaaatagcggagactaccctggagagggagaaaaaataaccatataatccggtttggatacattgtaaaattttaattcaaatttagtggcgagtccgagtcatctaaaaatggttgggttccattcggttaaattccaaagatattattccacttttatgtgcttccctgttatacattcgatatattcacatgccttactggtaagcctaattatatatgggtataatacatttcttactcaacgtgtaaaacgttacagagatttccttccttattaggtctttatttttaacaatataatcatttgataaagaatatgtaataactatttgacaatagaaaaaaacatctgcaacatataaaaaaaaactaaaatttattgcatcctgcttgagattttatagtgagaagaacaaccatggagttcaagctcaacattccaaatacaatcattaaaactctacagactatagtcttctttctctttgttcttcttgcattccaaatcgcggaacgcgagattcaccaccacactttcaaggtattgattgtcaaaattttattttgaagatattaagactggattaaaaaaaacntgactatgccatcgtttttactatacagat

SEQ ID NO: 30248 - DNA, 1015 bp, Arabidopsis thaliana columbia
tgagacaagaccacctcgttgttctgcatattattttttccatttccattcccattttcttctacattactttggtcagagaagacatctgatctctgatactcaaggggaaaccgcacaaataaggaatcaaaatggtaataaaaaaaaaatggtcatttgcaaggaccgtatccgactaaccagctgtgtacgaaacagatacggtagtacatcctgttttaggctcctaaaagcaggtttttgatccaaaacttcctgcagaactgctctgtaagacaaaagaacatattgagtatcgacagataaaactactttgatagcaggaaagcagatctgaccaacctcttgaaggcatatatatgagaatccatcagatctgatcgaatttccatctaaatcgaaaatgacaagataattagaaactgtactaagaatttgtaatatatgaatcataaaaagatgcatttgtaggtaatttcaaaaacttaataagaacattaccttgccagccgcacagagaatgctcttttttactcgggtatctttcttaatctcagtacctaacacaatttcaggaggtaaaccaacaacaagttcaagcattttgttacctctaagaaacataaagaaaaattaaaagtaggacctttggctatgtataacaagaactgtttcaaggaatcaagccctatgatatcatcgcaagcaggttttttggttttatctttcccaccagaacctcctgattctgatggcccactgacaggttgagcacaaagcataacagtcactgctgcatcatgccttctatgagtggcggcaacagcaccaggaggaatatcagaaacaatgtctccacttacgatctacgtcaaagcaaattaccagttaactagaagctcaaaaagttgcacaaagcaaaagctacgagacgtctttattgaaaagctaaccaaaatgtctttggcagttaagtggtgtgcaattgccctgagtgcccagcagttcaaca

SEQ ID NO: 30249 - DNA, 541 bp, Arabidopsis thaliana columbia
taattatgtgatgagaaatttcaagataggcaaagagacgggacatgactaatctactcactcattttatctacactcaattgaaaccaaataaaacaccaaaatgatatgaattcaaattatgagtattataccaaataaatatctacacatattatcctacacatacgtaagatctaaatttatatatacgaccaaaacaacaaaataatctatatcattttaaaaaaatatgaaatatgcacgtatgtccggggcagaagctagtgtgttatataaaaaagtagcatattgacaaagagagatttccaattatcacgtgtaattcgaaaaagtagcgtggtataaaagaaaataaaacaaatttaaaaaaaaaaacataacgacggagattccaaaaaagaatcaaaatcgaataaaataaaatgacaaatcttctgcaaattgagggagagatgatttatcaatataaataacatttggcagcgtagatttatcgaaaaagagatcgggtggatgagatggtgaagatgtggtggtt

SEQ ID NO: 30250 - DNA, 589 bp, Arabidopsis thaliana columbia
taagtataaacaatttaaattgtcactgaaaacacaataactctagatttgatttataaaacggaaaatatgagagttgctcaaagtgataattcactaggttagtctcacggttcttgttacttgaatatataagagcccacttgcttagataaacctattttttttagctaatattagaaactaattatagaattgaaaagaattgagtaactaaccattgtcagtttttctatgaataaataaccatatgacggtataagaaaatacaaaactatccatgtaagttgaaccaaaagaaatcttatgcagatatatttgatgttttttagcaaatcgcatgaaacatgttaaaataacacgatatttatattaaaaaagtgatattttataacatatatgttacataaatagcatgttatataaaaaaatattgtttcatttgaaaagttgagccaggagcaagcttatacgaagataaaataatagatttgagaaagttttaacatttaagtcatgttttaagaagaaattacatgtgattttaataaataatgtgttatatgaaaaagtagcatgttgacagaga

SEQ ID NO: 30251 - DNA, 457 bp, Arabidopsis thaliana columbia
ttgcccatgcttctctcttttcatgcgtgtccaaaccgaaacgagtgatagatcacgtccctctcttcttcattacaggagttacttgacttttcactcctcggtagtgttatttacttaattttatctatgaaggtgctatatttttaaatagtttatcaaaaatggttatttatgcaaatcaccctaaaaaaaaataacatacaatttaaaaaaaaaaacataacgacggagattccaagaaagaatcaaaatcgaatataaaaatgacaaatcttctgcaaattgaaagagagatgatctatcaatataaataacgtttggcagcctagatttatcgaaaaagagatcgggtggttgtgatggtggaagatgtggtggttgtggtggtggaaaaagacagatgagataattctaagtgttttatatgattttgaaaatagcatgtatatatata

SEQ ID NO: 30252 - DNA, 807 bp, Arabidopsis thaliana columbia
cttaagttattcatcaagatcggacgatgtatctagaaaattgtaatctaaaatccagcagtggcaaatgattcaatcactaactggtttttataagggtaatattagaaactaactataaaattgaaaagaatcaagtaactaacaattgtcagtttttctacggataaataactatatgacggcataagagaatacaaaactatccttgcaagttgaaccaaaagcagacttatgtagatatatttgatgttttttagcaaatcgcatgaaacatgttaaaatagcacgatatttataaaaaatatgacattttataacgtacattttacacaaatagcatgttatataaacaaatatcgttttatttgaaaagttgaaccaggagcaagcttatacgaagataaaataatagatttaagaaagttttaacatttaaatcatgtttttagaagaaattacatgtgatttaaataaataatgtgttatatgaaaaagtagcatgttgggagagagagatttctagttatcacgtgtaattcaaaaaagtatcgtcgtataaaagaaaataacatacaatttaaaaagaaaacataacgacggagattccaagaaagaatcaaaatcgaataaaaaatgacaaatcttctgcaaattgaaggagagatgatctatcaatataaatcacgtttgagagcctagatttatcgaaaaagagatcgggtggttgtgatggtggaagatgtggtggttgtggtgatgggagacagacagatgagatgattctcagtgtcttatttgattttg

SEQ ID NO: 30253 - DNA, 1038 bp, Arabidopsis thaliana columbia
atgctatttgtgtaaaatgtacgttataaaatatcatcgtttttataaatatcgtgctattttaacatgtttcatgcgatttgctaaaaaatatcaaatatatctacataagcttgcttttggttcaacttgcaaggatagttttgtattttcttatgccgtcatatagttatttatccatagaaaaactgacaatggttagttacttgattcttttcaattctatagttagtttctaatattaccctttttttatttactgaacgagttacctatatatgtagaatatctttttgaaacatcgtattaagttttcaaagaatttagtgatttttttttttttaataacaactccaacgatgttatagttatttgacttattgtaaatgctgaaataagaaaggagaaaaacaagttgagaaaaacaaagagaaacataagcaaaatataagcaaaacataaggaaattatttgcataaacatagaaataaatatttgaattgaaaaattgaaaaaaaaaaaatgaaatggtaaaattatgaaatgacatctggtaccaaacttcattacaaacccagtaatataaagtttgaaatcccgcttcaaaaattttttgtacatgcttaattatctcattatcaagaacattatctcaaaaacaaaatgtggaagaaatgtcaaatattttgtggtaatgttttcaagatgatttgaactttaaatactaaacagagttggtaaaccatgtgataaaagaagtttgttttgtttttgatttaaattttaatttgactagattttaaggatttttatttactttgatgaatttttttgagtttttatttatttttgttaagttagcttaagtttttattggtttttttgaagtatatcagtgtaggcgctgacatcgtagatcgtctttttccaactacaataaccttaggaaacggaaaaaagtttgatgtcgtctcatcattgttcaacccagcagtggtttgtctacacaccattacctctactcggacacttttttac

SEQ ID NO: 30254 - DNA, 1055 bp, Arabidopsis thaliana columbia
  unsure (1)..(1055): unsure at all n locations
ccatcacgagtgacctgccaaaataactgaatgtatatctttctttctcatgaacttaaataatttaaggggaacaaagaaacaccgtatgacaaaatgaaagtactttacgcaacacgaatcctttgttaaattataatgttagctattttggatggccaaataacgcttactaatcccactattttagttcaatgaatgaatgattcctttaatgattacagcttttaagttgtctcattttaaattagtgatatgctacgcgtttattttttaagttttccgagtttaatggtttccgtttggctttccttaaaggacagtttgtattcgtaaaacttgatgaaataaaaaaagaaaaaaaaaaaaatcaattctaaagtctaacaattattgcagttctctctatgataatcggaaatctttaaccgaaactcaaactaatatatcctatgtaaaatatctataatagcaaaccataataaacaaataaaaatttaaagggtaatattagaaactaactgtaaaattaaaaagaatcaagtaactaactattgtcagtttttctatggataaataactatatgacggcataagaaaatacaaaactatccttgcaaattgaaccaaaagtaagtttatgtaaatatatttgatgttttttagcaaatcgcatgaaacatgttaaaatagcacgatatttataaataagatgacattttataacgtacattttacacaaatagcatgttatataaacaaatatcgtttcatttgaaaagttgaactaggagcaagcttatacgaagataaaatagtagatttgagaaagttttaacatttaaatcatgtttttagaaaaaattacatgtgattttaataaataatgtgttatatgaaaaagtagcatgttgagagagagatttctagttatcacgtgtaattcgaaaaagtagcgtggtataaaagacagggaaatttggaaaaataacgcacaaaaatttataaattaggtaagtaccaaacaaanaaacagcgagtgatattgtgtgtgt

SEQ ID NO: 30255 - DNA, 446 bp, Arabidopsis thaliana columbia
agatacactgcttcatcgagcaggctttagaatacattggcaaccctttacgttcaacggtcccgaacacctttaaccgtatacattctggatgaaacgccggcagcagatcctcgtaaagcggcgtttgagggaaactgtccagtcttcattagcctttgaagagtatcgcgggctgctcattgccagggtagagagctctggaccagaagggcaactattcatgctcgctgggcaaaatttgagagcattctgtccggcgaaacgaatccactgatttgatatcccgcgacggtctcgcagagcaggtcttatcgaaccacatcacgcgcacctagttgcagcctaaatacctctctcgagaacccggcaatgaggaccattgagataagtgatggcgctgtgggtatgacgctcgcagcctcgagtccttttgcgtcagacga

SEQ ID NO: 30256 - DNA, 504 bp, Arabidopsis thaliana columbia
cgccagtgtgctctaaagcaggtacagaaagtagagtgttggcaacgtgtccggtgctacaggaggtgccttctatacacacctaactaccgaatgctcagctggacgaaggtgggacttgaagaagactagaaaaacaagatgattggcactggcaatgacagcagctgttggctccggacatagccaccaattggagtagcagcgtacattgtaaatctccgccaagaaccccatggggaaattgctaatattcacagagcatccacttccttctatcctttggtgcgctcgggaaatctcaatatgcagaagttggtggtcatatatgaagccatcttgggtggcccaatcagattcctaaaccctaaggagacactgcaaccgtggatgctaaccacccactaagacatccgatagtacccagacaccagtcataccatgccgacgactatcttaaagtaaatcagatccgacagttagttggtctcgataatttatgat

SEQ ID NO: 30257 - DNA, 636 bp, Arabidopsis thaliana columbia
gaagaaaatatagaatgagtgttcattaacgtcgatggtccattaattatttatgtcgaaacaaatgatgccaaaaaagtaaaccacatattacatggtaaaattttgctaaatacagcttattagacacgttaccaaggtgtagtaaagttacgttggaccggtaaagcgtcacgaagttgcaatttaggattttgatagaaagataagagtcataagaccaattatagaattaattggtggtgggccaggacatgttaccaaacaccaacaacgaccaaatctaaaatatgtgaacaagttgggccacgtagaagcgtgtaactacacgcgccggttcttacttttcaaccaaggcacagtttcaactttcaatttacaaaatgttttttttttttttctcttttgatttttggtatcgattttagagaaatgtttggtaacaacagttttgctgaaatatttttgatttagattggctaaagtattttactcaaagaatcttgttcaagtatttgtttataaattataaaataaaaaaatatcaaaatgagaaaacgaaaaaaatgttagcattagtctaagggaatggtctactattaggcacttttagaaaatgtttttcggtttgagggg

SEQ ID NO: 30258 - DNA, 588 bp, Arabidopsis thaliana columbia
agaaatagaccagtttactttatcacacagtctcactgttagtagaagggtgtgatcgagtagaatggttgaaagcagaaaaatcctaaaattcaatagcaagtggatgaagcaggtaaataaacagagaaatcaattggatgagaaactcctaaggatggggtaatcgaatagtgtagtatccctaatcaattcagttggttaacaaatctcaattaagctatcacttgacaacaggttcaacaacagattaattcactcccgtgatagaaattctcaagcatagctatacactgacctaattccaattagcgatccctaactaagcatgcaataagaaccgactgttaaagccaataaccgctctaaacggccaatcccttgggatagagatgactatcactggaattagtagatccaacgttccattaaacgccttctgagcgctggaacgtctgggatcggattccagttgatcagaaaggaataagcagtaaacacaactaatccagaagggattcaataaatctacacttaaccaacagattcgaccatgggttccacactactctatccatcctcaaaaat

SEQ ID NO: 30259 - DNA, 464 bp, Arabidopsis thaliana columbia
taattttttcattataggtaactgtaccatagaatataaaacaaaacttttgtagatcgataaaattcgtgtttcattttaaaatttgtaaagccaatgtaaaagagactagagatgagcgtgtggcccgagctcgtgatatccgccgagcgtttcaagctccacacgctttgaggtagactactagggatgttttggtcaatttaccgctggctctggtcttcatatatatattttttttttacaaattttcttggcatttaagcaaaattcttggagaatatttgagatggcaaaacatcaccttgatttctctaattcgacatgttaaaaatttagatactacatgtttcttcagttgtgtgtttggacgaaattctttcaaatctagatgtgtggggaatttataatgcgaattttacagtacgttacccctaggccctaacttctgaattatcaaacga

SEQ ID NO: 30260 - DNA, 195 bp, Arabidopsis thaliana columbia
ttcaaataaaaaagaaggtcactccactctatttcgacgcgatggaatccgtagaaaattcatatatatcactgaaatctttagaaatctatgtattccttataagctgcatgctatccgagagagagagcaatgggaagttcagtcaaaacatttttaattttaagatcaacatttttttcgagatcacaattc

SEQ ID NO: 30261 - DNA, 521 bp, Arabidopsis thaliana columbia
tctctctctagtgagccctgaccatccgaatttcgcattcgccaatcgctgtgtttccgtgtgttttccccctgttttggttttagatttgcctaaaccaatcagaacaagagaaacctggaaacaagaaccaaaaaaagtgggctttctctgcatcatcattccacttctggtccccaactgaaaaggacaatccaaagctagatcccttcaaattttcctttttgttttcgaaattttcgcaatttttaatattattttggaagtctatgtttctttctgatctttagcaacaaaggaaggtggaatctgtttcacgtttacacaaaaacatgtcaactggagattttctctttccctaacttttgaccatacagtatggtccatacttaatattctctctttgtttttaataaaataaaaggtttggttatcaagcatatatgtcattagcttaaagctatgactttgtttatcaaacttaggaggaccatatggcaagcttttatacagtgttagac

SEQ ID NO: 30262 - DNA, 509 bp, Arabidopsis thaliana columbia
actaaaaatgcttttaaaatatcttaaagataaatatcagatcatctaacatttatacgtgcttttgacccccaaaaaaataacatatacacgtgcccagttcgtgtccatagataataatatacatacaatctacgcgattagtttaattaattagtacgccaaatgaaaaacaattttactggcttttaatttatccgtcgacaataagcgaaataataactcaaagtatatatatttcaatatttttactaaaagtaatttagagtttgaatcaaagtttactgtaaatttttctgaaaaaaacaaaaaagaggaagtaataattaaacattgtgtcaataatatgttgatcacttttcttagttgttaatcaattcatataatcccgttacatcatttgcaatttatctttttatcttttttgttaactagaatccatatattgatcttctaaggttaacgaaacagcttacaaaaatttacatataagaatacagtacaaaatg

SEQ ID NO: 30263 - DNA, 580 bp, Arabidopsis thaliana columbia
gaaatggttaaaaaatttgaagaataaagcgaaacaatacatttctcctcattttttctttcttcctaaaacatggttatcggttaaaacctaagacgttaaaagatatttaaatatagtagatagtagatgaactaatatggttaatagaatatctagtacataagatatttaaaatcttaaaatgtttaatagaatatctagtagctattgtgtataagatgtttttgccattgtcactaaatatgattgtcacaatgttttgtgacattttcgagacgaaattgtatttgcgatgataatgttatgaagaaacaaaatttaacctatatatgtgtcacaactataatcgttatgactcatgataagcttaagttcttgtagcagtttatttgcattgcattgcaaaacaaaaaccaaaaagcgatatatgagtagaatcaagttatgcactaatcaaccttgttattattcattccaacagtagatataatatttgggtttttgtgaagcaatttgcttccaactagattaataatacatgttatcaagtacacacacacacaaaccaacacttata

SEQ ID NO: 30264 - DNA, 635 bp, Arabidopsis thaliana columbia
  unsure (1)..(635): unsure at all n locations
nnnnnnnnnnnnnnnnnnnnctaaagctgaaattgcttatcgttaaaaataggttgtgacataggagttccacttttcttagattttcaacacaacgttatcgctagtttgccaggctcgatgttgaccttcctcatcctgcgggggattaggcagggaggagttgcggggatgagcaaggaaatgtgatctcaaccacttaaagctagtgcaaaccacaggattagcatcaaatcaatgcaatacagcgcagaaaatctgtatctaagtgcaaaaaatggccgttgcgtattttcaaaaagcggaaggtaactctataaattaagtaaaggagtgaaacagtttcataagtaaaatatccagtgtgctccatctcattcttaatagatttattaagatcatctttttagatggcactttcatcaggaatgaagaagaaacccttgcttaaatgaatctgatgaacataagggaaaccagtattcacgctggatcagcgtcgttttaggtgagttgttaataaagatttggaattgtgacacagtgcaaattcagacacataaaaaaaggtcatcgcttgcattagaaaggttctggccgacttataccattaattacgagcgcaaaaaataata

SEQ ID NO: 30265 - DNA, 792 bp, Arabidopsis thaliana columbia
ctcacagggttgctgccagttccaactggatgcttttcatcttcggtaaccaacggcaagttgtggaaagtacatacttcctctaggcatcgcaaccatttctcagcatttaaagcaatgcatgctccctaacatggaaaccaaagcgaaagttctaagaattgatgattttgagagatacttataaagctataaacaaaagagtacagattcaaatagtaggattcaccttccatattagttctctcatctcaggcttcagaacccaaagcttggatagccaggctctcatttctcgttggcctacagagttccccattgaccatgggaaattgtaatgatctctttctttatcaagaaatgaagcgaggaaatcgatatcatatgaaaatccattcttccacatattatatctcttcgatactccattcacatcctcttcgcggttttcagtctctccacctccattcatccgtgtcctcttctctttcctggtaaggtctgaatagctcaaagtattatcttcttcatcgtgtgtttcttcttccaaatcttcagaattttcatcatcaagagcaagaagcccagcacggcaaactcctttgtgatggtaaccaggcgccatatccaagcacacgaacccaaagttttctttgttcacaaaattctgggtaacagccactgttggttcaagattaaggatacagtgccacaaccacttggaacataaatcgtttcgccaggtagtagtgtgactcaatcggtttgcttcgtccgaagaaggggataata

SEQ ID NO: 30266 - DNA, 428 bp, Arabidopsis thaliana columbia
aggaagtctcgagaattctttgaaagggtaccagctagggacaataatgtgagagttttgtttactgagaaagttatggaaagtattgaaagggagaccagctgcaagattaaattggatgagaagttcataattgttagtggcaaggacagattgatcttgaggaaaggtgttgatgctgttcacaaggttaaggaggatggtgagatgaaaagttcttctgtttctcacaggagcagatccaggtcacctaggcgaacttctgttggaccatcacgtgctcgaaactctgaacctcaaaggcagcagctgccatcacatggttcgtcaagtttcccagagcgctctggaaggcaagataagtttgtggataatcgtttccgcgaagagactcgtgttcgtgagaatcagagaaacgttcctcgagg

SEQ ID NO: 30267 - DNA, 1224 bp, Arabidopsis thaliana columbia
tagaactctagaggctatcggcaaggtaatagttatctccatgatttggatatcttcccttggaatccattggcatattgtttccaccatagggaggaggatttgaagagtagccatcatcaaactcagcataaggaggaaactgtctatagttaccataactcagaccagagttttgctgccgtgcttgctgttgacgtctctgagcatcgagttgaaggaagtcatcccattgtttagcattcataccccttagtccagccagtttcttcatgtaactctctctcagttcccggattgtctataaactcgcacaaattgatgtcagaagctgaaattcctcaacaggaattgcatttcactaggagattggggactatattacatatggagagatccactgccatccaatactatgagcaactaaaatgtaaaaaaacatgaaaccttcatagttggaactcctaggaattgcgatttctgaggtgatagaattcaatccagcctatactcggttttgaatctaagaaaaacacattcagtcactggatctcttacctcacgatgcttgttgttctcctcatcttcttccttatcgcgtttcttttcaagctccaatgcatccctcgtatattccaattctagttcttctaacgtttgtgggaaaggagggcgttcaaactgatgactcacctgaatatcgctggagccacccattctctcttgatcccatctttcagacctataaccactcacctcaggcttttgcctatcatacggtttatcccatccactataacgaggtctccctggagatttcgaatgtgtagaacgactccgagctctgtcactaccataagcttcataaaatgaataataatgttaactgcctgaccacgagactgaatgaaaggttacagctagagtaagatacgtgatctcaacttcattcagagaagatcgagcaaaagttcagtaaacatttatttacttcagaactgtacaaaatgcttgaacaaaaggacttacctttggctgcaaaataaagacaaggaatggacactttcggccaaaaaaagccggaaaacgaccaatcaacttccttaaagacaagactaaaatagaaaataaccaggtctctaaggtatcctatcctgtccctaccttgtggtgatcctcgaggaacgtttctctgattctcacgaacacgagtctcttcgcgga

SEQ ID NO: 30268 - DNA, 715 bp, Arabidopsis thaliana columbia
ggtggtggagctggcatgattggaaatgataattttggttcgggtaaccctaatgctgacagaagaggcagtcgaggaaggggtaaatgtccagtacccttttgtgtcttgtttggttttaatgtgctttagccatgcatgtttaaaccttttcttctattgattcagctggtggttcctatcttccttctggcccacctaatggtgctagacctggactacacccggcagtacccgatacctagggttccactttcaccctttcctggtggtcctccttctcagccatacgctattccaactcgtggacctgttggtgctgttcctcatgctcctcaacctggaaaccatggttttggagctggtcgtggaacttcagttggggggcaccttccgcaccaacaagccacccaacataatgttggaactattggccctagtttaaactttccccttgatagtccgaatagccagccttcacctggtggtccgctatcccaacctggatatgtaaatactgcccgcgtctctttcaaatttttatctttacatctaatttttgaagcattagagctcgcttattttgttttattccggatcatgacgcgataggttaccttttcagggtagccaagcgttcagggatggattttctatgggtggaatactcaggttgcttcttgtttaatgttactgggtgaatcaggtgcagtgt

SEQ ID NO: 30269 - DNA, 538 bp, Arabidopsis thaliana columbia
tttatggacacgattaagaagctacttggagtttctgagtctgcgtttgtgatcacagcaaaagtagcagaagaagaagcagcagagagatacaaggaagaggtaatggagtttggagtggagtctcccatgtttctcgtcctcggaacactcggtatgctcaatctcttctgcttcgccgcagcggttgcgagacttgtttccggagacggtggagatttgaaaacaatggggatgcaatttgtgataacaggagtactagttgtcataaactggcctctgtataaaggtatgttgttgaggcaagacaaaggaaagatgccaatgagcgttacagttaaatcagttgttttagctttatctgcctgtacctgtttagcgtttttgtaagattgattaacaacagtcaaaaaagtaatcaaaataatgaccagcagttataatatgtaattttcttatcttattttgcttactagaatggatagcaaatatcaactactaatatttgagagtttgcaactatttcaaaactcggaaa

SEQ ID NO: 30270 - DNA, 624 bp, Arabidopsis thaliana columbia
agttctggcttggttattggaaccattgagtcaacagtggatccaaccagagtggcagaacaattatctatcagacccgatgggtcttgttcgtttatgctccaacacatccttcatgtggtccatataccacactgttacattctttgagaaagcactcaagcgaagtggatacagaaaaagcaatttgaacacgacctctgcgacaactccagcttcacatcctatggctcatcatctttcttggatgttgccacccctcttaaaagtatggcctggaaatgtggacatgcttagtataattcataattaagttccttagtgccatattgggatgattttttcgttttcgtttttgcaagaataacatgacaacattcatttttttacatctacagctactccgtgttcttcattccctttggtctccctctgtatttcaaacattacccccagaaatgagggcggcaatgacaatgactgatgctgagcgatacagtctccttggtgaagcaaatcctaaattgtcaaaaggcgtatcggtttatgctgatgggtcattcgaaggaactaaggaaggacaagccgaggcaagtgaatctgatatacgaaattggttgaaag

SEQ ID NO: 30271 - DNA, 628 bp, Arabidopsis thaliana columbia
ccttggtgcatgtattcaaaacatataacatttgggttgatatactttctttttttttggggggccaaattgggttgatatactttataaagttatttaatttattaattatataagttatcaataaccatcatcaataaaggaagaacaacgacagatagagccttgacaaaaaacaggacgtcgataccttctataacaaccacgtgaacacttgtaacaaaaatcagccgatgcagctgttacaggaccttcgacacgcttaaaagaagaaggaaccactatttccgatgtacctataaaggaaaaggaaacataaacgattatattgaaatcttattggtaaagaaattgttatcaaacatagtataaaacatgatacgtgtttaccctaattaaccgaaaatatacttacataatgaaacgaatattagaagagtcaaaacaaaaatagtactcttcattttcttttcttttgctaagcgcttttaagttattgagataagagagtgccatagtgtcatatatatatcttttacttatgttacaaaataattaattttataagtaacatttatctttcaaagaagtaatagcatagttatggtatttagtaattgaatgttta

SEQ ID NO: 30272 - DNA, 572 bp, Arabidopsis thaliana columbia
acattacagaaaaagttaaataaaataaaaaatgacgtaattgatattaaatggtttgaacaaaaccacaaagcacagatctggtacggttggtaggattagtcaggcccattgactttaaccgacgccctttagataaagtcaagctaagcaaaaaataaaaaagccttttaaaatctcgtgtaactaactcgctgtatgccggcgcgtggaaacgtactctgcaatctatatataagccgttaaactctatttagcttctctatagacaaaagtttatgttttgtttttcctctaacacaaaaaacaatctcagatattaaataaagtgttaatcaaccggagaactctccgacaaaacctcgccgacgattttccgacgatgaaagatgggctttttcgggagactgttcgggagtaaaaaaaagtctgataaagctgcttcgtcgagagataaacggaggtggagcttcacaccagatcttcaaattccagcaagagagctccggcggtgacgtcggcttcggtggttgagcaaaatggtttggatgctgacaaacatgcgatactgt

SEQ ID NO: 30273 - DNA, 518 bp, Arabidopsis thaliana columbia
ggtgcggttttgggtacggtgtatgtcaccattcatagcctaagagatggcttatatgaataacaaatttggagtcgtcgggcaatgtcagtgtcgatgaaagggtaaaaagtgttgggtccattttcagaaagagaatgaccactttccaaccctatttgtttgcatcctctcctcggaatctgtaaattgatgctctttctttcacacacttcacattttacttcaaccgtgccatttaactatatgatttctacagtttattgtaccgctaatcgtaattaatgatctatttttaagatcatgtcttctatttttgttcatcttatagacttaattatgacataagcataatttgtttcatggaaaagtctttttgggtgggtttttaaaatttgtatttcttagagttttctggatattagttgtacgatataaaagcacatggttcagactttttttaatgtctaatcatatggcccatatgattgattaattatcatataatatgatgaata

SEQ ID NO: 30274 - DNA, 528 bp, Arabidopsis thaliana columbia
agaacaaaattatttagttcttagttatattaggaacatgaacttgagctttgggaattagatttaagtcgttttctgaaatgaaaacaaaagagtcacgtcgttaaaagttaaaaacacattattgtccgtttaagaaaatataaatttttatgaaaatcataacttggattattaagaaaatcataagttcaatgagttaggtcatcaaccccacttccgaactcatgcttttgacacgtgtaaccaaccaactttgcactcatagatttagtattttcctaacaagtcttaaaaaggaagacaattttgcaaagactaattatgaagtgagaaaattcgctattatcctctaattaaaagtttaacttcgcagataaattatagttatttgttgagataataacatgacaccagatttcacgtgcatcaaagctggatgaacaaatgaacaagaagtgtatgtgagatttcttccaagtaaaaggcataccagagacaatatagaacaataaaagtcagattata

SEQ ID NO: 30275 - DNA, 614 bp, Arabidopsis thaliana columbia
ccctgacacaaatcactacactaatgttatgatcatttgttataatctattacttctacttatatctcaaaatataaatgttttacatattggagacagaatgtttgagacgaattaggacatttaaattttcatggagaattgtttgttgaacaatgttgtcgttgtatttttgatgagtatgaattggcggttcagccgtttaaaaaccgattatatacaatgatcatcaaatttttgtaaggcccattggcgcacgagtatataaatccttagagctgacggcagcctgagaccattatcctaggcacttgtattgtatggtggtaagacacatcgtggaagcaccgaaagactagaacggtgacacgaccaaaataagacataaatcgtaaacgcaccaaatgactttcacaaggaaaaatctcgaagaactaaacattaaaagactggtgcatgcatgaatacataagtccaaaagattgagtggacagtaattacgtactagtactaccgtgaagaaacttggcttgtatatgtaagtcaaaaaaccacaaataaaactcttcacagacacgttttgatgtcttgaagatccagcatgatgacatgtc

SEQ ID NO: 30276 - DNA, 370 bp, Arabidopsis thaliana columbia
gtttcagataaaacccccagagatatggatatttggatatctcaaggtagaaacttcaccattccttcaatatggataaatagggcccccaaatgtagatataccttaaagaagaaccaaaccctgttttctcttgtccacccaatgcttatgtctgcttatgtaggtaatttagtctacaccccaagaaacaaatgctagaaagttttgctgaaattcaagcatttagcattacacgaatgatcatgggagttttacattgtctttctaatttgtttctcttctcaaaccgaaaacctatcttgacctgaagtaccaaaaaccaaaaccaaaaaggaagttgaagtccttggggcctggtgcaacttaa

SEQ ID NO: 30277 - DNA, 532 bp, Arabidopsis thaliana columbia
gagaaggcaagcatgatcttgcccggattgctctacagaagaaatcggctttagtagcacagcgaacggtatcttagataccgtatcttagataccgtatctgcatgactatcactgacatatcactgtaattctgtatccatgggaagaaactcatgcaaattgattcaaagcaaatctttttctaagcaacgaaatctgtaaatgctctattacaaagtcctctttctgtctgttaacaattcaaaaagtaagagctatattttaagaaacgaggagaacaagtaacaattgattctaatcagtggttttagcaagtctttacacttacagtagaagctcaactaaaaagtagtaagttgagaatctcaaaattataataactctttacacgagtagaaagatttagtgggaattcagtcattcacctacactaggagctatgcctgacttctctttggggatttttgagaatacatgggaatattctaggaatcgagcccataaacagcccataaacagcccataagtg

SEQ ID NO: 30278 - DNA, 1025 bp, Arabidopsis thaliana columbia
taattaaaacggtttactctgaactctgaagtgtgtgaggtcatcaaatgtcaacggctacaatttcattagttacgtgcgtgactgcgtgttgacatattaagcagacaaaattataattacgttagatcattagcaattagatacagtcacgaatgcattgaatgtaagttgatttataaaactttaaagcggactaattgtatttaaaaagagagctatagttagattggaacttggaaccatcgatatgattttatccgttaaataatttgagaaaatgtttaatgctgacaaataattgaacaatttgtcaacatattgcaagtttgcaacaacgaaaaacgataaattaacacctaataagtcagttgtacaaatatacctacaccaaacatgcatttacatatttgttcaaatatttttctttgaaaggagtgttgcaccccccataaaataaaacgtcaatattctttcctgttttgtttctttcggtaattagagaaactgattgtgaattctttccaacaaacaaacaaatttacctagcaaagttttaatacttcaacaagcttacatgatattaaatcatttgtctcgaaattccgtgttatgatgcactaatgtcaatcaaactattaataaaaacaaatatcataacaggtaacggctactattaataactcaattatcatcgagatacgcatatagatagacacataatcaaatactaatattttctctataaacgtatgaatataatgttctgcaataacagataggcatctttgaataagcagacagagtttccgatgattagtaaattactttctgcaaacaaacctacgcgtttttatgactcccaaacgagttgactcaggattatgatcgcattacaatatcatagttatcatacacatattaaaaaattaaaatggacctacctcatcctcattaatcatcaccacacttatataaccacttaacctaaagtttgtattccataaaacttccagtccaatgga

SEQ ID NO: 30279 - DNA, 1517 bp, Arabidopsis thaliana columbia
atgtcgatgttgttgtattgaacttaaagagaggtaataaaaattaccttttttttgaataagatcaaaattttatattttttttactgtaatcacaatttcttcctatagctttaattttcaactttgctcagccattttgggcaggcctaaatttacaccaagtagattaagaccaaatgagaatatataacgtaacacaacaatggaattggttccgcatagtgcatcaaatatcaaaagcatacaacttcaaaaaataatacacgaaatataaaacaagcctgggagagggagagggagagagattcatcattataaattgtaatacatgatttaaagttaacgaaccaaactaatacctaacatacaatattatcaccaaaaaccaaacaaacactcacattttctctcaacgggcttcgttttgttacaagggatgataagggacgtagcccaataagcccgtgacgttagccactacttcgttgcattttgacaaaaggttgagcatctggtgagagatgtccccagcgctaaccgctgggatcgggccacggaagtttcttgaaggtggcattggtggttcgacgtggtctactggtttaatgggaagttgttgtggttttgtgtattgtggagggagaggaagaattggaggcaatgtagaaggaggaagctgttgatgatgaacaacgttttgaaacttcttactaacaaattccattggaacagatgatgatgatgaagaaggtccactgtttctattcaaggtcattgtgacctgtggtggctcggtgtttgctttactcgagttttcttcaccacctaacatgaatttgactcttacggctgcgcggttaccgtttccattgttgctactactgctcgggtcatcaactggtttcttcaaacaggatttgaggttgacgtttggtggcggtaatgttggttggtgaagcggtggtgcttggtccaaccactggctctgtggttcatcatcttccttggtattttctggctcacgaggctcggctttaggagcatccacatcacggagaaagtactttacattcacgtttccaaatagagtgttgtttcctgttgcatatcgaaaagcagtctgggcatcggctttgtacagaaagacaacacggcaggtcgatgatttccagaaaaccctaatggcggattgatctaacagcccgaagcgaccaaacctcgcctttagcaatgcggctgaagggagagatgtgccaggtgggaatttcatgaccagcattgttggctcaaccaccttaactgatggagctgttttcttcccggtttgacctctggctggttttgcttgtaccaccctgcttggctctcttattggttttatactatcctttgcttctcgaatgatcttcttttcagaagccattgatttcaactgattagttttcttcagcttcttagctgatgggattcatcttgacgatcagaagagagcagttttttccagcttttgatgg

SEQ ID NO: 30280 - DNA, 816 bp, Arabidopsis thaliana columbia
aatgataaatttcatagtaccatcttgtatattctcatttcttatccaaatagaatgggccagcaggatgacatttccaaattttctctccgttctattttctttattttaaataaccaagatattttgagtctgaagtctgaacccacaatctctttgggtcagaaaacaaaacattatttgaactggatattattcaacctaactatacatcatactatagtttattttatcaattaaaattatggaataacgtgtattacagtattactttacaaaatatgtgatctcctagggttgacaaaaaaggatatgatattttacatattatataaaaatataaaatacccaataatacatgtattgtaggagttttatattccacaaagtaagaacttttcaagaagattatcaacaaaaaacaactattatcggacagaacaaaatgcctcgtgtaattgaatatttaaatctcataatttgtttaatatggattcaatgatcattcaaatccaagctaataccaatcaaaggtttcttctttaaactactcttctaaactccgtatcatttaaaaaataaataattgtgtaaacgagaactccgtatctatccagaaatagtgaaggaatacatactctttatgaactcattggttctggttttgaagcctaacacataatttgatactactaattatcttactgctttcccactaatgctactccctcaaaatcttttgtttggcacgagctacgaactatattgtatatagccttcgtttagacattgaacaattcatcagtgatctatagg

SEQ ID NO: 30281 - DNA, 443 bp, Arabidopsis thaliana columbia
caaaataaaatattgtggaataacactatatatgtttattaaatttacggaatcacaaaatagtttaatataattgcacagtcgtatgatttgttaatctagaaattaccaaccataccttaaaaatatgtaataaaaaaaaaaactcgataaagagaagccgtgacccgtgagaataataagatttatgtatgtatttacaaaattctgtacacaaattaacatgaaaatattgcaaaacttctagtcccaaacgaagccatatattagagatttaggggaaataagtacgtaaagttttgtgaaacaaaaaagttgatatatttgcagtgaattacgtgtaatgtatgagtaaaaaaacgtgatttacgcccaccgttttgaagactttgccaaacttgatgtacttcccgtcttcttaatgcttgcaaaaacatcatcga

SEQ ID NO: 30282 - DNA, 1454 bp, Arabidopsis thaliana columbia
tgtcatgttgctttcacaccacgccaagtttgcgggagagtattagaggccacaaacaaatccaacaattagcctcataagaagcccattatcttatgtcattaggcttgtctagtatcttagattatatatatatatatatatgctactatgagaatcaatgtaagcaactttgagagttggaaacaactctccttcttcaccattttatgaaatcaaatctaaagtattattgttcttggtgacaaacctaaagcttcttcatttctattctttacatttcaataaagctcattgagctattgtattttcaaatacttagatttctatgtcaattagcttatttgagcataagtttagaaatgtcaacatggtatcaaagccatcgttggcgcaacaaaaaaatttccacaaaaatggttttccactttgtgacccatacaagtggcatgtctcgttgtaatttcgatatgttgggcttgggctgcttcccgttagaccatttcccacccatatctcggaaaggtcaattagaatgtcccacatcgcttggaattaagatctttgggcattatataaaggatgtggcaatccttaactcttgagctagcttttgggttaagttatgccacattcctaatatggtatcaaagcataagttaagaaatgtcaacatggtatcagagccaaacagttcatcagtttttttattctctcgagcttctagccttctctcataccacaatattgaaacgatgagctttgtgtcttctctgataaagcggcggtaaacgtgaggtttaacatctaaggagtcagattttcagagacaatggaatcagcttagaaaatcttcaaagagctcgagacataacctaaccatggtattcaaggtaccgtttctctctattctatttgggacagaacgtggagtatttgtcataggttgagaaggatagctgctggtttagatctataggtgtggaacatatgaagctagattgcaatcaaattgtctcgggtttgataatgatgggtttatggctgcaaacttctaattttgctgaaatgccaaatagaaaggcttaaggttatttgcaaattatcattggctattggatgggaagtagatagcaaataggatttaagttattgtgggaagataattattcatcatcatgaggcaaattagaggagttaagtgggtaaagaagcccgtatttttgggttaagtggtcataaatacttttgaaagagattgactaaggtctccaagaacaaagatacctttgagtgagcaaagcaattctctccaactataggccttaatagatctcacactcatgtttgttctccttggtgaataaaaccatccatccacatcacaatgatcttgcttcagcaatgcatcctcacaccaaattcatctttatttgaggttcaaacttgtcatg

SEQ ID NO: 30283 - DNA, 1114 bp, Arabidopsis thaliana columbia
ctttatgatccatttgccgtgagtcccaccagctatgtaggaatattctatcttctttataagagctttgatacatgcaaaatactggaaaacaatgtccgaacatataattttccccacgtaatatagcaaagatcacgaaaaggcccgaaaaagtacatttagttcaaaatttggagtagaaaaaaaaacaatagaagaatttcattttccttcctcagtcatcggagagctctctttgggctttccaaaaaggtatcacatgccaagtttggcctcacagtctaaaagttatagagtcatacatttttaacaaaacaaaatagagaaaaaccgaaaaaaaagagggatgcaacacgaggactttctgggaggtaatctatcctagtactactctcgcccaagcacccttaactgcggagttctgatgggatccggtgcagtagtgctggtatgatcgcatgtgttactacatgcaatgtaatcgtatctattcttttttaaagactttatgatccatttgccgtgagtcccaccagctatgtaggaatattctatcttctttataagatctttgatacatgcaaaatactggaaaacaatgtccgaacatataattttccccccgtaatatagcaaagatcacgaaaaggcccagaaaagtacatttagttcaaaatttggagtagtcaagaccaacaatagaggaattccattttccttcctcattcatcggagagctctctttgggctttccgaaaaggtataacattccaagtttggcctcatggtctcaaagttataaagtcatacatttttcacaaaaaaaaataaagaaaaacaaaaaacaaaaagagggatgtaacacgaggacttttttgggaggtcacccatcctagtactactctcgcccaagcacccttaactgcggagttctgatgggatccgttgcattagtgctggtatgatcgcatgtgttactacatgcaatgtaatcgtatctattctttcttaaagactttatgatccatttgccgtgagtcccaccagctatgtaggaacaccctatcttctttataagagctttgatacatgcactatcggtcgttactag

SEQ ID NO: 30284 - DNA, 470 bp, Arabidopsis thaliana columbia
  unsure (1)..(470): unsure at all n locations
tcaccatttcaaggacttgctcagggcttttcgcattcttgacaatgctgcaaatgatggtgtaggtacactcaagatctgaattaaaaaaagatgcaaatcactgagaattgaatactcgaaagacatacaaaataaacaggtataagtaagaataggaacacaaacctttctcagatatcttagaagataccaattcagctgaagtgaccattaacgaagacaattcaagccacttctctgctaccattgactcctcagcctccctacagagcctggtaatttctggctctgctgcctaaaatttgaaacgataactagttaagtacaggcaagccttgaaaacttaagaagtcgcttaatgaaactaatcttagatggttgaactaatcggatgcatcagaatcctcaaagattacaaactattctagtccaganactaatcacaaacccttccataaccaatcaga

SEQ ID NO: 30285 - DNA, 604 bp, Arabidopsis thaliana columbia
cggtacaatatctggccatggagtagcaggcacacttgatggacttgtgtatatgtgggacttatccactggcactaaactcggctctctccatgatttcaaaggtatacactgattgaagttttaactagatatatccatgaaaataacgaagtcaattctcaaaagttaatattgttacatggattttgtcaggtcaaagagtttcatgcatcagtactgatgattccagaaatatatgcatagcaagtgaagatggtcagctcctagtttattgccatccggaaaagtaaactcaaaatcaatcaaggagggtaacaacaaaaagatgttttgccaaaatgacttcaattggcttggttacatttttaagtcaactaagtttttatgcttgtaaacttttaccatatggcttacaagttgagaattttctaatctagttaaaaaaaattgtacgaagatgtaaatgataaatgatgataaataaatcttttatgtatattcgttgctacaacttacaaggcatttctgatttctcagtaattttttatccatttttgctaatttccaaaaaggaattaagaatatgaaattataaataatt

SEQ ID NO: 30286 - DNA, 214 bp, Arabidopsis thaliana columbia
  unsure (1)..(214): unsure at all n locations
tagaggnnnnnnnnnnnnnnnnnnnnnnnnctaaaggtttatgtactccgaacaagggcgagactgagttggtatcagctgaatctatcgcagtaggttcactcgtcttagagttcgtaaaccagcaggtatgctatgtcatggaaagcgtagagatgtagagcaggtctcgataaggtagtcatgagtgatgtatatgtcacattccgaagta

SEQ ID NO: 30287 - DNA, 574 bp, Arabidopsis thaliana columbia
cctataattatgtcgcaccatattcactacaattgtttattctccaaaaacaaacaatctttttgctgtaaaaatgtttagatttttgttaattttcctttttttttgtttttggtttacagattttgtttgtatagacaaggtcgggctgacccggatattcggatccgtattgtcgtattgacaccgtgaacccaaccaaccaaaaccctaaacccttttttgacttgtctctacttgttacttcaccgccgcgttctcagtctctcaaattcctctgtgctttcgattcttaccagtgaatttttcttattttacttatcttatgctcgtatttggaggaactgagcaaaaccctagttgtttaattgggtcaaatttgtagattgagaatccaaatttatcgacctagttattgaatcccgagttgatacctagaaacccttttgcagtcgcagtaaaatgggtaagctggggaagaaagctaggaaatttgccaagaaaaatctccagtctgttgagaaacgaagcagaaagctcaagccttttatcaagaagaaatttgcaaagagta

SEQ ID NO: 30288 - DNA, 541 bp, Arabidopsis thaliana columbia
ttcttatagtctgactggtgaccggtcgcgccgtcgtttgttcttacttccttggttggccaggcccactcatgtaataatttattattgaaaccattttaagctacgcaccagttttattatataaagctgtatgcatgtcacctcggattaacacgtagtgaaattatgacctcgtatgtgttttctttttcttttaaaaatcttacgaccatgacaatgttttttacgaacgattccacgactaacagaaatttacgatagatagttctagctaggtagaccacgtttacatataacaaaattatttttaacatacgaaatcacgagaaacgactttacatgcactatgctataaatttctgataacagtgtctccattattactattctttcacattttctagaattaatcgaacataattaatatatgatgtaaaccacttaataatttactagccactaaaccaaatggcttcactaatatatgtcctattaatttgaaataaagtaattaatatataaccagaatatttgtata

SEQ ID NO: 30289 - DNA, 466 bp, Arabidopsis thaliana columbia
agaggtttctcaatgtatcagaattctttttcaattcgattgtatgtgcattagtggtgtttgttaatttaacgggtgagtaaaaaagtaaaaggcattatcattgaccatggcagaaaaatttggaagattcatgattttgcattgtaactagatcctaactgtagattacagaaaaatcccaaacaatcagacaaagagcagtgaaatggacacactaaacatctcaaagcacccaccattttattcttctcttcccgatcatttgcccaattgtgatgtgagcgatgaggtccgctgccacattggccttcctaatatggcacttgcatgaaccgaaaggtaagcagcatttaacctacaaatgccagaggaacaaaacaatgaatggggcattcacgagacaccacccaggtaagaaggtgtaagaaagtaataagaatcttacttgtctacatcaggagtg

SEQ ID NO: 30290 - DNA, 556 bp, Arabidopsis thaliana columbia
  unsure (1)..(556): unsure at all n locations
gacctagcttcaaacatcagctcgagttccaacgccgtcggagtttccccaccacgcatcctccctaacgccgatagaaccagaacaatctccgccactctattcatctcctcgtcaaaacgtggctttttcgcaggcggagacaccggttctgctccgttgccatcaaccattgcgacggattcaagattcattggagcattactggtcgctatatccattgaaaagagaagagacgaggagaaaccttaaacgcgaaagaagaaaaagggaaggagggagatctccattgttagagaaaggttcaaaattttgaaagccctctttataatttattttcgcgggttaataaaaataaggaatttgaggaatcagagtagggagccaacaatacccaaattacacgaagcagaagacggagatgttagagagagatcgatgagagaggatcttttgactttacttttttttgtcctagagagatataatagaataacaattttatccttttctattgttgtnttgcgtacatatgaataatattttgattgtttcg

SEQ ID NO: 30291 - DNA, 546 bp, Arabidopsis thaliana columbia
tcgccgccgattttgtgaaccgtatctccaagcgtcgtcgccgccgattctgtgaaccgtcttctccaagcgtcgtcgccgccgattctgtgaaccgtcttctctttttcttcggttatgcataaactgattttgcagagatttagtttggagatatctagggttcgttgagaagaaagaagagatctaagggtttgttagattgcagagaaagaagaagagatcgaagaaagagaatagaaatccatgacacagaagaagatagatagatagattcatggagaagaagaagacagatttctggaaacttgattttcagagagaagagacaaaatctaacagactaacaagaagcgtgacacagaaaaaaaagaggcagtgttttattttaagttcacaaataaaggagtggcagagatacgtaatatatgacttaggttaagagtttttggacttttcatataaatctgatttacaatacaactaagattcacatgaaaaaagtgggagggtatgagtgacaattttcttgagttagtggcatta

SEQ ID NO: 30292 - DNA, 774 bp, Arabidopsis thaliana columbia
attccatggatctatctatcttcttctttttcatggatttctattctctttcttcgatctcttcttctttctctgcaatctaacaaaacctagatctcttctttcttctcaacgaaccctagatatctccaaactagatctctgcaaaatcagtttatgcataaccgaaggaaaagagaagacgttcacagaattggcggcgacgacgacgcttggagaagacggttcacagaatcggcggcgacgacgcttggagaagacggttcacagaatcggcggcgacgacgcttggagatacggttcacaaaatcggcggcgacgacgatgccattaaatataatagctttagggtttagaaatacaaatcgcttaaacttccactattttgtaccatttgtcccgtataactgagttgtatcaattatactattaatacattttgtaccagttgtccatatttatatctcacttatactatttgtatcagttgtactattatttttcaataataccatttataccgattgtttctatttatatatagttattacatttataccaattgcattatattctcttttacttatatcatttgtactagttattctataatctctcatttgtaccagttataatttcattaagggtaatttcggaatatcacatttatagtggcactcagattataaaatggcacgccagattcgttttctccccacaatggcatatgtgacgcgctctcgagtttttgtggtagtcagttcaataaaatag

SEQ ID NO: 30293 - DNA, 679 bp, Arabidopsis thaliana columbia
ttgttagcggaataaactaaacatgataagtttttgtaaaataattataaaacgctgaaaaaactagtttaatcacgctttgctttttctagtttaattttaatacactagtaacatattagcgaaatcacttttccaaaacgcaaaaaagtgaaacttgatgactatttttcatcaactttatccaagttttgcagaagaagcaaatccctttcataagtgatggtcaaatatagcggaatcacgttttcaaaatgtgaaacatgaacaagttgtataacatcatcctcaatgtttcttgaagttggtttgaacttttgattttgtctttattacattgaactgaataccttaaaaaacaaagaagtgaatacagttaagtggttcttttaaacttttttaggtaatttctataccagataactcatatctcatgttcgacatgcaaaattttcgtttgacgaattcagctattttcctttgctattgtgcgtgacacacaaacgtggaacttgcataggccaacctaaccactcatcaataacaccctcagctaaattcattcgtctacaaactcgaatatcacaccgtaaatcgtaatactctttgtctatctttcaatcgaccattgactttgcatgtgacagacttgtagaacattatatttcacctatacata

SEQ ID NO: 30294 - DNA, 1291 bp, Arabidopsis thaliana columbia
tattttgtgaataaaagtgtagaaaatcatacacaataacataataatttaattcagtaacaattaaagactttttttagttgaataacaaaattttcaatgactttattaaagtatgaatccaataacttcagatttatgaaaattttagaagcttttttataaataaaaaataatagcactagacattaacaatgtttaataaattttgattgaataacaacaaatttctcataacatttaaagtcattaaaacactatttaaatcacaaaccaataatatcccctaaatttaattattaagtttaactttagtgaaaaattccaaatattttttatttatttatttaaacatttaatatccaaacttttttggttagaaaaataatacacataataataaatatgtgcaatttaatattcaaaaaattaaatattgttatttacgcattgattacttcatacaacaccaaaaattctaattttaccatcatctctaaatagtctttttaaaaataactgatgaattttaccctcatctctaattgtaccgtgatgaatttttggtatctactattgttgagaaacaactgactaacatctcagcaacgtataacttcatgtggtatgaatgcaaaagaaaatatttattttgtgaaccgtgatttattagcaaaactgtaaggttagagtttgaagagttaccaaaaaaaagatagcgctactctctctttctctctggcaccattatcgaggctcctccgctgattaatttttccgacgccggtgaagcttttgcttgccggcgtcgggattccagcttcctttcaccgctgcttcacatcttttctttctttgtttgttctcctttgaaatcattctccatcattttttctctgtttaacctctatcaaacctctttaaacgttttgtaccacctcacttcgcttctcagccgatcttcatcatcaagtgaagaagaaaagatgagttatctggcaaatccttatctccatttcttcctcgtagccctcgcttcagatctgaacccttggagctttgtctcagtttcggatcacggccagcgactgttcccgccgatcttccaatcaccggagatgttgcagtcaccgcaattgtcttcgcaagcttcagattgccgcctctcccctttcctgtcttggcattccaaagagaaactagggtttttcccagtggacctactttcttcttttggcccaaccctatttagaaggcccaagcccatcaattggattaactatcttaagac

SEQ ID NO: 30295 - DNA, 568 bp, Arabidopsis thaliana columbia
tgaacaaaatctacaaacgggtggagcatctctaagatctcacagtattattgccccatccgtcaaaaactccatgcaaaaatactaaagatataatatttggatattcttaaaggccagagctcataatcaaattttgatatgggcttgcttacaagttacaaatagtaataatcaagtaaaaacttttcatttgttgtaggacgattatgactgataacctcggttgaagcaatttgattctggaatttttgtgttctttgtgatgttattaagattccaagaggtatggaatctgatctgtaaaagttgacattttggtgactggtttgtgttctcaagggaaagtgatttataagtgtttgataaaatgtctcagagagtggtgtttcttctctctatgggacacttatctagttatctgtatgctttgtgtgactgacgaaatgggcattgctctagatttgcatagaaggatgattgctacaggatgcagccatgcaggagtaccatacttacttcattagatggcattgacctgaggatttatagaagtcatgacctgagt

SEQ ID NO: 30296 - DNA, 606 bp, Arabidopsis thaliana columbia
cgaacccatctcttcttcttcacttacacttataccggtactgctttgcttcctccttgggtgattcatttctgaaatttcgcgttttttttgttgttggttttgataccctagtcgtcgattggaagagccaagctccagaatccttcaagtttggttattttcagacggagacccgtaaatctgaattgggttcaattcgaaactaaaggaagtttcgtgtgtaaagcgattggtgattcctcgactccagatgaagatattcagaacactcaaagtgatgataatgttgttgttgttactgctacgactcagagtgacattccccatgattccgagtattcaatttcgaggtttcgaagtatggttaccacactccctcctgttgtcttcctggtatgtttctctcttatcgcttcaagttttgatttttcctgtaaaaaactgattttgatggatttcccttcactgtgatacaaattcttcgatggtggaatttagattactcatctattagaggctgcctaagtttgaatatatcctgagttttcttgatagttgattagtgtattgtcctgaataggaaatgttatgtgcttagttttg

SEQ ID NO: 30297 - DNA, 514 bp, Arabidopsis thaliana columbia
tccaaaaactctatagaaattacgtttttaggatgttgatggtttttgagcttaatcagtttctttgttacattttagtcacagttttttatttcttagaagaaaaaagaatccggattgaattgcgaatttagagcctatggttttggtacatttggatcgaaataaggactttgtcaaatcgttcaatctaatcactcatttttccatttgagagtgacaaaaacaaccatttctttagattctttgttttcttcttctatttctgtgacattttataaacatatgatttgatcatgcttgaaactaactaatcttagttttaagattttaaagattaaaaaaaaaaaaaaaaaaaagattttaaagattgtcaatttgaactgcttgaatgaaatgtcaaccaaaactggtttctaaaattatttttatcgttattcaaaacgtaaacgcaaacgcgaattttatacctgtcagaatttggtacaaaatgttccgcagaatcagccgacgt

SEQ ID NO: 30298 - DNA, 413 bp, Arabidopsis thaliana columbia
taagataactggaaatcaaattctacatttatgtagaaactagaaaacacacatacaaatacacacttgaagccttgaataagcagacactaagtccccgatgtaaatgggatctgcaagggctttgagcttagggagaacctgcttgttcacagagatccagtagagcgagtatctgtgtcagtgtccctaatgcttgaggcaggaagcttggtccagcacaaagcttgtcgtctaacgtacactagaatggtgcgacgtttagctacaaactgggaaacgggatgcagtactaattagcgcgcatcacgtgacttgtatgatgttgtgtacttttgttcggcacaaaataaattgtctcttatcgaagggtcagtatcttataaatgaagcaagttttggatttacctttt

SEQ ID NO: 30299 - DNA, 499 bp, Arabidopsis thaliana columbia
tgtaaaaattaattatccgattccaaagttattgcaactaaagattcaagaaattccattcttacaggtaaatgctcaacacccacgtaagcttaaaaagtttatcatgattaagtgctttctgggtcgtctcataccttataaattcgtccttaatctcaacaattatatcgagatttttcaaatacaaaggatttacttgttactaatggagtctaccctctactcttcattagatcctgtattcactccgatagtatcataaatcgagtcgatgcagagaaaatgaatgcatttacatactattactattaataattataaaatataaaatcattagtccagaataactaacgacataatcaggattttgttccatcccttaatctactggattttacggagcccactcatccacgacagcgtcgggtacgatcatagatcagattctcttcaagtgaaccagcctatcacctgtatggggcttacacagtggttg

SEQ ID NO: 30300 - DNA, 559 bp, Arabidopsis thaliana columbia
aaataatggtttaattttaaatgtacatagatgtttatgattaattatacccagaaataatactatttaaaaaaaaaatatgacacgtaagattattactataatacatagaagttaatatttttttaatatgtgtttattatttgtcaaactactattattgtttgttgggtggaaataaactattttggtaaagaagaaattttgtttattaacttggtaaagttctccttgtaattcaaactaccatttaatacgaggtctaatagtaagataatactaataatagttaaatatctatgaatattgattaaatacatggaaaatattcaatgctctcataaggtaatgcaagattttcaaagtggagttactaaatatgtatatatatgcaaaaacaaaagtttactaaaaatatacatatatgatgatgaggttcaataacaactttctccacattcattactataaatacataaagaaatacaatcttcttcttatatacacaaccatagattacaatcactcaaaacatttcacacgaaaaaaaagaaatggg

SEQ ID NO: 30301 - DNA, 566 bp, Arabidopsis thaliana columbia
tcaaatttttatatgtttttctggtaaataatggaggttttttttgtttactttaacttagcctcgccgcccccatcacctaaatgtcattttctttaggaccgacccaatatactatatcatcaatatggtgctctcttctttttgtcgtataatatcatagcctgtcgatttttcagatttaaaaagccacagtttttgtatgccaaatcattttaaaataacttacgtccacttttttattttatcgaatcagcatttacattcttgaaaacacataacaaaactccaaaaccttattttgctccaacgaagcatggctaagtttcttcactccaaatccaactaatcatgcatggttatattcgagtgtctcattgtatatatagagaacatttttcttgttcaccaaagtcaaaacactttgttttcaaaatagatagatatatggtcattctcttacattataaacatttttgtagtctagaaggtctagttttctatcaccaacatatgttattaagtatgtttgaggtgtcataacaaaccctacttgaagatgttag

SEQ ID NO: 30302 - DNA, 463 bp, Arabidopsis thaliana columbia
agaaaagaaacagaaaaatgggaagaaatcagaaatcaagactaaatatcttacggcgtggtcctgttctattcctgtctgctggtgggggacgtaaagtgaaactgttacaaggatgaccttgaggaagcgaataaccaagaaaatgtataggaggaggagggaacacaataacttcttttgccttgaacgatatatttccaatattcatgtttaactcctcaattggtttgtaacatatttgaataatttacgcctgaactgccattgaaatgaagactccgaggaccttgaccttcctgactatcttcacctagttacaaaaaaccagaagaacattcacaaccatctcaagcctgattgttcataaacttcaaatcaaatacattctagctctaagtagcattatgatcaccactctacacaacatttggttccacaattctaatccaaaacaaacaca

SEQ ID NO: 30303 - DNA, 381 bp, Arabidopsis thaliana columbia
gcgatttgctgcttttgaatcttaggctcaggatcactctggtggggccaaagtcggtcggattgtagtaaaaggaaggttcgtgtaagctcactaatggttctggtcctcaacatggtcctgctccaccactacagatacttgtacaaaagactttagactctgccaaaacaagcgcgtggcgtgacgcgcaggaagaaccaaacaaagcctccttctcttccaggagattcaagagcatcattaaacttctcagaacttgattcacttgatttatcatggtgctaatgagtaaacatcatcctctaattggtccgtacaaaaggctcatggacgctttgaggcccaataaagatgcttacaagttgcaatagaacattt

SEQ ID NO: 30304 - DNA, 547 bp, Arabidopsis thaliana columbia
caacaaaaggtggttagttggggcatttcaacaaacaaattagatgcaaaatcatgagaataccaaaaccccaaatatcaacaaaggaagattcttgtttgtcaagaaacagagggaatcagaacacaagaacaaaaataaaaaacccataaaagcaatctgattaattcctccagcaaatacccagataaacaaaaaaaaatccattttttgaatcgggtgaaaaacagaggaacatacgtaccaaaaaaatgaacctataatctgcatctggtaggtgtagacttaataaagagaagtcgatcacaaaatcaaaagaagagcatcagaggcattagtataatgattaatttgttccttggagatgctgtttctgggtagtttctacgagggtctctgatttacaagtttccgagctaatcaaggcaaaatttgtcgatcccaacaataagagagaagagaggtttggctatggctgataccgaatggagattttttgaaggaaaataaaaataaatattttagtgaaagaaaaaaagaggagaag

SEQ ID NO: 30305 - DNA, 488 bp, Arabidopsis thaliana columbia
cagaacgaaacaaagaagatgataagaagcaaatttcaaatcggagaattgagaaagagagagagaactactgacaaaagggggtcttgaaggaggcagcgggatcggtgtagagaaggatatgagcaacgacggtgaggagcatgaagaaaagaacaagattgcgaacttcaccatcatcgtcgtcgtcagatcaagagagagaccgagccattaaatctcccatctttctttttcttgtttctagtgtgtgagtgaaaaaccaattgctgctagctggatgatgatggtggtcgttgaggataagacgcttttacccttcacagccattatttataaatatactctagttgttgtattaaattaagcgacaaggtgacgtgtcgaggcctgcgcttgaagctttatgttcttgcctttggaatggaatgtaggcattatagaagaagaagagttgcttaaactcagtgttataaaacaatggatgt

SEQ ID NO: 30306 - DNA, 577 bp, Arabidopsis thaliana columbia
attctaaatatcaaaatctattacttggatgaacatttagaggaaaactaagagtttggtggttattatattgaacgtctttgaatgattgtttaaacaaacatttgtagttccacgaatttctatgtgtactagttacaaagatatatataatatatacgaatttatcatcaaaacaaagaatacattgtatttacgaaagatggggttatggtcattacatgttttgacggatcaaaagaaatattaaaatttcaaactattttaggagtttcaagatttacaccgatgaaaatactaaaacctaacttagtttcctgatatataatgtaattatacttaaaaatattatatattattctagatgacataatcatctaatgacataaatcaagtttttattttgctaaattttgtgacggctaaaacaagacgcatctgttttttatattttgtaatgaacctaaacactaaaattccactgggccacacaacacaactcaattaagatataataaggcccacatttgcatcaaaaaccatgttacaaaatttatatcatgaacgaggaattttg

SEQ ID NO: 30307 - DNA, 531 bp, Arabidopsis thaliana columbia
atagtcaaagagatttctttaaatttccgtttttggaaaattttctcatttgactgaaatcacttattgaaatgacatcgaaattgagtggtggtaattgagcagtcacgttaacaatttcagttgtacaatgttgaataaacgtaggtagtggctacttaatttcttcgatttcttaagtgcttagtacttttcaacattaaaaatgttgttaccaagtctaaattttcttcacaacttgtaactaaacttttcattatgtgtaatcgtaaaggattagcgctacaaatagatggtgattcccttctaatggacgagttgacattgacgcattatgtctctggttagctagtccgacgtttgaacaagtactcttaccgctctcgaaacaaaattaaaaccaaaattttatagatctattagtaaaatctactattgttaattttatcacatagtccatgtgtgtgttaatattaaggatgaagtcaatgtatatatatatatcaagactctattcgtactagatatggg

SEQ ID NO: 30308 - DNA, 340 bp, Arabidopsis thaliana columbia
gaggtttatgttctcagaagatatatcagctttcataggactgtaatatagcaccgtcttgtcattattattagagagctgaagcaccgtgttcaagttcgcattcatcagaagatctgtcgatgatttggcgatatccaatctcgagaacttgaggtttgtgacaagcacctgaggtagtatagatttgattgaagagtttgcagacaatcctaccaacaagacgattataaggacaacagaaacaaacatgcaggtgcaagcgcacgattttctgaaacatccagaggcgcatattctcttgtcctcctgaccgatatgatccacaaaggaacccgat

SEQ ID NO: 30309 - DNA, 430 bp, Arabidopsis thaliana columbia
catgaatttgtgtttatcgcattagatttttattgaaactgcaaaactgctctcctgaataaaatcatctttctctcttaacacagcctgctccagcttttatctaccccgcaaaccaccatttgcaaccagtcatggtaccttctaaatcatctcgaccaaccaagagcccccatttggctgttggtttagcatctgctaacttcagccatccaagttcatcagccagcgaagtttcttctccatacttaacagttattccaaacaatgcatattcctttcaactgtcatcaaccatcagaggtgggactccaagccaggcggtgcatttctacaatgggtctttttactcgcctcagatgttccaacaacctcctcagcctctgcagagacagagtcaagcccagacggagtcaaaggcatcaagctg

SEQ ID NO: 30310 - DNA, 759 bp, Arabidopsis thaliana columbia
gtttggttttgtgttacttgtagataatcagattggagcctagagttaaagctcaagaaacaaatgaggaagaagcttcaggaagtgctgtcgtcaaagaacttgaagaactaaaaacaggagaacgcgatcgttataatacaaaaaaagctgttactcgggtatgttactacagcatctgaaaacaccaattctactgtttcctacagtatctgtcttattggtatccagactagtagagaactgattgtcgtgagattcgttgggaggattatatgtctgagtgagaatgtgtgtctctatgcaggataagaagaagcgtgccttatatatgggagatgatgctgcgactcagaaggtccttgatgggaaactaagtgagttaggtgttaacacagctgctcttgaaggcaccagttctactgttgcacgcaacattcctccttacaataccgctgcaacgactgcaaatgaagcttatcccttagaaaagatcattgaaaagggggattggagttttcttgaagatatttactggcttctgcaacaggaaactgaagcagcaactgaggcttaccctgtatttgtccgcaacagattgtacagattgcgagatatcaaggtaaaattatgactattttcttggatgcaaaatattttatgttagcttgcaccactttcgcggtttgctctgattaaatggattctgaacttctcatggttttatctactgctcagaagattctttatgtatgtatg

SEQ ID NO: 30311 - DNA, 576 bp, Arabidopsis thaliana columbia
ctttaacattcctacagtctaaacttcctcctccaattccgacttcggacctccttttcttaccactttcaaaattttccagatcttgttaggagctttatattagtatcttgttacaagctttctttaatattatcatcaaaaaggcataattacaatgccttgacaccatccatggagaatcaaacatcgttatccgaatccttaaaaagcaatacgaataaaggtcccatcgcgtacaacccacgggcctctctctatttcaacctcattaatcgtcttctccatcaccatgcatcatcatcattaggtctaatatcatgcgtccacaatacaaagacgtgaacgataaattagactcgacggccaagcacaaaaccaacagccatggcggtcgttatgataatccttacgtccacattactagtcccacatcagcttctgataagagtaagtctaaaaaatgattgtctgtgtcttaattatgctgatgataaacgttgattgatatatgatacatgtagggtcgaaggataaggttcttgaggtgttgaacgctgtgggaagaaagtagag

SEQ ID NO: 30312 - DNA, 826 bp, Arabidopsis thaliana columbia
tcagtggtctcagccactgtctggttctgtttctcaccgctttctgtgttgttctcctgtattaattaatcataccaaaagatcataaccggttaagcccggttcggtaacaaaacctaattaaattttcatatttaaaacctagagattaattgttaccttggctactacgttttcagagacaggcttgttaggaacagagccttcttcgttttgcatgtctgattccttgggtctactcgcacagccacccattattatatatttttttggtttttgtgattttgggttgggtttaggctgtggagtgtgcaaaaaaaatttacacaaacttttttatttttctcttcttttttattaatgttgacccgaggattgagcaaatgaagagaacataatcatggttatatagatgaagatgattccgatttttatggagagcctttggtattttttcttgtgtgtgttgaagtattcaaattggggatggctaagaatagagtttagcagagaggtaagagtaaatttagatagatgtttctctgtatttgaaaagcttcattgatatcgtcaaacttttggaagttttgtggacctctctcgtctcttgttgctagctctatttttagccggtcctagctccagaattttaattcgattttttgaattttgtaacttgcaaagataagaggattacgccgtgtaaacgatgatgaatatcctaatgattatgcagctttttactaatacataatttcatgaaagaagttttgattaggtttccaaaagtcaaagaaagcgaaaaaatctaaataaattaaaaaag

SEQ ID NO: 30313 - DNA, 1501 bp, Arabidopsis thaliana columbia
ttctctaaatattggcatttttagtagtacaagtcatggtcttaaggtgtgtagggttaaaatcatggtttagtaaaaacccactttttaaaaatgtataaacaaaaaagttgttggaatcacacaagaagtttttagctttatatattgcaaaaaggcacaagtgaataaaaagctaataatggcacacaaggaccccatgtgaagatttgattacataagacaagaacatgtcctctttttcttctttatgaattggcataacatgtccccgtgccattgtcccactttctccaagatctactctcttgtctctttcccattgcagtttaaattccaagacaaaacaatagtgacccattaagcccatcttcttgatcatgagtgatcaaatgccttagagtcattaaattccattccaaaacaatagtgacccattaattcacaatttcactgttttatcaaatgcctcacctataacatcatctaatgactctaagtcccaagttgtgtgtactgaccaagcatgccaaattttgaaatgcccaaatctatcaatctgccatatgaaggagacaagagttgtgagatatattaatacacagttacattgaacaaaatatcattttgaatctcaattcagattactttaaactactctaaaaacaccaactttcatattgatgaaaatcttaatttcattctcgcctgtctaataatataaactaagacaaaaaatttttttgagaattccgacccaagtaaggttttttcattcattgtttcttcgcatataagactaagtaataataactactattattatgagaggaggaagggaggagctatatgtctactattttgagtttattagccaatcagagccctccatgtcataccccattctcaccgatcttaccatttcatacccactctcgcccatcttgcgtttggcgcgtgaatccaatttctgtgggttctaaccaccaaaacgcctattttgaaccacactcgcccctctctaaaaacgcctcgcgtgcgtgcctttttttcttttctcgttctcaaaaccttattaattccaatgcaaaccgaaacccaaaaatcaattgaaaagttcgaaaccatgtaaaccgaactcaaataaaaaacacaaaagacaaacaagggattattgtcactttcagattgataattttgattcgattccacacagaatcataactccaaaacaaatgcaattgataagagagccaaatttgtttcaagcttttccctaaaattcttagctaaaacccaaaaacaaacacgagcttctttctaggcgaaggcgaaattgaaatgttacctgttgaaggattttcggtctttcgatgtctcagattgcagagacgagaggctcctgcttactttctcttggtctccatttttcaccggagctcatgcggatgagaatttccgggattttagtttactagtcggagagaaacgactgtgttag

SEQ ID NO: 30314 - DNA, 607 bp, Arabidopsis thaliana columbia
catgtttggtgaacaaaacagcattgtacaatgaagaaatgtgagaagggagaagaaaagaaatgttccttagagcaaggtatttagtcatcgtccttgaactccctgaccagaagaaaagaaaagaaaagagaaatgtgttagtatctctacaatgtgcaaaaaacagagtggctcctgattcacagtaatcgtatagtatagtaccttcgatcaaggtatcgaggttgaacaccagagccttgacaagtagtgcaagttaaggaaccagcaccatcacagttgatacagtttgagacttctttctctcctccaccaagctctacggtcacattaccacttcccacacacaatctgcatttctctgctccaccaccaaagaaactatttcttcagaaacatcataatatgtttataaacattttcgacacatcaaacattttgctcttacacaaatccaaccaaaatgctaacaaaaagttgagagagatcacttacgagctccggtgccattacagggaaaacaaggttgagtatttctcgcttagcctatgaaagtgtaaaatcaaaacagtgttaactttattcacagcaatgcctcacttag

SEQ ID NO: 30315 - DNA, 585 bp, Arabidopsis thaliana columbia
cccacatatataaaaccacatgcacctacagtatataggtacctttcttataatcagaatgcttacaacatgcaagaacaacaaaaacttactaataccaccacctttttctatgtctgccaccaatttgataaaataaaataaaaaacatttaattattgtgaatttggtaggaaatttttattaaaaaaaaaacactagagttttcacaagaaccccatgagatatttatttatagagatactaataataattcaaagacaaaagtaagtacaatattgacgtttgaagctgtcgctaagaatatacagctgttatatatacatgtttgtgcgtatgtgtttgtatgtatatgtacacacatttgatgctctcacgagacgaccatgacgactaggttctcaattggtacaaagtcgccgcatccattttattgtttgattcctttaataaaaggaacatactgtatactatattgatcaccacaatttgtaccttaagtttgagggttttagttggtacactaattataaataagggtaataacttaaacaagaaaaagaaaaacagacctgaaatcagtgt

SEQ ID NO: 30316 - DNA, 522 bp, Arabidopsis thaliana columbia
aaagattacgatattatctcatttctcgtaagaggaaggttcactcaccgatcttggtaacaccgacggatctttatctgaaaatattcatgtaaaaacaaaattctaatcaacgaaaatttggaagataataatgttaagagagaattgttaatggagatttaattacctctagaggaattgaaagatcttttgcagtgtaaaatggcactttgaatactatcttgttgttgaagaagcgagtcgtcgcgtcttcttgactcagactgagtcgttacagtcgccgtagtagacgacggtgtagtcgctgttgaagatgacgatctgcttttcccgagatgtttcctcactactttaagaccagctggaatgttgatgttgtccccggtttattattagtcttcgtagccaccggcgaatctgctttctccgccgtggatctcgcagacgatggagctgttagttgaccggagtgtcgtaatttctcgccgtaacgacgtgaaactctgatgtaaagtggtt

SEQ ID NO: 30317 - DNA, 557 bp, Arabidopsis thaliana columbia
aagacaataaatagcttacactacgaataaaattttgagaaaacatgaaattcaggtaattaataatattttaagaaaaaaataactacatagaatccatgaattgataaacaatgattttttatttttttattttaaaagctttaaccttgttaaaaatcgttgattacatatggatacatgatagaactaaatttgctcgatttagtaagtggatcaaacagttcatcttctttccgttgctatcaatatcaaattatagaaactagaaagtactatctatccttaaacgtctcttagtttttttttttttttttaatgtatcttaggttacataataacaaaatgtgataatggctcgtaaaccagttaatatcaaatcataacaaaataagaacttcattttaattttttgttatctaggtggagttacgacagttactaacgggtcttccctaaatgtgataatgagaatgatgaccggaaagagattcttcgaggaagatgatggcggaaaggcggggataagtttggagtccgggaactagtggcggaga

SEQ ID NO: 30318 - DNA, 555 bp, Arabidopsis thaliana columbia
tcccaaaagaagtgatatatattttaatttggtagacctttttttttgctaagatatttgaccccaaaaaaatgtatatcaccccaaaagacgtttctgtagacttataattattattagaccgcaatcattttttcttggtatatcaaatcctccagacatacatttatcagtgatcttacaatcacatttttttttgttaaatggtttttccttgtttaatagttaatcaatgatcatactagcttcccttaatcatactagctataaaattaaagatgaaaaaaggttgtgcctttaaaatcaaatcctccagacctatgctataaaatatccgatacattttaaaatataatgtcatagtcatggactcatagttcaaccttcactagtattaaaagtcagtaatattattttgaaagaatacaaatagcaatagtataatgatagtagcattaattattgattgaatgaatcaattattattttagctgaacaatttttgtgacaccgtatctcctagaatcgataaaaacttttaccaaaatctcaatg

SEQ ID NO: 30319 - DNA, 463 bp, Arabidopsis thaliana columbia
ggcttccatttccaagtgaatcggtgagagactcctcctcctgtgacattttgccttaaaagtactacttttgcatcttcctaaaaacaactcgtctggcacaaaattattggagaaaacattggaagtacttctctttcctttatctctcctacaagattcaattgagcagcctcccatgccaattgttcacttctagcatgacttaaaatacctaaagcctctatactttaaaatactttcttattccttgatttctataaaagccaaagtctccaaaaaagctatgaacatgatcttcttctagaccatgactgtccacctgtccaggcttgcaaggcgtttacagtgctgcgatgcacctgagatattaatggctattccgactacaacatataactaccttggtcagttaaagctaagaatatctatggggaaccatataaaaaagcttagaagttat

SEQ ID NO: 30320 - DNA, 635 bp, Arabidopsis thaliana columbia
gaaaagatcagagcaggtaaagatttttaaaattgtgtcttaaagatttcaaaaaattctgaaaaagttttgctaatgttggtatgtaatatgatgcagatactcttgttcaattgtatgtctgttcgtgacccgagtttgcttcttccgcgattaaggagtaaatgcattgatcaaggtgtttttaactgtttatgtcatgatagaaactttataaagatgttacaagaaatatcatttgagagttttttcaaattctcaggagttgatttcaagagagccgtttttgtgccaaacgtatcagtgtacaaccaagtgggatcttcgacaaacgttggcacacgtgtcgagtcgatgtcgtggcagttcggtcttcagaggatttgggagagtttagctcgaggtgaagcaaaatctaattcaaaaagtgattctaaaggcaaagaagaagagaagagtttcgttttctcgtcacttcctgtggctgttgactggctccgggacaatgctcgccaaagtaaacaagttcgttttcaggtaaattcagtgtgttactttttacgtataatgttggtttcaggtgacacaaagcggcctaagtgggattttgttatattctgggtgttaggtgttgg

SEQ ID NO: 30321 - DNA, 611 bp, Arabidopsis thaliana columbia
atttcttgattccgtaacagctctaggtccatccatctatctaaagggtttaccccttgatgcaacacctgccttgcttgagaatgagttccagaaatttggacttattaggaccaatggaattcaagtgagaagccagaaggtaaaagagtccatctttaaatattgctcaacagttctaatagtaagtaattttccgagtatttactcttttaagtattgtggcctacagggattctgttttggttttgttgagtttgaatccgcaagttccatgcaaagcgctatcgaggtaagaaccaacggtattacgtctgaacttttcaaggccctgaacatcttaggctaactaactgttacggaaatttccaacaggcatcacctgtcatgctcaatggacacaaagttgttgtggaggaaaagcgatctaccgcaagaggcaagttttcttaaaagtttgagaaacgaactctcaggatcttaattcttaagtcagttaccatatcattcattgttgaaacagggaactatagaggacgttcgacgtttggtgtaacacaggctacagaaacgaaggaggaaggggtcgtgggagctttggaggtggaaga

SEQ ID NO: 30322 - DNA, 828 bp, Arabidopsis thaliana
ctggttctatctctactcctacctctctcattggctctatcccgtaaataatctccttccctctcctttctcctatccctatcaatgctgcgctctcgttccttctcttttcgtctttcacggtcttactctatctcccttctcttctctcgttctctttccctcctccgatcactatctttatctctccgcttacttccttccgaatccctatctcttatgcttccctccctgtccatatctctctccttacttctatctctttccaagacttctcgactatattgcctgtcattttcctcatatcgcccacgtcgatgatatctttcctcagtcctaactgagtcaactctgtcatgatgataatccctactagaatcatgatgtcttcctctgtccgaaaactcatcctccgcaaaccttgacctagaagtttctctctcccgatcatgtgacttagatctactccgggcacggccttcgttagactgcctgctgtttgacggagaaaacgaacttctgccattatcataacttaatttactaactctctctgaaggacctccagcttctttatcccacctcttatcctccctttcagattcacgagttagaacaccattagaactcttttcttctccttgacgccctttttccccaagtggaggctgaaagatcgcaaaagatattcagaatacttaccagaagagaaatacatgacactaaaaacgcaagaacatacaattaaaaaaaagggaaaaagaacatctacataaaaccagttcttacaaatcaagcgaaagcatcagtctccattgaacgcctagt

SEQ ID NO: 30323 - DNA, 583 bp, Arabidopsis thaliana columbia
tgtataaccagataaactacactatacagttctaattttaaccaatagagtgagtattaaccggatccgcaaatggcaatcgcaagcaaattcacaattacagatccaaagacgatgcaaaattccagatctgtgaagaaattctggcaaattaaatccaaaattcatgcaaaagtaagcaacgattttatcgatccacgaatcatacaattcaatgtttgataacacaaaaaacaatgacctgagatctcgcttaaacggaaacctaatcgagaatctaagatagatctctatacggaaacttaagaatcggagacctttagcgaatctcaaatttggagagaaggagatgacgaatttcaacaggataagagattaaacgatgcggaagaaggcgcggaaaacagtaccggagagaagcggaggagatcgccggcgggaagagagagctccgagcttgaaggatgatgatgtacagagaaagggaaaaagtgagattgcttctacaaattgacgtacgcaaagaaagccaaagaagaagactcttttctttttgattttaacttgcggttggattctatat

SEQ ID NO: 30324 - DNA, 428 bp, Arabidopsis thaliana columbia
cgccggcgtcccaaaaaaaaaagatgaataaaaaatgaaattacaacaaaatgtcgacatttagttggcgtgtggctacaatattcggaagaattgtatcttctatgccaagactctaacccgtttctcaactgcaaacttcctcacgatgtcgacattacttgtatctttctccaacttgcttttgtctgatttcatcatcagatggatctgtctgattctcatatttaattcccattcgtgttttttcggattgcgagaatcctacgttatttcttcacttttcatgatcccgaggacattttagaccccaatgttcttcgtcgatgttcgtaatcaatcagaattttgattgtttcgattgaagtttgttgttttgattaccgaaactgattctgggttttcttatttaggttctttggaaactg

SEQ ID NO: 30325 - DNA, 478 bp, Arabidopsis thaliana columbia
acgtagtttaaataaatttatctttgtattatgctttagaaacattttaaataatgtatttttgaacttctcgtgttaaatttattttctgtaaatttctaaaacgttttcatgaaatttatagatagtaatcaaggaaagcattaaaaaaaagaagaagaagagaaacattgcattattatgtttgaaaaactatatttaaccgtggttagttagttacaaatgattgatattttaataggaaaaaataaccagcattaagaaagtcatcaaaatgaaaacatttccccccaatttggattctaacacacgagggagaaatatggtaaacgttttgcatcatcactattataaaataaagaatgaggaaccgataatatgtctaaatgagaacagcgaaatctatatgaaaacatgtaattcattaacatctagtaaatacaactcagtatctagtacatagttcacacatgtttga

SEQ ID NO: 30326 - DNA, 594 bp, Arabidopsis thaliana columbia
tattgatataaacgcatgtagaggctgaagaaggtttaagattaatacacaatttcatttaacccaaaacaatgtttgactcagtttcctctgcattgcgtgtaccggtagtttaacaattgttggttggagataaacaccgatattttgtagtcccgaggcattatatgtcccatagaaaccgctgaactggcgaaatttccctagtttgaatctgaactgttgttcgtgattccaaatcgaagactgagagctcgagccgccaaaaggaccgtactgattaaggttggtagcaaatgcaagagaccttatctgagggccgctagcgccatcggacttgagatactctccactaattcctgttatgtactcatgtgggcagttcaaaagtatctgcatagcccaaaatccacattttaatttatattaaccatgttcgtgagatcaatatatataattaagtacattaagttgttgttagtaaatttcgaatctagtgattcgtgtactaatgaagaaaaacaaaaacagaacacactcacaacgtcaaacatgctgccagtattctgaccgtggcaggaggataagaaaatg

SEQ ID NO: 30327 - DNA, 596 bp, Arabidopsis thaliana columbia
tcaaaaacaacagactaaagattttggagaataacaaacgataactagcgacatactgttgtgttattaggatcattatctccagcatttgctccttgagtgttttgatacatagctgcaaataacagatgggtgagctcaagagagatggctataaaatttctatggatactgcataacgccccactcgacatggtgagaaaactacaaaactaaactgcagaacaacagacagttcactcaaacaacgtttgcaaaaatcattcacatcaacacctaagaagataccagcaaagaaaccaaataacatacagagatcaagatcagaaaaatctgaagtcagttgattattgatgtacaaatcgttaagcacatatcaaacggtccatgtgagacttaacgccgaagcatagaataacgaaagcaaactcttcatcctacatctaaatttcttcaatattagaagttcctagtaatcaacttacataacaactccttggccaacgtttaatagtataaatctagagaggaaaactattgtcaaaagatgaaaaaatactggcaacagtctgcatagagaagaagtattacctttt

SEQ ID NO: 30328 - DNA, 470 bp, Arabidopsis thaliana columbia
ttctagcttaacctagggtttgaatgagaatttaagaaaaaagaaaagaaaagtcaacaataaacaaatcaacaatgaaaaccaaaatgtattttcatatttttctcaacataatttaatatcacttttgagtttttttctagactttatatgaatcaaattcatagaacgggttattggatagtaagttaaatcgtagtggtagttacgtggattttggtagattatggatacaaatagagagttacattaccaaagcaaaaatcaacaaaaaaaaattccataattatgatgtcatacaacataaaaataaaatattacataaagcataaagctcatatctatgaattataggtacatatgacgtacacatggaactatcaataacagcacacacatcatcgcaacactttcagatcgtctttgaggtcattctgcggtagatttcgtcgagttgcacctgtataatg

SEQ ID NO: 30329 - DNA, 1143 bp, Arabidopsis thaliana
gaagagttcggtataccgagaggtgaaaatctagtttattacaatttaagaaacgatattttatggtacagatgtaatttactaagatatgcttcttcttctttctgccaagaactatgatttgtacgttatttcaatattttgttaatatttcaatattattctttttgtttttgtttttgctaggcttgttctaaacttatcctttatgacctcatgggtcacagaaacatgttttctctgtgtgtcttggcttttaatatttaaagaggtttttccaaaatctttaaacaaaaccaattatatcttactcaaaactaaattagtttccttgccattgcccattgatagaatggtagagaagttgtaaatgaaaaaaagaactcggcagaatgattaagcgacaagagctagattcaactacaaaacccgcataaagaagcttttacattcataattgacatttatcttgcggaacaacggatacaattctatgaaaattcacaaaattattcatcctcgtcgacatgtttatctttctcattctcttcctcttcgtcatggtcgtcctcaggttgaaccaacttcaacctgagtcgaccatcttcgcggcttgcacgaaggaactctctccttggaatcctaacttcttccaacacaagcctcccttcttttctataagtcttgaagctcatcctagtcatcgccggaggatactctttccgttccttccttcgtggttcccactcctcctcatcgttgcttccgttatctttacccttcacttcaatctcatcatcatcaccgtcaccatcaccgttgactttttcatcttccaagccgtaataactctctgaccctagaccttccgtacacagctgaagactgctgttctcggctgaggttttctcgtaagaagaatgggatgattctctgaaatgaagctcaccgaatatctctgtaaacggcggtggcgtttcgtcgtggtgggttgtgacgtggaggcctttgcttgggttccaaggtgaagaagaggagagagtatcaagaaacgactttggagagttgtcttgtcttgggttatcgaatattcggtgaaagcttccataagctgccattgttatggagaaagaagagactaag

SEQ ID NO: 30330 - DNA, 426 bp, Arabidopsis thaliana columbia
aacttctcttatctgcttgaatcagtttttgaagacttggatgatattaccatgcccacataaccagcgacctctagtattgtgctaaatgtttttccagtcggagcactatacactgcacctatctgataaccctttaataggttgtctgaattcgacacgccagccatcgtccattactccctgcctttcagatatgaactgcctgagatttagcagatgcatctcacctggatcctaggatggtaatctcatgcgcgatctactatcggtctagcataatgggaatccccaacctaggtcgtgcgcagcccacgcatccatactcataccagtattgcgcgtcatctggcctgaagcatcgagactagcatgtccttaccgacacttgagaagcccggtgcatcattgcatactcacaggagt

SEQ ID NO: 30331 - DNA, 593 bp, Arabidopsis thaliana columbia
gaataataattgtatctttaatcatatcatataaaatttaagcattacaagtaaatacgtaggcacgaattaaataatcaatacaccatatgattgcgtctatatttaaactgattggcatcgtaacacacaattcccctctccaagcaacaatctaaattttatagagaaaaataaaaaagtttttctttttctttatagaaacaataatatgttgttagggaatcgaccacggcctcaaatgcagagaacagcaagcataacgaggatcactatcgaagttgatggtgatcagaccgccggccaagactctgacgtgtctatgacggtggttgacggcggagaaaattacgcccagcggttcttgtcgccggtaaatcaccagaggaacgagagaaaatacggtgggagatcctcaccgtcgtcttttcttgtaaactgtggcttttgcaaacgcggtcttgctccgggtcgtgatatttacatgtacaagtatgtttacatatactaactactcttttcttaattatttttcatttttacaagtcttcagttttaagatctcaatttataatagtttaaaataattatat

SEQ ID NO: 30332 - DNA, 343 bp, Arabidopsis thaliana columbia
tatatgtgtaagcatcaaaataaccaataagcctcatgcatgacatagtatttagcgtttctacggttaaaattcaaaactgaagttgctgttatattattattgccgattttcctataaaaagtttcactgtcgttaatgcctaaaatcagatgtaaaaattatgttttcctaaaaaaaagtttcaatgttttacgttaagctagaagcgatcggttgtagtgatagatttcgaataagtttttagataagtgatatattatcgcgaagagtaaagttaaatgcgagtcaacgagaactggtaagagattagactgcgaccggtctatgtcccacacttaaa

SEQ ID NO: 30333 - DNA, 547 bp, Arabidopsis thaliana columbia
ttgttgtcgatcctaccaaccgagagaagggttgctgctgcgtttggttgttgcggcttttgttaaaactgttgctgcttccaattccagatttagggtcagagaaaggagaataggcttgagctagctcaagagcagaagctgcttttccgtgacgaatccctgttccatttggtgaatccagtttctggggaaccggctttcgccatgtctctggtgatggatgtcttgtcttctcctgagtctgctgttgctgtcttgcgctcttgttttcattttcacgccagtttctcctctgagtttcggatctggcaatgtcgcttacatttcgcccatccttttggtcgaatttcctcgttctcatgtcacgtggagaactcactggcctttgacttgcatgctctggaactctttcaatcggtttgaggaccatccttttgatataaaagaaaaaacaaaaacagaactttaaattagatagttggtctcaatggaatcgtaagtgttggatcgcagaaagtatacacagaatgtgagtgggtagaga

SEQ ID NO: 30334 - DNA, 553 bp, Arabidopsis thaliana columbia
tacaacataaataaaaaagaaaaataactttttcttttattacgattgcttatgtctcgctccaagtatataaagatgtataaatacatgcaattatatgtatcaaggactataggttatgtgagaaataacaataataataaaaggttatagtcgtatttgacttttccaaaagaaacttctcttcttgtcttctttaaatattcaaattcgtcttcctctctttcgttaatgtgttcaatttaaaattttgtacctctctgtctcttcgttgggaagcttcgaaaatggcgatgacttgtacggaagacgatgacaaaacccttttgatctctcatcgctatcaagaagacgacgatgacgtagaagaagaagaagaagaagaagctttgtctctgtgtgatttgccgaacgagaagggcgaatctacgatcgattgtcaaagaagaagatgaagaattcgattccggatttgaatttggaatcgggtcatcgtttcgagccgggtcggattcatgtgaaccagctccggagatgagtacagctgatgaat

SEQ ID NO: 30335 - DNA, 585 bp, Arabidopsis thaliana columbia
gatacctctcacaaaaaatgattgtcaatcctttaaataacacgttattcccataaataataactagccaaaatacatctttttactcctaaatttactaaaggaaacctggttacgcccgtaaatgtttaaatatttttcatatctttatttatctccatctcggatatatttaaaattattttttttggatactctacattagcacataattgaccattgtttttatatatttacaattcacatttttttttacaatccgtgtttgatttatactaacttgaatagttctaaagtttgtatgaaacggtaaaataaattttgaaaactataagacagttgaagaagcattataactttgtaccacaaattgtaaagcttgtatttctaaaacattgggagaatctgaataatatatatgttactaaataacttagactatataatttgacgttttacatttttgttgactgtatagtttatgaataaaaaatgacatgacacaaaaaaactaatacaaaggagaattaaaacacgtcttctttcattaaaatttgcatcatttctcatacagtttttatataa

SEQ ID NO: 30336 - DNA, 604 bp, Arabidopsis thaliana columbia
caatgagggaacgagctattatccatttgaaaggcagctcagtgaagttagtgaatcaaaagttagttctattcctgatactgaatctgtgtgcacagtcctggaggatgacgaaaagaaggtggatgacaataatgctgaccgagaaaccaaaattgctaaagttgatatggtttctgacaatgatgaagaaaataaccattcggcttctgaccacgatgaagaaaatagtcattcagcttctgaccatgatgaagaaaaaagccattcgtccgaggattccgatttcgatgaacaagctgatagcaaaaaacttcaccatgatgtggctgagatagtactaggaagtggtgaacacaccatgagcaatcggacatgatggaaggagaaacttctgataagggaaaacttgatgaagtcagtgatagtgattcatctttatcagagaaagaagaaaagatacgtgatatcagtgaagatgaagcaatgttaatttcagaacaagtagttgatcttcatgaagaattaggggcgtcttcactgccttcttttggagaattagaaatcaatatggctagaggggtggaggatgattatcacatga

SEQ ID NO: 30337 - DNA, 342 bp, Arabidopsis thaliana columbia
tacatacatagctgactgctgacctagagactatctcggcttccgctctcgctagcggttccaccttcactaccgctttttctgctttcactggtactactactaccgctaccactactctcaactccactttcactactctcactttctctcccgctacctgaactcgaactctttcgagactcctctctcgcttctgcatttacttgcgctctgagtgcttctgccgcgttaagacctttgtaagattcgtcatcattaatgtctacaactgctatctcatcatcttccatttcagcaggatgcggaaggttaatgtcaatgtcaaggccacccgtttga

SEQ ID NO: 30338 - DNA, 477 bp, Arabidopsis thaliana columbia
gctcttttttcaaatatttcagcgacattttagtagttatgaggaaacagtagtagttaggcatggactaacatatcaattggcgagacagcaaaaagacaattagacaagacacggcacgaaacatacattatagacatagagtctacgacctaacacgtttgcgatgctctctcttattacctaacaattcgcctgcttacctatttccttaattacatcccaccatttttcacttccaaacttcaatttgttacggcgtaacgtaaatgatcttgttactggaatacacaaaacgtataaattttcttaatattctgataacatttctttctttccaattatgacttttaaaaaccactaccaaaactaatacaacctcatatttactgtctttcctagaatacacaaaaatacacgttataagatttcctataatgacatgaactgatgagattctagccctaatcgttatta

SEQ ID NO: 30339 - DNA, 359 bp, Arabidopsis thaliana columbia
tgtgaacctggtttcggcattggagcagtgttctatagtatgacaaaatcaaattaattagtagcgattaatctctaacgtaatgtagtaacgtataacgaatatagatatgcttctcatactttaatggtgaggtgagctgcctggaaatattcagcccagacgataagagttgcactctcaacggttccgtactgagcggctgtcccgtggtaagtcaagaccgtttccgcaccaggttgaccaagcaatgtaatgaatggtcgagctatgtcgattgtgaccttctcattgtatacaccaggagccaacttgatgatcacacggttcttgtttcctgtcggaatgctcttgatagc

SEQ ID NO: 30340 - DNA, 408 bp, Arabidopsis thaliana columbia
ccccttggatgattcttcatctcacttgatatagacaatatgcttgtttgtatttctgtaagttactattttcggattttattctatttttcaaactagctagatacagattttgttacatgtgcatgtatatagatgaactacgtacgtcatcgttatagattcccttaattcgtttattcatagtccaaaacttctatataaaactaaattttgaaacttaacttggtttggttttcccttggagagttctaaatataaagaaaaagcctaaaagaaatttagtaggttcttcggttgaaactgggatatttttactaaaaataattctacgaatgtcttgacccttgtttcattcataccgttttccaaactaaattcagtttgccacatatatatattatcatt

SEQ ID NO: 30341 - DNA, 400 bp, Arabidopsis thaliana columbia
catagaggatccctgaggatctaaagatgtacctgagcttgccttgcagcaccttgcagggcattttccaacatttttatttcctttttggtcttctctaattccagaataacatcagcagagtcggaaacatttgtcgcagagcttgaacgctggctttcatttaactcactagtatccagtcttgaatctatttcacgagaaacaaaatccacaattctctccgaaatttcatctgacgacgatctctttggtatagaagactcgtaaggagaaccatcagactcaaaaattaaagacggatgagcaacaggggactctatcctatttacatgattgatatctggtgaaacttcaaaattattagacgaggttcaccttccagattttacccagaatt

SEQ ID NO: 30342 - DNA, 556 bp, Arabidopsis thaliana columbia
ccttccaacactgccttacagctctgaattggcaattcgccacgaacctaataatccatcacgaggcaccgttgaggaactcgaacaacatatacgcgtgattggatagtagtaggaagagaaggtggtgtttgtgtgtataccaaaatccaagagagctcgtagaggaaacgaagcatcggcacagagctgggcagcttggttccatagttgccattcttaccttcacgaacaaactcctccgtcacgtacttacactccagtagcggaagagacatcttaaacccctttcgtgtgtatgtatgtatatctttcactctcctcccttttcgaaaccctagaagattaagaaaatagggtttagacttcgattggcgaccagaaaataagcattccgataagatgaaaagggagaggaacgaacaattttgatcagagaagaaaaagagaaattagggtttttgagagattatttgatttggtggaagtagattgaagacgatgatgatgacggtgtgcagatgatgcaaatatgtttttgattttgcagaagagg

SEQ ID NO: 30343 - DNA, 604 bp, Arabidopsis thaliana columbia
catgttttaaatatttttatgtgttatttgaatcatggataaccattgtaaaatgctcaaatgtctaaatgaaaaaaaaacatatttcaatcatagctctactcttgtattatatggtccatatgtttaacatgtgctcgctacacagaattaaaaacaaaaaaaaaaactaaattccaacacttaggcattttgttcatatgtaattatgcatgtgaggtcgaatatctaaacaattttgattagtggttttagtgaggggacctgtctgatggggtagccatcggattcggcgatcgctaaattccgtgatgccatgggcccaagcccaataccattcaaatgggaccgacctctcttctaattcttagaccggaaaaaatcttaggaccccaaaattgatttcttcttcttctactccattcaattcaaacattgcaattgtatcacgatataaaaaaaatgtttttaaaatccaaaagatatctataagaaatgtatagataattctgcgaaacggttaaattcgaacgcatatttaacctaacttagtgacgaaatcggttctaaatctttagagaatggatgcatagagtaaaaaaag

SEQ ID NO: 30344 - DNA, 566 bp, Arabidopsis thaliana columbia
agtggttaggtttgcggggaaaagaggagaagtagctgacaccattcaatttgaaggcgtggctcgtggcgaggacatttgtggtagccattttagttaccaacgaaaagaataaaatgaaagctttaagataaaaccaaaaaaacgaaagctttgtttttgtcacaataatgggaagcttaatttgaagtggtcttttttagggctttagtgggagtgtatatatagagaaagttattagttaggaattaatgtggttaggtcgcggatcacatgtggacctagtgaagctgtgttttggcctcgtggaaaaatcaaaaacgagttatattttgggtgtgaggatatactgtacaaatatagaaaaattccattagaatttaatgccataggtttcgggaaatgtgataacaaaatctgtatattttatcagtttaattctgtaaataccgaagcaatttaattagaaaattcgcaattaattcttaaaaaacggggaatgtaaaagtttttctgcactttgttttcaaaatagaaaatattttatttgtttcaaaatataagat

SEQ ID NO: 30345 - DNA, 499 bp, Arabidopsis thaliana columbia
  unsure (1)..(499): unsure at all n locations
cgggtgccttttcattttctcacttgaattgtcctttttaacaaataggtattattaaatcagagttaggaaattgtactgtacctttctttttaagtttgtgtcagcaacttgtattttgcctctttttctgatcaaattaataaatatggattgcacgacgagtcttttgacacaatctatatatactgtcagagtgatgacaattgcttggaattaatcagaaattcatttgtttaatgctctctaacaaacaataagaaattcaatataacttcagatgagaacaaatcatttctatcttcactggatcattcttttctctcgaaaatgttcgatgccacgatctcaaaatgtctgcagcttctatatatgttcttccgtanactanattcgatcaagttacgatcggataacgcgagtacccctctagctcctagctctactcgattttctatataaaagaaaaacttgacganaccatggattaatatatata

SEQ ID NO: 30346 - DNA, 477 bp, Arabidopsis thaliana columbia
caaccctaaatctgaagaaagttagcacgtaatagtatgttatagaacagtgaacgagatattgtaatttacaagtgaaatagaaacgattgaccatatgggatacgaagatcacgaatccgtaataataatacgaaaatcaggtaacgcttggagaaataagtacacgtcacattccaaatttatgaaaattctatttgattctttcgccaagtaacccactccaactataatatcatgccatcttcgtgattatcatattcttaaccgttcaaattcttttctttattttctcattccattttttaaaaaatcacttatatgtgtttgtgaatcttgttattaaaatcgatcaaaaagtaaacaattcaaagaacggatttcgataagaaaaggtcgcaaataactgtttggggtttattaggatttgtgtcctttaaattaattagctttggagtttggactattaaattaagt

SEQ ID NO: 30347 - DNA, 566 bp, Arabidopsis thaliana columbia
tcagaagtgtttggttttggcgagttattaccaaaaccaacgacttgtatgatgcgactatgggagaatgacatattaagttaatatctatattgttgtcttatagaaaatgtatgatgcttctaagttttaaatacggccatttgttgatgttgatagatttgatgatgtatataatccttctagatgaaattgcaacgacattataatttgtaagataccagaaactaattcctcttttttttttcttttgcaatttgaatatctataaaattttggttaacaataaaagttttttttctaatcaaagaatttgtggtctagtagcaaacctaggtccgtccaaaagattgtatgatttaagtttccgaccaaaacgtttaagacataaaatatcatatagcttttgtccttaggatacacaaataagacaactccagacatcaaaacaaactatccaaattgtttacaatcaaatcttctctttgtttttaggctttgaatgagagaattagattttctcccataactatattcaatcaatgcactacgggtttcacggatgg

SEQ ID NO: 30348 - DNA, 648 bp, Arabidopsis thaliana columbia
caagcaaggccaaaacatccatatctcaagttccatatataataaacaaactcaccgaacacatttctcacaatcccaaatcaaaacttgttgtgtaaatgatccttgtgtatataatctgaatttctcttgaaactaagtctatatatttccgtgtatataatccaatacatgcacttttgtatattgtacatgcatccaaatcttcaatttttaaatttatctataaattaatgcattggattttatgtttttttcattcatgaatgtcaaaaaatttctttctttttttgactcactaatattttcttcctttttttcaataatcagtcaaaatttcaataatcactaatatttttttcctttttttcaataatcagtcaaaatttatcgataatttcttttcagcattgtcattaatcagttagtgccttagtgaaatgaaaaatgttgttcatcaatgatggacaatttgaattttttgttatttgataatgaatctaattatagtaaatcaataactgatgcattttccatttgacattcagttattgaaaaagtgaatttaaaacttatataccacatcgtatcagagccttaatcaaaatttttatgggcccctatgggttaacatattttatgaagtaa

SEQ ID NO: 30349 - DNA, 563 bp, Arabidopsis thaliana columbia
atgatactgttactaatcacaatataaattggactaccgttttacaaggaagggcttctgagagtttgctcctcacgtgcttcttgcctaaaacggaactgtgtcgttttagatctagttctagtgttagaacacttgaggaaaacttgggaacaaagatcactagattcgtgtcttcttgttgtacaagcctatgatagaacctgattctagacttatagtgggttcttgctcatttacgttctctgcaattctctgtttcttgttctgttttcaagtcctcttcaaagttctttacaaacgagtgctaatcgaaaagagatagtgagttttataaactctatacctcacactgaataatttggattctgaatgttttttttgagtctttgaaattgttctgtttattggtataatttcagtgaagtattaaagattcagtgagattgacgttaacttataacttgttgttgcttttgtattttgacatgtttcagaacatggtatcgtctcgggccgttgtgatggcattatggtattggcacagtgcagtggttggtttt

SEQ ID NO: 30350 - DNA, 525 bp, Arabidopsis thaliana columbia
atacaagactaactttattccgaaatcgaatttatgatgagattttagtgagaataataaaaaatggcttgatggtacgtaaagaagccacgtaatcctcaacacaacaaccatatgagattattctggagatataccgtacgatctcgagtgttctacttttattatgctgattatatgtcaatgggtggggtttaattaaggttttgaacctatgtcaaatgtatatctcgttttagcagcttcattacaagtaactttcatcataactagatatagtttatcctatgtattaaaaaaggatcacaaagcagacatttttgtaagcatcaagtcatcaacacataacttatgtcctaatcgaattctgctagtcaatacaattatcatcccatgccggccttagatatagtaagatccaatgggtccgaactttccaattagaaaaccaaactatgaagatcatgagatatatctctttttgataaagaaaatatatggccgtactatagagacatgacatga

SEQ ID NO: 30351 - DNA, 1050 bp, Arabidopsis thaliana columbia
tgatgatttaatctatttagatcggtttagaaaagaaaaaaaaatcttcaattgctacatatgaagattctgctataaagtctcaaactttatttatttgtagagtaaaaaaagatcaatttgtccaagaaattgagataaaattgagaaaaataaacaaaaaacaaatccaatcggaattaagaaaacaataaaacacaaaaaaaaaaaaaaaaaaaaatcttacatgaacacaagaattaaaaacataatctataaaaaaaaattctcaccattgatgtaaggagaatgagaattggagaagaattaaaggatctgatgaagaaacatcaatgtcgtttatgttttagagaaagtgaatttaagagaagccaaaacaaaaaaaaagagataaactataggtgaagaagagagagaggaatagcagattgtttaggaagccatgggagaagaaagaagaaattgaagaagaagaagaagaacgaaatacataattaattaattaaattaagtatttaagaagataattattgatttttgtattattattaaaatattaataaggaaaaagaaaaaaatggaggaaaatggttggttgtggtggggaaggcaacggtggtcccttaagagagtgatattaaataattctggttttcttaccatttgaaatgacggaaatctccttcgactattgttttatttaccggaagattctactggagaaagtctttttaagataggggaattgacgaagtcgttaatgggctattgggctttatgatgttgttgggtctgttttattcgattccatgctcagtttcggttcaacttcagcggtatggtaaaactaaaatacctaacaagtattatttatttcatccaaattttcttttcatgtaactttcgacatactcgggtatattaaacaaaacaacataaaacattctgtaaacggtacgcaaacttttaacatctattatcacattcacagacagtcaaagatggctacaacgctcttatggctcgacaatgatcttcccagtagcatga

SEQ ID NO: 30352 - DNA, 1274 bp, Arabidopsis thaliana columbia
aggaagaggatctgccacttacaataccccgtcgcgtataactataatgcggaaccttaattatgatccacaaagatcgactgctctgataccatgtagaataaggtattgaactgacttgattttattgattcacaaactatggtatttatatacaatgatctctatcatctgtaattgttctaggtttcatcaaaggtaatccaagaaaggaagaaaagtttcaaatcacttaaagaaacaattattgggacatgaatgatactgctttgcttgttctaacaggttatgttttcacatgttctggttctgcgtataaggctgttaagatagctttgttacccgcacataattatactcagaaacaagactgagaacctattttatcacacatcaattgctatacttcgcaaattatatgatgggctttttttatatagattatataattaagtgggccttccccactacccatgcatacttttctaatttgatatttaatttctcccacatcgctaatttgaaaacaaatgttgctgtatatataagattgagagagcaacatgtgtcacgaccttacttgaacaggatctgttctataggctcgtacctctgtttccttgatttctcaagagacaggccctttaccctggttgatgaaccatgaccgtgcggctagagcgtgattgacggctacgatcgtcctcggacgcattcggtgctgtagaggatcgttactcggttcggttctaccttgctggggtggtcgcacggcggtctgacaggttttgtagttactttcatttgtgtgtaggagtggctgcgttgataggagaacattccttcttgagaagaggagggaagaacggatttagcggaaacatttgtggccaacattttacatccacagctgaaaacgccttgcagcacatatatccaacattaccaaactttcctgtgaaaactgatttgtagatttcagttacgcaaccttcaacgttaacaagtgatgacaaacattttgtgagatcgatcggagaaccagggatgacaaggaattgaggtttcgtgtgtgttggtgcgccagagatgatgcgagacaaccatccttgagaagaggagggaataatggattcaacggaaacatttttggccacactttgcatccactccgtaaacgccttgcagcatgttggtcaacgttttcaacttacacttaaaacagatttaagatccgattttacacttgaatgttgggagtgatgcacattttg

SEQ ID NO: 30353 - DNA, 565 bp, Arabidopsis thaliana columbia
aagacttttaaatatttagagatattttttcttggctgatatattgtcctaaaacacataagtcacaaaatgataggttaatttcactatatcatataaatctcatagagtttcactatttcaaactatttttacatattgtgtgtacactttaagaatatgattgctacaaatttggcgttaatattttagattaatggtcgctaacaccaacttgtctcccaaatttagagttgaattcaatggcaataaaatagacataatttaatcacggaaagagatatcaataaactaataagattatatattacattaaaaatatatgtaaatataattagaagcgataagaattacaaaattatcaagtgattattactttattagtctagtgatagtgagtagtgagtttcttgaaagagtacaaaaacattgacaataatgctttcggattatttttgaaagaaatagtctaaagacggcatctagatcaaatggatatcataaacttttgatccgaatgttgcggttatcaaaaaagaatgacaatagtataaaatatggtaga

SEQ ID NO: 30354 - DNA, 603 bp, Arabidopsis thaliana columbia
gaggatcccccgtgttacgtccggaatctaaagccaatgaatctgcaaagtcctctggactcaagttgctctgtaatcaacgcaatcccgtgagaatccagatagtttaaccaaaaaatcaacaaaaagaaatcattaatcgaacctttaagaaatcaagagtacgacactcggcgccgatgattctgtctctgttaacgggccctgcctccacaagaaaagcgactcggcctcgaatagaaatacctaaccacgtcccatcggtctctgcgcaacgaccactcaatacctggctttcatcccattcccaagccgcctttcctattgacctattaatcacccatacaaaatacaggttcatcaacaatgtctgatgcacaaattataacctaaaacgtcgaaagaattttaaacttgccttgattgccagttctctctgttctgcagcagcgtcagtatgttttctcctctccccattggaatgctacgatcccattttcttgagagaattttgtaaaagtttttgctattgaatctcttgctctgtgttgtcattgttgtgatttgagttgaacccctctctgtgtttatagcgagagatga

SEQ ID NO: 30355 - DNA, 541 bp, Arabidopsis thaliana columbia
cgactcgatccctcacccttaacttaacaacacaaatcccataaaaatggatagaactagcaaaataaaaatcaaagaattttactgaagttactgaactttatgattgtaatgatcaacagtatcgtctttacacaaaaaaatatatgaagaagatgatacacaacacatttcattacaccatctgatccatctccatcttcaagtataaactcattcttatttagtttacaactattttttgtcttttgggaatcttataaattatttcggggtaattaacgtcaataaaataacttacacctaccgatataagactaaggtgaaaaagtatacgttaagaaaagtgaaaaactttaacaaaagaaaaaattcaaatcagaatcactaacccggtaaaaatgtaaaaccgtttcccggacccaaataaggacctggataacaacccagacccgaaattaagtcggatccggatctccttgatttattttttaacatttttgtcttcccctggaaatttgaaactctctcttcttttttt

SEQ ID NO: 30356 - DNA, 585 bp, Arabidopsis thaliana columbia
agatatcccttctcttcagcagtctgagctccataaccctagcagataccgcaaacaccacaaaggatgcttcaaatatcagaacccgttcatgcgaattatacaagagccaaggcaaaagtttctatagaaatttaccaatcgaagaagaaatcactaacaaccctgcagcaaacatctaacttaatcacattacataaatggccaaacaaattccaagctctccttgagatacgttatgactaatatccataacagggagaaacaatcctacattcctaatttcctactgcagcgtttttagtagtctaacaccaaatgtgcgcaggaattagcgaccgaaaactctaacaaaacttggctatctgcgtctaatacaaaatttgcatactttaccaagctagggcaaactccatcaagaaaactaaagggcatgcaaaatattggaagagtacagaaacaaagaatcagggaaagcaattacctgcatgagaaggtttgggaggtgacgctgatcattgcctgtagaagcaacaggagacgccaaatgctgcaaactagcggattgaagcaccgtgccatgac

SEQ ID NO: 30357 - DNA, 522 bp, Arabidopsis thaliana columbia
tgaaataggtttgatatttattctttggtgtttctatattccatttccattttgttgtttgtccttcagaaaatcttcaggctcctcctgtgttgtatgattttgtataacagtttacacattgaccataaagtcttgtcaaaattgaataaggtaatttagaattgcttttatgagactaaaatttgctgaactttctcttcctctctcaactctcaacgctcgtttgtgtataaatgaaattttcagtgtttcgcacccaattgctttatattaaaactatgtattagagagatgtatgtgttataatgtgtacacgcttcatgattagagaactctttagggacagtattactagtgtatagctatatttgtatccatctttctttgatcctaaacaatctaagtacaaatatatattgatttcacacagttcctcaatcttaaatcttctattctatttttcgacaagatccacaatgcggagatgaattgagaggtgacaaaaatctctctgtggtg

SEQ ID NO: 30358 - DNA, 519 bp, Arabidopsis thaliana columbia
ctttcctgaaatgttctaacattaaaactagatctaaaacgacacagttcctttctaggcaacaagctctctcttgtgcttgtacaacaacaaggcacgaatctactagctcccaaacacaccctcaactcaactactttctgcactttgtccccaagttttcctgaaatgttctaacattaaagctagatctaaaacaacacagttcctttgtaggcaacaagcgcgtgacgtccttgtctttgagtgagagtcttcactcttctccttgtaatgccaaagactcaaagcctctgttgggattggagtcacttcatgactagtcttctcgtttgcgcataactcgaagacaactctacacatgtgtattctagagatctgtttactttgcatgggaaagatctatcaaatagtttacaatgtatccggagatgtgagcattctttaagttaaccacgtgatgtgaggacattaaggttttcttttaccaaaactaactctttagcctccttccaagtt

SEQ ID NO: 30359 - DNA, 554 bp, Arabidopsis thaliana columbia
tagaggatccccgctgctcgcccaaatttggacctgcaatgaagatacataaaatgttgaaatgagtggcagcattatcacgtaagtaatggcatgggttaacaagaattcaactgaagatagaaaagtcaaacttacggtaggagcatcagcatcagagtaaccacatggactaacgagtagaatcacactgctgacatctgaaagggtgttgagaacaatggcggcttcaacagagtctgcagacggaggagctttccagtaggcattacttgaagcaagattcagaggggtgagcaatgagaaaaatggtgctgaatcagtcgcagtttcgacctaaattgcattatgcaaacatccaaaagagagaaaggaggattaggtattacataacagctctttccaaagacaatgaagtgatcatagtaattttaaaacacataagaagcatattaccttatgtaagaagcttgcaaatgggaactcagaaagcgactcctctttacccaaaatttgacgaaggaaattgaagtcttctcgattaggagaaggtt

SEQ ID NO: 30360 - DNA, 595 bp, Arabidopsis thaliana columbia
ttgatctcatgagagtaagaagaagcagctctaattcctccctcttcgatgccatcaaagagagaacttctaccaccacgaggctccctgaaatcaaaattagacctcagcaaagaaacagtaacatcttccactcaatctaaattagatgaatttgaaactgatccaaatctatcagaatacagagcaacagtcctattctactgctccttcagatcttcccgatgaaacctaatctacaaattaacgagctcatgaaaacacatctaatcatcagatttcgctagatcttaacctccaaattctaaccaaagatgtgtttgaaaaagtagcgatttgaaatcattcaaggagagctaaccttctaggattcatcgatcaatcgaattaacgttttgatcctccaacgatgtctcgatttcgcttcaagatgttttccagaattcacctggatctatggtttccaacgaacgcaaattaaggaaggaaacggttgatatgtcgaaagaacagaaagctctgtgtttatcgttcttaagcgaatcaacactcaacaacacgtgtatacgcaagtaatggataatagaactatggg

SEQ ID NO: 30361 - DNA, 515 bp, Arabidopsis thaliana columbia
ccattcatattagtgttactttgtttattaccatattagaccccatattatctatatattcgtttttgaccccattaacttcatatcctcatcccattaagaccatgtttgaaatgtattaatttaagccttctcactcactcgctatggccgcgatcgttgccattggtaggaaactcgcgcgaacgccacaatggcggattgttcagcatcaatctctgctacgtcgtgcagtgtcgacgtcgttttcgagctcagtttcccaaaatcattccttctcttcagcatttcatcgagcaggtcatgtgcattctcaagttttaagctatctcccacattttgcctcttctaatcgcttctccaccaaaaccatctccgaaacatttgatatcaacttaacagcattggctccgttagaaaagggtctgattgatttaatcagacaggtctctgagctggagtcagaggcggatgcatggcttctctggaggcacatcatttgatctaaatcatga

SEQ ID NO: 30362 - DNA, 608 bp, Arabidopsis thaliana columbia
tgtagtgattatggtgaaatgacgttatgtttagccacaaagaaaaatggcaagatagtttctagttttcaggggatttagtaatgacattctttgaaaattttccatacattattgattgattaatgtaggtgatcaatcatataatcaaacagaaaattgcaagatgaaataaatgtatgtgttttgacccaaaaaaaaaaaaaaaaaagaaataaatgtatgtgataaacccttttatcactaatttagaaataaaaaaaaagtttgatggttatgggctaaagcccagataatctagggtattatatgttgcactaaactaagcccatatgattacgcccaataaaacttttacaatggatggactatgtaaaccttccaactttcaagaaacattctcatactggtatatgatcactatatctatatctcacacctcacgcaaactagtagttatttacgtatcaaacaaataaattaagtgtttattattggttgaaaatatgtgtatagttttattttcacttttttttttcaaaggcccaactttttggaaaaaaaatagcagtggatgggtgggactgtggtccatcttgatttggcat

SEQ ID NO: 30363 - DNA, 519 bp, Arabidopsis thaliana columbia
gtctacttattacaatttccagaactagccaaatatgtgaaactttagtcttaaccaagtttgatgatgtggtcaattagttaaaggtataaggtatattctcaaatattccaggtagccagattttagtaatcttacgacgtggctcgtttcctgataatatgcatgcatacaccatatgatacatgcaaaaagagaagcaaaaatacaaaattaacaaatacagataatttaaggcttctgagtagcccagttaaatgtattttgcatagaagacaatgaaaataatcaatttaaataaagaaaatgtcagagttctggaaagatatgcagatgtacaaatgttgccgtcaaaaggatggaaatatttaggagcaaaaaaaggttggaaatatttattttaagatagatgttaaaaaagagatacgaagctgtcaaataattaaaaaaaaaagctaaattagagggtgcattagatgcagttgacatttcgtttcctcatgacatgctcgctaatta

SEQ ID NO: 30364 - DNA, 587 bp, Arabidopsis thaliana
cttcttctgtaaacttccattgtttcatatcattcttggccagaaaaataacatttacgcagagagactctttcgttgaaacattaccaaattcctactcttccacaatctccaaaggatccacatggctaattattggaaatgtggctgagcttgattgctaaactttctttgacatcttcctctgcaagcactatcaaatttttgtttcgttccagctgtttcctgtggctttcacacagtcttagaccatataatttccatcagtttgattacgaggccgtggcagtcttggtggatgtgaaggcaaccagggatcggaccaagcgttgatcatcgagtcgtctccatagcaaatcatagaccttgtctttgcaaatctcgactttgcaacaacgatctccaagcgtatgaagtcttagcatttaacagacaatctggattctgtaaaattcccactgcaaaatttattactcctattcacaacagaatttttttttggtacacagttcatcatacatttcgaatagtttgttatcatagaagaaacttttaaattagatagtctattatcaaataattttatg

SEQ ID NO: 30365 - DNA, 436 bp, Arabidopsis thaliana columbia
ttagtgagaagattttctcaaattactattgaacagtataatcagagtttttatttggcaaactaacagtatctatcatatatgatcgaagatcaatgcatattcgaaaccgaatttcttgcttccattgctctgtttttgaagagaacaaatggtaaacttgttcttgcattctgaagctgatatattgcgacttttaaaatgcatatatgccctaataaatcgcgagacctgcttcttgacataacaattttagagtttgtggtcagctagtacattgttatggttaacaatttgtataaaactaactaatgaactgagttgatattgtcgtaaatctacttttcgcttggttcaagtttcacgatcaattcaaaataataaaatactagtttatcacttttttggcaaaagtagtgcaagagttgttggtcac

SEQ ID NO: 30366 - DNA, 716 bp, Arabidopsis thaliana
tcatcaggctctgctttagacttcgatgaagattgattccccgagaaatctgacggaggaagagaagggagaagaagaaaagaagggaaaccggaatcgagaagaatcggcgtaagcacggttctgagacattgacattgaagtgaacgcagcagctatcgccgccgcggaacacaatctagaagcagccatcgattttgataaaaagaaaagattgacccttattcagagattgagaaatagagctaaaggttcatgaaagttgggaaattgacggtgaatgatggtcgatttctgggttttgccgaccataaacccacggtggcagctagcttttagggtttaaacggtatttttcaaaaggacaaaaaataaaatgataataaaatctcgaccgtataagtttactttgcttggagaataatcaaaaagcagatctgggcctaaatataattgggcttattattgcttggagaataatcaaaaagcatattttcataggaactattattgggccatgttctaaacagattcttttttttcttaactcgaaccacgactaaaccattagtgtaaaattttggtttttaaaaaaatgtttgaagtttgctaagttttgtcacctccactcagcgacgaaagatatatatttataagattccgtttgtgtagatccgggtacgaagataattgttctcagataattaatatagtta

SEQ ID NO: 30367 - DNA, 574 bp, Arabidopsis thaliana columbia
catgaatatagaatcacattttaaaactttgcgcgcacaccaaaaaataaaataaaaataaagctttctagtttattccgagtttgcatatttaagctgaaacagagcaaaggaagaagacgaagagaatccgatgcgtagaagactatcttccgtgctaatcaacaatcagtgcatcgcgtcccaacgccattaccacacatctcgacctgagaaacccacaaagaaagccagcagccatgaaccaactcacaaattcaccaggaagccatgggaggaagtgccatttctcaccgatctcaaagaaatcgaagacccagaggaagctctttctctcttccaccaataccaggaaatgggtttccgacacgactacccatcttactcttctctcatctacaagcttgcaaagtcccgtaacttcgacgccgtcgaccaaattctccgccttgttcgctatcgaaacgtccggtgcagagaatccctcttcatgggattgattcagcattacgggaaagccggttcggtcgacaaagccatcgatgtttccacaaaatcacctcctttgattgtg

SEQ ID NO: 30368 - DNA, 592 bp, Arabidopsis thaliana columbia
cggagatttatcacgatctatatccaaacgggtcaagagattacttactagccgggtcagcccagttaccgggtttgtatctcgtcttttttctctgttacttgagtttcctctgtttctggctctgtttctgctggaatcataagcaaattgttaaaaggattcaccttttaatgacggctctgcttctagtgaaatctctgactctgatttgtgctgctgtgtataaacactacgtgaaagtcacaggcacagctcatggctggaacattgttttctacattttccaattcattagtgttgttttgctcttcatggtgattgttctaatcggaaacggttggtctttcttgaaaccgaagctacatgttaaggagaagaaattgttggtgattgttgttccgcttcaggttttagctaacattgcttccattgtgattggagagactggaccgtacacccaagattgggtgagttggaccagatcttctcctagctgatataacttgctgttgtgcgattgtatcgctatggtttggccatgtgttgctaagagagcatcgaaacgatgggaagcggtaagacttagcaa

SEQ ID NO: 30369 - DNA, 1431 bp, Arabidopsis thaliana columbia
actacccttgaccgcctaataattttgatccaaccgagctatctccaacgcgtactaacgatggatctaagcgtcggaccgaaaacaaaattaaaaaaaatattctaaaaagattaaaagactaaaggcggaactacttaccttattacccaactacgactcccgactcgaccaacttctacctgactcagactccgacggactaactagctatctaacggtttaagctaaaggttttggtgggaagaactaatgaatcgatctagggggtttatataggctggggaaacttggtcagcaagttacttggagtgcaagtcactcaaaggataaggcttatccttatcttatccactttcaagcgtatcattatccaatcttgttcttatccttatctaaatgcccattctaatctaaaacgtgtggaggatcatgcacaacacacggtacacgcccgtaccgagaactctccgaccattgtacgcggacaatgatcattacccattcttctaacaaataaatgactaagtcatttaactactccactaaccttgttgtgtccgcatccaatcccattcgatcatcgcttgcttgtctcggcctgaatttactatttctcgataataatcttgatagtcttaataaattcctcgatagccttaactgcctttgtcgataatagccgatcctagtcttcttgatatgtagcattagccgataaaatctctactttcttctaaactgatattaaactccttatgtaaccattctttgatcaatgatcattcgggtaatgtttgatttacccacaactccgtctaaattttcttatcgaaaattttcctaaggtacgatcgcacctctatgttcgcgatcgtccgacggattcctagtcaaagtcaggggtattacaatacccgtggcctaacttatcggccatgtcaaaacttacaaaactatctgtcgctcccgaatcgaacaatacatgcgtggggttaccaccaacaagtaatgtccctaatgcatatgaaaatgatgtatgcaatatttaaactagtaaactatgcatacaataatcaatcactcaaacatacataaataagaaaagtaagaacccatactaacctgttatgggaccttttgcgggtcttgaaggtttggtaggttctacatctaaggcatagacatttgctggagtggcttgcttctttaccggtggtcccttagctttctgaactggcggtgggtgattaagcatttggttatactgccttatttgcctgttcgggcatgcgttaccataatgccctaggtctccacaaatgaaacaagctccgactcagttaccctttagtcccccttgcttattcgggcatgcattcgacacatgtcccgactccccataagtataacaagtaacaaatgccagat

SEQ ID NO: 30370 - DNA, 1026 bp, Arabidopsis thaliana columbia
tctaagatcctctttgacagtcatgttacagatataaggtgattccttaggaggagtaggagaaggaggagaagcattagcgcctcgtttctccaaacaaacctcaacagttccagccatcacagcctcctcctctccatcatcactaaactcatcaacttttttcctaaagaaaccaactaaagtaactgcgtgtggcaacacttctcttctctcaatcaaatactgcttaatcaaaaaccgtaacacagattgataaccagaaggcaataacatcgattcaccaaatgactcagccaatagatgcaccgttgaatccatctcttcatgtctcataactcgaacccacatcgatccagattcaagctcttgaaaatacgcaaatccttcaagagttttaagcttctctaactcatcgttactcaaaaacctcccggtacgaaacgattcctctagaaacgcgtaattcccggtcgatttagagttttcttctccagtttctgtagctgtcgaaactgaagaaggagggaaagcgaatctgagattggagcggtgagatttacacgagtagagtaatggatatctatgtgaagaagacgagaagccaaacttcgttgattgggttggtttgagagaatcaacagagaaagctagttagatgcttaaagccgccattgatatacacacacacgattttctccgatttgattgtggttcagtgttcgctaatctggttatcacgacatgttatggataaagtaacagtcatacactaatctttaaaacgccgcgttttgaaccaatcatgaagctcagtagttactgggcccgtatggccatatactgatataaaaatgaggaaactgttataagcgagtagctaaatgggcttaaggcccatattgcgatatatactagtgttaattattccgaagttcggcgatttcagaagacggaggacgagcgaggacggccgccatggatccagcaggagcatcggtgcgcagcgcaatcggaggagaagga

SEQ ID NO: 30371 - DNA, 598 bp, Arabidopsis thaliana columbia
ttttttggtggatgcttgttagcttctttgctcaggtacaaccttgttctaaatatctccgcctagcccgattaatccccgcttaatcgctagacccaccctatccgcctcaattaattactaatctcttaaaatttatttattcaattatttttcgtttaatccgattttttcccgattaatcatcaccgaatcttgcatatcctaactctttttagattgcaagtatagaacaatttttcttcattttattcaatcatttagttttagagtttgtgatgttttacaaaagttcaaaactttaataaaaacataaattttgttttaaaaatacagtttattgtatttaatataatttggaaaacaatattagattaatatgtttgaaaaataataaataaccctaaaactaattctgaataatcctttattttcatccgattttctgattaatcgttaaatccatactgagcgcccgattaacgcctagcaattttttaaacaaggggtacaagtacaagaaattttattaattaatactatatatatgcaatattttattaagagtcgtatgcataagtaaagtatatatggaata

SEQ ID NO: 30372 - DNA, 1463 bp, Arabidopsis thaliana columbia
ttttttaaaaccattgtatttaaaaaaacttacaaggattttaaaatacttacaaaggtttttaaaagagttttaaagtatttacatatgtatttaaagagttcataaggattttaaaaggttttaagataatttacaaggatttctaatattttttggcggagaaaacaagttttggcaataaaaaatgttttggcggaaatatttttttttgccgagaaaaataatttttggcataaaaatataagtttttaattacatgttctcattagaaaatgagtaatttggtcattttgttcaagaaaatggatattttttttaaatggccaagagaaaaatgtattgttgcaaaaggtgtcttgcatggtaaggtggaaactgagagtgatgagttctgtttctgatgaaaaccatttttggtaatcttttttgcattattatttgtgattttatttgtttgtcattgtgcattaggatggttttgtattaaacaagaggatataagtctaatatatactttaacaagagagtgattttgttttgctaaattaagcacacatgcattagtttgacaagttgtgtgtgtgagagatacatcataaaatgcatcattaatgcgagagagtcatccgcgtccccaaatacttctatataaacttacatctctctttctctctaacgcacagctcacaatactttctaactcactaatttttcctaaattcttttgaatcagtagaatagaaattatttatatgcatatcattatttatgtatttgttttcctttgcttatatgatttgattatggtgtgtttttatgttcgtagccatgcagatttttgtgaaacggttaggagggaaaactgtgacaatccataccctaggtgagggaaacacagtccaggatttgaaggctgttttagaggagaaagcaggaggatcttggtcttggctgagcagcagatgcttcacttcgcaaagaagatgattgcggacgatgcagcagtcctggggactatttcatcaaagatggctccagcctccagctcgtggtgaggctttttgggagagctaccaattaggccttcatctatcaatcttatttatctatccatgttttaatgaatgaatgtatgatattccttttaagctttacatctatctatccatgttttaatgaatgaatgtatgatcttccttttaagctttaagttttccattgtgtagaactattgatctttctttatatgcaagtgaattcaatttggtgattttatagtttgctccagattatttgttaatcttgttttcgttgggaataatatgtgggtagatatgttgatcttaaagcaagtaatattttttgttagtttaccattgtaatggttagaggaattttgcatgtcaatatatgtttataccgcagaaataattgaaaataattttgcatatcctacaatc

SEQ ID NO: 30373 - DNA, 558 bp, Arabidopsis thaliana columbia
agaaatactcaaaaatatttatacatttgatctattaacacatcctcttggaattttcatctattgaaaaaattttaccatcgtgaatatataccattttcaaaattttaaataacaacctagaaaaaaaagagttaaggttagcctatgaccaaatcctttgcaaatacttcaaaattactattttaaaatttgcaacgaattcttttgcaaattttttatgtatggaactatttctcataatagtttacttagttagacgaatttgagaacaaaaattagaaaagatatacagtatatatgtgtattctttcatcttaaaaatagtgtttttcatctttaaaataatgttatacacaattttctatgtgtattaatttgaatcaatataatataagaacattaaaaagttgtaaattctaaatgtaagtaaaaaataaattttgcagctgatttttcatatttttgtgattaaatctcatgtgagtttgtgccatatcttttgattctccatctcatcacacgctttacgacgtcgtttagcagagggagcgtgat

SEQ ID NO: 30374 - DNA, 511 bp, Arabidopsis thaliana columbia
ggagaagacatcatcttcaccagatttgagcagtctaaaaagctaaattttggttgtcggtgccaatcatacgattcatcgtccagttttgttctgttttttttttctttttaatatttattaatctaatatgttttgggattgcacgttagttttcgaaattaataacctatactccaaatttagtattttttgtgtcctatgtcttttaaaaaatatttattagtctacttggttttgggagtatatcgtattcaactattcaatactttttttttagtttgcatcttagaaccttagtttgtatcttagaaccttaataattcgtattcaatcggccaatccatttgcttttattttaataattgagaagttcgagaccaatagaccttaatttcataaaacatgccatgtgccggtttaatagcatttgctagactcttagttgaacggaaaagccataatcctaagccaattatcgttagcaacagaaacaatggtatcagtaaag

SEQ ID NO: 30375 - DNA, 476 bp, Arabidopsis thaliana columbia
ttttatcatttttaaaattcattttatatagttaaaacaaaattaatacctgattaaatcacactttaaaaggccagtttggtttgaactttctccaacccttttaagcaatatagtactttgcttttctcatttgagttgcaaagctttgtatgagctttcaactttgccatatcgtcttcggcatcatctaaaggaggtgtatagactacgtcttaggcttgacattgactcgggttcaaccttggactttacccatcttggtcatgtcacatatattgccattggtaccgcgtgtcaagaattggcaaacgactcctccttgagatgaaaccacttttaggtattcacgttagtacgtagaatcgacgtgtaactttcccttaccctctttgatatcttccttaatgtaggaatatggtgagtcttcaatcgtcatcttctatcagcaacaaaagatgtctttaaacaaataa

SEQ ID NO: 30376 - DNA, 517 bp, Arabidopsis thaliana columbia
gatggttttgtcatcaccacaagttattacacatagttgcttgtttggagtcgagaaggaaatatcattcacaccaccaacatgagcatcaatctgaaataatcacaatattacaagaaaatccccaagggaaaaaacgattgttaaagagagaggcttgtgaatggtacgagacctcaaggtgttgcctcatgtcttcacctccgtgataagagtatagttgtacaatatgtctcgagtaagcaactcctgcaattcagaacgtttggtgacttataaagttgcattcatgtgcagatataaatttaaaggcgagttctttaccaaacaaggaaccgtcaggctccatatcacacggttgacagaaacgacaggttctttcaccagagcagcctgaagatacaactaattcagtcactgtagattcataacatatataaaagttaacattttgttgttgctatgcataggcacctgcaagggcattgaacatttactcaaatcccagactttgaac

SEQ ID NO: 30377 - DNA, 489 bp, Arabidopsis thaliana columbia
ccctatgctgcatttatacacattattacattttgtgacatgtcttagctagtttagtaaggatgtaatttagattatttttgaaattgtgatggtagatcaactggctccacaactctcgatttaatccaaaatagggaatttgcactaacaaaccttctatttttcaagtaattggtcgattacaaatttgtccataaataactaatggctttgtgcgtcttttaaacaagaatatgttataacaacactgtttaatcaaaaataaaacatgctatcatgcacttttttattcatgatgcgagattacatgttcatccaataatttactattttatctacagccacatttttaaaaatacacaatagcccaaagagtgcattgagataatttggtcaatctgcaacaaaaatcattatttaccaactactatttagcaccatagtcatatatctaattttcttcaaattagaccatctaactaaata

SEQ ID NO: 30378 - DNA, 623 bp, Arabidopsis thaliana columbia
ccatcacgtctatctgctgccttaggaacaagcaaaaggatcaggaagcttgttgatgaatagcagtgtcaggaagcattgctattgtcactatgaagtattcacatcctgaagagagaccataagggtttgatgttgttgttgctgaagttgatgttgagattgaacttgatgccagagttctcgagccctggtctgagcagagatgatgtgtcttacccgcctcaggagaagcagaagctgaaagttgtgatggcagtttcactatttggcgctctatgtggacaatctgtccaacaatgtatgtaggccggcttgggagatgatctgtgaacaatgcctcagattcagaggacaagtagtaatttgggcagttcctgttgattgcctcgtaatgccctgcttggtttagcacaaatgctgctatctcatggacttcaagacgaccgaatgatatcttttccttatttgcctgtcatcacaagaattcaccaattttctcattcaaaaccgaggacactccaaattatgaatgtgtagtaaaaggagaaagaaaatttactgcaagaaaccatgactgttactagagatacacgagtctactgcttccaagttggtgttag

SEQ ID NO: 30379 - DNA, 151 bp, Arabidopsis thaliana columbia
gcaattggtcgaagaagcccctcgcgaccgcctgctcgacggatgcgggcagcgagtggctttcgacggcatgcatcgcagcacaaacgctcaacaggttgagttcgtcgcggtattggtccagcgtgatgccagcgtcttcaagccaggc

SEQ ID NO: 30380 - DNA, 596 bp, Arabidopsis thaliana columbia
ttcgatatgccgcctccaggtaactgtttcttcgattgatattataaagtcaatttgatttggctcatctccatgacaaatttctctgtgtccgtgcaaaaaccagtaatgtaataacatttgactggtttttctgtagaaatttcgaaaagggttttagactcgaagcctggaacttgcaaattcgcattcttgaagctaagtgcggttaaaacgacgagaatgaagaactataagcaactgcgtactctgcttatgttgaaagaaatatctcgacgtggtgctgatcgagactttcttaaagtaaacaattcagtctccatgttttttagcatctctcactgttttgcttattacccttaacgtcaaatttacaatctttgtttcaggatccggagaatagtgtaactcgaatactgtgttcggttctaaagcaagtggtaagtacacatctttatttggtgaagcattaaatgtgaccacaaatcgattaaaagtttgaattttgtgcaggtgagtactcagaccgatctttaaagtctctcgtgggttcaatatgagcattggatgacaagagaacacaagtgacaggatga

SEQ ID NO: 30381 - DNA, 449 bp, Arabidopsis thaliana columbia
attttctacgtggtatcggtcactcggtccatattccccacattaatcatgatggagtgtcttactggttaatttgaaattacattaggaaaaactgttcatcacaactacaaaatgattacatcaaataaacatagattttgatacgtattcctatattctatgatttctgatgaataatattttgttgtccacccaattttcaattctttgtatcttacattgatctaattatacaccaaaaatgatataaatcgttcaagctactgcttaaagagtcccacgtaaatgttcttcatggagtatcatcaattgttcagctacctgacgaaatcacacgatgaaagattagtcgacataattcacaagtaaattgatcgtctacattttcaagaaatagtacgtacctcttcaatgctgccatcttcaatctctgtgttgaaagaaag

SEQ ID NO: 30382 - DNA, 500 bp, Arabidopsis thaliana columbia
tctattagagatagtgtgatcccaaaaaaagaagcataatgtgctccatttcctacagcgtgattaatggacaaaccctcactcagtcatctccatgtgttgcatcctttttcatttttcttcaatgctaaaagatgtgtgaacttctctttatcattttcttcttctttttttttactttggtccactttagcccatccgttcacccaccttactaagcaagccccgaaacttttgaaaaagtcaaaaacaaccccaaaccgtctcactcctttcctttatatatactccaaacgactttaccttccaaaaccacacactctcaccaaacgttctacagattcgtaaatctcataaacattatggattggttctcatggctctcgagaacaaatctcgaagcttctctcatctacgagtacggtctctctttctcaaacaacgagctcgagtacgaagacattgcttacttcaaccacgaatttctccagagcatgggt

SEQ ID NO: 30383 - DNA, 598 bp, Arabidopsis thaliana columbia
ctaacttaaagtgcaacaacatgggccaacttgtcattttattacattttttttatatttataagttcacaaaatgacaaaaacaaaaatgaaatctcaaatttctatttttctccaacatgtctctcataaaacttttatttaaatccaattctctggttcccaatccagtctgtggcggccccaatctttccacaaccttatgaatgtttagtatccattgttaatcactgtgttaactaatcattaaccacttcataatttatattactacttgtttatctactttgtataaataataatcacatctatatcatagacttgaccaatatttgttctaatactattcttagccccttgcatatataactatacatattcatgaagcttgcatgtattatataagttaagtgggacgagaaatagaccatcactataagaaaaactattgcatgttgagaaaaggtgatagattagtatgaataaacaagaaaaacaaatatttcccttatccgtaaaagataatataaaacgtgtcaagtaattcggggttttaggtcagtcataaaagacataatttagcccgaaaatttatgtg

SEQ ID NO: 30384 - DNA, 343 bp, Arabidopsis thaliana columbia
ctcggtatggaaaatttggggtttaaaatgtcatattatgtctgtaccgtttcagacatgtgaggccatgaggtgtctaagttacaggagtgagcttacgtgtaggtgcagtctcatggtttcagttgttgttccctgaatggattttctatgaggaaggaaatgtatttcacagtagtggtgaagctgaacatggttttggctagaacggttttgttggaacatgaatcggtacacaaaagatgcttttaaggagaggaatttgaactgcagctgatgagacccaagtaatggctttgcttggtatccacgatttcttcgttctttcatgagtgcctttggt

SEQ ID NO: 30385 - DNA, 653 bp, Arabidopsis thaliana columbia
caaactcgactaatcgaaatatttaattaaccggtgtgtcgccgagtcacggtcagggacactaagcgcggttcgttgggtgacagtcggacaaagagaaccctggtggcgatagctggccctgagtcactgcccacctgtcggccaaccgtaagcagctttgtggccgatcagaagccatacgtttatagcggctggacatggcagtttctcagccacaaaatgttggaacagttcacccacctgcttgctgtcatgagctggtcggtgacgtagtcaactttcggctgtacattaaccgtatacgccgaccgtgggtcgagcacacgtctaccgcggcgttactcacgcctgcacgggtcgttcacacgacgttcacggatgaggtctttggttggttttctcgtccttaaaaaaacacaacggcccagtttaagaattctcgtcccgaatgttacccgtccatgagtgatgccactttagtttttttttgcgatgacctccaccaaacttagtcttactaaaggtaagggatattacattctcctcctcttaataaaattcgtcctggaatttttacgacttagtggctaccgtctgttcaccttgcttgaggtgctagcttctataatcatcttccttattctctcaaa

SEQ ID NO: 30386 - DNA, 285 bp, Arabidopsis thaliana columbia
tatttctccaggataatcgtccactcttcttcgctcatattcgacagcttcacaaagcctgtgctcgatgggatctgttcgtctgcacttctgtgagcagatgatgcatatgcgctctgcactcttgctcctgggtgtctctgatacttctgactcgtctcaccaagaagagtgcttttgagagacattgaaagcttaatcgtcggcattttctctagatcagctctgtcattctcttcctcctctctgtcttcttctccttcttcttccgcatcctctgttgta

SEQ ID NO: 30387 - DNA, 581 bp, Arabidopsis thaliana columbia
tataagtatcaaaagaaaatcactaagggagagaggctaaacttaggaagtaaggaagaagaaaagatgcggtagtgaatggaagtagagtttgggggtcaatatagggttctgggagcatcgggttgtcaccattcttggaaattgcaataagtgtgaggagcaaagaatactcacgaggatcaaacaaagtggacgtaattaatcttgatcaagtcaatggagaacatcttgtcaattttcaataatgcttagccacttttgtggttagtgaaccgctaaacgtgttgcataccatctccatttgtctccgaaatccacacgaccggggtcatcgttaggctacctatttgcatataagttgatgctgcctcaataatcggattgggaactactggaaacatcttcgtgtgaagatcaaaagcaaccaacttagtcttctctggcctgaaccaataaagccatccgtttgcaaaagttggtacttgaacgttttgtgtccattgaaaaggaggaggaagcggagtcactgcctccatcgcttgacacgaaaatcgaaatcccccgcgatgaggtgtagt

SEQ ID NO: 30388 - DNA, 617 bp, Arabidopsis thaliana columbia
tcggtttatcatcctaattaggaaaagcttaacctaaacttttaaagctaaaacttaaattctaaagtataaccggctcgaattcaataaatcggttgataaagttgtttgtatggtattctctgagtggtctttcatttctcataccgttctttctatctttttatctatcttctacaccattgctgctaagcgttgaagacctttcttatcaccctccttatcaacactctctatctctgtgggattcttctcttttatcttgtgttctctggattttgtattttgacttgaaggttgggtgttggcttgctattttgcctgctgaatggccagtcttctagccttcctcctctggttcctcctcgcagtttccgttagtattggactcttagctgctcagcaagagggtcatgatgatttccataggaaacaacaagaaccgaatgtaccgaaccgaaacaaaaataaccgaaccgaaccaaaaattgaaaaataaccgaatggatagtaaattatataaccgaaagaactgaaaccaaatagataataactgaaatattttgggtaccgaaaataccgaaatataatatattttcaaaatattagttattcta

SEQ ID NO: 30389 - DNA, 381 bp, Arabidopsis thaliana columbia
tgtatcggtttaaacttaaagcagcctgatgagaagaaggggaaggctaaaaagcatataatggggccgaagggcttacgaaggcggcaacatcttcaaaagttattgctgataatgcgaaatcgagcagatcatcatgcaacaggtgttctcagacaatcgtttcaaaggatctgagagtggggctggttactgaagactccaggggatttgatataacaagatggcatcacttgggttgttttcccattgattttcatccaattgattctgtggaggacattggtggatattcatcgcttgaggttagtttttgtttacatattaggaattttcagttcagtgtatagagcttttggatgattgcatatgacatgtggt

SEQ ID NO: 30390 - DNA, 320 bp, Arabidopsis thaliana columbia
gttaagggtccttatgcgagagtagtactaggatgagtgaactcccgaaaagtctacgtgttgcatccctcttaatccgttttgctctattttgtcttgctaaaaatgtatgactctataacttttagaccgtgaaccaaacttagcatgtgatagcttttcggaaagcccaaagagagcgctccgatgaatgaggacagaaatttgaaattttctattgttgatagctctactccaaattttgaactaaatggactgttctgagccttttcgagatctctgctatattacggggggaatatgatatgttcggacattgt

SEQ ID NO: 30391 - DNA, 655 bp, Arabidopsis thaliana columbia
ggagtttggagctgattgactttttatttggtatgcttcttctgttgttctatgcattgcttaaaactaattatcaaagtgttgtgtgcagtcattttaggagttcacaacatgcttctcgaatcacatccggactctgttgtcataattgtgcctcgacatccacatcatggccaacagattgctcatgtatggtataccacaccttctgcttatttcatattaatggcttattgaaggttgatctttttggtgaatcgaatttcattgtcctcagctttttttgtagaaactgcggaaagatggccaaagtgttgctctaaggtctcaaaacgaaaagcttacaccaaggaagacgaatatatatgtggtggatacactaggttagggtttcactacttttagtttatcttcctagtgctagtcccttttctttaagaaccctatctgtgtctgcttggtttcttcaggtgaactaagggaattgtacagtgtcgctccaatagccgtcattggaggctctttcatcccgggcttaactggtcacaacttgtctgaagcagctgctgcatgtgcgccgttattacaggttctcaatgataaagattagatgcttgtatattatcactctctcggttcatccagctcgtcgcac

SEQ ID NO: 30392 - DNA, 965 bp, Arabidopsis thaliana columbia
gtaacggccgctatcattgatgtcactcgcctctgaccttatgccagaaacagaagtcaagacagacaaggactggcatctctggcttgccggtttgaaatctttgtcaatgcaggaaaattggtgttcttgtggagcaatcgttagcataccgctaagacaagcattggtctcataaaccgcctgagaagcttcatttaagagcttcaattgagggtatctttcagcgtcaaaatcatgaagaaactggtcaatggtgattttaagattatcttcaatcacccccagcatcaaatcttgccataaatgcttagtagagcaagtccattcttgaattcttacaaaaccaatcctgtctcgtatgtcataccaaagttgctttaccgaaaccgggagatagttatattccttatatatctcaatcaaatcaagaaacaaccaactgccacgacactcccacgtctctgtagcctcattccaatcctgagtaatacgtaaagattgaagatcagcatccaattcatcacccaaatcagggaaaaacaccctccttttctcagaaccattctcgtggtcaaagagcacaccttcccaccaagcatcactgaaaaacacatcgacgcagagcccatacgcaaggttcagtttagcaacatccagctttggcggcacaggtcttaaacgtccacggaaagtatcagaaacatcagtgcaatcatccaacccttctactatatcagaaacatcaacagtttccacaagattaccagaaccatcatcagagagaatgttgtcatatctgatacaacgccgacgtcgctttttagctgaagttacagttcctaaataccaagaacccagagacccctcttcaagactccttacctaaacaagcaacacaaatacttttccaggattagaagacgaagcaacattaaaagcaacatataagtttgcactaaaaa

SEQ ID NO: 30393 - DNA, 571 bp, Arabidopsis thaliana columbia
tgtaaacaaatttgtaagtttaatttttgtgtaaatatgtgtcaaaatataattgggggaagttttttacatgtatcaaaatctcattacgtgtatcaatatctcatcaaatgattgacacatataacaatcatgttaattagttactaatttttaaacatcaacaattatataataagattatatgctttcatcttttttgtatacttttatttttttaatactagatattttcaagattagttatttactatactatttaatttaaatgcctatttgttaattttataaacctttttaaagaaagtaattgcaatcattttatttttaggatttgtaatttattgtataattttcattttaatttaaatatatttatcttttacacatatcaaaatcttatgagttactaactttaaaaactaagcattatataataagaagatatgtaaaagttttatataataagaagacatagaaaagagtgtgcaagcaaaataagagaactctaatttatatttgaaacaatgacgatgatgagtgaccttcgcaggatttgttagaggagata

SEQ ID NO: 30394 - DNA, 445 bp, Arabidopsis thaliana columbia
ggatgacttcgggttttatgaagagcgggagaaaattatacaagaccggaaggcaagaagacagccaagcttgccatctgcaggagtagtagcaggagacaatgaacataaacctgcttctgctgcattacccagagacttcatgaagaacatgtccaagagttttgcgcaagttgtccgcttggacgaaggcagcaaagaagcagtcaaggacagttcatctccagatgcaattacaacagcagcagtctcttctggtcaatccaactagtaagtaaaagacatcaattagcaaagactatgtcttcaaattcgatgatatggtcgctcgtgggtgctaagaaggtatctcaaatgaaattttacgtctgaccgggtctggatatttgtgtaaagtaagcctctttcctccgacctgttctgcttcaggggtattgagccaaaa

SEQ ID NO: 30395 - DNA, 489 bp, Arabidopsis thaliana columbia
acctatttcagataaccaggacttgaccagtgtgtctattgtatctttcgtcttagcgttattccccaacaaggggagaaaagttgaaatttcaatggtaagcgcgaaaatttggggaaggaaagcacgtgtaagtcacgtgagataaaaacatatacaaccttagtggcttgtattaggcccaacgtttttaccctaacggcccattaaagcccaatccagatataaaggaaagcacttgtaaaaagtcacgtgagaataacattttcaaccacagtggcttgtattggcccaacgtttttttcactaacggcccaaaaagcccaaatcagctattgattagtggaggagtactcatttattaattcctcctactaattggggtttacaacttaacagaaaaaatgcatcagttgtgtgagttgtcgaacaatcaaagtgatttaccaacaaaatataaataacagtaatcattaacttgattagata

SEQ ID NO: 30396 - DNA, 504 bp, Arabidopsis thaliana columbia
actgatatcatacgctccctaagatctactctttcgtaatcaacgagctctctgtgtttttacctcttttatcttattatgtaatgttctactttgtaagatctactcttttgtaatcaaaaagctcactttgtttttaactttttaatctttaccatgcaatcttctgctttgggacttgggtgttaggattcattcactttgcatcactcgtctaagtatgagacaaaggacagtctaaatgcctaatattaataatacaacaaagtacaaaggtacaaagatacaaacgtcaaatgataatggactgaactacaacatagagagacattagttctaccaacacatacaacaaccactcataatgttaatgctacacctgaaatcacaacaaactcttcacgctctgtgctctgtacagaacgatataggttttaacagctcacggaagctgcagctccctgctgctgttgaacttgattcgcctccaagcttctgtttgtg

SEQ ID NO: 30397 - DNA, 543 bp, Arabidopsis thaliana columbia
aaggttttctacctctacaccactcaaaatagcgtcggataccataagaaaaacaaaggaacaactatgcatccaaaggaaacaacacatcagctttcacaccagtaaatatcagaagcagtacaaaagatattaaaacagagaagaggcaatgaagcagatttacctgaaccaaaactccatctaagaggaaggacataccgctgcatcctcctcagctaaagacacaacataaggctgaactttgaatgtttcagtaacattacggctgagctcgtacttcacaaccttcgtcccaaatatgttgaaccttcctgcgctattgtaagcaacctccgcatcagcacccttcctaaaaactaccctagcccggtttttcccctgtcaacttcagtccgcaactcctgtatagggccaaaatgtctgaacattttactcagactcttctcaggaggtattgtatcagtttcaaaaaagttcattataatctcagctggtgcattctcatcaatgtctgccggtttcttagtggctgaatgagga

SEQ ID NO: 30398 - DNA, 358 bp, Arabidopsis thaliana columbia
atcagatctgagtaattgaagactcgccatcgtgagaaatccaacgagaatcaactcaaagtagttgaaattctaggtgacggaacgacgaagctttaaactatgggaaagaggagacggacgagagagtgagagagcttttgggagtagctgagcacagatacttcgcagagttcccaaccccctgaacaagacatctcagattcttcggccgatggatcttggaacatgagctgccactgggccattaactacttgcctcgagtcaatcaggtttggtatgtaataccggtctagttatatagtatggtgtaggctcagaagtatcgagccgatcccattgagtgcacaaactcac

SEQ ID NO: 30399 - DNA, 432 bp, Arabidopsis thaliana columbia
tgtttgagctagctcatgatgattattcttttcttttgaaatagttttttttagcgtttgagttttgaggtttttcgttttttaaaagtatcctttgtgaagaagaaaatggaagaagttgaagctgcaaaaacacagtggaaagtgcatggagtattgatccttatccaacaacatgatcaatcataatggttgacaagagactgtttgcaagtcaagagagccctctcttttgtctagagggtaggtcaaggagataaagaaactcaacaacaacaactacaagtttagctcttctttgttgccacaaacatgtttttggagagcctgtttgcagtatatgctataagtggttgtattcaatctagcacaaagctctcagattgtacagctggtctcctcattgatgttgttaccagatatgtgcttgat

SEQ ID NO: 30400 - DNA, 535 bp, Arabidopsis thaliana columbia
taaacccatccaaaaacttatataaaaattagttatgttgaaatgcaccaaataagtttggatgtttttttcttggatttaaaggcttaccaaggaaacatatcacccaagatccacaagccacgtaaagcaaagctacaacgttctgtttaagaaaaaaaaaacattttgttaaatagccaatgtgcaaaagaaaattctataaaagttttttttttttttgtcgtctattataacattagagatatgtattctaatcctattaaaatgttggatgtgatatttaataaaaatgctagatctggatggacatcctgatgaaaaaaacaatagggcctaagatgttaagcatcatgccatggtaggtttactttgtcatatcgacttacaaagaaaagcaaggaaaaaaaaacagaaaataaagaccatagaagaccttggagatggtttgcatgaaggttttattattggaagaggaagtgccgaggttgttcagtagtgtgttgaagatgaaactacgacaggagtgatgaag

SEQ ID NO: 30401 - DNA, 522 bp, Arabidopsis thaliana columbia
agagaaagagaaagagagataagaaataatgaagttgttagttaatttagtaggtgaagaatgtgaaatgagggaagaaggatttaagacgcataagtttcgtgtttggctctcaatgtgaaattgggtttgatttggtgagctaaaaaaagttcgttgctcttttctaaccggtcttgtaaatttgtgtggctctttattctcgtgttttgctatgttttcgttttggtcttttgaaaggacgaatcttttggaggggattaactagaaaattaggaaaattagaattagggttttagacttgaggattgttgataaaagagaaattgacaggtgggtagtgacggatcacctaagttcttgtttatttgttatacactttattttattttgtcaaacaacttgtttaatttatacgtgtggaaattggaatttggagaatattaatagtgagtaatcaacataacagaatttttttggatactactgtactattttaaacctggcggtgaagcggttgtt

SEQ ID NO: 30402 - DNA, 566 bp, Arabidopsis thaliana columbia
caccgttaaacttcctcaaatctcccacggctatctctccgctaacatcatccctgacgtatactttctccacaccaccggtatcaactccgattatattccctaacaaccgccccggctgcctccactccgcgagcaaagccggcatccgaaaaccggcgcgtggatcacacgccttcactttaacggcgtcaacaccttttttctccgccgcccaaaaaaacggtgacgaggttgagttatagttcttgagaaacgttgccacaacattctcatgatcatcgccatcgatatctaaatgatcccaaagcttcacgactccactcgaaccaatcccaccaagatcaggccatgagaacaaatctccaaaactaccactatatcgcctccccatccatgtgcaattaccattgtctccctgatcatcatcatcatcgtaataatcagatcctctaacgcggaaacctccgttgactcgtcttcgattaaagatcgagtcaacatcctcatcttcatcatcagcctcatcttcttcgtctttttcatcgtcagaggagacggtagag

SEQ ID NO: 30403 - DNA, 498 bp, Arabidopsis thaliana columbia
tttatgttgataatttcaattttttgtatttatttaatgaattaaaatctctacagccaagaaaataaggatttgagaatttactctactacaacttaaaaaaaaaaagaaaaactgggctgtaagtttaaaaataaaattacaacacgattggtaagtaatcaaagttttaagaaaaatttaggctaaatcatgcactaaatctattgataagagatccactaattaatggaagattcttattaatgatattttaatttaggacaaggaggattctaaggccaaaacttatcggttttgttgtgtagcttgctggcagataaagtgagtgactagaaaaacttatccgaatcctttggtattgattatcggtttatccggttaaaagttataattttaaactaaatgcacataaccagttatcttgaaatgaaagatggaaagccctagactatattgagagccacttgccgatttcttcagtgatcaaaaatgacg

SEQ ID NO: 30404 - DNA, 759 bp, Arabidopsis thaliana columbia
tttttcccaaaaaagaataattacatatattcccgatattttgtgtttattacagatatttcctatagatttgtttattgcaatcgctccttaaagttctgtttattacatttgtttccattagtttttatttattacaaatgtgccctatatttccagttggttctttgcagcagatgcatcatcattggctttggcataaagggtaaatataaacttaatagtacttgcttcgacaattctgtagactaccgataacccgagaaaaggtaactgcattatccatgaaagtgtagcatcagtttgagtacaaaagagaatacaaactcataaagaaaacagtcaagacctgacgttcatgggagttgagctcttctaagactagtgggttatgcttaggaatcatgagatggatttggcacgagcatttggatcctcctttgactcgagaaacatcatgaaaacataaccgagagaccagaggagaatgtattgaaatggaacccaagagaggcatgccaatagagacatgatactcccaacatactgtggatctctaatgactccaaatgggaactctgtaacccatggtatgttcttcccgaatcgaacaccgtaataagtcccagcttcacctaacaattggtataccctgcaaagatgtgaccttttaagttacaaaactttacaacaagagagctcagttacagaacatagaagtgtcaccatatcaacatcactcaataccattttgttggg

SEQ ID NO: 30405 - DNA, 975 bp, Arabidopsis thaliana
gcctggtttgctttccacgcgccgcgcgtaactggtgatgactttggatagactggcttgcttgcttgaggcattgctttatagtgaatttgccgtaacggtaaggatctgacggtgaggatttgacagcgttgaggatcgtacggcaaagcttagggtatggagttgacttgcaagcgagagaaggtgactgagactgtgacggaggcaaagaaggtggctgtgacggtggcacgaatattggtggctgtgacggagggaagaatggtgactctaccggaggctcataaggtagctgtgacggaggctcagaatgtggctgtgatggagattgttgtgatgagataagcagagcacatgagaggaagataaaagacaagaacaagagagaagaagtgaagtttagtgtttgcattttcatcctttttgttttgtttgtgtattgatggtgtttgttattttggatctaaaatctgctatatatatagactatacgaggagctttctgctatttaatgaatgcatgggctcgagggaaactgaatttatcatttatgtaatgcatgttggtctaataattaagggttatactcgttttggtcaaatgaagagtttttttggagccggtggtccaccgtcacgacgaccaaacatgggttgacttggttaggaaaggtttcttcatgtgatttaaccgtaaaaaatggctatttttagagcttaattttgtttagctcaatttgttatgccagttgacactgtaaaaaattaacattaatcagacatgtcaaagatgaatttgtatttaatttaatttataatcaaacaagctgtgttgacttggaagagggtttcatatctattatttgaccgtagattttgcatgtgatgtgttgggaagcttttagacaaggcaagacggtgcagcctagaagaagaagtcgtcactttgtcgattacgcaattcacactaac

SEQ ID NO: 30406 - DNA, 397 bp, Arabidopsis thaliana columbia
agcatgcattgtcttgttggactgaagcctctagccatcttatcaagccagagctacgaaaagtatggataactgttgcatcccatttttggcccactggtgaaaatgaaaatggtaggagtggatggacaatagattaggttctttgacaagtaagtgttgagtgacagtcatgaatatttcccatttcttgattttaccaattgtgtctctaaattcactcaccagaaatatacaataagaagctgaattttcttggattacttaacttgttttagtgaatgggtgagaaaggtttccagctgtagctgtcaggtttttttctgcagcaggcgcctgccttcagcgtttttgaggataacacgatacactctttcttcttttgctaccattaagc

SEQ ID NO: 30407 - DNA, 548 bp, Arabidopsis thaliana columbia
tgaggttaaattgcaaaatgattctatacattggtttgcaaactggtaagacattgatacactgattctcatccctaaaatcagatataaaagaaaaagactataggaaaaggaaacaaagagatggaacgcctacagataatcctaaactaggaaattcaaagagtgttaacctatgagctttttttataaattacataacagttgttagaaaatattacctttgaacctcagccgatgatcttagcctctctcctgatggaggaaaataatagctgaatgacaatgagaaagcaaattataataatatcattatgattttacatcattggaaaaaaaaagtgacaaacttacacgtctgcgaattttgtggattcacttctaatatggacagaacgtgaccagccggtgggtatgggagggatgctaggccatgtatcacatgttgttccatcttgaggaacattacatgacatgtttggcgtccaccagatgttgtgccgcagcaaatggggtttgaagttgtgttctttgattatattgtagtg

SEQ ID NO: 30408 - DNA, 616 bp, Arabidopsis thaliana columbia
tggacttttagttgatttttctgattgatctatttgatcgcttgttttaacagtattttcttcatgctgatgtttctcaccgtttttgctaaaaccttcaagctggtccacacgattacgagcaccattcctattggaaccttccatacgatcacgacccctaatcaaatcttcaagatgatccatatgactgtttttaactgagcctacaagctggtccgtaccatcgcgattcatgtttctaaccgagccttcatcaagctggtccttgcgatcacgaccaccattcctaaccgaacgttctgacatttgggattgatcgtccacgtgaattttctttttatttgccttgtcttttagcatcagcttacgatgcatggactccataatctttgtaaccttaggagtctcctttgtttcattactttccgcataatccggcgaatgagatcccggaaaggctctcaccgtcttcctctgacttcatggacccgtcttggcggcgtttttttgcttatggagctcacgtatttcattgatagcttttttgtatcttcttcattttcaacttttcttttgatatcacaagtaacataagatatgtaagatttatata

SEQ ID NO: 30409 - DNA, 372 bp, Arabidopsis thaliana columbia
gccagtgtgctttaaagtgcgctgatcacaatgtgtcaatcttggagtatccgttgtttatcctctaatttactgattaatttatgaacatgtataattatttatatcatatgatctcgtaagatatcttagcattttccaccatatgttattagtaaatcatctagatggattgatgtaaataggaaagttaaattaacacaccaaaaaagtaactgattaaaagcatacaacttaatattcagattatggtaactaaatcagtctcatgcaaactccaaaaaattatacgagtcacaactcttgatttatttccggatgaacgaattacatcttatcatttgtatgcaaccagaataacacactaactat

SEQ ID NO: 30410 - DNA, 546 bp, Arabidopsis thaliana columbia
taacatagtacatgtcagtaaatgaaaacatagttaagtaagaaaattctacagatatttacaaatgtttattgaaaaaaaaagagagaagacaactctattcttggaacgattcaagttttgttttgtttaatctaaacgtacacttaggtgatgatacgataacatggtgtcatgatttgataagaaaaccactttagataatttattgaaagcctgattagctttataaacacacatatattcccccatcaaaatattctacttttccctcaaacaaacaaatattgatcgtactttgttcctttaatctcgaagttgtctttacgtaatatgaaaacataacataactctcttgatattaaatctaggtctagaactcatgcgaaccaagttttggtaagagaataaaatgaacctaagaatatatcaaaagatcaaaaatatccaaagaatatgcaagagttagaagtgaatcggagatcaaaaagctgtgactgtgagtacattagacaatatatccttccttagagaagaaaattagtg

SEQ ID NO: 30411 - DNA, 515 bp, Arabidopsis thaliana columbia
tacaaaatacccaaataataattcataatttcacatagatttttacatacaaacgtggaggttttctttgattaaaacataaaaaccctagtcaatgatttttgcacacgtagataaactgtattttctgaaatcagatgtaaatctgaaaaagtaaatatttattaacggaatacagctaaggtgaagtttgtggaaaagtaaaaatatttactttatttaaaacaacataaattttccattttttaaaaacttaaatttccaatatttgttttactttttactgttctcctattagtaaaaggagtagattaacttaaaagcaataagccggcaaaaaaaaaaaaacttaaaagcaataaaccgacttgaataccaattaagaaattggctataaataaggctccaacttcccaaaccttgacaccatcacaacaatcaatcgcagcgccgattctccttcaaaaacttttcctaagtcgtcactttttacgatggcagaaacgaagaagatg

SEQ ID NO: 30412 - DNA, 503 bp, Arabidopsis thaliana columbia
gccactcgtcacacacaaaatgaagtcaagtaatgtttcttcattttgttattggtttttgttcctaaatcacttatctagatattggcttcgtatgccctattttatctcttaaattttcaaaaaaataacgtccacataaacagttgacttcaaaccccaaaagtagaaaggatgaaatcattgagtcattttcatgaaatcgaaaaaccacgaatcttacaaaaacaaaatcaatcaggtcctgtcatagttttaaaacccacaaagataaatagtgtattttttttttgatcagtcaaataaatagtgtcttatatggatataagctaataattgtgagaacgagacaaagccgtagaagaggcgatgcagttgttttggaagtaatacgctactcactacttcagaatgtacatcaactatttacgaatttatagtcctagatttattttgtatcaaagaaactaaaatttagccagaggtatattagagaataatta

SEQ ID NO: 30413 - DNA, 951 bp, Arabidopsis thaliana columbia
caatcggcgtccatgaacaattggttccatagatcgacacaacaatttgcagtgaggaatcggagaagagataaagcagaacctggtcttttgcagaagaaggcgtggaaagcaccttaaaggggtgggtctcaatgaacgaaaatatgggcttgagcccaataggcgagaaacaagatccaatccagaggcatcttcatatgttagggttgcgccgccccctggttgcagtttccggtgagaaacggcttcatgggaagacgagagagatccaaccatagcacatctgggcaggccggagcaaatcgtcacagttgcgagtatggagtctcgctgataaaggatggctcctcgaggttcaaaagcgatggatagatcgtgggttgagcttggcaagggaacggggttgccgggaaacgtctcttagcttcaacatccgaagaaacatcaaagagctttggattaaaggggaataatggggctgactgagataaaggccaacaatagcgagatacaggggatttagaagagccaatgaaagcagagaaacaaagatcctgacgccggcaagcataagctttaccggcgccggtggaggaagccaagagaataacctcaataattggatcatggaggatatttctgaagcttttgttagtgaatggtacgaaaaaattggtcgacttaagatatgattagtataccttttctaaaaataagattctatacaaaatatattcataagcttatctatacgttttttaacaactcatactttttcacatgttttttcaataattccgtcttcacatctttttcgaaagagctatcactctttctatctttttgcaaggactcatttatttgtttcttctttcatgttgacgtatatcaaattaccctaagaccactctctcaaataagagatcgtcaattgtacttaaggataga

SEQ ID NO: 30414 - DNA, 599 bp, Arabidopsis thaliana columbia
gttgtttgaaaaacaaatgtggaagagtgaagaaaattgtgctattttcagaaaactttgctatttttcagaaaatcatcaaatgtttttggtgcaatttcaaaattgttacgaaaaggttttcttgatcaaataaccttaaccaagaaacttttgccaccatttaactcagcattatgcttagccaattactaatcagagaatctacccttaattgtttggagtaaacatagaaacaatactaaagaattttataagattttgattaagttcatgagaacctaactcataatcaattgacaatgagtagattgatccatgtcccttatatactatttaaatcctttatcatctttttgatataaaattcttctccaaaatcttcatcgagatagtggattttctaaccattaatcttgaaagaattcattacactctccaaataatgttcttttagctattttgataattttgttttattttctagaccatcaattagtggagatgatcggactattttgtaagccggattaatgcagaggtgtgtgttctgtgtttgatacataaaaagtgttttgtaacttattagtccgaagaca

SEQ ID NO: 30415 - DNA, 859 bp, Arabidopsis thaliana columbia
cattaaaagaaaatattctaagttaaatacaaatcaatcgatataatagagaaagcgtgattggtggtgacgatgaggaacaaatcgtgggcattgatggagctttatctctagatgcattctctggattaaatggtggatcaaggatttcgagcaagcaatactccttagcaattaatgctaatttaattacgtcgaataacgaaagtttatttcctttgaatttctctttgattccttttgatattccggccaaagatgttttgcaagcttcttcttcatttggagggtttgaaatctccaacataaacgatccaaggttgatggatgattcactttccttgcttggttcgacgtgtagtagttcaggaagtccttcagcaagtctttcaggaagttcgtcagaaagtccatcaatcagtacatcagcaaatgtgatgtccgcatcatactctccttcttgagaaagttttgtcctcaaaactaatttcatttttttttttttttttaaatcacagaacaagaaaaaaaaaatttaatcgaagaaaacaaaacagaagcaaaaacgattgatgatataggagctttgagctctgataccaaatgatgcaagactcgggggtgagtctcacacggggatagatatggcggcttcacaagctggcgatcgcttctcttttgtgaaggaaagatggtcgaaggtggaaatctgacacgctggcggtcgcttctctcgtgtgagatcaaatgagggttttgatggtggattgatgatcgccactcaaaagtgtgaaagcctttgtgataagatcacgaacctttgtctcaaggaatcccacaagagacattgattcacacg

SEQ ID NO: 30416 - DNA, 485 bp, Arabidopsis thaliana columbia
  unsure (1)..(485): unsure at all n locations
gtaatatattttgtgatgaaatattctaaaccggagcatgtaacataattccctctgtacgtcttagatttctgtaacataagattattattcttaatgtatttaaaggatgcttaatataattgttagccacttgtacgtacgtctttcgcgagaccacgaaaacaaattgagatggattgttgatgtgttcatgatgctatttaagacggggttatgtgtacacttcaggtcaaaagaaaaaagaatatcaaattctaaacttaaattttaattttatctaacctactattcaaattgtttaagaaattactccgcttactcacttaagaaacaaattaaatttagttaagataattagcatgttcgtttaacagtcgcagctgcaagaactgcggcacaaataaaaagcctgagatgatgtgtatttgggaaaaataaagtgccgcagttgccgcagcgatcagaaaaagnaaaagaaacag

SEQ ID NO: 30417 - DNA, 1439 bp, Arabidopsis thaliana columbia
agggagtagcacgacacatcagcggttattctattattagggtttgtttttaagaacggtttgataacaatcctaataatagataaatctacaatttatctacttcgtgagactatccctagacctcacgtttaatctccttaatctacaacttaatttactgtttaatattcttttactttcatctactttgtctagcttaatattaatcatcattagtagaattagacccttaagtgctaacaacgatcattagagggagtaagcttaacgtaatttgagctatatcaatttttctactgatatacctctatttttaccggttttaagtatgatttaggtattagttttggagtctatttgttatttttagagtcttttatagtggggacagtgacgtttaagtctcgaggagatgcttactaatgatgcttttatttttttattctttttatttttcgtttttatagttatcgtaaaaaaaaaatcagcgttttttgtagagtctagttacgaatttatgatctatattctttagattattgcctggttgattattgctgttgtttcgattcaatccgactattggaaaatccagattgtaaaccaatagacttgagaatatcctgatttacaacacaatccattaaggttggagctaatctcactgctctaccttttacctcgtcaaaatggttagtatttatagaacttgactccttgttcatacctggtatatgagatgatttcctgtagtgtaaagggctaagaatatttccttggatcctattagtttacattctaaagaatgatctagtgcacccctatcccttcctaggcccaggacggaacgagagcgtcacgtggacgcccgtagtcagccaacctaggctctcggaacaaatccgttcgcccgagtgtgccgaccgggagtgccgttcctcacgaacgtggcttaaggctttgcaacctgtactgcgatacgtgagttatgatagtctggacatgactaattatatcatgggagacacatggttttataaaatcagagctttattacttatcggtaaattgagtcttacataatggttgcctgcaaaagagaataagggatgagcgctaatcgctcagtgaattcgggttctcctaaacatgcaatatttccccacccaaacccaaaataacaagcaaccaagcaatgcaacaatcaaattgtatatactccacgcagtatacacaaacaatgcgcaacgaaattaaatatgtatgaccactaaacctagggcgccgcgtattgatcttcccttcccttagtcgtgaacacatatacacgtagccacaaacgctaaacgagtatagaaattaaatatgtatgcaactatctactcaaccactaaaccgtagggcccgcgtatggatattcgttcccttagttgtga

SEQ ID NO: 30418 - DNA, 302 bp, Arabidopsis thaliana columbia
taacaatgacaagagcttcatcattcacttagtcttcatctatcaaaatcggattttttatctttgttatcttccgtctagtatgagtgtaggcccaatgaagaatcacaagatattatctgtcgaccgacaacgggagttaccgacgataaggtgcagtgattcagcgtcgatctcctctcaagaacccataaggcatacacacgtgtcataatactgacgtccatatcgtggactgagatgttcgtattcggcgtctattatgcctttcttcgtactgcagatctagttgagtcttataa

SEQ ID NO: 30419 - DNA, 503 bp, Arabidopsis thaliana columbia
cccctaaaaagacatatatacataactctcttatcaataatcaataccaatctataattcgtttgattcttctaaaatttatagttttcatttttgttttataggaaattgttagaagctccttatattgattcaattgagtggtctaagtggcacatcttttgggtcgacgagagggtttgtgcttgggatcatgcggatagcaactataaactcgcttacgatggttttctctccaaggtaaacatgtatacgttaaaaacaactatttaattagcaaaggaaaattctgttttatattcccaaattctatctctcaaaatgattagagatgcttaacaagtaactttattcaaaaaataatgcaattctattgttaaattatgagctacgtaccatatatagtatcaaagtttgcattcatgacaatataaaacacccaccattcaggttccagttccagctgaaaacatctacgctatcgataacggactcggggcaga

SEQ ID NO: 30420 - DNA, 804 bp, Arabidopsis thaliana columbia
acgagattttgaagaactaccacctggggcttttcagaagctacggcaatcattaacggtaattctttgttctattaactatttcttccaaagttgtagggtttcatgagttattcattagtatgtctgttcctttgagcaataacataataggaaaactcagttgaactagagtattctgggatctaggttttactatgatttcatctttctggcctattattcttggtattggacaattacttcccggaaaattttgactttcattattttctcaaatgcagacattgttaaaaaagttccacaagggccctccaaaagttaggacccaggtaagtgcatatgtggaattttctgttgtgcgtataaagtcatgtactttgtgtcgagttatcttatttaagtattttatattgtagattagcattgctgttgctgccttggcggtgcatgttcctgcggcagactggggagatggtggtataattagctggcttagggatgagatgcatatgcatcctgaatatgtgcctggtttcttggaactcttgacagttttgcccgaggtagagtattttttattcctttgtttaagtgttcatctcactcagtaattaatttgacttcatgtatccggctatatagatatgaaaggccttattttggtctgacttggatcttcttacttattatttatgctggtattactgacctcaaattgggtagacctatttggagaatattctgtccttttttacttttccatactatgtttaggtagcatcgacgttatctgtgagtgtt

SEQ ID NO: 30421 - DNA, 342 bp, Arabidopsis thaliana columbia
tacctcacatacacatgctacacccaaagaattttcgatgtggaaccaattatcatagctagacaaaaccctggatttatatccctagagatctcgtgtgatagaaatcttgatttggtacaaagaaaaacaataacatggttcaaaagtctttgtttaagtagcacgaaaccaatcaatgatttgggtaatgtaatacaaaatggacgaattgatcagttaacgagagttacggacaaagaataaagtcggcaagaaaaaaaatacaagtatgaaacacgttgtaacatcactgatgttcactggaagacaacacaaagcaaatatggtgaagacatggca

SEQ ID NO: 30422 - DNA, 154 bp, Arabidopsis thaliana columbia
ttctcacttgttcagggtcattgtagtgttggggtgtcgtcatatttactagtaggatgtttgaaatatcgtggttgggatatgttggtgtctttactctaaagaccggacttctctatttatctctatgtagtaattctcgtgttgacgtcgc

SEQ ID NO: 30423 - DNA, 867 bp, Arabidopsis thaliana columbia
aaatgattacattcgacgaagcttcctcttcgaatgagaagcaaggttaaccaatcggacgcttgcagaggctaaacccatcttgaaaattgtaagcggcttcgttcgagatggtggaacggtctgagccattggatatggtctaaaaggcaagattcttggtgttgcggcttgcgagtttgtggtcaatactgtctttgagttctgaggtttatgtaggagtctggtttgcgtaaaattcaatgcaaatggagtggttcgccattggagtggtcagtgagagaagttcttcgttttatggttcagttgcttctgtggtttggttgatagtttgaccttcacctgtcttcttttgacttctgtgccgtagcatgatctttcgtggacctactcttgggcctaattataaggcccaaaagatatcttcatcttcctcatatatggaatcttaagttttgaacaatttcaatctctctcatttgcccacttatctgcgccgccgacctacagaatctcggagaaaccttaccggcggggcgggaaccatgcgtcttcactcagcaattactctccgaaatctgttcaccagaaagtctctccgaatcccacagaatctaagcattaccgcttccccgttattgattggagatgtctccggtcaaatcaaaccttcatcaacgtctcactattcgaaatctagtctctcagaagcgtcatcatcatcatctagctcactaattttccagatcccaaacaacgcttcattcttcctggaaaatcagaggagatacagcaccggctccagcagcggttcaccgccagatgtaaacaaggtagtggacgagattaatctcaagttcgggggat

SEQ ID NO: 30424 - DNA, 536 bp, Arabidopsis thaliana columbia
gtttctctaattgcttatataagttttatacgatgatggaagaaactagaggaaattgtcaaaagataagaatccatttcttctacgcatattggtggttttttggtagaatttgttctctatgttctgttaaggttataaattctcatcttgtttttgcttaggatttgagattaatagtagaaatagatgattcatcgcatcacttttggatttggaatcgagtccttgcaatttattgtattcatataaaggtatgatatcagaaaaggatttttgtttcatttgtgtgatggaccttaaaatgactatatataacaaaaacacaattttatttatatgatgatttatatatccatcattctgtgaacggattagattttctttgcctcgtagatcaatggtttgtctagtatagtatagacaagttcaaatttgtttggttttgcttaacgaatcattaatttgtattttaatttcatcttccttaatgcaatcgccgacgtaagacaatcaattcaagcaaagcttcaatt

SEQ ID NO: 30425 - DNA, 543 bp, Arabidopsis thaliana columbia
cgctagaggatcccactgtttatttcaatatcttgatgctaactctccgtttggcaggaggaactaagatttcacatgaagcccaagtctctgaccgtgtcagaccggctaatgccagtggtccaagcccacagattaataccgctgtagggaggagtctgggttttgatcaagtccacaagaatgtacgtgcttattcatttgcctcttccaaataaatgttgtatcctgcaaccctcccccttgtgttagcatctcatgcctgcatctgtgttgcttcagagttctgcatggttctctgcttaaagcttttacctgtattgcatggtcaattgtcatcaacgagctctatatagtgatatgaactacatatagcataaatgattaaaacacgatactgatcatcacgaaataagctcttgaccattatataactgaaaacccattgcagatgaacatgccatcatccacttcattatctcctgcgggtacctcaaaaagaaatgtcagacacgaaacctcgaattctgggtttgggagcgg

SEQ ID NO: 30426 - DNA, 502 bp, Arabidopsis thaliana columbia
tttatgtctgataccattaatagacctcaaaaccaccatgtcattgtgttaaatctagacactaataatctcaatatgtcttagttttaaccttgtagaaagttcatcatctatgatagtgaagtacaagacacgacaatgacatcatttaggaaataaagctagaagggcataccatcttcttagtcacggaagcaaacgcccttatgtcacggcgttttaacgtcatctccttaacaaggtcgtcgaatgactccaatgatcccttcgttcctcttccattaacgtcctgatgatctgtcgtctcttccactagagcccgtgtcaactcttccccaattttctgaaagagacacaaacacgcattttcttgccgtgtgagttataacaaactaataagctgtcataataatgtctttacatcaactcacgacacaaaacaacaaaactgcttcaacagaaacagtgcaaatggaaagcgtttttttaagtcatgtattgg

SEQ ID NO: 30427 - DNA, 628 bp, Arabidopsis thaliana columbia
  unsure (1)..(628): unsure at all n locations
tgttttatatatacacatatcctactttatgtatgtgtgcaaatgcaattggaaggatttatcatatacgatgaatgtatcgcatgggtggttagtatgcattaatatggactgttcttaagatttgtgaataaagaaaaaaacaatgacatcttcttcttcctttttttgtgttataaacgaaatgattttattttaattgtattgtttttgaataggaatgtgtaaaattacaagaaaataataattcaaaaactaaatattgatgtgcatggcaacttgagaagtatttgaggaaactttaatggctaaaacaagttggctcttgatttcacattatgccaaaaacaaagctggttcgtccatatatgataatatgagagaaatttatgtttgaaattttaattgaaattttaaacccgataggataaatatgtttctgattcaatgaacggatctagccgcgttgacgggccagagcatgaggcttagaatgttggcccattattcgatgagtttcaaacgggccgggaaaacattatctcagactgttacttgtctgttttgcgtacacatatgagagaactcagacttgattacatctatttcgaatanacttgatttgttg

SEQ ID NO: 30428 - DNA, 515 bp, Arabidopsis thaliana columbia
gtcgactcatccccggttccctctgatcacctatcaacgcctggaggaaactaaaaaatttttagagacgatatttcgagtgcttatgattgtttcatcgattctgggcaaatttcaaagaatctgtcgacagcttcctctagacgctcgcggaaagtgaagaaggcgattctcggaatgtagaaacgacgccgtttgactgcttacctatcggtcgatactcgataaccaaaccaaaaaagatcaatctaaccataatttagtcaaccggtcgacaataaacgataattgatattttcggtaaatgtttttttttccctgttgctttttggtaatcgttaattcctggttgtgttaaagttttggttttactaatcggaaatctataatgtctagaaaaaatgattgataacaatctaatggtttatagtagtgatcaattgtgcatggccatatcacatcgttttgatcggttattaataaggagtcaattcgccctgagtaacatgcagaag

SEQ ID NO: 30429 - DNA, 158 bp, Arabidopsis thaliana columbia
gcctgattagaatttagaaattatttatatgttgttttaatttgtttgatatgatatttgggattgaaattattcacacacaaaaaaaaaaaagacaaatttagacaaacatttttggatattctcaaaggagtgtgaaagaacgagtggttcttttg

SEQ ID NO: 30430 - DNA, 528 bp, Arabidopsis thaliana columbia
gaacccattatctcgaattcgtctcttaattttgaggttttttttgatgtggagagaaacagaggattagatagataaggaaaaagaaaatgaaaaccctaaacaaaaacccttggaaaccgacaaggaaccaacaaaagaagtgtttttgttttgtctgtttgggtggcgcacgcaaaacgattcctcgtgatcttccgacgtgattttcaaggcaacaccttgtggaaggaagaaaaaatatctgaccacataaattgtgaattaaacaaaaaaaagttaaagataattagaggaagccacataaataatttgtcaaaagagtttttgtttgttatgataaaattgataattgaattagaataatctttgattgttgggttttgttttttactctgcataagtgcatagagatcattcaatcattcaaggtaaggtattccccatttagcagatttattctaagatgaattaacattgcaaaagttagtctttatttacgcacgtgagtttttttaggtggaagag

SEQ ID NO: 30431 - DNA, 522 bp, Arabidopsis thaliana columbia
gcattgcctaaagtaggcgattatacgcatgtccctcatcaaacgagcatccttatgtattaaaatgctgtacaaacaggatacaaaaacttgtaactactcgaacaaagcgtatcggtgagattattcgataactagcattgtacaggacttacgattgattatatctgtcttggtaagcagattggatctctatcaaatgagctgtctcatcatcattaccgtctaaccagaacaacccagctggtaggttcttgttgtaagcagagatgttaattttcacaacgtgggaaggggaaacatatctcagcacgtccaccaataactcatagccaattcctaaaggttgtgaatcatttctattagtgaaagaaaaaatctgttccttttgttttgaaaggatatagagagtgagttacctttaacccatccatggtgtattaatgacaagcggcaattcagttttgttctcgctagacttgcagaagtgtagctgatagtaatcgaataaggtatatacat

SEQ ID NO: 30432 - DNA, 582 bp, Arabidopsis thaliana columbia
tgatttcaaaacatgaatcatgaagtcccatgactatatattattcacatcacctacctttgggtatcctttacccttttaggcttttactcctgtattatgttttcattttctaacatctaaaatgcaactggtcgaactacgagtcatgtctacgatggtagatagatagtgcaactatttcaagcttcgacttaaaaattctaactgaaatttggtcaacaaatttggtgaagcataagtggaaactttagagagaaaaatcccaacaaatgtcaaatgggttaatcagtggtacaaatagtgcggtctatacaaaaagaaatattatgaactcaaataacttaggtgtcgattgttttaaaattatttgggcttaaaggcccaatattactcaggataataaatggatattataccttataagccccagttattaattgcgctttaattgtaatacgacgtcgtagagaaggaactcgttcgtcatctaagccaaggactagggttctctgagggtacagaactaaacttaatccgttaatcgtagcaaagaactacactccagtggtgaaaatggag

SEQ ID NO: 30433 - DNA, 421 bp, Arabidopsis thaliana columbia
gggatccccgataaaatatataggaaaatacttttaaaagaaaaagtagtggggttttaagaatataaagaaaattagtggatgttcaaaatattgagtagtgaaaaataaaccaaaacaaaaataatctatgagggtgattaggagaaggttctgctcgtgacggtttgttttttcagccaatcaacaaagcttttaagtggatctcactagatttcatagcatacgctaacgacctaacgttaaagtcaggcaaaatctatgtttaaaatttgcgtcgttcaaaaaccattccacaaaaaatacaagctaaactggcggcagagtctcagttcaatgaatccattacgagctttgtttgaagaaatatttaacccactgactcattaatagagcaaccaaaacaaaatcctttaactat

SEQ ID NO: 30434 - DNA, 807 bp, Arabidopsis thaliana columbia
tactacatattataactatttactaaaactttgaatcctttcaggcaatgtacctgctcactaacagcagtagtgaaatgttagtatctggcatgactactccatcttccaagatagctgtggaggatacatccgtggagagatgttccattaccaagaagacatgcttgaaaccaataaagttggagaaatttgatggcaataacgagacagagcttggaaaggaagaagacaagaagaataatgggggaaaatgatgtaggaaaagagaatcctgtttccaatgaaccaaattgcgctgcactttgattgtggcttttccaatagctcattggagacaaacttatgtcggagagaagatactcatgtttttgtttttttcaagcatatcttggtgttctgttcttttgatatttatttaataatgcctacttagggtatatcagagtaaatgatttactctgattagtagtcaacctaggttcgtttttttttttttaccactttcatcaataagatcttctattttaaaaagattctctgttacttttattttcgagatatgctataagaaaaattaactgacattttcctttccctgagaacactgcccatcttttccatctcctattgtttgtttatcaacctataaatgagaaaacgattatattttacagtaaaaatatatatacaaaatagatagtatttatgattaggggaaaacaactctctacactaagtagtttaatgtgacttgatctaagctgttaaaagcatatatttatagttaacactctgataattttt

SEQ ID NO: 30435 - DNA, 1276 bp, Arabidopsis thaliana columbia
ctagatgatgaggatcccccgaagagtaaagatatgtcttagaatcgcggttttaaaagtgatcaatttaaaaccgccggccaaggtgacttgaacctgggcgtcccctctagactttcaccgaccactagggagcacaaccacaccttaccttcctcttgccgccgacttccagcaaccctaggaagcccaagaacttggcccatcacttactaatcaatggaaggacgtttccaccctttgacctaatgaagcccaataaatacaagtttaagggaaactctaaaagatcacccacgaaataggctgcctcctgcgcctctcaccgccccaaaaagtcgtcctcctcttgttcttctttaaatctctctttttctcttcaattctcaattctctattctcttcttgtaaaaggaagaagatttatcaagctttggatttcctgagaagatctctaaacccttttctatattcatactctcttttatgcaatttcttattcatatgatgtcgtgttttttgagtatgtgtgagtagatctctagttaggttttaggggggtttcaaagggtattcatggggactttagatctgatttaggttggctgtttctatggttttgtttgatcgtttccattattctttctagttgagttaaatcttaatgcttgtatgtccggaacgccacctagtatttgaccttaggtatttcattccttggcaaaatcttgtttgaatgctcaactgaataaagaactataaccgtttcacaaccgcagagtgatagagacttatggactagaatcgaatttgaacttaatgctttgatcttgttttttgaaaccatgttagcacctactaaccgatagggcaactgagtacgcgagatattagtgataatagccggttttcacctactaaccgttagggttggctggtcttgatagagttttgtatgtccgagaatttggaaggaaacaaacctatcgtttgaatgcttgaattagctcaactgaataaagaactataaccgcttcacaaccgccgagtgatagggacttatggactagaatcgaatttgaacttaatactttgatcttgttttttgaaaccatgttagcacctactaaccgatagggcaactgagtacgcaagatattagtgataatagccggttttcatctactaaccgttagggttggctggtcttgatagagttttgtatgtccgagaatttggaagtaaacaaacctaaccatgttatcacctagattga

SEQ ID NO: 30436 - DNA, 1125 bp, Arabidopsis thaliana columbia
agcttcgtgcaaatcctaccttctaatatggagagagttattttccccctgatgtattcatcatcaagttatacgcttgatctttccaattaaaatatatgatcacattctccaccattgtatcctacaaaaacaacacgaaaactctgtcagttatactagttatactacaattctgggtaacacaagaataactagtgatattacacatatctgtataatactagtataaccaataatactacatgtaaatgggtattgctactgtacctaagtaatactacatataaatggttaatactagtgcaactatgtcatgctacatacatgtgggtcaaactagagctacgagtaatactacatatatatttttcagttgaatcatgtgcaattctacacagttctactagttgtatttcctgacaagaactcaaattgaattgttcgggttcaaaactacaattcactatgattcagttgttgtaatccatttctcacccatttatagatctattcaacacaggcagtgtgcataaactttcaatgtgcatacccaaacacaatttacttaatctcaaatctaattgagaaaatctcttaaatttctaggttcaaatcttcaattttaagctctatgcagctcgagaaacataacttttctttctatctcgacgaagctcgtcggaggagaagatatggtaacaatggcgactgaaatcgaatgaaaccgacgatgagagcgatgagcttgagcttcagaggagagagagaggagaggagagagagagagtcagtttctattttttctttgcccggtttcgatttttttttgtttttcaaaaatcatttaattttaaaatgaatattagagaaagaaggggtaaattcgtctacacacatttcattacaaaaagaggatatgggacaaaaagaggagttaagagatttgttgtttgcagaaagcgagttatgagatctttgctcaactccagtgcttcaaatgtggccactttttgtccactatgtaattttgtgtttattcgtaatattagcaagttggttcatataaagtagtttggtgtttctgaattgaaattcttcatgagtgagacctacgaccaaaca

SEQ ID NO: 30437 - DNA, 1036 bp, Arabidopsis thaliana columbia
tattgatttgcttgacgtctttaagacgtatttatttttaaatagaaatataaaaggtaaataaaagagaataatgatattaaagaaagggtaagattgaggatgttggactgtaatggaactgacgggttcattacatatcattaaccgctaacgagcaatgagaggaaggatcgagctacgggccgtggtcttccataaataggcttgaggagccataagttaaaataatttaaaaactaagaaaataaagtaaaagatcttgcggtgagcaagacagaagcttgtctgttatagcttgctacaaaagtgtgagctatatgcttgttgtttgattctatgcttatgaatggatattgtgtcaaagtacaatcgtgatattgtgattcaatgggcagttttgactgtcttccctgaataattaattactcacccccttttcttttctctcaggtgaggaagagaatactgagtagctgctcgcttggtgttatttcggggactttgggtttttatttgatttatcgttatttcttatatttttaagcacggtttctttatacatttttatccaactattataatttatttatgctattattttaagacaatttattatcgattcttaataaaagaaagtttcccgaaattataatatattatttcaaaatttgatttgaagaagttgaataaatgaatggaaaagatgaaagtaagccgtctcaaggttgagacagacaggtattatactgatacccaagtcaaacaccttgggtatgaaagacaaagtttcttctcaaaaacattccaatatattcattcaaaatgaggataaagccatccagtcatgtctttacataagaaaaatcagaacaaaatccaaaacaacgacattgttcgggaacaagaaaaacaagccttcctctcaaaagatacggatcagtcagtttagatgcggaacgagctggctcgatcacaccattcatgaagctagttccattactcttaaaccaaagagctggggggctactgttgg

SEQ ID NO: 30438 - DNA, 638 bp, Arabidopsis thaliana columbia
  unsure (1)..(638): unsure at all n locations
catattttaagattaaaagacatacagtactacccgcacaactgtgcaggttaggatctagtaaaattaataaataacaagatttaccttttctgaatcagctctgctaccggtttgtctggctatactcaactttctttagaataactaataagagagatgaatttcgttaaaagtcaattgagagagttgactccaagtcaaccttataagtcttgatttcatattgaagctgtgtcacatctcacatgtattctacaaaaccgcgttattcaactacacttgttgttgattaattcttcattctttaaatccttcacttaaacttttctatatgtacaacctaaaaccggccaatgtcaaatagaaattgagcaatggcaatagtgaagaaaacaaaattagcttcccttcttccaagtttgcttcttatatttctatctctatcctttaatgtgccagtctcggggactagactccattacgtaggttagtatctcactattccgataaatttcctcgctacacattcttgtttaccatccagtaaatattattaaaagaaaatcttgagtttacatggttttaatagagttcatatcttaatacgganaataagatgaatatctagatataat

SEQ ID NO: 30439 - DNA, 608 bp, Arabidopsis thaliana columbia
ctcatcaagagtctcatcaactaaaggcctataatcaaatggccggccatcgtcctcaacctcactgaattggctatccactaatctttcagcatcatcatttccatcctcaagcacaactttctccgccccgacgaaactctctacggtaaaactctcatctcctcctctatcaacaacagtaacattagcatccctcgaaacctcagttctaagaggtgcagcctcgtggaaaatctctggatccttttcgatttcaggaatgtttggctctccaaaactcaaaatggtaccaagcaagacgaaagtacacaccaaaacaggagacgcagtcactaagggagcaaacaaaagaggacaatatctatgcagataatacaaaaacgcaacgaagccgagaagaaagggatgattgcaaatccatttgtacgacgttctgatcataatcatgaataatctccgaatctgaactctgaactccgaccgatcactaatcatctctttttatatttttccaggtcgtctctgtattaagaattacgaaaaatcagaatcaaatgatgaagttagtttttatcgtatttaagatttgagaaaacaacaagatg

SEQ ID NO: 30440 - DNA, 465 bp, Arabidopsis thaliana columbia
tgagaacacgtgaggagttttgatctggcactgcaattatctaatctttgtgactattttttgtcggcatcttggacttgaggcagaggcatatagtaggaactaggaaatctgattttaactcgaaacccctaaagtagaaataaattaagaaagtttaggttatagacaaatattatgtcctttcattttgcatcactttagtttttagttctccgatttcaaaagtacgtatgctatttataaggtttcgtttcgttgaacaaggagacaaagagaaaagtttcgctttgaagtttagtctacactctataatgttaagacaattcaacgtttacatagataattgattgtgcgagtgtatgggcattacttaaattagatagtagctagctagttagagaggcattgttttagctatcagattcgagttcaatactactacaattgtgaacgaatggtgta

SEQ ID NO: 30441 - DNA, 658 bp, Arabidopsis thaliana columbia
taatatgaaaatctatttttagtgtatatcatttatatataatcatagttttagacaaaaatatatttacttatttcagctcaaaaaaatactaaaagtttctgcataaaaaaactacttttgattcaatttttggtgtcatgaggtgtgttacctcgtttgtagttttgtgtattctcatgttccttgtggtaaacaatgttaaaggtaatactattaattttcttataatttttttatatattaggagttatgcaaatattgattattcctatcaaactttgaaattctttgtttatcagtatagtttagttaaatatttatctgtggttttttgaaacagtagatgtgaaagcacaacgaaggaaacctgtttgtaaattgactggtgtcctaaaccctggaaaatgtcccacagctatacatgatgcaagcaacttgtgtagtcgcaaattggcttcacctaatatgacatttaagcgttgcgactgtcaaaacactgaatggcgagggaaagccactatcaatgcacatgttatataaaactcccttgcaaccaatagctcaaataccaaaatgcactttctccaaataacagataagggccgtgagcttttttatgttatatgattgacaatatatattgatgtgataatgg

SEQ ID NO: 30442 - DNA, 380 bp, Arabidopsis thaliana columbia
taatcaaactcatgcaattatttatcgtttgttcgcctactataattaattataagcaaaattaaaaaaaaaaaaaaaaaacaaaaaccagaaaaagatatttgtaatgaaaagaatctcaggttcttacacagtgatagtacttgcggttattggtcgagtccgcagatgggacagccatgtggtcgtacatttttgtcggctttggttccacttgtgccgtgtaggcctcctcttccttgcgcacatcacgatcctcctctacccccccaccccccagtctctctctgctcccctgtggtccggtccacctgctttccccgtccctcgttccctgttggcccctggcttatcgtcccgcccccctttcactccctccc

SEQ ID NO: 30443 - DNA, 461 bp, Arabidopsis thaliana columbia
gaataagaacatgtgtagatccaacactattacacgaataataaacactgagcattgcttttggtgaaataataagtgcgcatatttgaatcgtttaatggaatttatcttgtaactttcttcgagcttcgttcatcagtgttgtggcgctactcgtaggagtctactctagagctttatatcccatcttgtcacagttccttttaaagaaatgggcctcgtcggcccaataacagagaaaaggtttttagtgttgatcagagtctcaagttgcagcagctaacaaccaacatggtcagggacaagatcacacacttaaaaaaaatcaagtcgtgtctcttccgcattcatacatttcatttgacaaataaattataaatctgagattgaagactttgactctctgtgcaaatttccgtttaagagattgagaagaatatacatacattgtgccaagatat

SEQ ID NO: 30444 - DNA, 482 bp, Arabidopsis thaliana columbia
tctagacatatctaatcccatatatattgcaaattaaatattttacctatgaaaacgaagcaaaaccgttttactatttctccttcggctcgagaatgcttatcccacaagtgactttacaactttttttattatttttttttttttgtcaaagaagtgactttacaaccttataatttctttattcctttaatttcggatgaatttgtctttagtactaatatcataaatcacttagaactaaaaactgatatactcaagataccactcaaaggtcaatcgtgctaattgaattgatatgccgtttaaattggcattgtatgatataataattaataacgagttaactacaagtagctttatatcgtcattgaattttaatagattaaaaaataataaaaaccttgcttaattctaaaaaaaaagggagcatttagcaacattgaaaaggaagcgttgactaaatcttccacacgaatggg

SEQ ID NO: 30445 - DNA, 377 bp, Arabidopsis thaliana columbia
ccatatgcatgcaaaatagcagatcatttatgtttatattttcaaattatttaatacatttcaatatttcagaagagtgattttttttttttttgtcaatttcataagtgtgatttgtcatttgtattaaacaattgtatcgcgcagtacaaataaacagtgggagaggtgaaaatgcagttagaaaactgtccaataatttactaacacatttaaatatctaaaaagagtgtttcaaaaaaaattcttttgaaataagaaaagtgatagatatttttacgctttcgtctgaaaatagaacaataatagtttattagaaaaatgttatcaccgaaaattattctagtgccactcgctcggatcgaaattcgaaagtg

SEQ ID NO: 30446 - DNA, 574 bp, Arabidopsis thaliana columbia
tgcacaactttctccagccacctaaaatcttattttcatagctcacgtccttgaaatagcagaaaattaaaacagaaaacaaagaaagaagttacattaaaattctccaaatatacttttatgattttaattttcacatattttttttctaactgcaaatgggattgacagttgacagcccaaccttcttcactcctaccagtatctttctattttcgatttattttctatgtttgaaaactaaaatttgttttccgaaaaaaatagtttttggtcgggtgaatctctcacgtgaatcccaccccttaactcacacgtatgcacaaccatcgatcacgtgtggaacctcctttttcacacgtatggtgtgtcctttatcctcctttacgcatttaatagataggtaactcaaaacatgtaatggatcctttggttttagtctcttcaatggtggttgaaaatctccaaatatctctttgtacttcatcacacgttactccctctcgtcctcacattcattgattcttcaatactggatcaacaatgtcgatgaacattacaaagcctaaaaaat

SEQ ID NO: 30447 - DNA, 569 bp, Arabidopsis thaliana columbia
acaataaaccaaaaaaaaaccatccttataaatacacacacttagatcacgcattctcttcttcttcattcatgagaaatcaaaatacgctctattctcacgtccttcttcttcgagaaaccaaaatcattcatcgttcccatcttttcatacctgttcgcttgatgatgatccatgtaatcctcgagttcatcatctcagaatcgtaattgattctctcacgtcctctctttcttgacctaattgagaaggaagagatcgggggcagtgaaagcgaggagcacctaagaagacgattccaggacctaatctagaaggaagagatcgggaatccaagtacgatcaacttttgatcaaagacagaggaaattatacaatagacagaggaagattccggcgaaactccaaatttctccggtttaacacaccaaacgggggaagatgaattgcgatgataggagacgacaagtatagagaagagtcaaaaacgaatgaagaagacggagaatttcggaggagttgcaacaaagacgcagcagcaactaagggcttttcagacgagttcacgg

SEQ ID NO: 30448 - DNA, 509 bp, Arabidopsis thaliana columbia
atggagcagttagggcttaaggaatcagatgttaagaatccggctttatcttctacttatcggggatcggagattccgaagccaaaccttactgttcttgatgctcaagctagggtttgtacaggtccgactcagactaggcctcttagtgaagaacgagcctttaaggtgtttgatactatattaagatcaggtaagctttttcgttctccaaatttggacttaatcgattttgatagatttcaatttgccctttttagctcgaggcctaagcattcaaaagtttcaacctttgtatccattatgctgcttaattagaatttgggatagaatgtgaaaacccaagtggagtatgatttgcttacgcttcttggttcttggttagcaactttgtttattgatcggttcgatagagttcttagccttattagtcagtctcactgggatgcagctagaggggagcttaaagatgaagagcctgtttcaaaggcgcaacttggggctttttt

SEQ ID NO: 30449 - DNA, 554 bp, Arabidopsis thaliana columbia
tgtgagttgattgaaacgtttcttttagtcttatctcaaaaccgtgtaacttgtcctgtgatgatgatgaccatttttggggtcttgttgttgttatcagcgtggagcaagatactttgaccctcttgatgctggttgggtaacttgttatagctgtggggagaaagatcatataactgttagttgtccaactcttaccaattgtaggaagtcgtgctttatatgcgctagtttggagcatggtgcaagacagtgtacaaaggtatggtcttaagtttgatggtagtacttaatatgtccaactcactccataaagctcatgtataaagcttgcacaagtgttttatgtggttaccatggaagatttaggatgagtgatgttttttctaagtagatttttccttatttctaacagggacattgatgcaaacctcggaatccaccaagacaagactcaaagattcaaaggtaaactatgcggaagtggtgatgatgatgcagtaccgatttgatgttgaaccacaacaccgagggctatagaatatgatcaaggg

SEQ ID NO: 30450 - DNA, 495 bp, Arabidopsis thaliana columbia
aactaataaaatttgttttgctatctctcgacttcttctcttgaaaatgttttttttttttcgaaatgaattgtttagatcgataacggctaattgtaatttcatgttcacaaaaacaaaaaggatggaaaatcataagtaatccaaaatgaacatgccggtacagcagtaagtaaatagttcattaatttacgagcttgattatgtaatttaggtgaaacagaagccagacaaacacaaagtattcaagataacgagattctaaaattttgtaagcatcgacttaaaaagactttcctggaacgttaagagtcgggacaagacataaaccgatactaataccgacagggtaagacaaaaatgcagagaatcaaagtaaaagtaaaaggcatttagggagaaagctaatttactactaatggtgtttatactattaagtcttgccttttgccttcgtaatttaattacccaaccaacatttgtagccgaggttgt

SEQ ID NO: 30451 - DNA, 552 bp, Arabidopsis thaliana columbia
tctttgtttttaaattttatattcctccttcactagtagaaaaatcttaggaattttagggaggctaattaacaactttacgttttggtaattgtggaatcaaccatgataatcttatattattcgatattaatcaaaatatggcttaaatagttaaaactcacacataagtccataagttccaattgtataatattatacttttaataaattatattatataaaaacatatgcacccaaaggaaggtttcaggaattcatggttacaaaatgagtttaaaaagatgaacatttcccccaggacactagttagatcgtacggttggtgagcctaaagaagtagtgctactaatagatgagactaatagtttttggtacgacatcccacaaatccttaatgatgagagcataaatctcggcataatcttcgtttcaagagttcgaaagcatattcatgcatattcacaaatgacatcgcagcaagtcagtttgataggtacagcggccataagctaatgactaagttttcattgtaatcattggtgtacattt

SEQ ID NO: 30452 - DNA, 565 bp, Arabidopsis thaliana columbia
  unsure (1)..(565): unsure at all n locations
tgaaattaaagagaaacataccttcctagtcctgcgcacaggctgtcagctacttcgacagtaggtttccttccacgtctcttagctggagccaccacagtttctgctggaacagttgcagccgccacgtcatctttctttggcctccctcgttttctagaaccctctccagtagcagtagtaaccacagccgccgttacagtcgacctctttgccctaccacgtttcttcacagccgccgccacagacgtagaaggaacagcctgagctacgtttcttttcggacgaccacttggtttagtactcgccttcgcagaaacggcaccgatttgggaagagtcagatttagcctttggggntcgaccacgaccgcgtttctgagaagcagtatcagtagctgagactgcggtgcatccgtttgaggtttgttgccagacgcatctccaggtgtactggatcttggaacttcggaaccagacgcgggaggagtaagagctgttttcgccatgagatctgtagatgcgaatcagaaaaaaaaaaaaaaaagagaaagcaaaatgtgaga

SEQ ID NO: 30453 - DNA, 621 bp, Arabidopsis thaliana columbia
tgaccaaccactattactctgatgcacaccgtacggatcccaccggtggtgtccacactttcttccacactcccgcggattactcggttgctgtggctggagatgagatcgcggcttcgatgtttagcgatgataatccccatgcttgtactattatgtagtcttttagtatacaaaaatatgttttcagttcatcttcttcgtccaaatttgatttgatgtgattttttttgtacaactaatgttggaatgagaaagtaaaatatatatgttgtgttttagtctgaataaattggatcaacatgatctaaacaaatacaatccgattcaaaatctctttcatacgattaaaatgatttgtagtttttcaagatccgaaccactacgaaactgaaattacaagaccgtaaatgatttctaagcctctctttaagtgtgctaaaccgaaattagattacgcagggaaggttttggttcaattcaagtaaaaaccggtacaagtgaattagagaggcaataaccaagttggtcagggaattggtggaagaccgattggtttcctacgacgtcgtttcagaagccaataaaagaagccgatatataagaattagaatttagggt

SEQ ID NO: 30454 - DNA, 582 bp, Arabidopsis thaliana columbia
  unsure (1)..(582): unsure at all n locations
gaggaagaagatggttgatgagacagaaaaacctattaggttactcaatttcgtctccgaggaacaggttctctctctctctctctctatcgaaaccctagttttgtgaaattcaatttaaaattgcttgttttttctgagaaattgatttggtgatccagttagatgaatcgaagaaagaaagaggagaaagagttgaagatggaacattccagagggacagggctctctacgaggtatttctccatccttcactgtcgttttcagtcccatgagtaaatcattcgttttcttcttcctcacttgtaatgtgtttcaattgcagattttgaaagagaacaaagacaagaaggacgctgagtttaatgaacgattcaagcatagtgagtcactatctctgtatagcagtattgattccattgtttcaagctgtgatcaattcttatgtcaagatctttgctttggtttaccttttctgaaattcaaatttttggtatgtaccttctgttgaatggtttgctanagaagagactatattgaattgggattttacagggccaccaaagctctggatgaagatga

SEQ ID NO: 30455 - DNA, 522 bp, Arabidopsis thaliana columbia
tatatattgctagtttctataaatacgatgagacaatcacacaagatacgaaccagaattaaatactagtagtatattattctagcttaaactaatacttgaattttaaaaatgtcatacaaaaaaccgacataagagttatggaattgattcgaacaaaaaaaagtgttatgatattgattttgtcgttttcccaatctgaaaaaaacatgtcacgacacacttagttacgttgtattgagtaattttcacgttggccatgtgtcctctatcggaccctcacaggacctgtggctttcatgttccaaaattttgttttcattatttacttctgtcttcttcctctttgatgtgtacaccaaattgtaatttggcattttcctcatatgtaatgtatttgtaagaatactccacatggtccgacattatctataggacaaagttttttaaccattaagctaaacgctctaaaaaaagctttccaacgagagagctagctaatgaaatgtttgaaacctatat

SEQ ID NO: 30456 - DNA, 585 bp, Arabidopsis thaliana columbia
cacataaaaacaaaataaaaccaaatctcatacttcttcattaattggtttctgatccgtcgaagcctgctgcactcccttgttctgccacaaaggaaatatagactcaaaactagaatcatgtaaatagccaaactaactgctcaggccgatctatacacctcaattatttagcaaaggttggatctatacctgctttttggatgttcccacagattcttcagtgggattcttcttgtttcttttttttgtcggatgaaagagactgcatagacggccggagctgggcaacagcatgaacaggattcaagtgtaactgcaagtcaacaagtccaattcaataagacatccagtccacactacacaacaatgttatcaagctttcgaaaacgaggaaaaaaaataccttatcacctgaaagaaccccaacagcataatccaaagtaggaggctgcttccatgttgttttcaaggtctaccaaaaacaagaaaaatgaagttgcatcaaaaagattaaacttggatcaagcttggaactaaaacactacctgcttagtcatatttagtccaaaattggagtcatag

SEQ ID NO: 30457 - DNA, 247 bp, Arabidopsis thaliana columbia
tccttccactgatatttttgtagctggtttatacgagatgcataattactaaataactagattttaaccagtggtacaccgtggagacaatttataatttacaattagtagatataaaattttgctggaaaaaaattttatcttttacattctatatgtccgtcaataagaacctgcgaaaaagggggcgccaaacacatcctgtatagaaatcaatactttattaatgttaatcttatttatgata

SEQ ID NO: 30458 - DNA, 512 bp, Arabidopsis thaliana columbia
ctccgttaattcataacaagtgcattctctatgtccattttctgattaataaagcaacaatttctaaacaaaggagctaaatcggggggtacttgattaaagttgatagtattggggctaaacctaaaaactagacaaatatacaagggccatatcgatacaaaacgaaacgagacttttcttaatgtctacgttctctataaaagcaaactttaagctaaaacccaaacaagaagcagaacacaagaaacgtgagaaactttgagaagaccaagaagaagaagcagaagaagaagaaaatgaaattggtttggtctccggaaacagcatcaaaggcttatatagacaccgttaaatcggtaagttttttttttattttccggtgagttgtgaaggaataataacacacgcttcttctctccagttctcgaaaactcagatcttaattttgttaaagattcatggtttgtccttgtaacgatttttttcttttcttttttgttcagtgtgag

SEQ ID NO: 30459 - DNA, 548 bp, Arabidopsis thaliana columbia
tctagtaataacggccgccagtgtgctctaaaggggctcctttgtggacggctctagctggccaggatagaggccgctctcagagcaggagttgcaaagcacggccatggcatgggaaaccatctcgtctggttcgaaatcacgatcaagctggtgcttggactgggccatgagaagtgccagagcgtacgcaacgagttgtcccatcgagcttcatcgacgccttcctcgtcatgatgaatctgtgccttcaccagctgctcaaatatatccatttgatccttcttcaggaacccccaggatttaccgtagtataagactgtgtcccgggaatgaaagagaaagcgcgtttctcgagcagaacgggtcacactcaacatccgcttcttcagcacgtcgttttcaagagtgaagcgtcggatgttctgctttcttatgtcctccactgtgaagtccagtgagtgtgttgagagtggtctgcgcattctcagactgggaaacaaagggcccacctcgcgcaagaagtcgtcaagtgcgcgagtggatga

SEQ ID NO: 30460 - DNA, 617 bp, Arabidopsis thaliana columbia
tagccggcatgaggccaatcctattgccggatccacccagtctatctaccggcgtccctgatattttcgaacaaggcggttcccataacgtcgtcagacgcgccgtcgtcatcggaaacggtttccctggctccgagaatcagtgtatcggtctcgttcgtgcgctcggcatatctgataatcaccttctctacgtgagtttctttgatctaggctctagacgtttttagcatctgcttagtgctttcatttcgtcgactataaaccattgatactatactcgaaattctcgtcagtttttgctaggcgcatgatgtagttgagagattgatgattgcttttggataggagtttcttgtactttgttgtttcgtcgtgtgttctaggtttttagcttgttaggtctcagtctaagtaggagtggaaatttcatattgtttagtacttctttagagtgtatgaatgttcagagaaggaggaactatttgaatttttatggaaacaatgaattggtaaatatgtaaatttgccaatatctcaagttctgcaaatttagggtaaacagtggaaggttcttggggtgtcataactacctatattgtcagttttatttataa

SEQ ID NO: 30461 - DNA, 1421 bp, Arabidopsis thaliana columbia
tgatgcagtctctgtaccagttctcgtagtagtttttgtatcagatgcagtctcgccattaattccaatatgtgccagagttgcggtttctgacacacttcctgatgtagatgtgattcttccaccataaacatacactagatctgattttgaaggatttcctttacattcaaggccacacttatcattcttgccaatattcagaatatgaaccaacttctttgttccattattaagcatcctcaaattcttttgagtttcttcaagttgtattttagcttgtgattcttcttcttcttcctttctagcaaatttcagtgtttcaacaattttagcctctaacttgagattctccttagttaacattgaattctcctcaactacctttagaaaatgctcattgatatgttgcatttttggtgtcttaggtcccttagttttgcaggctacattgattcacaagaacccggtcaagctaatgacattaaacaagcgtttcgcgggaggcaacccacaaggtattgtatatactttcttttccttctttcgttttctttgattttggtttgattcacttcgctgtagagttcagacttatcgactcaggtgttgagtcgatagagtctctgtatttgacggtgctgtgagattcgtttttgagtgtagaaatccgccaggttgggatcaatcaatcccagaaatggatcgatcaatctagtcctgacgtaaggctctcaaaaacatccgcaagaaggggatttatcgatcccagcactggatcgatcgatccaataatgaggcgtcgggactagtggcaacagatcgaccgatctaaagagccgatcgatcgatccaggcagcaacttcgcgatttcaatcttacgccaccaatgaaccgagctagaccagattgaaccggagtcgccacttaaaaataaacggaatcgacccaacaccacttcttcttcttcgttgaagaccatgaagaacacttagagagaaatccataactttctcaattgttgctcgattttcacaattttggtgtctattccactcgatttttagccctctttctatatctagtgttggttttcctgatctccaaaggtatgagttcgaaattcctctttttgattccgtttttacaaggtgaacattttccaaagcattagttcgttgccggggaccaattgcgttacgtaaagatttaggattagttattagtctagagcatttatattctattttgctaactttcatatttacattctttttgtgttgtaacatagaagaagatgatgagccatatttggagcacccatttgacgagagtgttcttacactggaacagaaagtgaagttggatgaactgcgcaacgagcatccgacattggtaaggtgtgagtcagcgcttatga

SEQ ID NO: 30462 - DNA, 472 bp, Arabidopsis thaliana columbia
aggaaagcgaaagaacaaagaattcggaggtgcatttaattttatcttagttagtgtatgaaagctaataaatttatcctagtaaagttaataaattttcaaaatggagtaattaaaaaacaaatgagtaaaaacttgaaaaggaagagagaaaaaaagaaagaaggaaagatgaaagggcaggtctcttggtgaaagaccccacgatcacgcatccatatggaaaatgcaaagagacacgtatacctaaacgtcatcgtttttgcacattaccccaaaaccccaaaaccgacctacaaaatcccttcttcttcctcttcactctttctcattttccaccattaaaaaacctctctactctctcctcaaaaactcaaaagagcaaaaaaaagagaagaagaatcaaaatcccacacaatggcaacacactcttccttcaccgcaacaacacctctctttctcatcgttcttc

SEQ ID NO: 30463 - DNA, 571 bp, Arabidopsis thaliana columbia
tatgaggaatttaacatgtagcgtcgtgattcgttaaggaagcgtgaaccacagagaccggccatgtctcgatcaccgcctttctctgttactgtcacctgcccttcctaacctcgccgccttcaacgcctgatccactcacgtgctttttaaatttctatctcaaataatcgaatatattcatgtgtttcaattgatttttttttgtgtgtagtaaagatgtgtttataatttcactcaatgtaaagaatttaacagatagtttcatacgaactaatatttaaaaatacatataaaatctaaaattagtatgattttgatggacatgatgagatatgtggtgaactattatgggcaagagggaatcatctagtcatgaccacgcgttccactgaaaataatctatatgagctccactaaaattgcttaaaataatttacaattttgttgcaaaaaaaaatcgctaatgccttctatatatattaaagcttgtgctccattttgtaacttttatatgctaatctaatatagtcttaaatgtgagttgtatttttcattgattgcatataag

SEQ ID NO: 30464 - DNA, 437 bp, Arabidopsis thaliana columbia
gatccccttgtaattttaatattggaaatttttgtttagttttattcgaaagccaataatttgttgtatgaactatgtaaaatttgattcctaaatattacattcgatcttttttgattcctaaatattacattcgatcttttattcgagagaatatttcatagggataattaagacccatatcatacatatagcgtcgtgacaactaccgtgacagtgacctcgacaattggtaacagtttgattctcataattagggtcaatgactatcaacccaattattattcttcaaacacgtaagcttagctggagccgtggaaggcacgcacaaaagatattgtagatgttgacaagaacgtatcagtacaaatcgtgccaagttttgttgaatttgttttcgacatgaaagtattgaaatttgagaaacttttgatata

SEQ ID NO: 30465 - DNA, 498 bp, Arabidopsis thaliana columbia
aggtttctagatgattactattgcttcgtttcttttgtctcttatcttcttccttctgcttaaacaatttattttactatatacaaatgtaccacctcctaggttctaaacgatagactacacgtgtgaatcaaaccctcttaccatttggaaatgtttttatgcgtaaccggttgtccagagcagttatttaggtggaaccaattttctatgtgttgcttctttttacagctgatttgttatgaaaaaacatttcacttttaaaacatgtaaaataaaacattacaaacgatacatatttcatttttgttgctttaattttcacctttttaatggattaggttagacaataagcagatatgcttatggtaatgccatggaccatagtttggaccaaaaaggcctacattatattatgggcctttatgaagtccattagtttcgttcataaaaagacaatttaatctgaagcccacatttttaaaaatgtttaatttt

SEQ ID NO: 30466 - DNA, 624 bp, Arabidopsis thaliana columbia
taaaggtaattacagaaatgtttttaacatagtaaaacgtgttatccaccagtgtataaatcattcgatttttaaagtgatgttgatgaattaacatttatcgtttacagagttgtgaaaatgatatttttttttatagataatcataattatcctgaatgaaaaccctaactaatgatggtggatataaaaaggttatcattatttgtcggaacattttacttgtggattttaaactcttttgatcttttgtcatgtgtgggcacatggggtcaatttagcgtgttttaggcttctcttgttttttatgttaacgtacgatctactttccaatgcaaaaagccaaataaaaatagatatgctaatttgttcttcccaacaaaaatatatatgcttttaagaagaataatacataaccaacttgatctaatattacacctttttagattagggacttctcacactaaaaatactaataacaaaattaatatttttagaattaatagttttgttacttttctaaagttacgcatgataaggaaagcatattgaaaacaagtgtgggtgataaaatagctggctattcgaatttgtcgcaattaagatatttctttggaatttaaa

SEQ ID NO: 30467 - DNA, 516 bp, Arabidopsis thaliana columbia
tatgtgcttcagtatgagttccctagttcacttaatcactagtggaaagttacagcttacatgaggatttcatctctcaccgggaagtttctctagacccggtgagtcacatgaatatcaacacaatgaaacacatcaacacatatttcagagacctcagatgttgaaattacaagcaatcacaatggaatatggtaccaaatgaatcaattagtttctatcttaagccaatatcaataactttcacattcttcacatacaaattcacaacattcttcacatacaaagactctaattttcagttactaaaataccaaaacactaaagaaaattaggtttcaatctccaaaaaacatcatcatctccagaaccaaggaaaaaaaaaacattctaaatttgagccaaaaaaaacaatcagacaaagcacaataacacacaaatcaaatgttttagtaatccaaatgaagacaacattgttacatccacaaacataaaaacccagaacttattcacact

SEQ ID NO: 30468 - DNA, 594 bp, Arabidopsis thaliana columbia
actagatagaaggcatttctattatgttactgctaaagtgacttagattatggagtaaagatgaggaaatgaatatggttatggctagtgctccggttaagataatcgtggatgaggttttaataagaacaagatatttcgatagtttccaaatatgtattacgtaacatagctaatgtagaatatataatttcagatagaaaaaggctattatattggtgacacgatagcagtatgaaaaaaactttatctaaagtggctgatttattattagtcgttacaagacgattaataataagtctaataagtttagcgactctcgattttcgtttacgatatttagttgtcaaataatcgtaacagaatatttaacgactactttacgagcatttagcgatgtcaaaaggtttttttgaacattatcatatcgttagataatggttttcggtgttaaaaatactcgttttttatgcggtggtgtgagaataaatcaagtttgttatcaataagaaatagtttgtacagagttactctatagtgaacatgttcttcctactttagtttagttttgtttctcttacgtaattcatatat

SEQ ID NO: 30469 - DNA, 470 bp, Arabidopsis thaliana columbia
tccgtcttaaattaagtaatgtttttatagttttgtgtttgtttcacaaaaaaatattttaaacacaacaaatgttataagagataacttattatatattatgagtaaataaatctacaacgaaacatactataaagtatcaaaccattaccataagttttttgttggacttctaaatatgcttaacatttggatagctaattttttaattgatccgtctttctaacaaaaagcgtcattagttaaaacgaaaattctattttggtcaaacggatacaaagttctaattttcaacactctttccaataatatcaaagttaagaagatttttttttcaaaaaaaaatctattttagataacactagaatttcagtatgaagtatttttaaaattttaatcgaatagcagcaagactttaaaaaaatttaaggcatgatttacaaatatcataacactagattttaatgtat

SEQ ID NO: 30470 - DNA, 402 bp, Arabidopsis thaliana columbia
gataataagctttttccctcctacgttattttacattttgatagtatttaactaatataagagatttaagatttaattacattatcatgtaaaaagcaagtaatttgtcggaatccattaaaaatctgttggttattttgttgacgaaaattacccacaaccaatcctctgctatttgcgatcgaattagtgatggttacctcatttcttgaaacatgagatataattaaaaagcaaggaaaatggacatcaatatattgtcattgatttgaagtatatttttttcatcattagttatatcaatctctcttttactgtttatcaatctatggaaatagtttgatccatgacgatatactagtacaaggaaaatatgacaaaagttatagcaatgagtgtgca

SEQ ID NO: 30471 - DNA, 459 bp, Arabidopsis thaliana columbia
tcaaaacgttttttttttggtatgacattttattcctttttcctgttgctaatctacatatataactacatagcgtacagctatacatattaaatatattagatctctacaataggttaaactgtaacacaaactattgatttagatagctacggtaattaatacgttttgatcgtccatattccacaaatataaatagaaataccatttgatgtgtaacaaaaaaatctcatagacatttatggttttaatacaaaaaaaattctcaaaaattgtaaataaatacgagtggatacgatggtctacgtacaaaagattccagaggataaaagccattttgatttgtcgttttaatgccttccatttttaaaaagaaagattactaacgccgactctctaaaactctctcaaaccataaaaaatattctccgatcagcattttaatggagagtacagatt

SEQ ID NO: 30472 - DNA, 503 bp, Arabidopsis thaliana columbia
ttcttaattcttattttttgactgcatgataacgatcatattaacctattaaggggaaaactaaacttcacaaagataaagaaaccaagtatgactctcctaatatttctccatccttgactaaatataaaagtataaaactatcatgaacaactgaacaaggttgccaagttatatactataccggtttaataagtcaaaagctatttcatccatcagttttagatatcttgagagacaagtgcactaacaaaataatcgtagcccaaagtccttaaaatcattgatattatcttaattattcagtcacgaagctaaacacctaatgagaatctaaattaaacaaatctggtgacaaattcttaatgaatgataccattgatttgaattgaatcttaaaaatgaaaaaggtttacaaacattagaaacaaattccattaaactagtagtagtcacaccaagagcactaaacacggctttagaaactctctctcaccaaatca

SEQ ID NO: 30473 - DNA, 389 bp, Arabidopsis thaliana columbia
tgtaactgaaccctcatgatgctctttatagcaagtgattttgattcattcaaatacaattttatacagtaaaagtgtagtctaaataaaaatacatatgccacatgacgaatgcttaatctgtatacaacagtagtctaaaggttgaagaaatgatacataacattgttaaagcgagggaggctcgtatctgcatacacaatcatatatgtttccttttatcaacttctcagccaatctctgatttttaaccattgctagctgccaaaaaggaagagaaggtttcagccaaaagtttcaataacagttctagagctgaaattttctgtcaagtgaggtttataccttgagagcctcgcattggaattgagcgttgaagtcggtgtgaa

SEQ ID NO: 30474 - DNA, 481 bp, Arabidopsis thaliana columbia
ccttaaatagatggtgtactaataaatcctgcaaattgcaaaagacaaaattataacctaaataaaaataaaatagaaagtaatccaataaaatggagttattacgagcacgtatatcttgcttctataatattaaacacttatgttacacacacattgaatatgtgggtccttattccctaataccaagtagtttacgtatatagagtgtgattgcttctcgaaggtaaagtagcagtggcaaagaagttgtcatatctcccacttcttgagctccaccgcacatctggctcacacgtgcatgcttttcacaatgaaatccaagtcatgttttcagcaaaaaatcatttgtagtttcccaagtatccaaagacagatttttagacgttccgatttaatgaataaggatatcaacagtacttgggacacaccaaaaccaaccttcatcttcatgaattccactagaccacgacccatttgg

SEQ ID NO: 30475 - DNA, 477 bp, Arabidopsis thaliana columbia
agaaaagtctcagagaagctttgagtagagcgagtgtgattttaaaaaaaaaaaagaaaaagtgtacaaccagatttctcaattcataatttcaccataaacagagaaagttcattaactgaaaaaaaatccagtcgtaaagaagtaagtaacttgtataaatccaataagctataacgcatcgaattaaaatagagatttaagaagaaacaatcaagagtatctaatttttcgaacagaggagtgaaccctaaaaaattggtgagtaatcggacaatgagattggaggaaatgattcagcacgaattaaggaaatacaaaccctagaacatctaaagaatgatgctgcagaagaaactttggagatggcttgcatctttctctctcgattgcccaattctgtccaattttgttatagagagagagagagttctacacaaatctctgtgaactgacaacagaaactgacccaagtga

SEQ ID NO: 30476 - DNA, 610 bp, Arabidopsis thaliana columbia
ggggctaaaaattcaaaactgctaaattttgtttttgttgctaactatagggcatccataatttttatttcttaaattttcttaattttgggggtactgtttgctaattttggaatatttttgctaatttcatgattttttttgttaattatgggacttaataataatttaaaaaaacatagaaaacgtaaaaatttgagacccaatataaatgtttcaacattatgcgtaaaaggacaggccttcctaaaattagaacattttatatgatatcctcttaagtcttaagtactatcgaagccggagatttctaagttttacttttactaattaagctattgacacttgataaatgccatatttttgcattccctaaaacctcaaaactctctaaacacgtttttgtggacatattaaaatagtgtattttgtagtctcttccaggtttcttccttcttgtcaacgtcgcacaagtccgtttacggatatgggtgaataattgaatattatccatgtttccttattagcagtcgctattgtgggttctttttggtagctaatttattattacttcttaaaatggggaacagatacaagttgcatcatatat

SEQ ID NO: 30477 - DNA, 537 bp, Arabidopsis thaliana columbia
  unsure (1)..(537): unsure at all n locations
ctaccatttaacttacattctttcgtcgacgtgaagaggtaggaacttcattaggcatactgtaaacaaaatattaattatgacaaaatcaatttaatacaattttgtcataatttatatttaacaataataaataattttaattataaaaatagtacaaatgcgatcttatataattatttttacatttcaacaaaaatgtaaatcattacaaaaattatattatgaatgtatgaaaaataaacttgaatgtgttatatatgacaactatattgtaaataaataaaaattatattcatataattatttcttattttagttgtaaattagcaacgtaaatgatatgtctataatttgcatgttttacacatccttttatcaccattctgagtctagtttcatccatctttcatagcattcaccatcatttttgtacattttgcatctttagtcgagtgtaggactagtcttgcatacattctgcattctggagttgtntcaggtgttttggagctattggtgctcagaaagaggaaa

SEQ ID NO: 30478 - DNA, 534 bp, Arabidopsis thaliana columbia
tgcattaagtgtttttgattatacaacaccaaataaaaatatatatttttaatattaaaaataaatataagacttttttgattatttttgtgggtcaatgtcggtaaatattgatattcgtcgaagtaaatttattagtgtactggaattgcatgtctatggttttaactacatgacgtcagatatctgatcatgtaatacatctaattcgtgtaaatgaaggtacaataatacacttgccatatgtgatcatgcatttctccgatagctaacaatttttttcctatgatttaatacaaccatacgaattacgaagaaatttaatataacatttattttctataaaaactaagacatcatcccaaaaacattaaaaaaaacaatcgtctcaacaaagacattttctaagacatttaacaatgagaacaaccttcaaaaggccaaagcagaagcaatgtcggaaggcaaaacttcaggagcaacctcgactgccaatctctctactaagatctttgcttcagaagtatcaaaaca

SEQ ID NO: 30479 - DNA, 388 bp, Arabidopsis thaliana columbia
gtaacggccgccatactaacagagtttgccaaagatacaagagtggaacaatccaccttcatgctacagacaacactttaaacagaaaacaacaatggaaaaccaaacaagcggaatccatgttgtagaacttaaatattgaaactgaaactacaaaacacagccgatgtgatcagttccaaaaagtaacacagatgcatatgcaaaatgtatttggtctatagcacggtagtgatcttctccatgaagtcaacaatgcacctgccttagaaactaaacaacgatggattgacctaacaagagtaatccatgctgcaaaagatgatcataacactgcgaacgacaaagcactcagtatctcatgatccaataagtgatatagagaccc

SEQ ID NO: 30480 - DNA, 670 bp, Arabidopsis thaliana columbia
gttcgactgagaggttagaggatccccaagctaacatatgtgttgtggagccatgtttgaagaggtgaaggagcctcaagtccaaaattacttgagcatcatgataaattttaatgtgctgtttttgttttaaatagttgaatctcttttttttttttgtcgaaaaatagttgaatctcttaagaatatcaaaattttagaagctactactagtctgcaataattagaaaacatacacccatttcatgtatcttcttttgttttggtaaactaggattatagtctaacattagccctcaaaatgatgagttgtcctttaaaatagaataacctaacaaaaacatctattataagaactcttttttttatcacaaacactaataataagtaaagtgcgacccaaagaggtcctatttgttgtcatctctctttctttattggccaaaaaaaggagaccttagttttttatcccctaattcctcaacaagaaaacaatcaaaacccattaatatacgttttcattttgtactcaaattctgatttcttgtcaaacaaacaaccagagaaccctaaaaggaacatccccaaaaggttgtcatttgagatttgagctctctttgtgataccacagcctgaagtagaggtttaattcccttttcttatcaattta

SEQ ID NO: 30481 - DNA, 620 bp, Arabidopsis thaliana columbia
cggattcgctttatgttaatgacctaacaatgacgtcaacgctataataactcttgtaataaaagttagctcagtagttatattggatccaagtcattgactcacatgtggagattaatagactattcacaaccaaactgaaaaccagattgatattctatcgactatcgtgcaaaagcaagaggatgattactagtaactttttttttcttttccatttctataagacagggatagtatgagttaaaatctcttttattggtacgtctggaagatgtggatatcaacggaaatttgactttggaaacttcacctgtctattgaattttgagaaattgggtgaaaaaatcttagaatagtgcattaattagtcaactaacacatattgggacaaaatgatacattgtgatgtgttaggacaaaaacaccacttgtgagactttgagacatgtctccttacgtggctttctctccgttttgcattcctttttttcttcaaaattttacgtgactttgagataatcatttttagttttttcatcctagaatgattgaatactcatcatatgtagaaaaaaaaaacatatttttgtatatgtcatgattgaaaattttaaaga

SEQ ID NO: 30482 - DNA, 569 bp, Arabidopsis thaliana columbia
catttggaatgatttaaaaaaatattacaaataaccagtaaaaagaaatgggactatcacttcacatttcatgacttttaactacctataaacatcttaccattttatccaaaatacaaagatggctatgttatcaattcagattgactacaaaaaatttcaatacatttggaaagattttaaaagatatgactatagtcaaatatatgtctacttatatatacccactcatgttgttcatttattcccatcaatcaaagctaaaagtaaaacaaaatcatcaaagagggataataatcatgaaattgctagaaaaaatgacatatgtagaatgttttatgataataatggcgacatggttcatgttcataagttacagtcatggagccaatgtagctgcagcacctggaaccaacggacttgatactgcttggtatgatgcgcgacgcgcatattatggtgatatccatggtggaggcctgaacgtaagttaaaattactaatatgttgtcgaatctaattattacattgatggtttgttcaaaatgtatataagctgcgatttgttt

SEQ ID NO: 30483 - DNA, 575 bp, Arabidopsis thaliana columbia
cgaattacagagaaagtaagatttattatcacattccggcgatcatcttcatcgtcaatggcggtggaaacaatgtcgatgggatcagattcatcaactttgattctaacatcaggagcaagcggtcgcgttagggtactcttctcgatgcgagacttaagcgtctcgttacgattatccaatcgttgattcttttcctcctccttccgtttcgcgtcgtcgtttggcggcggaggactggtgcggtggttatcagagacgataagcaagagaggaaggtttggtctcctccgcagatcgtggtgaggaagaggaacatcggtggcgaaacgagcgtttctcctccgtcggttccagctgcggtggtggatggggaggttgctgttcgacgtgaactggcgattaagcgagttttggaggatgaaggcggcgatggaagctccgtcagagattattcgctattcacgacgaagagaggagatacgttgtttagtcagtcatggtcaccgtctttctcaaatcacaggtcatttctccattattttaatcatttaaggattgttggtttgattaat

SEQ ID NO: 30484 - DNA, 571 bp, Arabidopsis thaliana columbia
gataaattaacagctccattttagcttaatcactccaccgatagtgatttttaggaagatacttgcgattatggtatagcaaaagccaaaggattacaaaatttgggatctaatgaggctctatgttacttacttgttggtcaccttcgtagattcttaccaaaagaatcgtagctttgaaaccttcaaaatacttctttttggatggttagaatttagaagttcatcatttgtgctacctcatcctcataaccataccaatcttaaccactataataaatttaaatgctttgccaataagaaattcgttggtctaaaccatatgatattgacatggtccttgattcttagtctaaggtgcaagattccttaattctcaccacttctttgttttcatttacgtttattttgacagtttacgttttctacacttcaaagcaaaataaatagtgttgcctaaatcaataccaactaaaccatttttacctaaaacatttaaaatacgacacttgttaaaataaaataaaaaaattaacatcaaaaacccaaaaatcccttttattgaacaaag

SEQ ID NO: 30485 - DNA, 527 bp, Arabidopsis thaliana columbia
gaatctatatcatctaattgatcaaatataaaaaacaattaatttgtatatacatcaaactaacaaaaatacacagattttctaaatatctttatattattccgcaaaacaaaacaaatctaacaatctgtttactatgcaaaatacaaataaaatataattaaaataacttaagagagttaattatcatcggatttaggtcgtcatcttaagagtgagaatctccagtagaggataatgatgcaagatataatgcacagtaattgcttggacatatgattcccaccaagaaggcatggcgatcttaatcgacggtggagcagattccgcagacgatagccaaggttgcatggaaattcgctctgaggttggaaacacaaaacacgtcatggagacgcgtatcctactaaatacataacatttggctaactcgcggtatgcagcatcgtagataccaagcattactaagattcgcaaaaggaccataattctcttcgacaaaatcagatataattttagtataatat

SEQ ID NO: 30486 - DNA, 386 bp, Arabidopsis thaliana columbia
cggttaaaaatttgccatttcttacatctcaaatataagcttattagtttaaccgctaatttcttaagggttttttttttggttttattcttgagttttgccttattaattatagttccctttatcgtgaaaattgcataatttctccatgaagaatcacttaacaagtataatggttatggtagcttatatatagactcagactttcgacaatatttaaggaggccctattaggtttgtgtcaccatgaagatatcactttaatgttttgtctatacaattaatgtcatatatatagtttacgctcatgctaattagaaagctcattatcgttaattatgatacttaaacaaacaaaaagaaaataaattattattaatagtata

SEQ ID NO: 30487 - DNA, 576 bp, Arabidopsis thaliana columbia
gagctgaagaagaagaagaagaagattcgaggactggctcttgtgttgtggtggagaagtacgaagtgaggtttctggattttgctggaattgagtctggaaacgtcgcgtgacgatggagacgacatagtgaaggagtagataaagagagagagtgattggtgaaggcaacattgggattagggttcttctggtttgatttgtgacctagaatttggagggaaatgccaggaagacgaagaagagccatgactgagagagttttggataagaagaagaaatcgaaaagcaacgcaatttcacatttattgtgttggaatagactaacgacgtcgttcttagttttaaaacgacgtgtttcatgattctcacatgtttgttgtagaagcaatgacgtcgtttagaaaatgtacttgaaaacgacaacgtttgtataaatttcactgttcttgtagacgcaacgacgtcgttgtaggttaccgaaacggttgcgtttttgtaagaaatgttaaacaccagtgtttagtaagctatgtctagtttacactgctgttgtatataataagctagttattt

SEQ ID NO: 30488 - DNA, 480 bp, Arabidopsis thaliana columbia
gagtgcacattttctccaacgtaaaaaccatataatttaatgtaacgtcgcgtgtgtttttctatgttggtgtcaaatgtgtatgcatctatttatttgactatttttgcgtaaccttgtattttaatttatgatgcaatcaatccaaataccgcgttacgagatcgttggaacggaccagtcacatgttcctttcttatccttatatcaataatgaaataatactagttttagttaattttctgtaaatctaattctataggttaacgaaagaattttgtcggatgatggacattttaatctctttggggagaaaaaatgtagggatataatagtaattggacgagtcatttgagatatgatgctatgcgtactaaaatcccaaataagaactttttgccaatatgcaaattgcatcttcattaaatgactaataggcccaacataatttacactaccacaaattagacccacaaattt

SEQ ID NO: 30489 - DNA, 596 bp, Arabidopsis thaliana columbia
tatatttacttgggcgttgtggtctgttcaaatcgttttaccatgtgaacatcaatgttggcgaaaacatatttgatattgctcagtataattatcaatattcggttaaattaatattgaaagtttgattctaaaaatccatttggtcgaggagcctgctttaatcaaatcttgattgaaaaaataatagttagacagttaatgcaccatgtgatgttggtctgctcttagttctgtttattcgaataatatagctattctaatgaataaaaaaaattgtatggaaaatatcattatcgactagttgacctatgtattgaaattaaacctcatgtatttaattttcgtacgtacgttatggatataatcgtttatgttggtgtcttggtgatctatgtttgttttccgtttagttatatctcataaagattgtttcactctcataaggtaattggtcaatccttcatagatgaaaatatcgatactcggttttcaaaatttattaaattgtgaacgcatgcatttaagcaagtaaaaatagagaaatcttttttttgtcaagataggtacaattattgctcgagaattagggtttg

SEQ ID NO: 30490 - DNA, 466 bp, Arabidopsis thaliana columbia
  unsure (1)..(466): unsure at all n locations
nnnnnnnnnnnnnnnnnnnnnnctaaagttgctcagcgggattgctttaaagaccagctacgtgtgcatgggatcaggggtggtgttgcgaatctaattgaccgtaagttctacgacattccattttccgttttgagtcgttttatctaaaagctcccagccaaggcgtcagaggcaactcgcggccaagcgcttgatcatcaaaaccatgagacctatctcaaataccagtctgttctcaaggctcttgacatacaaagtctgttctatgatctagagcctgaatacgagtgccgggacatggaacaaagtatggctcaccacagagatacgaatgttcctcaaaagcttgatgcagctgccatcgcagagttcgaggcgcaagatgaaattgtgaaaataaaccggagaattgccgttttgacggctgagattgcggggaaccacgaggacatgaggaccttgt

SEQ ID NO: 30491 - DNA, 451 bp, Arabidopsis thaliana columbia
gagatgaagaacggtaaagattagtttctttggatcgatatacatatacctaatcacttcaaaatttacacgtagattgcagacattgagatcagtaaccgtcaatcaaaaaaattatgtcacatcgaatttcaatggttgaaagataattccattttaggagaacaagcagtagtacaatttctaacatttattacatccaaacaacaaacaagaccaatttttatggtgtatcagttggcagcctctattaatgtctctattttcttaaaatcacaccaacaacgaaaaaaaaaaaaaaaaaaaaacagatacacaattacttattgaaccctaaacctattgtcagtgtatatataacccacacactctccatatgctctcatatcatacgtcaatttataaaggtttcttctcattcgtcatctggtcccattctctgtccataaca

SEQ ID NO: 30492 - DNA, 479 bp, Arabidopsis thaliana columbia
  unsure (1)..(479): unsure at all n locations
gtgagtctctcactattattatacatatataaaataaggaaaacaactttattagatatatttcgtattagtaacgttttagttagtcaaactagatgatgctttaactttactaaacctatgtgtagaccaagaaaaacattttctacatctatgtaaaaagttagttttgttcttctctatcagaactttttttaataagcattgtgatccacaaaatttaaagttatcaatatatatgactgaaatgtacttttatttcctcgttcttgttctgccaggaaacaaataaataaacatgtgaaaacacttctgacataaaaacagtagttttattgaataaaaccacaaaccgtgattcccatttatacctcactattttctgcttaagatccaccgacgacgcatttgtattaatatttacatacatcctctctgaagactgataattanaaacattttttttcatttccggaatt

SEQ ID NO: 30493 - DNA, 719 bp, Arabidopsis thaliana columbia
caaagaaatatgatggaaaaatccataccatttagctccattcaaacaagaaggatgcagcaaaggtaaacttgaacggtccacatatggctcatccataagtacactacaaacacatgtaaattcagaagttatcaatcttgaattcgacaaagcgaaaacttagaaagctcatatcaaataataaaaaacctagagatttcatcatttcttatctatattcagaaatagtaatccaagttgagaactattagcaaaacccagaaatttatttacaacgactaacatgaataattaaaaaaaaaaaaaaaaaactagagacatggagatttgaaagacagtaagagaacaaagatttgcagtttaacatgtagattagcttctaaaaatccagagttatgtaaaaatacctttcaatgagatctctgaagtaaaagacaaaccaatctctctaaaaaaaaggaagtagcgtagagaacgattctgagaggtagagggagatggttaaatagttttgacgcagatttagggattcttattgagtggggaaaattttggcaaaatttaagcggttaatgaaaattttaggtatttttgggaaagtttaaggcgctaatggtgtaattattttccaaaggatctagaatattctcgtagaaatatttactatacttattcgcatatctttttcgcggaattaactaagaatttctaaatac

SEQ ID NO: 30494 - DNA, 547 bp, Arabidopsis thaliana columbia
aagagagttcactttttagatgttgatgatagattgtgaataatcatcggcatattttgtgacccaaattgccttataataaaagaaataggaatctttgatcagttttttctttacttaaccttttatcaatttcaggcaaatatagaaatctttgaatcaatcagaatctgtcatcttaataaaaaatatatttaattagaaaaatctaatttgccaccaaaatgagattacatataggtttgtgtttataagagaagatttaggatttagattttataattaagtgaggttaaatattcattagggtttataaacatgtttagatattacaatgaaacgaggttaaatattggtttaagtttataaatgggtttatattttacaatggttgaatagaagagttcacctctacgattgaacgcaaatgtttttcatcaaaatatatggtgtaatttcatctaataccaatttagaaagagagagtcatagagtacgagacatttgttttacttgattagtacgagacaaaccaagaacgaaacag

SEQ ID NO: 30495 - DNA, 437 bp, Arabidopsis thaliana columbia
ccctatcttataagcgaagggactgcgaattttgcagcatgaggtgcccactactaaaggacaacaaaccatcatgaatcttaatctttatccaacaaatcctattgaaaacatgaaaacattaataaatacatatattctgaaatatatatcctcttgtataatgacttttatacacatacacacagtacagaggagatacaatacaagacataagtagaggaaagcgaagacagttgtaatctgaaaaaaaaaaagagtcattaattttaccaaaagcagaaagttagtcccccaagcattcaaagaagagtcaaaatggaccctcttcttctacatttataagatcttatccccacacaattcaattgtatttagtaattcgatggcggtttaagaagtaatgaatacctttcacaaaaaaactctacttcgta

SEQ ID NO: 30496 - DNA, 589 bp, Arabidopsis thaliana columbia
  unsure (1)..(589): unsure at all n locations
cagatttagattttataattaaacaaagttaaatatcggtttgggttttgaaaatatggttagagattagattttacaattaaactcgtttaaatgtcggtttgggtttacaaaagagaattagggtttagattttgtaattaaactagattatgtatggtttggatatatactataattattaaagtttagattttataattaaattatttttatttatttattagatgacatctaataaaagaggatgataaaagggtttgcccctaaatccaagtattgttcataaattaatgtaaaaacaaaattatttggatatattcaaatgttaatttttaaagatcgtacatatattttgtgaattctatattatttacactttcatatggtataatctaactctgatttcaaaaccaaatagtgataaaatattttaatgcaggttgattctagttatgctacgtcatacccacactgtccgtgcctcaattatgcatctcaagctttggaggatagtttcgaccgccactncacaacatggttacttactacattatgagtattatggtgttacttcttaatattttat

SEQ ID NO: 30497 - DNA, 634 bp, Arabidopsis thaliana columbia
gaaattctgtttttggttactgattgatttttcttgttgttggtttgtgattagtgaatcagagtttattgtgttcaagcttagagaaagtgggaggattagtgaggatgatataaagcagatcgtaagagagttcgagaatcttgaagaagtgccatcaagcggatcatgacaatttgccaaagatcacattgccctaactcttgtctggtactagatatgaaattgcagagatgcacatggttagtttttctttttgaattttagtataaaatgtatagaagaatcacaaaaatgatgatgacgatgctactctgttttgaccttgggacttgaaaaggaagaaaatactctgttactgcagtccaaatgttttttttgtatatgtgtacatcttttggcagtaggtttaactatttcatgacactttagtttatattaatttttcatggttataattatataagaacaacatgaaacttactccaagccgtgtaaaagtcgccataaaaacaaacaccccaattgaaatagctcaagtacaatgatacataaacacaataaaccacaaaaacagagaaataaaaaagtgagcagataattggtttgtggaatgaagacagaaacagagtag

SEQ ID NO: 30498 - DNA, 526 bp, Arabidopsis thaliana columbia
gaagatcttcagtttcgactaaacttttgattgctactaaatacgtatagaacaaatcttcttaattatatcttataactaccgtttcttaattattacaacaatatgtcatatgatccaagtctaaactataaatgtccctttgaaaacggacacttcaagtacagctatatcacaaaagatttggcaaatctaagtacacatttagatttggtaaatttgtacagaatcagtgtgttccatttcaacacctaaaaatatagtcacttttaaaaccaaaaataaagaaaaaaatagtcatatcaccgatgcttagcttgatcatcataagcttagcttgatcatcataaggtactgagcctcacggatctcgaggttagaaataagaagagagaaaaaaaacaccaaatcggacggttaacaagttactgacaaaacgaaattatgaacgtgagagagtagacactagtcttcggatcttctagactaagatatcaaacgtgtttgttattagaagataatatat

SEQ ID NO: 30499 - DNA, 546 bp, Arabidopsis thaliana columbia
aaaaatcttaaccaaacttttaactacaaaagtgacaaaaatgatcaagccgccaaatatctaaaagaaggtcaacaaaaagagatgatgagactcaacgatgtaaacaactacatttttctaaatgaatggattgaatgatgtcaattatcaacccaaatttttcaacttaatattttcaacccattcaacttaaaagaactatttgtaactttcatatattaaatatgttttaccatgatagatatttgatagtaaaaagccggaatacatacttttcataaccattcaataagtcggatgatttttgtacaaatttttgtgtgaacaaagtgaatgtatctacaatcagtaattacaatggacccaaatatgatccaatattagccaacttgtttttatgacccaactaagttacacaaaatagtccaaaaacacttttaacaaacattagccttaacctactttatgattctcgagatatgaatttagaaatattgaactaacaaaaaatattgaatttttgagatatgaaatattatacgg

SEQ ID NO: 30500 - DNA, 511 bp, Arabidopsis thaliana columbia
tcaaatccattaaaaactcaaatccaataacgtcctcttagcaacatttgtatgtgggttattcacataaagcgtctttattaacagatagaatatccttaaatattagtttgaaatactatggatattcttcatgtatctagaagaatcccataacatattgtatctagaagactttcaatatctttcacggtattagagcgcacgtctttctaaatcgcttcttttctgattaaatctttttcttttctctttctcgtcctctattctcttcctgttttctccaaattctttcaatggccgacgcagtcaatccctctaacaagatctatggagtctctaacatcaagtctcacatctctgtgatttttgatattgaaaaaaaacaactaagatacgtggagagaactttttctcacccactgtctcagctttgacgttctcggacacatcgacgacactctcatcccagccgatgacaatgatctcgtgtggcagaacgtgatgggat

SEQ ID NO: 30501 - DNA, 542 bp, Arabidopsis thaliana columbia
tattgggatctttcaaaaggacacgatcgggaactctaactactgtttgagactttcctaaagttatatcgataactaacggtcaaatacctgcaaattttggatatatataaagatatataccgagtttgtgtataaacatgttgtttctcctaatcatacgttattggaaacattaacgcggtttgctttatgcaactttgaaacatttgctaatttgttgatataaaatttggctatttatactgtttagtttagtaaggaattaacacaaatgttttagcgcattattgcacatttgtgtgaaataatatactattttcgggaaaatcataatcgaaatagaattccaaaatttccacgtggcatattatgaaaggaatattccagctcgggtaagctggcctccatcaccggttatgatgaaaggtgagccgaaagtggagccaacctgagatgccccgcatgagagccatatgcttcttcgacctttcattctatattctttccttttaaagatagcaactattgatcaaaaaaaa

SEQ ID NO: 30502 - DNA, 623 bp, Arabidopsis thaliana columbia
tattattttttttgtgtgtcggcttgttaattttcttaaaaattatcttgtgaagaggcctgtttaaaaactattacaactaaaattagaccgccgaattcacaaagattttcaatttatttttaaaaagcttataatttttaaaatagtcacaagtatttaaagttttcatacctcttacttaaattagatctattttaatgggatatctttctctctcttaacaaatccttatctttgagagagatgcaccggaaatctcctccagtgatattcggtttttgtttgtttataacttctaactttcgtcggatctgtttttccgttttgtaggatttaataatctctcatttagtttgttggtttctttttgttttgtattttcctctttctataggatttcatctcaaatcatgttgggtgtcggttgatatctcatatttcaaccatcaacttgattcttctcaaagattggagtaatatcttaaccattttatcttcgatgtattgcgaagtgcaaatccgctaaactgttgatttgagtttcgcaaaacaaatcaatagtctaggagatttgaaaaacatgtattcaacttaacagtggcacgtataaagatgaagtg

SEQ ID NO: 30503 - DNA, 439 bp, Arabidopsis thaliana columbia
caattgggaatcaattgaaatggttttgcaaaaactacagaaaaataaatattacaatgctgtcaaaatccgttaaaggaatatcgagcagagaacatgatccctgtgaatcatctacaatgcctagatatgacttccctttctgcctgcattcaggaacaataaattgttatcaaaacagggaaatcagaaaatggttgaaagtatttgaattttggtattacctatagctgcatgcaattaggttcttctcttcagaacactcgattatctcgtaggagttagtaccgaaaatccatagtggtttcgcaaactcaccgtcgagaggatatacagaaacaacctcattggtactctcaatctgtgacacatcgagaaagaggaagagattaaataaggaacaaggtagtcaacagtaaacatgtgtcctacattggga

SEQ ID NO: 30504 - DNA, 453 bp, Arabidopsis thaliana columbia
tattgctatgtgttagattacgacattatgaggtaactatttgggtactattttaatattttttcatctcctctctcgccgacgccaagatatgtgaagactgaagacagttgctctcacaacccctatcatcagccacgtgtttttttctcctttttattcaacattttctccttttaatttctcaacaaataccatcttttagaaagaaaaaaacaagtcaatatatatttttattatttatatgtatgtgtttaacttaattcgctttcacacaattttactaatataactgacttttaatacaaaaatggtttaggtatttcaaaccaatttcagtaatagtctagtgacagaactaaaccgtaagcttaaattaaccattcattttgtgaaactgttgaaaattgaaatcctaaaattgtctgggagaacatatcgactctttttgac

SEQ ID NO: 30505 - DNA, 479 bp, Arabidopsis thaliana columbia
tttgaaatgatttgtattaaaatgacaaatcccatgttatttcaaacatgaattgtaaaaactgtttttaaaatcaagtgttattagattagtgattttaaaatgtacaaccaaacccactgttattggaaacattttaagtagtggatttaaaatgacttgagtgattttgggtgggattgcagaaaatttcttagttaagaattcaaacatccaaatctcatggtttcaagtagaatttgggagaattttaataacaaatctcctaatttaccaaaagtcaccaaaatcatttaaaaactcattaaaatttaaatgatttcaaatctccagttgaatacatccccttggaattagagattttgctcgatttgggacctaagattgaattttggggatttagtttaatcgttacaacaaaatgacatcgtattattgttataggaaacaatgtcgttttcagttgacatgtatgttaa

SEQ ID NO: 30506 - DNA, 505 bp, Arabidopsis thaliana columbia
cgatctcaaacgagtaacagaattctgaaaaagacttgaatctaaaaatcaaaaagtcaaaacaccaaaccgactcaaactccacacaaattaaataccaaacacacaaaaaaaaaacactcataaaaaaacctaaaccctcagattcaatacaaatggctaattcggtttactttctgcagtaccaggtaaaccggtaaaaccgataaaaagagagaaacaatacgagccttttctaattccaactcttactaaatctctagagatcgaaaccttttgagattaaacatgtttatctccttactctgtacagagtcttgtcctctaagaagaagtgacttctctctgtttctttctctcttcctctctcgctaaagctttcttgggaagaacatgagcttcatacaacgcaagaatctctttcttgttttgatggcctctgttcaataacaaatgtccacaatcgtacttggtcagctcatgctttagattctgcacagtaagc

SEQ ID NO: 30507 - DNA, 417 bp, Arabidopsis thaliana columbia
gaatcaaagtgatttgaaaatttagtaaattttggctaaagagagctctagttatgaactaatacatttcattatcagtaaaatccataaatagctgaaaacaatctcaaaataagcttttaaatcctacggcatggattcttctactcctgttttttttgcttttaaaaccttttctgcttcattttttcttgttttgtagagaactcagaaataatttgcgaattacaatttgatcaaacctctcttcttctcctctttcttcttccttcttcatcaaaactattacatttctacattatctcaaacatctccaaatcattatcttacacgaagaaggaagagataagagcatcaatttttaagtatcggggtttcaatttgcattcgatcttttattccatattttactatttg

SEQ ID NO: 30508 - DNA, 926 bp, Arabidopsis thaliana columbia
attatattatgttaacaaaatatagaatcatttatacccaaatatacatatatatatagaaaaatcaaacaataaatagagtggtaaaaatttgaatccaactaaatgtctaacaccgtaacaaatatattaggagatcatcaatgacagaaataaattaataaaacatcgtgaattcaaacaactaatctcggttgtctctctcaccattcgattcaattttaaggcggtattgtaaagtcttcaccaaaatctaaaacatcaaatgaatttaaaaactgaaaaaacttttaaaaataattgaataaagtctaaaatcccatattttattgtaaaatcaagagaactttttaaaacccacacccggccggttcaaccggttcaccgggtcacgggttaattgcgagtttttgtggtttttttcgttgggttttaatactaaacccaaaccgaaaaagtgttcgggtcacgggttaaccggtcggaccggacggttcgggtcgggcgtgaaaacactagtcttcttcatggctttccaagggagagaagagcttatcacgagtgacaaattaggtttagtataaaaattctctaaataatcaaaataactttttcttcagaaatcgcatgcaaaattaataggatacggaaaatatcaatagatttgaaaaccgacctttttctttttgccattgttgttgatataacatgtctatattttctaatttacatgattaaataaaatgttttcatgtttgtatgaaattgaaaatttcatattttaaatcacatttaactagcaacgaaaagtttaaaatttatctcaattggatttcttttggaccataatcgacttgtttaggtgagtgtattgaacaactttaaccttttcttaccgaattattcacgattttattagctattat

SEQ ID NO: 30509 - DNA, 450 bp, Arabidopsis thaliana columbia
ctgactaatcctaagtcaaagagtcaagaaactcaaggccactattcttgaacaacttggattggagccgggctttctttacgcactacgacgagtatgaaatagaaataatggaaagttggattcaactgcccactactctcagggccagcttagaggatgtgccaacggtgcatttgtacaggatccactatttttaagtgagatttctttaagcaattaggatcctattttctcaaaagttatgtaaaaaaggtccaaacctatgcacatataatatataaactgtttttttaattacgctcaaggtcccacttttctctttgtcggctctaaatactccaatcacaaatagaattgattatggattcgagcaatagcaaatggtttcataaaactgtatgattctctcgatctaaatcaatctggttttacatgaagaagatttga

SEQ ID NO: 30510 - DNA, 552 bp, Arabidopsis thaliana columbia
actttctagaacagacttctcaaacgcagaaaactacattcacataagaacagaatcagttaggttataagaagactgatactaaactcatcgaaggatttcattaaatgcaagcaaataagattagcgtaaagcaaaattcactctatcttcctatgaatcacgaccaggaaagcatgatacgaagtttctacaataggacaaaaatctaaaccacaaccgaaacaaaagcagaaacccgacaaaaatgagctaatgtaaaaccctagttttgttcccaattcgtagagacgagaaaaggatatgtacctcgggaactaaagaagatgctcgtcgcttctagaactctttaccaatcagtgaatgctatcttcgaaagtagcttcaatgtaagagagctctcagcttttgattttggtgtgtttcgtttacacacgaagagaggggggtatagggttagagacgacgaaccaaaacgaaaggcgacgcgtatcgtgttggtcggcgcacactggaactcaatctggcccgttaagtaaatgggtcattaga

SEQ ID NO: 30511 - DNA, 718 bp, Arabidopsis thaliana columbia
ctgatgataagctaaattctcgagaagatccagttatgtccttaagattttgttgtctatagtatcttttcaccaccttgcttgaaatagtgcactactaacaagtccttaatttattttcaggatgaatatcagaaggaagacagtctctctttaaatgggatttctcttttgctttcttatctttgcatattgggagtttgctccaggtaagataatctgcagctacatatttgttcattttggtctagagcaagtttagttattcctcactgtcttgaaatttctagaactgaaccaagaacgctgtttaattatcaggttgttagaccgataatcccaacacacattttaatcagaatcttgtggaaatggattctcttgaccttttacagatattgagtgattgtcatgtattatggattttagtttttcctacagcgatatgtttaatatgtttttactcatcacccaacccaatcactagtccgctcacgtaacagaaacaaaaatgatatttttctgttattttctttggatgaaatatgaatctctctatatttgttttgcagtgatcttatatatgatttcttaatgacattggggaaacggctgactaaagttgatgctttcactatcaccactgttttagattgtaagttttattatcatcactattatctatcgatagctgccttaggtgttttgagatgtttat

SEQ ID NO: 30512 - DNA, 433 bp, Arabidopsis thaliana columbia
cgaaccttgatgcgatgtcgtaagccttttcctctatagatttcgcgacggcggaggcttcctcaggtttaatcgttccgtatttgtaggagaggatcgagtctgtggataaggtcttgatcatactattcaccacgtagtcgcgacttttctgacacggtggccaaacgctgaacaagattcctccagatttctcttctttcgtcacctctgatgttgcgtcagatctgtgtttttggaggcaacttgtctcgtctgatctgctttctaattgtggctgcggcgttgagacggtggtgttgattgtatcggcggtttctgccattttttcagttgaaattagggtttctcaagagagtcttttgcgtcggaagaattattgaaagttgtttagtgctatagttatatatataacacaatccatcaatataat

SEQ ID NO: 30513 - DNA, 605 bp, Arabidopsis thaliana
gttactgggctgaacagatcttgtttgactcatggaacaaattgtggatttttgatttgatctgattgaaatttactgactttactatgaaacaaaggggatcgtatcttatgcctgacccgatcaccgttttagattcatgtgtttgtttaaacaatgttgttgaagttgtcattttttggattctgtggtttggtttctcacgttgtttatgcaaattcatagataaaaattatatcaagatttgtgttgtttttgacaaacagattttttaaggtcttttcaagaaattatggaatctgcagggatccagcaactgcttgctgctgaacgtgaagctcagcaaattgtcaatgccgctaggaccaggtatttacaagttctatgcttattctctgataccttgaatctgagactctagaattgcttaaaagtttttcatttgattggtttctcatcgttcagtgttcttataactctttcggtttctacgcgtatgtcttgatttaatgccagagttcttcatgtactgtggatgcgtttatctgatgatatagtcttaggatcatgataagagtgatgacataaagcttttggttgaatat

SEQ ID NO: 30514 - DNA, 524 bp, Arabidopsis thaliana columbia
tcgaaagatgttgttagatttgcagactatttcaagaaactgtcctctaggtggagcagcaaagtcccatgtaaatgattctttccaaaccggtgagctgcttcgtttcacaacctgaaccaaaaccggttaattttagccaatattgtactgaattgcggggaattacttagaaccggattataccggttgcttagaaccgtattaaaccgccttaaaccggatacggattagtaatagcaaaaatcaaactgaaattgcaccgaatttccttagaactggattgaagagaaattaaccggattgaaccggttaaaccgaaattacaataccttggttttcttggtgggacaattgtcgatgattaatctgcaaaacgcatttgaacgtttcagattatcaccgcgtttaatcgccaccgtgagacttcccggcaaacaattcaagagactgttacctctctcatggaagctcgatggagctggagatttcaattttgatttcatcatcaattgcagaaccgg

SEQ ID NO: 30515 - DNA, 257 bp, Arabidopsis thaliana columbia
gtttcgcgaaagaaagaaaagatctagaaactagatttgcagggaagatgacgaagaagaagaagggcgtttatgaagacgctcttcttttagatctagatctgattttttcgatttctaggtttatacagagccatctgatgctatattcatgcgcgaaagtatccatccgtatgtaacggcacgtatgacacacgtgtagtgatgtaattgggttgtcgtttacaccacgattagttgatatcctcgtgcgttgc

SEQ ID NO: 30516 - DNA, 500 bp, Arabidopsis thaliana columbia
gagccattgcctacaatgtctaagataaatatatatatgtagacagcgagagagtgtgtgtacatgtttttgtatgtgtgagcttgtgtcatatactcaggggagttttaggcatttgtgtataagagatgttgtctaggaaccgtatattacctttaacaagaatgataagtatatcaatatattaatgtttttataggtgttggccaatatattgtttgagaccaaatggattgaattttaagattaaaaaaaggaatttatataatactgtataacaaaggtgcctccattgtgacggtgataaacacatgaaccattgatagattgatctcggtgatgattttttcaccagaatcgacgctcgaacggttattgacatgtggctaggatggagccaacaaaaatttctataacaacaagcggtgatatattgggctctttttgagcctttaatgtttctggggctttatgtatagcccatgtaagatttggttatg

SEQ ID NO: 30517 - DNA, 979 bp, Arabidopsis thaliana columbia
taaattagtttagcaacaaaatctgtagattggatttaggtcaattattctaattttcggattttctatactattactttccttttttcttaaattttggaaaactacaacatattcgtttctcattttgtattgcgtatttaccgatgtaaccttgttcgtaacgctcttaaggattttttggtcaaaaacccaaaaatgggtcaaatgagttaggaatacctttataaattgattaatataattaattaactttttctaattaactattttggcatactaatcggaagtctcataatgttgcaagcagaatcgtccgtcttaggtaagaataagatcgttcatcgtaggtatgatccaccataaagaatcgttaggtaggagatcactatgttagagagagagttgcacatcgtggagttgtttgtggattcgtacatcataatcgcatgagttgcgtatagttaaatctgatagtttgatcataatgtgtaatttaagattagattaaaaaaaatctatgtacatatttaaaaacaaaaacaaaaagactgtaaattggatttagggtttgtcacaaaagtagaaattattaaccacaaccaaatcttacatgggctatacataaagccccagaaacattaaaggcccaaaaagagctcaatatatcaccgcttgttgttgaagaaattttcgtcggactccatcttagccacatgtcaataaccgtttgagcgtcgattctggtgaaaaaatcatcgacgagatgaatcgatcaatggttcatgtgtttaccaccatcacgatggaggaatctttgttagacagtatcatataaactcttttttaatcttaaaattcaattcttttggctcaaacaatattttggccaacacctataaagacattaacatattgatatatttagcattcttgtaacgtcgtaatatatggtagacatgactttgacgatgaatgt

SEQ ID NO: 30518 - DNA, 534 bp, Arabidopsis thaliana columbia
tgtggagtgataacatctgcaagttttttgaatcatgaaaccaaatcaaccattgaaatgcacaagctttgagaaattaaacatctttgtaacatcatccagagtagaatttaaaccaattatccaaaaagttctgaatcagaatgtaaacgtacctaaagaaggcattggaaattcattcagctcaggagtgagagaaggcgaaaattcgaaactcgtctcttcgaaaagtacagtatctgtgactgtgattgtagagatgagacagagaagaagagggagatggataagccacacttaatgggcctttaatatttgggcttttaagtcccggtagatgtatatattatattttatttttcttttattcgagaccacaaaattagaaatactaagcgcacgaataagattcgaagaaacaaagattactattacacaatgcatattgaagagattaagcaggataaaaaaaaaccaagacccgtcatcaccggtcggaggatggtgcatcttcgccgttagatcctctttgag

SEQ ID NO: 30519 - DNA, 630 bp, Arabidopsis thaliana columbia
catcaatcaatagaaccaaattgaaagtttgtagctttctaaatattcagagatcggaaattaccatgccctttggccctaaagtagacttaaccagatcactgatagccattgcaccaacaaatgatgcctaaaagagcaacaacaaaagaaaagaaaatcagatttaaacagtagaagagtgaatctgaaaaaccctaaatcctaatcgattcaaaagactcaccatcctcgcacgttctcccttctcttcactagcatcatctttgaagatcttatcgatctaaatacgaaatagctaagttcagttaacggagagcactggggaaaagcaaaaggattgaaagagacgacggaggaacattaccggcatcgggaagagcggaaaaagaagaaggaggcttcttcagtatcggagatatccaagttagtcgaatctgagactagcgagaaacaatagatgggatcgttcacgaagaacgaacaagccgagaggatctcgaaatattgagtgtgcttttgaagaagagtagaaaatgagaggagagagccaaaacccagatctttcggaaccctaaatgaaactcgtaaagaccaaactaccctcgtatttcccagatttcttatgcg

SEQ ID NO: 30520 - DNA, 427 bp, Arabidopsis thaliana columbia
  unsure (1)..(427): unsure at all n locations
gtaacggctaacgtccgccactaaagctgcccgacttgctggcagctagataactaaaccgtacatagcaaggtgtcactaacccaattatagtgtaacagggggcgcaaacgccatgacacaggccactgtttcgggcgtcggatttgcaagtccgagtatactcattaatacttccaaggccttcgcggtgtgagggtcaacagccaagtttgttcccaatgtcataattatagagctgtatatccaccgctccaatagcggcaggtttattggaaaagactgagctatgattccaggttggcttgggagtacgatctgacacgttcaatggataagacgacttgttaacgaaatcgatctcttgagcaagatttgtgaagtactctgaaacacctaacgngcagagcgatgggagacggagcag

SEQ ID NO: 30521 - DNA, 579 bp, Arabidopsis thaliana columbia
tacacagaatcagaaccataatcattcggatacacgaaactaataaccaaacaagagagaaacgcattggatatcaaaatctaacggaattagatttgatcaatcgagatttcacagtcatttgcttttgaggaggaatcagaaagaaagaaagaaaaaaagcaaacatatttagcggttacctttggttggaccaccgaccatgatcacagccagcactttctcctccattgagctccccatgttcaaagctcagatctttttaacagacccacaaaactttgacagaaatttcccaacttgcagaaaaatggggacagcagtatcacaattcagacaaaaggatttgagctttgaaggaagatctcctctgagaaactggaaaaacaaaaaaaggtgaagtttttgagaagatctaatcgaaactgtgacaggttagttgtggttatcgagatctaagaagctgtattgttgcggtgatggggtcctccaagtcacactcaccattcaccacagtcctttaaggataagcgcgagacctctcgtctttacctctttttcagatttggttgcaaacat

SEQ ID NO: 30522 - DNA, 522 bp, Arabidopsis thaliana columbia
acgatatttgacatttaaaacaaaggatgagtaaatgcaacttgcttaatcttaggtttactacagatacagaaacaactaagagtggacctgtgttttcctaactaatatacatcatcatattagtaatatataaagacagtacaaatcgaaactgacagaaagttaagaaaatattaccaaataaggagattaattgataatctacgagtagatagaaaaggaaataaggaattgttaggattgcaaatgggaaagaagaaaagtgatgagaggcataaatcttgaggatgatatattaagaatcaaagacttaaggcaaaaaatagtgtcaataagccgtttccttgaatgttactttctgaacttgggattctctaccataattgtcaagattttctagacattaacgattagcaccctattgaacaataaatacaagcactcttgttcctttctcatctcatattcacacaaacacaaacccccaagatcacttttgttccttggactatggaacta

SEQ ID NO: 30523 - DNA, 508 bp, Arabidopsis thaliana
tcgccggagatgaaacacgtcatcatcccgtcgattaagcagaaactgccgccaccggtacaacctccgcctctaagaggcttggaaagtgatgaacaagagcttccttattcccagaacaagcctaagttcacgcagccacctccaccgcccaataggcgtcgtttcgagccatgactcaggataaatcaccagtgccaccaccacgacggtctccacctccactccagactccaccatcacctcctcctccgccgcctcttgctccgcctccacctcctcagaaacggccgagagatttccagatgctacgaaaagtcaccagttcggaagcatcaaccagttctagaacgtcaccttcaagaaaacaagcattcaagactccaagtcctaaaacgaaggctgttgaagaggtccatagcgtatcagcaggttctcttgagaaattaggtgatgggtgcacggacccaagcagagccaaagttaaagccactccactgggacaaag

SEQ ID NO: 30524 - DNA, 452 bp, Arabidopsis thaliana columbia
atcgacgggatgatgacgtgtttcatctccggcgacctagatgctgccgtcgtcggagctgatccaaacttagacctcggagatgttctcttcgagtgaggaagtgatccattggcggacggagggactgcggtgtagtaaccgtcatcgctgctgatcgcagatccgtgcggcgtgtaacacgctgtgtcacggcattcttcaccggaagatgatgaagaaggagataaagccgacggagagttatcagagggttgcgggggtttagctaacggaggaagcggttggagctccggactgggcctataccgttccgatctcttagccgaattcaatttccggtacggagacgaattaccgggtccattagttccgcgttagactcactcgccgaaacacgggtcggttcaacagttcccatatagagaaatgtagaagacgtcgtcgtcggt

SEQ ID NO: 30525 - DNA, 543 bp, Arabidopsis thaliana columbia
tctacaattcttcctgtagttaagttctttaaccacaatgaagcgttgaattcaaagcgtaaagtgtcttgtgtgaagtagtgtagtaaacaactaaacagaattattgggacttgaaatcagtacttgtggctgaatgaatctcgcaaacaaatatgaaccttctggttttggtgtatatacatgttgcccatccgcagatattcacggcagaccaaacaatatactggaatgtaatttgctaatgtcatgaggtggctcagagtttaaataagtagtgagggttcatcgtcaaaacctgagtagtggcgacatggtttttcttttggggcaaggtaatgggtaattggtgctccaaaaacctgttacatctgacatgtactatgaccaaactgttgagttctacatttgagggtctaaatgttttgaatggcactctagtctttatctcataagcttctcagtcgtgcttgttttggttcataggcttacaccgtggagcttgaagctgaagttgcaaagttaaaggaagagaatgacgag

SEQ ID NO: 30526 - DNA, 540 bp, Arabidopsis thaliana columbia
gtcattagttgaccatattacaaaatggaacatggcttatgggcagttcctaacaaatataaaacctaagggccaaaacgatacatgtgtgaaatatgatcacgactcatgagtagactctaacctctttagaagctgggtaacgacaccccagttgaaaccccggtactgaagccaccggatgactctagttttacgagtttctgtaggcaagtctcgaccttgaagccaccgctttgatgcctggacataaagctggtccactgcttccttggacagcccgtggtttagttctgcttcttcatctccttcattgcattggcgtttctcaaaaaccagctttatggccgtctctgagtctttgttgcttatgcctttcttaaacaatgcctgatccacacacaaaatattcacttctccttagtagtgaaagatcagacaaaattattatctcacagaaaagataaatgtgaatggcaattcttacttgtttgatcgccttggccccaacttaaggaagaccactagatcgagtgaatg

SEQ ID NO: 30527 - DNA, 588 bp, Arabidopsis thaliana columbia
aaccatcttacttaatatcattcatgtcatgtaaaatgtatttgatagaaattcaaaaccaaggatggaagaaaagccaattcctcaagtaagtaacagacgcaacaaacagatgcaaaacaacagataggcccagttgtactaaccacatgtgagcacactcaaagggagggcaaggtgggttcatcttgtatcctctgagtacaataagaagagcaatctgaagataaaattaaaaagctaggtgaagatatgaagataaaggagcttcattccaagataaaaaaaatgctgcagatgtgtcttagtgaggaagaactagaactaccttgtggccaattcttcttgctaaaaggctgaagttactgctaactgggacctgatgaaggagaaagtagagaaagtgcctgcgttgcttttcatgctcaccatctcgcaaagcctcaagggactggacaaaacaggatatgcataatatggcaatgtaagtaaaatgaaatcatgttaactcattggcgaaacatatatgtaagagagaactaatgcaacttcctgtaatagtggctggaaagatcaaaatgctttgtg

SEQ ID NO: 30528 - DNA, 575 bp, Arabidopsis thaliana columbia
aaactgcagagagactaaacatatatatatgaatagttaaaaatacagttatggaaaagatttttcttacactgtgttctgatttgtttaagtcttcctgttttgggttttgttgtctgttttcgttttttttcttttctattaaaatatttgttgcgtcttgtgccttttgccgtgaaggagaagtgtccacattcacacgattacactaatcccacttttgtttttgtcacgattacattaaactcattaatcccacgttattaacaaatacacgaacttgtaaatataaaaggctattttttgtcaactattaaaggctatctgatttcttatttgcaataaatacatttattaaacagcatctcgaaatttaattttttacacgcaaggccactaattttgtggactatttatttactgaaaactgaatatgcagtaaatctctacgtgcgggcgctggctgttttcgggaaagtggaaggccggtcgtttttacgtagtaaactgctcttgtaatagaagtgggttagaactggaatgaccaaattaccccttggttctatacttctata

SEQ ID NO: 30529 - DNA, 572 bp, Arabidopsis thaliana columbia
cgaacaagcaccaaaagaaaaccagaacggaagtgcaggtgattcttccgtcttaatggatgaaacagttttgcctgagtcggatcgagagattgcagaaaagctttaaagaaagaagagcctggttctagtgttgtcttccttttcttctcttcctttttcagctctccatgaaggtgatgaaacatgttttaatggttttggtaatagtttccgaatatgagtagatgatgctagtctctagatgtgtctaggaaaataaaacttgaaaagtgaattgctcaggaagcttgatgaggagtgtctagcagttttttcgtgtgtgaatattttcccttgcaaggatgatatatgataaagttgctaagcgaaattttcttttctcttcttatgttctatgctaatcaaggctaccaaaaggcatcaactttatttagttcggtctgtgttacatatgacttataatcattttttggtggtaacaaacttttttaatttggtggtaacaaactttacaatactgagacatgaattttaggcaaaaactgagtgagagaatagatatttaagag

SEQ ID NO: 30530 - DNA, 574 bp, Arabidopsis thaliana columbia
tgttttgactcccaatccatagacgtgactcttgatagattgatttccttctaaaccacctgacgtagaggttataaaatataattggagtggaatcagcactaatcattcatttgattcgatactgaaatttttatatttctttccatttcatgatttctgagatgactcgtcatccttcatcatggatcttagtaattcgaaagtggcaccgatataccgtatctattcgggatggagtccgatctctcttttcaccgttcatctcgttggcaacacggcaagaccattgttcatctctttgacaacatgaaaaaacctaaaattctgcccttctatccaaaggatgggggggcagaggcctttggtgtccactccagtcaagaattggagcctcacaatcactagccaatatgcttttctcgcatgcctttcttcgttcatggttcgatattctggtgtcctaggcgtagaggacaacaccaatccatcccgaacttggtggttaactctactgcggtgacgatactgtaggggaggtgtgcggaaaaatactcgacgccaggatgatgaa

SEQ ID NO: 30531 - DNA, 364 bp, Arabidopsis thaliana columbia
  unsure (1)..(364): unsure at all n locations
taaaaccacttccaagatatctgaatcaaactttgtaacctggagaacatatgaagtcaacattatcgaattcacatgtacggaggactaagggtatctctgaggccaataggtattgaagttttaatggcgtttacattgtgtccaacaatgtatctatcacctgggtaaatgccagttcatccctaaatcaacacttgatgaatatataaacctcccaagtaaggattggattgaacttgganactggaaccaacatgaaggtttcccagtgacttacatcaactgattcnacgccctgcccaatcatgaatagcgcggcgaccattcagcggatctggtgccacaggaaagcactgcctct

SEQ ID NO: 30532 - DNA, 546 bp, Arabidopsis thaliana columbia
gcccactgaagagttgctacagcagatctgctgaagacgacgaatagcaatgttcagagattgttcgctttgttggcgccaatgattttcagaaattctctcttgaaaccaatatcggatcttccatagtttccactcgggtcggcttttaacgggcccatttatataaagcccatttagcatttttcctaaatcgggtgtttttcttatatcaaaatagaaagggattttttaaaatatctctttgttggttatagtttataaacatttggtttaacaagttataatgaatgtggtgagccactcattacaagaaattatttacaaccacatgagaaaagaaaaaaacacataggctattaatggaggcagcggacaaaacggtctaatttatatgaggtttagtccatttcatttttgggatggataataaaccgttgcggacgagtttatttgtatgtaaaaatagttcgcagatggtccgctgcgggtttttcatttttttttttgtttggacactgcggactataattgatgaatgaaaaa

SEQ ID NO: 30533 - DNA, 614 bp, Arabidopsis thaliana columbia
ggtcgaccctgatagcagatttgataatgaaagaagaaacaactccaaagaactttatagtaaaaatatttgcatatatatcatcaggtgttgaatggttgcgtagtatgatgtagaccggactaaaatcggaccagccggcacttaattcatcattcactattgcggactaaagtgcactaatgcagactaaaaatctccacactaccatgcacatgagcatacaactccataccatcacaaattcactactagtctgcagtttttcactccacttcccaaaaactccataccatcatcaacttcataccaacatattattatctgctgcatactacagtacgacattttgcatactaaaatattggtaagtattatctagtccgcattatataaataaccattcaaagcctcaatcttttgacaagtagattgacgatcttataatatatttttatacaacattgatgaaccacactattgcaagatataactttaaaaatcatcgcttgccagtgttatacattaccctttggcacgttttcgaaatgtacaatgtcttgccccatatttttatcaacattgatgaccaccctacgcaagatataattttt

SEQ ID NO: 30534 - DNA, 536 bp, Arabidopsis thaliana columbia
ttattctttgtggcacttataacatcgatccaaattttgaagatgtggatgttgggatgagagaagaatctattgcggctaagattgaaggattgacgatcgaaggagacatcgacaatgatagcgatggaactcagaccggtttcttgggtgccaccttagaactcggagatcctgacaaaccaaacctcactggattagaccagacgagcttctaggaaattgatcaaaggattttactagttaatcaacaccatttttttaattttctcccaatgaatgttgattttactcaataaacttcaccaaaactaagattttttttgttttgtttttggttgataaagaagcagctaaatataaatccaaatatatctatattcttatttaatctaatctgggaagaaataaaaatgatacataatccgattggcaaaacttttgaatatggagctatatattcaaataaaactcaacaccaaaaaaaagaagcaatatacctatatcatgcttaaataaacacacaaaaaatgaga

SEQ ID NO: 30535 - DNA, 728 bp, Arabidopsis thaliana columbia
gctttcggattcgcctcatcacttatctcttgttatcaggtatatttaccagatctcatttcaagaaaacagtttgcttatatatatatgtgtgtgttgcaatcttgggatcaaaccaatgaataaaagccatcaatctctcgcttgtgcagctattgccgtcacatcccaagtccaagatggtctgataaaagggaaacaaggaaaggcgaactagtttcattgtccacatgttccatatatagtttgtgtctgttttactattacttggtgttaaatttgtcttgcttgactactttaatgtttgtgttagattctatggtatataagataatgataaacattgcagtctctgtagaataataagaacagataagcattacgaggtgttaaatttgaattatgagtcaacacaacagagagtgcaaaaaaaaaggctggagaagctctctagtaaatgaagaacccccacgttgtctcggaacccatgtgattcttatatgtaatattatgacaccatgatcgtattttgcatatatatgattctcattattatttatgatcgcgtaacgcatgcactcatcatctccaacatttcattgaataaagaggacgaatagaatggtaacattttcatagagtaggagaaagaaaaaaatgaagctaagcgttgttcctagtatctaaaggattcagagcagtgattcatcgagaaatctgtattcaac

SEQ ID NO: 30536 - DNA, 579 bp, Arabidopsis thaliana columbia
ttatccaaactggatcaaaaccaagttgggaacaaatcagttccagttcaattctataacaaaaagtcaaaaatcgatcagcatcaattacaattaggatcggttatgcaaaccagacatggcgtaggtaaattacagagttactagtagtaactacctatatcctggtcaaccttgtttgaaaggaacaacactgtaaatgatactatacaaagttcagtgtctaaacataaatgcctcacatgttcctcggatcaaagtttgcaatttacttctccacaatagctcctacagttacaaagcctaaacattataatatcctgtctacaaagatatgaatttgagacaggtaaacattgaaaacagtacacaatagccactcaacaagtgtgatacagaaagaatctggtctcgcatatttgatattgtacataccttgctgtgtatgcttaaacagtagcctatcaacgatagcccattcgagtttaagcccatccgacaaatagtagaggaagcgtcttagtatcagactgaaacacttgtgttaaccataaaaaagactaggcattggataaatag

SEQ ID NO: 30537 - DNA, 197 bp, Arabidopsis thaliana columbia
tatttggtacattaagatccaataaacaatctatattcttcagcaagtgtaaataacttccgagatggggtagaaagaggtgccaaggaggaacaagacactactattagaggacgttgacgccatagacatggggcgatttgatgtcaacgacggcgatgggcagtcacgtgcagcatcagctgagacgggttgat

SEQ ID NO: 30538 - DNA, 542 bp, Arabidopsis thaliana columbia
tgtactagtaacttttaaccttattttggatcgaacgtattagattttaggcaaacttgaagacaaaacactttcttttttcttcaatatattacaagtcaaaatgacagattagaaataaaacaatacaaatatattaagattggaaatattttgattgttcataatgaggatgatcatggacgctttcaatccaaaatagaacgagcagtgtacctgtgaactatgatcctttcatggtgataacaataggttttttttataaatgggcttagcctataaacatgtcaccttggacttattattacataattcctttctagtttaaagattggttggcgtgtaactctttctttgatcagcctaaaaccgctaatagaaccgccatctctatcttccaccctcagcttactccagtttattccacgagtgctagctttctcttcgttatggagggttgtctttaccggtgtgtggctcaattgatgtccgctcatcacgcatggggtcaatttccaattttctcttttatggagagattg

SEQ ID NO: 30539 - DNA, 554 bp, Arabidopsis thaliana columbia
tgccacaaattataatattttatactgttatgagactagattaatcgttgaagttataaacattactttatattagaaacagttgatagaaggctaggcaactgattaggacgtatttgtatatttctgtatttattatacctataattcgatatgtatttagataaagaaaagtcaaaatattttattccaacatttagtgtgagatataatttattatttgcggtttaaataattgatgagagatgaggtatgtggaagcctttttttgcttatgctaaaaccattttgctgatataaaatatggaaagaaataataattaaggtttttggtaatggcgatttgctattactttgacctaaacttgccatgatagattgaaaacaataggcatgatagagagacccatttttttataatggacacaactatacaattaatttggtggcataagagagagtctctgatacgtttgaaagaaagtggttatgtcacataatcacaacaaattataatattgtttgattatactttctctattacaattgactgt

SEQ ID NO: 30540 - DNA, 527 bp, Arabidopsis thaliana columbia
tgcatctaatagctaattaacacttaaaaaggtttttttttttataaaatatttgcatgtaacagacaggagaggactcagattcgccttttctcagacaaattagaggaaacagtactcatccgccatggctgctaactaagttttatccttatatagccctgccatgaaagagagtgttaccacaatgtctggtctattgacttcttaagaatcatcattgtttcccaataagaagaagaagaagaagaaacagaaaacaaggaagatcagaaatggtggcggtgatggcgatggtgatggtggagatgattcatcaccactttttaaagtggttcatcaagaatgattttgaatcatcggcgccgcttccaccggaagccaaaataacctccgggagcagagcctcatacttaaactaatgacagcgaaaccctaaaaaatcaatccttttggggaaatttatagtaccaatttccagtttcacctcagatgattattaacaacacagaccgatataagggtat

SEQ ID NO: 30541 - DNA, 1151 bp, Arabidopsis thaliana columbia
cttcattttctcgatgataccttatattgtacatgagtatagatatatatcaatcaaatatataacttttgtttaatcataacttattgatcaagttttcacgtagcgcgtcagaagactttcgagataaacatattctacatatataatataataactgatataatcatataagtcaagaaatagctatgttatacacgctatattgggtcaaaggatactaaactattttatacttccgtaagtttactatgttttcatttattgacgataaagctaagatactctatttgtcagcatttcaaacaaaatatgtacaagtcaaacaaaaatcctgatttttccctggatttggactgtccttttacatttggggtgcataaataattaatcatacaatatttaatgtcaaatcttaaagaacaaaaagaaacaaaaacgatgtacgaatatgcattgggtgattggctgatccgtctaaccatatcaaccggcgtgcggggcacctacactggatggtgaaccttggcccgcaggcgttgtcacactccgtggtgtttgaatcttctttgtcttgtgaatatggatcatttctcttatttcgtcttctacaaaaaataaagtacggaacatgaggtccttccattgagtttatatgtagtcgttaaaatcgaagacagattccttaatttggctttagcatacgttaatatagatgaaacaaaccggatgacaaatattgatgatactcactgatttttcgaaatttatatggttgatcagctgagatcgtcttgagtgaaaacaacaaagagagaaccaaaagagaagcaatcaaccacaactttgctttcattttttattttgttttttggtggtatacgttgtatacatgtgtatttatatcaaatcaaacgtatacgactacaagggttccttaaaagttattatatgaaagctttcaaatgatattctatcaatcttgtatagttcagaactttgacgacgcaaaggctacacaataaaataatttcattcggaaaatatggatttaattaattagttatgggtagtcaatgtgcatggtgcaccatttagatagcaaaaatataagacatttgatatgtacagtcttgtttgggctttagtct

SEQ ID NO: 30542 - DNA, 754 bp, Arabidopsis thaliana columbia
atcataactcaacactctcctccactcttcacaaaagagagtaaattgcaataaatcttgaaaacttcctttttttcttttatatatttttactccataagcaaaataagtggtagcaaacaaaaccaaaaaatgaaaaaacacaatcgttacaagcaacgatgaaaatccgccagtaaaaacgaaaccgaatgatttagcggatatgttccttcttctactttgtgggtttcattttctggtaacgacattcttagttctaccgcagcacatcaaaatctaaaggtttttacatatatatgttttgtctggtgttgaccgtctcatggagattaaggaaagaaccagaccttgatgaagattgaaagaaccatttgcagaccaaatgctgcagccattacaaccgtgatatcattgttcgtctcgaggtaagaccgtagattcagggcaacaaaacacgatgatgcactaccagctaagagtataatcacccatctcagaaactctactggaataagcaatggaagctgcaaaatagaacatcctgagtgttattatgcttaaacagtatgaagtataaagttgtgatatcaagttaggttgatttatgtcattgtacatggtcattgaaagtgaagttaccaaaccattgtgtatcaagtatatgcatctgtcattagtgttactgatcatcaattgaatagttgaatcagcaaaagagaccgacgttactgatgatacttacagaggttgg

SEQ ID NO: 30543 - DNA, 562 bp, Arabidopsis thaliana columbia
tgtcgcatatgctaattaaccttaatatgttagggatatatctcatagtgtaaattggttattatttattttattttaagagtatttgtttttcatggtaaacgatacatttggtgatggataataagtaatgaaggaaactgatagaaattttgtttctaaataataaaaacttaaatttggaaactctctagaagatgaagaaagtttgcatgggaagcaatcttagtttggtgaattttcgtcaaaatatgttaagccttaatgggtgagacgtcatgactccacactccgttttctttaatggcgaagggcaagtctgtagttccatagactttggaccctttcacgatatccacgtgtattttgtaatatttctcttcttttaatggttttgtaatttgtttaacattttttaaggagtctttttgctaacgtcgatttatataaccgtagtactaatacttcaaaaaaattaaaacacattttttaaaacaaaaaaaatttccttaataaaactagactcgaagtcctggactacacattcagactcatagtagtt

SEQ ID NO: 30544 - DNA, 586 bp, Arabidopsis thaliana columbia
gccagtttgctctaaagtccattagtgattagtagattggtatagttttacatgagatccgagactatgtccattgttgtagactgttggctaatttcagttgtagatggatagttgtaggcaagtataagttgtaggcaagtatacttgcctaccctagacctcgaactcgtcttgggctcgtaatttggtctaagaatagctcaggcgggccgacaacggcttgccgaactcgccttcattagaacgtcatcccgagcccgtgattttgttgccagtccgactccatcatacaatatgcgcaactcctaggctatccataatgatcttcaacacgaggcacactagcgagtttagagttatcacactctgtcgtgggaccggcccgaatccggaattacattgtgccctaatttcttcccttatcagcattaataaaaaaaaattggtaccggcaagcgctctgaatgctcttggaacagcctgcccctagactcggaactgatgcgtgtacaaacagggattggtattatatctattttcctggcgaacagcagaacgtttaccaccaagcttgaggaacgga

SEQ ID NO: 30545 - DNA, 471 bp, Arabidopsis thaliana columbia
ggcttcgatcggtccataatatccgagggtgtatataaataagaaagacagtcgaatcagagtccaaagaaaacaacaacacaacttccttcacataataacaagggaacaagaattgtcattacataagaatgtagttagattatagacctaaacacacaaaggaaaccatctacaaacaaaaaatcaacaatctaaggacttgggattggatcaacctgatcaaacatgtcagctgggaaatcgtctaagaaaacatcagcttcttcatcctttgaaacatgtctgcatcttctcggcacaggcgaaggctcgaagaacggctgagggagagcgaacaatggctcagaagaatcagctggtccaagtatatcatagtaaaaagggtcgtcaagtctagccaaaagctctctgctttctggagagaaagggctgattgcttgctgatttgcatcattctgtgagtcagag

SEQ ID NO: 30546 - DNA, 591 bp, Arabidopsis thaliana columbia
ccatgaaacatagattttagttttttttaaaaagttgacaaaactatcaaaatctatagattccctattttgtttttagaaaaaaccattcttttcataattgattggttataaagtagatttttggaagaaaaaaaaaaagtaaaaaggttaaaaaccaaaaacaacttcaattcaaggcctaaattaaaatcctaattcgagtgggaaaaggatataactaattaacccttctcggtacaattcgagagctactgctccaattcatcggctattaagttgcttcgatataattcgaacgtatggacgatggaggaggaggagaatgaatgtgtgatttgcatggatggttacacacaaggatcaatagtggctaaattgccttgtgaatatacagttaaacattctgttattttgataacggaaattatacaaaattactaaattgccatccaaattgaaacacaaaactataaaacatgagtgcccttgtgccgatttcgaatgtctcattcatcatcttgttcactttttctttggattttcgatttgtaaaccacaaaaagaaagatgagtctttctttttcaggg

SEQ ID NO: 30547 - DNA, 574 bp, Arabidopsis thaliana columbia
tgcctcctttttctgatgatgcatgaccgtaatcaacatgatttctgcatttaagattttgagtctgcaagtcggagtcagttctttattaggttgtaattttaagcatgattacaatggcgtatatagatggttatggtatgagccctccttttgtcgctctggagctgcctgaaatatcttggttcagattaaccatgcatgattactgaatgcagggagagcgtaatttcaatagatttggtgggtggcttggcaagaattctactgcgggaaaaaatagacggttaatggaggatctgcatgttcatgtccttgcttcccgtgaatccagcgctggaaggttgtttccactgtacagttagctttatgatttacttctttctgctagtgaaatgtttccttttctctgcgatttactactctgatagtctttagacattgtgtattttagctgctaccttccctttcttcatatcttatcctttgtgtatatactgcctttcttcttagcaatattctgtgatatactttcttatttcactttctgacaacagcaacattaccacaggga

SEQ ID NO: 30548 - DNA, 555 bp, Arabidopsis thaliana columbia
aggaatagttgctatttgttcatagaatgcatatatggacaaatgcttatatatttgtcctttattttcaattttcccaatcataaaacatgaaaatctaaaccagaaagcattctaaaatttaccaaaataaatggaaaagtattaaaaaaaactccaccatgcatcactgagtttttctggcatctacactgattaaagcttcacgagagcaatcaatgacaatgtcaatgatagggatttttccatatattctccccaaaacatgagagagatctagagatatagaaatatacttcatgacatgaaataaatttgacaactacaagtctctatttctttaaaaaaaaaaaatttatgtgccaaatacaaaagcaacatgaaataagtttatgtctacataaagcatagaatcatcagttcatcacacaagtagatagcctaacgaaatcaattaacgcaaagagataacatatgaagcaacttgcttgatattgattggtagtcccgtcgtgggcggtatctcatctttgtcttcggcacaatttcagattt

SEQ ID NO: 30549 - DNA, 590 bp, Arabidopsis thaliana columbia
cttctcatcaaacatgaacaagaacgaaaaatatggttttaagttataagatcatacatccattaatagcagaacgagttaaatctcctttggcaccataaaacaaaaggttcaaaacgaaatggtttaagaagatttagaagcaacaataacagtcaaagggacaaaaacgagtaccaccagcatctttcctgttgaaaccaatttcattttccgtgaacactcgtaacccgtcttcagttgtcttcctgggtcggctatcttccgtatcgttattaaaaatactcgagctgggtcggctttccctgttgttacggagagttctcgtcctgagtggtcgtctcgtcctgaggagtcgtctcgtcctggatcggggtcccgtgtcgttactgagaattctcgtcctaggtcggctttcagtgttgttattgacccaacattgagctcattcatctcagctctagtgtctctcgactcggatacttgggcttctggcgtgtctctcgactcgggattttggacctctggcgtcctctgagatctccagcaaagatatcatcaatctctttcccaattttaccaggttttgg

SEQ ID NO: 30550 - DNA, 586 bp, Arabidopsis thaliana columbia
aaacatgggatccaaactctgcaatgtatattacgaagtcgtttgatataacacctctcttgataaaagatgattagaacctaaagtaattttaaaatatggtgaaaaattagactcttggagtatataaatggctcaatctgtattgcccgcaccgcccaaactcccatggcaaatccattgacgaaaccaaggtaaaaatcacatgctttgagcgtttttttaaaacagaagtgtaagcttaaattttttagtttaatagtagtaacaaattcaaccttgtgaagagatttattaataatattaaaatcattcccctaattatttgccttgagtttcgagccttctactgtaccactcacacattaaaaatcatcagactattcaaactttcttacatggttgattagttcatctcatatatgctcagtatcatactcttgcagattaatttttcattttaattatcaacgaatttgttatgtaattattcatgaccaacatacatctatttgttttacatacaaccaatgataaatttggaagtcagaatacaatcaatagaaacataagtatgacagtgata

SEQ ID NO: 30551 - DNA, 487 bp, Arabidopsis thaliana columbia
tgtaaactcgtatcacagagcttgatatacacttcgaagtgaatagagttaagacagcgtgagtaggaaacagccaacacatcgagacgacccaaaaatgcaaaaatacaacaactaaaaataaaaataaagctattttgattacagtatttaaacagatataaaaatagctaattatatcatattaaagttatgttatttaaacagtcttaaaaggaattgaataacgtgcgatgttcctaaatatgaatgtatgattaaatcaggtaaaacatagtactaataatcttatatagaaaaaattatacattagtggaacgttccatgcattcattgtattcagtaaataatctttactattggcaattttgtcgaacttatgacccgctcgctttaatagaagactacagtgcagataagttgtttgtccatgtgtaaacgttttaatagttttaaccgtgggtaagaaatgtttgttttacacgag

SEQ ID NO: 30552 - DNA, 476 bp, Arabidopsis thaliana columbia
ttcttgacgtcggtatatctaaaagggaacggcgccggatctttgatgactcacacacagttcttcaccatgtgaaacccattagacttgttttttccatgcattctgaattttaaaccgcttttttccattatagtaaagtttaacaccccttcatggcttttgtaatgtctaaatttttcaatatccaaaacgtcgtataataatgaattactgactatctacaactatcaaaatttcatgatataagtctatctccttgaaatacaatatgtatctccttccttacaatatacatcctcattataattaactcacatcattacatgattttaagaaactaaaagaaaccattacccaaatttctcatattgcctccgattggtgaccaaagaaatgaacaataggaattttggggaggacaattttgttctatcattattttatattgaggaatgatgaggataaatgtagga

SEQ ID NO: 30553 - DNA, 268 bp, Arabidopsis thaliana columbia
aagtccctatcattgattcttgaatatatcctaccaagtaattactctcatattcatacttagttcaatgtatgaatgttgtctagttatcaggtcgtgtctgtgtacctattgacccgaataactgtgatgagtttgatccattggcaattccaaatctttcacaggtaagttaatcatagataatgtgatacgatagagtgtggatctgaaatatttcaacagagagatattattccttaagcttatacttcatcgtctaatgatt

SEQ ID NO: 30554 - DNA, 534 bp, Arabidopsis thaliana columbia
gtcgactccacgtacgtcctcccggcggctctcctagcaacctcaaaacttaattagttaaaaattagtttatatacaatgtagcactccctacattttttggtaaaatgtaaagcatttataccatttttgaaattgtgacagaaattacaagaaacacaagaacaggaaaaagatcaaaatctataaaaaaaagatgataacaaaacagtaaaagaggagaacgaatgtttatagcgaaaacgaaagaagaaacaccaattcagagaaactcagaaattcgcgtgatttccacaactccaaaaagctcgagtcccatcctagttaccgcgagcaaactctaacagagaccaatacaacgaacaaattttacgcgtcaatatgcgagtcataaactcaacaattgaatttagtagacttttgtgataatgatctgagatataatttttctaaacagtatcttatgttattcaaacaagattatatgataagcggcttctggttacaataataataatcatatttccaagcgga

SEQ ID NO: 30555 - DNA, 832 bp, Arabidopsis thaliana columbia
caacaccgcaccatcatccgccacaagcaactccatcgccgtcactaattgccctacagattcctcaatatacacaacatccgccgcaataaccaaatcaaacggcgtttcaacgccgagatctgatctcgattgttccaataaacaatcgaggtttttagagatttacctaacgccgttttgttccgtttcagattgtgttttagcgcaggcatgactggtgctatgtctgtgagtacgatctccgttagacctagtaagtaaaaagccataccggcgactccgcatcctgttcctagctcgattcctcgacggcgacggaaatcgaagagttcggcgtatggatttggagatgttgttgatgatgatgagtctagtgttgaccagcgttcagcgaatttggataggattagtgagcaaggccagacggaagttccgacgtgcatagagccattgtcttgttggattgagagttttgtgccgttcaccgtcagatcgatcaccggagaatctgtgaatttcatttctcttcttcttcgattatctctctctcttcgacactcactttgcgtattggagaaattagggctttcgttttatacactaatgggcttttgaatgggcttggtagttcgttatgtaaccaatgtttcttcctctaaagcttggggctgaaatgctcaaacgaatctatgcaatttcgtacaaaaacaaatattttatagacaaacaaatattttatagacaaatattttacaaaaacaatttaatggcttaaacaatttaatggcttaatgccttattatacatttatactcgagtttgtgcaaac

SEQ ID NO: 30556 - DNA, 587 bp, Arabidopsis thaliana columbia
tagtaacggccgctgactcatctgattacgtgggggaaagttcagattcttctgatgtagagagctctgatagtgatttcgtttgttctgaggatgaagagggtggtaccagagacgatgctacatgcgaaaagaacccaagtgaaaaagtataccatcataagaagtcgaggacttttcgtaggaagcataacttcgatgtaattaacctgctagctaaatctatgttggagagcaaagacgttttcaaggaagatattttctcctgggacaaaatagcagaggttgattctagagaagatcctgtagttagggagagctcaagtgagaaggtaaatgaacatgggaaaccaagggaacggaggagtttccatagggtgagggagaagaaccacttgaatggtgagagtttttatggtggcgaaaaactctgtgatggagaagagacaataaactactcgacagaagattcacctcctttaaacttgagatttggctgcgaggagcctgtgcttatcgagaaaacagaagaggagaaagaattagacagcttgtgggaagatatgaacgttgctctaacattggaa

SEQ ID NO: 30557 - DNA, 728 bp, Arabidopsis thaliana columbia
tgaaaatgaagtagcagaagaaatgctagtatcactgtaatgtataaacaacaagaaatatcagcattgagtatcatcatattcaaaagaataaagctaacatctcttgtaacgttatggttcaaagagtataccaatatctacacaaatatctagaacaccaaattgaaaaatctctgattgtaaggtgtaataaaacaaagatgatgataaagatcatagaaaattcttaagcatttgacagtttaagatgatttctccatcatcgattcatacaccatacttcaaaccaatgatctatttcttttagctacttagccactatcagagatgtaatacaaaccacatgtaaagattatagaacagaaacagaaacagtgcaaatgaaactacaaattcaaggcaagctgaagaaaatgatggagaaactaagaagttgagatcagaaattacctagatcattatagctacctaaataactagagagagtccaggggaagatgaaagtaccttgcaacagaatcaggggatgtcaagccatagcctccaacagttctaggtgggatcgttactggttgcatcggcaaaggtggcttcctgtagccagttgatacacctaattcggatcgatcgtcttcaggtgagacatggccattgcttgcgggacgagtaccatcaccaggtgcgttgttatacgccatcgcagcatcgttcatggcaccaggtgg

SEQ ID NO: 30558 - DNA, 648 bp, Arabidopsis thaliana columbia
catcagatttctttcttcagagatcatgtgtagtagatatgcataattagtagaatgtaatggtagcttaagttgtgagtgaagaaaacattattcgccgatgctgtttctgttctactagtattactcagcttttgaatttccagtattttccacaatcacaatagtcttttaccatataaatctcagatcatgtacagtataaggtgtcatgtaaaagtctaaattgcattgaggaccaaatcacaaaaaacagtcactaaagctaccaaaagctataaagtagtaaaagtacatataagaaaaagactaactattccgattttcgttttgatttgttggaagaagatggtcttgatgataaagggaaaacaatctcagaaacgttttgaaaacttcctctatcatacaaattccgtttcgctatagcgtcggctttgacttcttcttcacgggcagaggatcttccacaaagcccgaagcatttgctttcagctgatggcttctttagttcacatgacatcccggccttgagagcagcagcgctcgccttagcttcactgagcttcttatttaagcttatatactctctccacttaaacgtctatcagaaagtaaacaaacccaaaaaatcatctgttattaaga

SEQ ID NO: 30559 - DNA, 1043 bp, Arabidopsis thaliana
ttgaggattcagattttagggtctcgatttattgaattctccttctacaattttggtacgttcgatgagacccgtcgagttgtttgatttgaaagttgtgaaattgattaactttcgacctacaattggattttaatttagggttgtaatcaattgatgagatcagcttttggattgcgcttagctttgattggccttagattttcttgattcaattagatgctttcgttttggattgcaatttgatgccttttcttattctacatcatagttctactttgatgttttcacataacctcacttgtgttaccgatactgttcctaatcatctttacaattgctttcatcaagtctctttagtgtgtgtgtttgcctgtgctgattaaagtttagtcttattttcagaatactatctgtcatgtcactaaacgtataattaattcaatttactgctgctgtaggtggcagtcctcctaaaccttgggaaaaagaaggaaatacatctggtcctaatcctttcaggcctccttctaatactagcacggctggttcagttgaggcttctggcacagctaatcctggtgaagtagttcctccgcccgtgaacaggcctaatacagctgctaatatgaattcactcagtaggcctgtaccggctagaccttgggaacagcagaattatgggagcactatggggggaggtatatttaaacaagttatcttagatttaatggttgctgagattgcataaagcttagttctattattgtatgaatggcaggttatggttcacatctaggtatgacctctgggtatgggtcaggtacatatggttcagcattaggtgggtctggttcatcatatggtggtgggatgtatggcggtagtagcatgtatcgcggaggttatggtggtggtgggctctatggaagttcaggcatgtatggtggtggtgcgatgcgtggttatggtggcacgatgggtggttatggtatgggtatgggaacgggaatgggaatggggatgggaattgggatgggtgg

SEQ ID NO: 30560 - DNA, 902 bp, Arabidopsis thaliana
cttataattatagtttatgaattagaaaaccttattttatttttctagcatctggtatttcttcggcacatgcatgcatgatgcatccatggaccataaatacgaaaacaaatccatttcatatatatttacttcaataacaaattcgtttatgagtgatgatactattaattataatgtatttattccatagttttttttctggtttatgtaaacaaacttacatcaataacagagataaattcccagaaacatttacatgtgtatgaaactctaataatccgcaatgaacttagaaatataaaccggtaacaaaagaaaagagaaatttctgaaaaattatatatcagaaaaagaaaagaaaaaagaattacagtgagactgacagtgatagattcatgagcgccggcagcgagtgatggcgctgcagccacgagagtaaggattggcctgagcgccacgtcgacaattgtagtaagatgcgccgcgacgtgagcacggaattgtgtttctcctcagcgcaccatagctgatgtacctcctcgtagctaatatgcgccggttgatctctgagtccatctcgaactcctctcccatttctcctccgccgtagaatagatctcctccgtctccgagggcggcggaaacagagcactcggcaattgtaccgcggcactctgtttcgaatggagggaaatctccggcgaattcggtggattgagaagatacggcgacggaccagttatgaacggcgagaatgagtagaatcgcgaatatcgccgccgcgccggagtttctggagagtccctcattttcttctgtacactgtagctttagtctctctgtgcacgaactatgaagaaagagatagagagataaaagaaaaggtttttaaagagaag

SEQ ID NO: 30561 - DNA, 788 bp, Arabidopsis thaliana columbia
agctgaagctaggtcttgtgattgcgaaacgatatcgacggtgtaggagtgtggaagcatcgctaaatacgaaggtgaaaacgaaacaagggtttttatcgagagatagagcaaaggtttacgccggagaagaagggtttgaaatgcgaggcgactcaaatcgcgccttgtgaaggggaaaagaaaaaccaaagagggacaaaagagaagaaaaaaaatcaacacgaggaagaaaaagaaagcgaacgtgccacgtggcatctgtgtaaatcaccgcgattaattttccatgacagtggactttttaaccaaagagtggagtgaatcggtgaacgcgggaacactctcgacactcatcgccctaaatttaacgctcctgattatgacacgttattcactcttttaaggcccatttagactaattgtttagcccattcgtttttttacttacgaaacgcttgggaacttgtttactttctcttacaacactggagtccggttaaatccggttcgtcttggtttaatttccgttttcaatccagttatagtttttggtcagaggataaacaaactgtgattttatttattcaaaactaataaattctaatttttagtacagattaaacgaaaattaacgcatcctagagtcaaaataaaagcatacaaatataaagaaatgtaagcaaaaaataataatttgtttttctcccttttttttttcttttttcttttccctaatgatcaaagctgaactaaaacatcctacccaagttaaacaacctaacaaa

SEQ ID NO: 30562 - DNA, 1306 bp, Arabidopsis thaliana columbia
actgtaaaataatccatatatagacttaactttaatgccatctataaagtttcagattttctgttccactggtatcaggggagagtatatatatggttgattcctgaatggtccctttgctcttttttattctttttcttttgtctgcagacatcggagatgtacagcgttaggatgcctaacatattgaacttctcatttgacttcttctatgcaacgatactcgtccttgcaatctatgtcccaggcacaaactcagtcaacctttcttataacatatcccatacatctgttcaattctgatctgcgagactaaatttgtatttggctgttgcaggtagcccacacatgtacaggtacatgcttggtcagcgaaagagagctctctccaaatccaagagggaataaaagaaaagatttagaaagagacgaaaaagctcatcaactgttttctcctcttgtcttgttcgttcatgtactactagtctactactacaacttgtcttttgtttagcttgtttgagcttttacttcctcggcgattacttgaacttacatgcagcaggatactattaagtgtaatgtggtttctaaattaataagaaaatcattggttccttctcagtagaaatgaaaaagttgatttaagctaaaatttcccaaaaagtcgaaatggattcttaataatatttatgaaattgaaaaaaaatcaagaaaattgtgaaattattgggtcatatcgtcttatcatggtttaaatatttaaatgcttttgagatgatcacgagtcaaatttactttgcccaaaataactatcaaaacttgtttttttgtgatatataaaagtcaacgtagttcgttagtgagagatttatcatggaacacgataaggcgtcgtgaagtaacgcagatcacaaaatatttgtgtctgaaaaggcatcggcgttgtctattttcttaaatataaaaattgaaataaatataaacgtcgtcgtttggaatcaatcaaaaggaccttctccgcctttcattattttgtataccaaaccgagggaaaaatccacagagatgaaccaaaaataaaaacaaaaatctttgattatttctacaaaaataaaattcgaaaacttttgaattctttcatttggctttcgaagctgctgcttcaattcttgctgctttgatttgattttttttttggatgaaatggccgatcagagaagtaaaaccaatagatggaactgggaggtgagtgggttcgaaccgaggaagtcttcttccaatgcatcgtttgcggagagtactg

SEQ ID NO: 30563 - DNA, 297 bp, Arabidopsis thaliana columbia
atctgctgcgacatcatctttactttgattctcatcttatgtagttcgtgggctttgttttaaacataacttgggcttaagtacttattattttctattaaccttactagaccatccccatcggacaaatttagagggtatcttcaaatattcacagggtctcgcaatagtagcatgagtattaatgcgcttatcaggagatacaaggtggcttagatgtctgatggtcagatattttctgatactggaagacacgaatatgtcatcaagtcataggttggtgctaatgtgatttat

SEQ ID NO: 30564 - DNA, 587 bp, Arabidopsis thaliana columbia
caaattgcacattacatacatatgtactttcctttttatgaatggtacatactatatacatcatataatccttagaaattatttaccttgcaactattgaaaactataacaaaggacaacaacttgcacattaaattcatactttccaatttatgtacacgataatttttattttttttgataataaaatttgaaggataagatacaagagactagttggacataaagtttaagttaccacttttccctttcgtttattgggactttgctacggaccttggcctctacgtgaatctgaaggtggtgcatggattcgcgacataaccggagtacggaccatttgaccttgtacctcgattagaagaagagagagaaaaacacaaaataaaagaagagcaatgagtgatgtcatcgaaaccattattatattgcattcattacgtagattagctaatgatatatatattaaaagtagagagaggagaaagacagaaactgaagactttttaaagtctttttggctccgaaattgccaagtaatatgactatttaaattgggataacatgcaagatctataattgagaat

SEQ ID NO: 30565 - DNA, 453 bp, Arabidopsis thaliana columbia
tagtaacgagatacaaactcacatgtaatttagtcttagtaagtatcgttcgattttctgaaatgaagagagaagtttgttagccaaatgaaggaaaaaaaaaatagcaccaaccaatattatggtgacacgttctgtttcttccagtatcagaaaaatgtcttctcacagacatcaaagccacagtgtctctcctgttcagcgcattaattcccatttttctattttttaattttattaaaatttgaagataccctctaaatttgtccgatggggatggtctaatagatttttcgggttttgaattatatttgattaagaagatgtatttatttatctgaagtttcaattcaatcgtctctttatgaagtcatcttttattaaaagatatggacacgccaattttagtgtatatagaattgtcatttctcttaatttgcgacatcatagttt

SEQ ID NO: 30566 - DNA, 550 bp, Arabidopsis thaliana columbia
cctctttattacccacttcttcacactaagctgatgctcttttcgtcatattatccaggttcaatatccaagcaatatagatttttcgcctgttgtaatcccaaggttagatcatctagctgctttgatgcaaaatgtatatttttattctgcatctcaatattatttgctttatttcttacatattccactctctccctccaacttcttttgctcgactatctcacgcctatgtattatatctatttatggaaaacagcttccaacaacttgtggacagcaaaccaatgataacgaatggcagtaacgatgaacctgaaaagccaattgtggaacccagtgttgcatctaatgaaaaaatccagaaaaattacactgaagagctttcttccatgatttctttcgaagagccagaaagcgttaatgagaacaatctcattaggcaaccttcaccacctccagtgctagcagaagttcaagacttggttcctgctttatgtcctgaagttagagaaccggaatgtatgatagaaaactctctgccggatga

SEQ ID NO: 30567 - DNA, 479 bp, Arabidopsis thaliana columbia
gcatacggcaaaagtagttgtaaatggctgcagaatctcctctcttaaggttcagcaaatcaggtgacccagtagaattctgaaacttcttgttaagagtcgagtttgtgttcacattgctcccattatccaccacacaagctcggtacagcttaatcgtcttagcgtctgagactggactagatacacacttcctcttccatttaaccgatttatataacttacaaccgagtaaatggatatgatcacgtgtaacttcaactacccgccacctcttagaatcaacctgtcacattcttatcatagcaggacaaccagttcgagtttcctttctaacacgattcacatcgttaatcctcttaaaaccttgactactacaacaaagcaccgcaccatacttctctttactacgccgcttagaccacgaattcttcactctgacacgagacccaacttcactagcataacagttatgatag

SEQ ID NO: 30568 - DNA, 549 bp, Arabidopsis thaliana columbia
tggatagaagtgagtccgttgatgaagatgtatgtgtttaactctaaaactcctcttttcaattctggattttgtgaagattatgaatcgattcgcacaagggttgtgatgatgttacatttgatttcattgggttgattatcatttttgttcagctccttcacaagtttgatgcctcaattgagtaaatagggtttgctagaatcaaagtttatagctttttgttattacaggtccaagcatctgcatatttagagaacgacgaggttcgtgaaagagatgatccaatgtcagatactttacggataggagaagaagctctagtttgtagtagtgagcatgagattgatgttggattttgtcaaaacgaagaaagacagagtgaagaagaaacaatgggagggtttgatgaacagagtggtttacttgttgatgagagacaagaattcgatgcacctgcggttggcatggagtttgagtcgtatgatgatgcttataactattataactgttatgctagtgaagttgggtttcgtgtaagagtgaaga

SEQ ID NO: 30569 - DNA, 711 bp, Arabidopsis thaliana columbia
taaactgaaactaaaataaaaagaagtaaccagaaatagctgatggagcttaccgaagatcctgatggagcaaagcagtatcaaggtaagtgagcttgaaccaaagtgcagatctattgctggagtcctctgatgaaaccatctctctgattcaaatgtagttatatatctcttctcgtacatttttagtaaccagaaagagttttgagccaaagcctgaagcctccctggatcgggaccatcttgtatcctttccaagctttccttgaaccacatggaaaagtttctcaatccttttgacgaattttgctactactagactaaaggccagttggttaagtacatgtatctctatctttaaatttatccagtagaaccagttaggaatgtatcattggccaaatgggctaggcccttaacgttttgaatcctaatatcctttttccaatgttaaaacacatcgctgactaattaagctcgaggactgccgactgtggatcatggtttggctggctacacttggcttaagacgggttagctcgaggactacgggtaattagcccgtcctaggccaggatctttcagcacatgataatatccctaaacaccactaagcctcatctaaacgggcaatggctgcaaattaattagttattttaaacaatggttggaggattctcaagccacactccttgtaattgtaaaatgttg

SEQ ID NO: 30570 - DNA, 831 bp, Arabidopsis thaliana columbia
ttcgatgggcatgtcaagcgcttcatcgcaaaacactaacaaatgtcgcgacggatttgcgaggcgtctcatagtcatacatacaccaaaaccgactttgagcggtgctcaaacccaaccggtcacactgaaaccctaatcaactcagcaacgccgttcttattctcaggtaccgcacttctactccaatttcgtgcaacttctccgatgtgaaaaatcctcatcgaatagatccaaataacggtttaccagaaaaccctaatttcctttgtctaaaatcgagtcatcgagtcttctctggcgataacccgatcttcttcgccgcctctcatgtctcatcgatctgcaaggtaaagaaatatatttcatttgaaagtaagatctattttctgtagatctaattagtttttttttgttccaaacgattttatatgtatatttatttaaatctaattagggtttcttttactcaatcaattttctctacagttctaatttgggtttcatattttgagttggattttttctttagattttattagggtttcatattttgagttggattttctctttagatctaattagggtttcatattttgagttcgattttctctttagatcgaattagggttttgattttttctgtagacctaatgattttggccatcaattttcttttactaatgttttctttttatttgccagatgacattctctggaaacgagtatacaaggtttcggtctcagaagcaacatcaacaacgtccacacacgagtgtaagtgaagagaacacctcgacggttcagggtaatcgccgtaccttcgcacct

SEQ ID NO: 30571 - DNA, 609 bp, Arabidopsis thaliana columbia
taaataaatgctataatacatgagaatcagaaaaaaaacataaatacaaaaaagtaaggggatcgtttgacttcatccgagttattcgaagaaatggtttcacttttgtacgtttcagtaacgtaaatgaaatttatatttgtattgctttcaaacatataaacaaagtaaaactgtatttgacaaatgtacaacaaacaaattcaatttatttgctgaaaaaaaggaaataaaaaaagcaacggatgggatcgcactagctcggcgaatttgagatctaatcaacggccctacactcatctctctcactctcttgaacaaaaccaaaacaacagaaatagaagtagcgagcgacgggagagcccaacggagagacatatcgccatttcaaagctaaacaaccagataataatactgaggtgttttcttcttttctcactgatttctctatgaaattgccacacccaaagtttgagtcttttatgttttgtttcctcactgatagtgtttttgttgtttagctcaaatcattgcttaattttttttctctttgtaacaactttactgtctttgaaaattgaaagaaaaaaaaacccaatgattcacggg

SEQ ID NO: 30572 - DNA, 704 bp, Arabidopsis thaliana
gttcatatcttgaaattgttaattgtatatcttaaatctttgactgaatttaactcttttaatattaaaataattaaataattaatcttaaggtatttaataaataaaaattactaaaaaaactacaataaaagatctatatccaataagaaaattaataattatattgataattagggagcatatgcgttattataaattacaacctaacctactttaccgacccaaagcctaaaaaatccgacctttttttgttttctctctctagaagtctctctgttttcatctttctctctctctctctagctcttcttcctcgtttctggcttttctgggaattttgatcctttggcccccattgctcgcttgaattacgaatcagatatcgccgatcgtcgtagatctgcgttgatactgtccggctgagtaaacagggtgaacaaaaaccaaaaacagagagggggtttaaaaatcctgaagaaaatcgcatgaatttgtttggaagcctgattttttcatcttcgatttcgagccacttcacgacttgtcttctcatctttattcttcatttctctccccagcttaatagtaataataataataataatagtaatcgtaattccaataatctcgagagtaatcgtttgatcaattgaaaaaaaaatcatggagtccaggaaaaactctgatcgtcaaatgcgtag

SEQ ID NO: 30573 - DNA, 1290 bp, Arabidopsis thaliana columbia
atccccttctcacatatcctctaattatctaccacgtcatctctctttcgtatcttttttttttctctctttatatactcataacgaccataaaccaaaatctcctctctttttctctctttactattttcttccttaccaaatatagcaacaacaaaaaaacgttttctgtgatggaggtcccgattataaacagaataggcgattttgacatggggataaactcgataaacgacccgtcgtatttatctcgagctttggcagtctccggtgtcggaaagttacatcaagcttatagtttttggaaatggggcgccttattgctacttgcattttttgcttcatttacatcgttaactacaagaatcaagactttagtctttagattaagaaatgtaaacgtgtctctaccttcccaaactcttttatgtaattacgacagcgactccgattggtctttctcgtcagactcttcagacgaagagaaagatgaggacgataacaaagaagatgactcggtcaatggcgattcacgcgttcaaagatttggttattaccatgatgatgatgataagggtattagtggaagtgtcccctggttgcggcggtgcagtggtagcttcggagatttgttagatttaggctcaagcggagtcgtgaagctttgggacaatcttgatttcaacggagaaggaagtccggtggcttcttttttcagcaaatgcggctcatactcgttattgtcatcggcggttttattagcggcggagaagaaaggatccgacggcttggaagtgagtgcgtgggatgcacgcgttggttttggggtgcccgcgttgctcgcggaatggaagcagccgggaaggttactcgggaagatcattagggttgacgtaggtgacgtggacaagatctacgtcggtgatgacgtcgaaggagagattactgtgggagacatgaggatggttaacggtgcgttgacggaactgacggaatcagaggttgagaggatggtgagaagacgcagacgccgtcattgaggctgacggtgccgttggggagatgtattgatgataaatgattgattggcatggtagggtctaataaagactgaaaagttcaacgcaaatgcaagtgacgaacatttttttattcttgtaatataatttgtctgtcttgtatttttttcaatttaggttttcaattttttggcaaaaaaagaaagaaagatatctcttattttgttcttcgaaataaagaaattcaacctcctgttgtcgtgtattttgg

SEQ ID NO: 30574 - DNA, 946 bp, Arabidopsis thaliana columbia
ccgtcaacagcattaccagtccgcatctacagttttataaaatagagttaaccccacatttgaagcctagttcttatgatgcataccatttaatctttactccaagagagtccgtagagaatacaaactcaagacaactaaaagttttcaacaaacctaccttccaaatagcactatatccccggtgcttcatctcctcctccaaggtcctgaaatttatcaacttcctgacatatacaaattaattttagattactatacatatggaagatacattctgtatacatatgataaaaaaatagtaaagcaagaaagttttgtctccttagtccctcatacaagcaattaccaagaagatatagcagaaactataacctgaaggcacattatatctgcagaccataggctaagctcgaacactaatttgctctttctccatccccaactcaacatattcctcggtatgtgaaagtaaagacttctccagtgatcatttgcaaggtaatccgccaatatattatacgataaaacaacaaacttttctgtagacaagagaaagcaaatcaaaaattgtataccggagcaaatgagatggtcacgcataaattaccggagccaggagacggtggcgttttggcatattcccattcacggtaatctgaaggttttgaccgtggccgttgacgaaagctctgctgtggaggcggccgggacatctggttttgatagaacggagggggagggcaagccgcgtagttttgattagacggaaactgattaggttgacggaattgttgccactgacctcgtgacggcggcggaggtcgaaattcgtaattctgattgaacggtggttgctgccgctgatcaagcggaggctgatgttgtcgataaggttcaccatgccggaatcggaaattggcgtcatgaactgattgaaaatgag

SEQ ID NO: 30575 - DNA, 494 bp, Arabidopsis thaliana columbia
ggtttagggtaaaactttttatcaaaattattgagacattatctcgtttattgaatttaatgaaagaaattcaatgatgattctaataaaaaaatagtatttataggttttcagtttcgatctctctcatcttttctgtctccgccgtcgttcactccgccgtcttaggtttaattttatgggggaattttgacaaataactaaaaaaaaaatagaaagaattcaaagaaaaatgagaatgtgacatattaaattgagaaattagtaaatgcaaattttgactaatatgttcagggtgaaatcatgtacaaaatgatgtttgtaaaaaccattttcagtttatcctctggattcttctttagtataaagaataaacacacacaaaaaacaaaggaaaaaaactattgttaagacttgaacccgggacacagtcattttaacacaatacagataaaccatctgacctacaggcaccaattgtgatatgaagaaaa

SEQ ID NO: 30576 - DNA, 662 bp, Arabidopsis thaliana columbia
tccccatcttcattatcctcgccattaccagcaaccattagctcttccaatttcctctgcaaagctcatataccagattcagaacaataagagaaaagataggctcaagtccaagaatcaaaatctacataataaaaatgattgatcatcaacaatctctctgacatctcatccactattaatcactcatacatcacagacactatcgaaggacatgtaaaatttcgattaacaattgcggtcaaaacaaaagaagcactcaaatttctatagaaacaaatcagaacaagctcattgcacaacctcttaccaaaaagacagtgtttttaagctccagacaaatctaaatttagctaaacaaagaatttgagactaatctataacgcatatcagaataagaaggaacagttagatgcttacattcttacgggcctcgattcgtttccgcctaaaagcttcctcctgctgcttctgagcttcctttcttcttttcttcttcctcttgtgaaaaccagtcacaaaatccctaccaacaaaacaacacacaccagaaaactcactaatcatgcgaattcaaagattcccagattgaatcagcagtaaagttagaatttttattgtacttgagatctttctcgtcaaaagagacggtgaggcttttg

SEQ ID NO: 30577 - DNA, 613 bp, Arabidopsis thaliana columbia
aatgagacctggattgagaagtaatgcctggactagctgggactggaaactaagagcccggtatccattgtgacgaagcattctctcagcaatgtggtttgcattaccaacgcatagagctttcctcaacttcctgtagtcgtctcggcttgaactcttcctaccatttgcccctacttccaatcgatctagtttgtcaaggagaccttttattttagtgacggttggttaggtatgatacagccacctatcacatctcacaagataaaagagtgatgttgacataaactctggttctgttggaggcataaccatttagggtgaaagccatagagaaataattatatattctttcacggaatcttcttgtcatgaaacaatctaacctttggatattttctgcataatctgacataactgtcttctaacatctttgacaaacaccatccctcgcacctgcaaattatttttcaacaaaagttatctttcttattggcataaggagaccacgtaataatgtaccgaaatagactatctaaacaaaggtagtaaatttcagtaactcgcataattgttggttatcaaactgtatgaagcagaaaatacaaacatt

SEQ ID NO: 30578 - DNA, 579 bp, Arabidopsis thaliana columbia
tcaaccttacatttaagacgtgaaacatatttggtccatttgattttgtgttgatgatcattgtgaacatctctgtctctctgttcagggacctaaaggagcatctgagaagattacagcagcaatcagattcacggcgcagacagctgtaatggaaatgatgagacaaagagctgcagaagtcgctgggggctcaggttaaaaaaaacttgtatatttagaaagatcaattcaaagttgcaaaaactttcatccttctctcgaaggtaacaccttttggaagaagaagaagaagagccagttagagagagacagattgtgaaattagcttagattggtatttaacagtcacgggtcagggattaacatgcgagctttaaaccaaggatgccactttccagaagaagaagaaagagagcaatgccagccttcttcacagatgacaagagtgttgagagattcaggtttgatggggtttggttggctgatcttctgattctatctatacatacacacacgcgcacacacacacttgcccacttctatttttggtatttattgtatttttgtaaattgaca

SEQ ID NO: 30579 - DNA, 740 bp, Arabidopsis thaliana columbia
attagaagatgcaaacgttaagttttaaaactaatgactgacttctacagttatccgattcttctactgcacaaatctcgacttctaaaatagtttccttactctaataaccataatgttgcataagctgatgattccaagggaaggatcaagtagatccaaggaagaagacaaggaagaaagtggaaagcaacagtaccaaaaagacgagaagaagcagttccatcaatccgcaaagcttaatccgattcatctttatcttcaccatggtaagctttctcctcagatcctctatctctcttcgcgtttctcctttctcctgcttctaaacaaaacaccagagatgagatttcgcatggcaatttcgtaatttaagagtcgattgtagcaaaatcgattccaatcggaagaagaagggatcgaactaacctcgccggcggaatcgattgtgcgagatgatgcaagtgaatagagaagcatcgtagctctggcgcagcgaatcgcagtgagatctcgggaaaattcgtctttgctcgccatcgtctctctgcttctttctgtttttgattttttgagtttcaaaacttctacgccagattctcaatgaagggttcaatgtgacaggtgtcaatatatgattagttgactctacccggaaaatgaaaatgtcccacttctattttcgagattttccctccaaagtgttttggggttagttaatttatttaatgtcaatagta

SEQ ID NO: 30580 - DNA, 571 bp, Arabidopsis thaliana columbia
taaaaaaatatacttattgccttaatatccactaaacatctgattctgatctataagttttcaatcttccattttcattaggctcatgttttattttcagctcaacgcttttcattcaagatcattttaaccaaaaaacaaaacgaaaaaaaaaaacgtaaaacgagtatatgtttactaaatggtgaatcttcgacacactgtgcctttcaaagagagaatgcaaaagaaaaacctaacctgcagacttcagagaaccaatcataagcttctaagcctcacttagttcccaatcactttggaactctcctccggttccacaaaatttcccaataccctgaaacaagcacccaacaaacttgagattgtcgctagtcaattgtagcttaagacagtcgaggccagtttttcaactttgaagtaacatctcaattctcagatgagcacggttctcgaattcacacttcgtctttagaaatacatagtcaaagactagtctttaccttgagattacggcaaaactttgtccaaccaagacactcatctcgaccaatccaagtccaaacgtgta

SEQ ID NO: 30581 - DNA, 586 bp, Arabidopsis thaliana
cactttggtccccccattgcgggtggtcagatggccaacaagtattcgcctctccaactgcagatgttacagcagcagcagcaggcggcagtgcagaagaagataatgatggggctaggatcaggtgtaggcatgggtatgggtatgggcatgggtatgggtatgggaagcatgggaaatagtattgctgggcttggagctttaggcaaccaattgaatatggcaggaagaggtatggggggaaccggaatctcatcgtcaatgtctgttcctggcatcggtaatatgggccagaacccaatgaatctgaatccagcatcaaatttgaatgctataagccagcaactccgatctggtgcattaacaccacaacaaaacgctctgtttacacagattaggatgggcatggcaaaccgaggaggtgtaatgggtgctcctcaaaccgggataagtggcgtgtcaggtactaggcagatgcaccccagctcagctggtctttccatgttggatcagaacagagctaatctgcagcgagctgctgctatgggtaacatgggcccacccgaagctgatgcctggaatgatg

SEQ ID NO: 30582 - DNA, 473 bp, Arabidopsis thaliana columbia
agtcatgttccatgcatcgtataccatcatcatataccttgcatagtacaccctcatgtaccatgcttactacaatgtcatgtatcatgcgataatcctaccatgcgaaatacaccattttgtaccatgtggagtagaccgtcgtgtactatgcgatatacaccgccgtgtaacccgctaacataggtctgtactccaaagtgtacaagatcggtgtgaaatataagttgtacgatctttgtagcatattatatactaatatacagtgtacacataaaagaatacaccgcttcgtgtataagattagtgtggagtatatggtgtatgcatttttcttaatatacatcgttttctaagttttttcgtctttttaacttctcttaagttcttctaaccccatcacacccttcgtctaacccttttttttatcactgggaccaatcataaagaaagaaaacaaccaaaaaagttga

SEQ ID NO: 30583 - DNA, 560 bp, Arabidopsis thaliana columbia
ggctcgaaaagttctgagatcggagaaggtagcagcggaaatagcagcagcaaacctgttcaaacatttgtggaggtcgaactcgagcaactttctcgacgaaccgagatgaagtcaggaccgaatccagcttatcagtcgacatttaacatgatcttacacgacaatacagggacactcaagtttaacctctatgaaaataatcctgggagtgtcagatatgacagtctcgctagctgtgaagttaaggtaaattaatgaataataaagcagttaactagttgctgtaactggctgttacatgttcttcatctttttctctgtacagatgaaatatgtaggtgatgattcaacgatgttttgggccgttggatctgataactggtgtgattgcaaaacacgctgagttctgtggtcaagaaatcgagatggttgttcagtttgaaggagttagctccggagaggtagataatacgagtttcttgtaatgtattactctccaaatttcttactcttttatgattttgagtctttgaccacttttatgtgtgtgtttttgg

SEQ ID NO: 30584 - DNA, 530 bp, Arabidopsis thaliana columbia
gtaccgatgttgtccgtgccaagcatctcttctctatagcatttcacctttaaatattcttctccggctaactcttcgaactcaaatttctggttccacacacactctgctgcgttcactatcttcgtcttatgtataatctacaaaccattcaagcacatgccaacctcttaagattttaagatcgtgcaatagccattttgaagcaaaatcatgaagagagtacttacttttccgtactgtaacttgacagaggcatcacattttccggacttatctttagaaacaaggttctttccagccaaaaccgtcacgataattttccggccggttttcgagaggagggcagacgagctgtcgagggagtgtaatgaactcgaattaacgctattcaagctatgtgagccatcagagaagtgccattcttttagaagtagccggacagtcaactaaaagaccgaaaacacacacataaaagtggtcaaaagctcaagatcatagcagagtaagaaatttggagagtaatacat

SEQ ID NO: 30585 - DNA, 413 bp, Arabidopsis thaliana columbia
tcatactacacgcctctcactgttgttgcggttagtggaaacatggagattgctgaagccttagtcgccaagaaccctaagctgctagagattcctggaatcaatggacaaattccggttgtggttgcggttgagaatacacagatggagatggctcgctatctttacaccagaactccggttcaagtgttacttgaccaagatgggtatcacggttctttgctctttctcaatgccatcttctataaaatgcttggtaagcggtttcttggacatcaagcaaaccatatttttggcggttttgatgatgatgatttcttgatttgtttttctatatataattagacatcgcgttggatcggttcaacatgagcagacgcttagccgtcacaagacactcgcaaatcgagtcg

SEQ ID NO: 30586 - DNA, 1446 bp, Arabidopsis thaliana columbia
ctcacgttcttcagagaaatatattatagagactttatgatgttatgagtactgaaggctttgaaaagaagttacgtagatttcaagttactttagattcacaaaagaacttactctgatgacctttgtttgaacgagaaggctttggaaaacttggctgctttatttgtatacctagcaagtgagagaaaaacatattggatcaaaagagaataacaatatggttgatcgttgcaaagaagaggtcttagattagtacggacaagagtagatgaagcgtttcaatggtccaagatagcagccaccggggaaaagatctggctttgaagccaagacaatgataggaaccgactcaattctcaagtgttttgtgacggctaagcgtctgcttttgttgaacagatccaaggccatgtctaattgtatgatgaaaaacaaatcaagaaatgatcatcaaaacaccctaaaacatggtttgcttgaagatcaagaaaccgacagcttacccagctttttataatatatggcattgagaaaaagcaagataccgtgaaacccgtctttttcaagtaacacctgaaccggagttctgttgtaaagatagcgagccatctccatctgcgtgttctcaaccgcaaccacaaccggaatctctccattgtttccaggaatctctagcagtttagggttcttggcgactaaggcttcagcaatctccatgtttccactaacagcaacgacggtaagaggcgtgttgtaaaaattgttttggctcatcttgggaagcatttgttccggtgtcatacgacgcagaagcaatttaacaatctcggggtttccatatgcgcaagcctttaacaatggcgtctcgtaagggtttatatatttatccactgcgtccgggcggcggttcaagaagtccttcacggcttctacacgaccttggcttattccttgatttaactgtatatactcatagtattcgttcgtaaccctccctacatcgacaacaaggaatacacatatgataaatatatctgcatattcagattattatgctatgcgaatagctaggtatcccgcactatattcacatttaaataaataaaaatcatctaaagatacaatgtgaataaactagtactcctaagtttgaaactgagacattgataatgccttcttgtaaattgcttataggcgattgattttgccaacagtaatatgagaaatcttaagtaccgtgaagctgagatgccgtccgaatctgaagattgaattgatcacatggagcttcttcttctggaacttcttttataggtgaggaactctcttcggaactgacttgtaggacaccatgaaaaaactttgttttagcgaatttgaaagggatccctcagatgtttctccaaagcttcgcctaattgattagactcattgctgtaataa

SEQ ID NO: 30587 - DNA, 508 bp, Arabidopsis thaliana columbia
acttgtaagatatgattaaccatttctaagggggctcaattcatgccaaatgccaagaaagcaacctgcttaaaaacatcaacaagaccttcaagagaaaagtagtcattgttcttgatagaatcccacaagtcctgcacaacatctacttgtaataagtagaccataccacaatagattttggaagaaggacatggcaaccatacataccagatgactacaaaatttgttagtttcaggattaacttccatgattgataatccagtgaagacaagttctggtttccatggtaaaggtatgaacttcatcaccattgtccatctcgtagtgatctcgtatggacctgtctatatatcagctgcatcagtgaacttaaaaaaaactagaattaaagaaatcaaatgataaacaaaagtcagcaaagacctgtttagcccagtgaagctgaaactgaggagtgaagatattcttgaggaaagcaatgttgaagagatagccagagatggt

SEQ ID NO: 30588 - DNA, 481 bp, Arabidopsis thaliana columbia
aactacttttggtaatcatcatcatgatgaatttaggatcttagcaagcaatttttgtttgttgtcaatactgtacaagacacctgagtaattctgtggaactatagagtttttcatgcgactttttttatactggaaatcaaagcttacactgttgacatgatacttaatatctgtgatggaaatggcaaaactatttatagagcctgctgctccttgcacgtgagctacaatggtgtctggcagcttattaaaaaatgttggaattagatctctgaaccgtccttatattcaactgcccacagagaccactttaatcatattatacaccacatacttgttttctcagtcaactattgatgaagtcagacgcactgctcaagaaggaatgaatagagcattggaagatcattcaaggtctgtttgtgctcccacatgctctctggtcaaatttatgtcatgtttatacagtaaatgacgt

SEQ ID NO: 30589 - DNA, 802 bp, Arabidopsis thaliana columbia
tttcttctgttcctataatctatatgggattagctagagaagcgaatttcgagattatccacttttttttaaaaaagaaaaattgttttccttcgtttttaatgaataaaacaaattctagtgttagcaaaacaaaagattagggtttaaggtttagctataagcctataagggtttttcaattggttaaaagagatattcaaaggtcttgttttgcttacgggataatccatattaaattaaaccactcacctaaaactaaaaccacacactctcttcctcttacatttctgtagcttatttcttacagctcacgtaacaaaaagaaacggtcatgattcgttgcactcacataaggtaaataaggaaaccgagtctgacttatatactgtatgcctctgagagacaaaaacagagccggtattgtgtaagtttttccggtttggtacatttttctctaaaccaaaatgacatggaccaagtggtaaaaaatcacacagaaccggtagaaactttgttgagaaaatctctgttgccaaagcatcatcatctctaatgtagtagatccgtcgagagtaagaactctgactagaaaaatatggaaagagataatggaaaacgtgactgaataaaattcgatttgtttatacaataacaaacccacgtttgtagacttggaaaagagacaccttttatttttttttatgaactctttggtgctagatcataattgtattccaaaagttttttctgttgtgtgtaaaaagcccggatttagagagagatttagtttttttttttt

SEQ ID NO: 30590 - DNA, 765 bp, Arabidopsis thaliana columbia
tcttgactgcattcgtatcctcgcttgttcatggaaccttccatttaagagaaaagaatttgcgatctctgtgtccagagataaacaaaaactattccaaagttaggaaaaaaacagcagaagtccacaaaggtagcttcagagaagaacataatagatacctatccacttaatgagtcggatatagaacaaatagcctcaagctatagagtttggtcaacccacatgggtctagacggtttgcagaagtcactgcaccgagatctgttctttaatggtagatctaaagtgttaataaaaacctttaaggaatctgtccatgtgagcattagaataatgcaacgagagaaagagagtattattaatggctgacactagtggaaatatacatatcatatcacagggccaaagcagctgtttttgtgcatgaatgagtattgaaagttggtgctgtgtaatacctggagagatcatatgctgcattatgtcaaccctttcttgacttttctctaattgtgtctcttcctctgctcttgtccctcttcacaaattctagtgttagttaaacatctcaaaagtctttgttagtgactctcgacccacacttatgcttaaaccataatcacagatgcatccaacattagctgcaaaacaaatcctcttacaaatcaaatcaggcttgctgtctcaatcagatgcacatctcaaaaaacacaatatccaagttcaataagatcataattatatattttgcttttgcctggt

SEQ ID NO: 30591 - DNA, 1458 bp, Arabidopsis thaliana columbia
tgggttgttaacgaattgtatttcgattacgttgccttgacaataaccgttgtcgtaatttgttattagccaaataacatagattcatgtgttgacggactcccccccaatctggagggcaatgagatgtgttggatagcaattaattatatttaaatacactttgattactccaaacattttatggattaggtaatgtaacatagcagataatgagttgggtagctgttaatgtgttcatttgtgctgtaggcaccaaatcgagttgttgctgacgtagcaacgttgatgcggataaagatacgccagaggtaaggagttaagatcttagtattgtgattagtgtttcaacgaattgcatttctctctattatcccgaccctaatgttggaaaaaatatctttgtaggacgctaatactgatttcgtggtagacgacatcccccctgcagtggtgtgtaatgaggtttgttttataaagaaacattaaactgaatttctctttttaattgtaattctgctttacatactcccttgttgaatcctgttgattacatatttttcatatgtttaaaagtctggttacaaggtttcatccaatgaaacggttgtaaacccagaggaatctctcgataacgtagaggaatctctcgataacgtggaagttagcggcgtagatattatcctcataatgccgtattttgctctgtcggttgttttatccaaagttgtgttgtttcatgcgctaggttcaatgttcccagcctgcaggtggttctgtaagccaattgacgaatgctggagaagatggccaggtaacacgtctatttcatactagcacggtttttatgtgtttgaatctggcttcactatttgaactcatcgtcgattaggttgcccccgcgactgatgatggaatggttggtgttgatgtgaccgcggagtttccggatattttggttagcagctaaactagcacccataatgttgttacctccttacgcttttctccagcgtttacctactcttctacttgtaaagattaagttttcaatgatagcgatgttaggagttaagtaaacctttttttagtttggaatttgagttctatttatgttcagtctttaagttgggcaaatgctttattactgagtagatcgtttataattttaaaataaaaaccatgagtggtaaaccaaccaccggcaaataaaattaaaattaatcgtttttttaatttatgctcagttttaatttgtctcagagtctatcatgttgttgtgttgttattgtttggaagttactacatgccatcattagtgttataacattgtatttggatgctagttctgttgcggtcgtgttatggttacgcaaaacacttttgatttcaaagtttcatctccccttttacagtaagttgtattttgtggaaccgttgtattgtatcaggaatatg

SEQ ID NO: 30592 - DNA, 723 bp, Arabidopsis thaliana columbia
cccctattatgatgatattgaataaataaatgtgcacaaccctgaatttcttacatgagttttcggtttggttttcgtgtaatttcagtttgatttaatgcaatctcaaggtttaaataatgatttagataaaaaaaagttactgtcaacagaaattaatgtaatcccagttactaaaacttacccatttttgatcaaattctggttcaaataccgtataaactattaagttaactccggtttgaccttttctgtatgctattttttacgttgaccaaaataaaaaggtatatacaattttttttacatggcgcacaccatgactattacaaacggcatgatccagaacattcgttcatagcagctaaaactagaacattcgtctccttccatttttttgggggcttcacaatgtttacttgagcccaaagtaaagcccattaaattggtaccacgtcatcgctaacttttccatttctatgtttctataaaagtctcatattatgtcagtgatagctctcaacctaccatacttcaccacataaccacttctgtctctgcgaatctccataagactctttgagaagctttcctctgtttctccgctggtaagcttccgttatctctctctctctcgcttctcagatctgttccttaaacctttaatttctcacgacgagtggatctgaatcccagttatgggtagctcggcgacgttactgg

SEQ ID NO: 30593 - DNA, 501 bp, Arabidopsis thaliana columbia
tgtggtttgtgtgtgtgtgtgtgaagtcacgtgaccattatagattatgcacgtgttgtcaatctgtctcctttacgagggcgagcgagccgccgccgtcagaagcttccgttctgctgtctgaatcggtcatggaggacgtgctagccacggcagagggagtggtaggtctctttttctcatacgacgttagctagaaattcatggattcgaaggttgtttttcgttctaatcaattttggtaaaatctatggggttttaagtaggttttagtaaagctggtgaaggtagcgcaaaagctaggtctaaaaggtgaaaacggaacttggaaggagtttttagatttttatgacaaacagctaggatcttcgagcttaagtgatccttcaaagcggcgcaaagatgatttggtggcttttcttactacactcaagaagaaagaagatttgcaggtttcaaaagacaaaacacacaactcaactttttaataatgataatctc

SEQ ID NO: 30594 - DNA, 483 bp, Arabidopsis thaliana columbia
tttttgaaaaacgaatactaatcgatgacaaaggtaaaaatgtaaaaacgaaaggagaaggtggtgactggggcaaataaagtggtaatatgaactaaagcacacgctaaatcatcttttctaatgggttttgtaactgcaatttttgtctttgtttgcaaatggaaaaaatgctttaacaaagtttgatgtttcctcaatgagggtttgaatttagggaagaagaagcggcgaaaacaacaaaagtaaacgacatatagagaaagaatctgactgacaaacagctatacaaaaatacaaacgtattttcgatggagaagaagaaagaaaaaagctttgggaatttgttgctttttatccatgttttgaaaatgtatgtcgtagttccatggatagcaaatagattgacacggattgcattaggtctctttgtaaaaagaacagttaaatatttgcatcctgggtagataaattgttgacaag

SEQ ID NO: 30595 - DNA, 472 bp, Arabidopsis thaliana columbia
tgtcagtcagattctttctctatatgtcgttcacatcattttccctaatttcaaaccctcattgaggaaacatatataactttgttaaaccattttttccatttacaaagaaagacaaaaattgtagttacaaaacccattaggaaaaaatgatttagcgtgtgctttatttaatgttacccccactttacttaccccagtcattaccttcctttcgtttttacattttcacttttgtcatcgattagtgttagttttccaaaagattggtcaattctttattatagcaaactatctttgcagaactttaaacgaaattacatagctgccaaaagacattatacccatgcatggtcatcaaacattcataatttattcaaacatttactattcttaaggaatcatattcattgtcacatacaattcctctattagccaaattcatttgatcaaataactagttgtgatgaca

SEQ ID NO: 30596 - DNA, 576 bp, Arabidopsis thaliana columbia
tcttcgtctctcccttaataagaagaaaccaaaaaaacaaaacggagttgttatttacagattgtaaaatcgaaatctaaaatgaacgttttcccaaaatttctccgtaatctctgtttcccccagatttagccctaaaccgttactgttctctcccctgtctttccattttcccggaaaatttccgccaaggttttttcttcgtatagtcaattgttcttcttaatcgactttttctccggaaattctccgaatttgattcgtcaattttgggggattcattagttgtcagattcgtgattccttgattcttgcttcttctcgactccatcatcatcatcctctgtcggaatataaaatctggaaatagggagaggaagaagacctatttcctcagatttctctcctcctcctcctcctgatcaatatcttcgttgaccggaatctttctccagatgccacaatcgaattccactatgcgctgctgacggaagataaaaggaagaagccgtcgttattgtttatctggatcggagtctctttggtcaatctctggtgattaatgggttttgttta

SEQ ID NO: 30597 - DNA, 523 bp, Arabidopsis thaliana columbia
taaaattttaaaatattattaatatgttgttttaataggggttaaaacttcagttttttaacaattgtctcatggattcgtggtatagtgttacttaataacaattataaactgtaaaatataaatattttataaaaataaaatttgcaaattttaatatatattacttttaaaaaataaatcatcccctggtataccgagggttaaaatctagtccatgattgttacggcataccaaacttacatgataactaaagagtcttaggttaaaactgtggtagtcaatatatgaagagtgttgttgatttaatttgcgaacgagaaagaactaaaattttaagacattccaaaagactctgtatcattctgaaggtttgagcttggaaagcgagcacgtgagtcgctcgtgaaactatataatttacgaaaactctaaatacaccccaatagtattatttcattcaaaacacaccccactaatttatttaaaagagtcggggttttccaagaacactggatcgtc

SEQ ID NO: 30598 - DNA, 510 bp, Arabidopsis thaliana columbia
cacatgacagattatgcctacttaagctggacaactgtggctaggctgcctcaagttgatttggtgatatgctgtgttctttaattatgggtccagtgtagttgatagcttttatgcctatgggtcatatgggtgttctaatgggtgttctatttaagaagtttgcgtgatcacagtttcaaattcaatgccccatagcgttttagttctgaaactattgtaccgatgatgaaccggggaattcaaaacacatgtctagaacttatatagatgagtaatccatgaaggtttagtaatagttgttttgcctttgtgaatctattaacacagtaataggttatgcctacttgagctattgctctggacaactttggctgcttcagtctcttggtcaagacatgctaatttgttaagtattaaaatgttattttaattacgggtccagtgtatatttgagagcatgtatgcctatgggtcataatgggtatagcgtccgtggaacagtgtgag

SEQ ID NO: 30599 - DNA, 442 bp, Arabidopsis thaliana columbia
acataggttgtttattgcatatatataaagataggtttgattaaataagattgattggtcttgtaactcgttattgtcatcatcggtgaggaaaaagaagattcattgttagtagttgttccggcgatgattccgatacaccggattgcaaatctcttgcacgcggagaaagttaattaaacaacacgtgtcctagcttatcccaaatggtttgacacgttcttgagctgtaactggacttttatgtgggcttaatatgtactggcctagaagttagaagcgtttgttccgacttgtacaatgtgtttgtcattataaataaagacctgtggaaagaaaaaaaggtttgattagataccatcaatgtttgcatacgccgaaaataaaatctcataagtaacgccattgttaatgtcatgatgctgacaaatcaacatatgac

SEQ ID NO: 30600 - DNA, 509 bp, Arabidopsis thaliana columbia
cagagagtcagagactactaaaacttagtttttattgtcttctatagtaactgaagcaagaaggcttaacctatatagtttgcaattagacttgtgtgtgcctcgcaagcaacttaaccattctacatttgatcacaatttcttcatttgaccaatttatctgtactctccaattcactgtcctctaggatcacaaaaccaattcttcaaatccataacacagaacaaatactttggtcaagcaaatatgacgaggaatcacacaaatacataactcttactttaaaaactcgaaacatttcatacattcaacaaaagggttcttttttctcattcagtatccaacaagtaagcatagagaattcatcatcatcatcatcatcaatgccaacacttgcataaagtaacaacaagaagaaggaaaaaaaacacaaactttaaaagcaagaggaagtgatctgattcgataactctcagcaacacagcatcaatctctagatgttgacctg

SEQ ID NO: 30601 - DNA, 484 bp, Arabidopsis thaliana columbia
tactgagtctgatgtcttgcctcccattgaccatctctggagtgatctcggtcgaaacgaaatcttgaccgcagttttgacacggcaaggtcttgttaaagataaaatatccttgcatattcaaaacatgtctggcagctattgcacacggtcaaaatcaaaatctaagcctttactctactttcaattgcacagcacatagacaacacctttaaccaacatcaatgcttttactttaaatagtgcagtgtagtactattgatccaataccgatgccaatgatattagctgttcaaaaacctattgatccaaatcattattagaagttttcaagctaagaaaagaaattaaaaaagaatgatgtatcagtctcttacctttatagcaaagagaagtgtctccattactgtaaatccaagtttcataagatcaaaataaaataagactatcaatgacacacaaaataaaaaatagagatatagag

SEQ ID NO: 30602 - DNA, 502 bp, Arabidopsis thaliana columbia
tgaatgttcacaggtaaagaaggggtgatgcatatgagacgtaaaatacaatataggtattgctaactttaagatttcttgtaatgtttagtatcaatagctttaaaacaagtatatatattaggttcgaaagtaaacttaaaaggggttatacaactaagacgtataatgaaatataggtgagtttgttgaagactaacatcacattctcacaatcgtgcagtgagatcttctcaccaaatttttttgactcttatgaatctacattctaagatctctctcatctcaatattatttaagaaaccattctgtaaacaatatatagcaaaacacaaactctctatactcacaacattgtttaactcatctttctaagttggtttcgattcaagaatatcacaatgactaatgttcgccttcctattctcgtctcctcggtcttgttccttgtccttatttcatcgtccctcttgttccctacacctagttttgctgctagagt

SEQ ID NO: 30603 - DNA, 579 bp, Arabidopsis thaliana columbia
ttatgcagttaaattgaatcaagcaaggtaaggtatgattaacaaaagagaaaaatatagcttcaaacttttaatagttttcatgaaatccataaattaagataaaagaactcattaacattatttttccttttttgttatcataggataatgtctttcctgatattttgaagaaagatcctaagctctctagctttcttgcaatgttcctcatcatctgtctctgaatcagtcagctcaatcacagtctcaagttggtgatcatggctcttctgttcttgataacttcttgacacgctccgtgaacgagcttcaggacaagggcttatcagatcaatgacttctgtttccggatacaatggaaatgaactcattccaacacccaatctatccctgtttgaccaagcgttattgcaattttctctatcaggtgaatcgataagacgcaagtaatcatgtttcttggagttttgttgttcgttctcttgctctgcttcttctaaggtgcttctacttactagagaggttgagttgagacaaggtgttggagtcgaggctgagttcgcaagagaagagatt

SEQ ID NO: 30604 - DNA, 453 bp, Arabidopsis thaliana columbia
actctagagatacctcccacaattatcaccaactatttagctgtaaaagttactcgcgaactgatcaacccgtttttggacctacccgaatatactttttatttttttaaactatgtatgtatcagtgtcaagcgggccaaagactcacgggctagtaccatgatggagcgggtttggacactatattatatatccgaaaaataacgggtcttgcggatcggccaaaacggattacggattttagtggacttgacccacggtttggcggattgacctgcagactacaaatattcaataaaaataaataaataatttgtaagaataattaattttacttaattatgaatcctattataatatgtaaaatatgtaacaatatgaagaaattaaattttttaaattgtaatatttacaaaaagtatttattaaaaattaaattaaattaaaataac

SEQ ID NO: 30605 - DNA, 398 bp, Arabidopsis thaliana columbia
gagccaacatcgatgaaagacttcagcaacccattgacgatacagatactaaagacgacgacgacgtatgaatctccggcgaagtttcccaagctaatccccaaattccagtaagcgagagaggagagttagttcgaagtggtaggtatagatttttcttaagcttccgtttttgagatgatgactgagaagttgacgtcatctttacagttttcaattaaatattcaattttaatttgagataaaaatggattttgtgaaaggatttattattttctttattatttatacagaacattttagtatcaaattaaataaactgaaactatatactccattgctgctaatgagcagctctgtgttagggaaaaaagaacatagatatccaaaagaaaaaa

SEQ ID NO: 30606 - DNA, 453 bp, Arabidopsis thaliana columbia
ctagatcaagaggatcaccaaaataaaaaatatcaattttatgaacccatgatcacgtttctgaactctcatgagctctcccacaacttctaatttcattgaggcctgaagcagtgtgaagagagctaaaccttgcttgagacagaagaatctggtctcgcatattgatgtttgccgtgacattccttgctgcgcatgcttaaaagtagcccattcaagtttaagcccatccaacaaattgtgttaatggggtttgaagccttaaatcaaacgaatcaataatctcatgatagatattaataaataactttcctaaaaagaaacgaatgcataagagaagtcaaaaaatgaaagacgccaaaaacataattaatcagccccaaaaacggcaagagcggttcgctaagtccaccaacgccacctaccggtcccgtataacacggctcacgttag

SEQ ID NO: 30607 - DNA, 487 bp, Arabidopsis thaliana columbia
aaaataaacatggaaaagaaattaatgttgagagaaaaacaaatatgaatagggatcaaaagtagaaaactagggcatgacatggggtcaacttagaaagtttataccagaacattaataattattaggtaatttaccttataattaaaaaaattataatgttatggggttaaatgatcccctcctccttaattggctccgctcctagatatcgccattaaaaaccagtgcattaacttcataaacagaaaacaactcttcttaaagttaagatggatagctaaaaatgatcttatatatagagagaaacattccaaacttcaaataactcgctctaattactgctgatcaatgattaatacaaggggttatcaagagtttgaaggaacaagaagcctaatcgtcaagccaatccacggtgaagcattttttggcgacttcaatgcaaagttcaggaccaccttcttgaccatttccacatagacga

SEQ ID NO: 30608 - DNA, 528 bp, Arabidopsis thaliana columbia
catatttgcgttcttatctaattttgacatatacttttctacatcataccagataagatatatgtccacagatttataaagatgtcaaatttttaatcatcttcatatttgcgttcttatctaattttgacatatacttttctacaatttcgtcttttttaaagatgtaaattatcattccacagactaccgttaaatcattaatgaatgataaaatctaaaacgtacatatatattacttagcgaaccatgcaaagatctatcatatttttgtttatatgacgagatgtgaatgtattggaccatagtttgtgccgctggtataagagccgcccttaaagcgaaaccacaaactagataaaacctccccctataagtaatttctaaatgaatcattattaataatatgtgtaaatttgtggaacaaccgactccccatagtttaatcacctaagacatcaaggctatcaaagagagaaatatattaattaagagcggcaatgaaatcgtagaaacctctataaatag

SEQ ID NO: 30609 - DNA, 582 bp, Arabidopsis thaliana columbia
attattatttttacagaattgttacaactcaaacgacatatatatcgaatttatctgtacatgcattcacatatgtgtccaacatatttatgaaggcttgaaatccggacaagaggatgcttttttgcggaaagcttctttttgttttttagtagttgggactatgaatgagatcgaagtctccatttaaaaattaaatccatgttagtgttcctacttcctactatatcccaacatcttattaatatccctcgtcatatatgaatttggacattcttatacatttcgtacaacatatggatgttcattatattatcattttgataataaagtttagtttcttattggtacacgataaacaattgacagttacacatgctctagatattccaaaaaggaagaataataatttagtattcgaccgtcatattttaatatataactccgaaatatcaataaacgactacaagcctacaaaccttatatatagaggagcactcacactttcattttagttacccttcacaatattaaccgatttctcacactcaaattcaaatacgaataatggagaaaggtgag

SEQ ID NO: 30610 - DNA, 393 bp, Arabidopsis thaliana columbia
cctatggaagaaccatctcttcttggtgatgattccgacacactgttactacttcccttaaagtcgtcaaaaaggcatagaagaaccattttagagacaataaacctagaatgagataaagaggattgaggagacttttgattacctgcgattgtatgaattccacaagctcttgcaaccgcgctgcttgctgtgtatgtattccacttgaacttctctggaccggtggcagtctttccaacactatttgaaggtaactcttcattcaagaaaacacaaaacggaaaaaatattgacttatgtatataataggtaaacgatgttcgaactaaagttgtctcgacaaaagaagtggaacctttgttgtgtatgaaccatctagtttgagagctg

SEQ ID NO: 30611 - DNA, 1258 bp, Arabidopsis thaliana columbia
  unsure (1)..(1258): unsure at all n locations
caacctgtaccacaacaactgatactcattcagtatacaagtaacattcatcttaatgaagcaatataaaccactcattagcacaaactgttccttgttttaacaaagagattattaatagtttattagaagcaccaaccagataaattcaagagaaaacaaataccttgtacacagcaggatgcatagggtcaagttggaagaacttagtctcgagatcaggaagttgagtgccatgctcatactgaggcaaatgcctaaatagctcaaccctgtttttagcctcggtctgttttacaacagcacgtcttttagccttcacgactctactctcatcatcatactgcatgcggggatgaggagcatctttctttctatctttttcagatggacctcccttcttctcagctgctccagtagcaacagcaacatcattcttctgagatgtagccttcgctggtttagcagctttaacacttgttgaagccaccgaggctgaggacactggtgccaccttcccaccatcagctgatatagcacagtattacacagactgattaagatattgcaaaatacacaacgataacacaacagagcaaccagcatatcaaatctctgtactaagctgacgaatcattcattgcgataaaaccacacattggtttaaatcaaaaatgcaccttttgcagcagctttagcagctctttgagcttcttgaatagctcgtctctcagctttagtggttttctctttcaatggcttcttctggtcactctgcacctccattccactagccttctctgcaattatataacattgtgaatacattagcctcatatatcctaaagaacaaatttcaaaatcaatcaaattatgattccacaagatcaaaagtgagagtaccagaaagtccaggaggcatggtaacgacggagacagtggttaaaccactagcaggaacactactagatttagcagcagccatagaatccatcccaataccaggcagcgaagaagcaacaggaacagatgattttacgaaactacccctggaatggcgtccaggagacgccgtcgttgatccatcagggaaatcacggcgacttgagtaagaaaacgaagaaggagacacggctgacgcagcagcaccagcggacacagcntcgaagagggaaagtatcagaggaattgagacgaggaggaggaatcatgacgggggagagtgagttactgggagagaaatggtggaagaagagaa

SEQ ID NO: 30612 - DNA, 565 bp, Arabidopsis thaliana columbia
tgagtctgaaaagtctctccgattagaacttaagtgttctccgaccccagactagattattatttacgatcgtatatgtggccctttgcgggtgtcttagatgtcatgggtgttcaaaacatctgattcagaccatgagagtctcatcaaacttttttcttaattagcgcatatttagacattacttcacaaaatatactattctaactaattccttcttaaacgaaccgtgcaaagccggttattcacgatataccgagtcttttagggacgccttcacatgactcataccggtatatttatataagtgtggttgaatttttttcagctatctcataaccagtcaaattgttcaagccttttttttatgtgtgggaaaattcaattgctcaagcttataattactattctcgtatagagctcttaaaagctagttcctcttttgtgatcaggtctaaaaggtcaatcacacaaaaactccaatatataatgcattagaattaacgttaacaaaaagaaaaaggaaatttatattatttaatatatgaaaaagagagagcaaaag

SEQ ID NO: 30613 - DNA, 1058 bp, Arabidopsis thaliana columbia
tctttgttcctcttttatcctcactttctcagaagcttcagacacaacagaacatataagacctagagtctctctgtttcgcttttcataaatcttgaagaataaatggaaaaagcttcaaacagcaacaagtccacgaaattctcgaaaatgcttcaatgagcgatgtctattggtcacagtgcggcgccgtttagtccacggagagattttcatcagcaccgtacgacttcgacggcgaacagaggaatcttcttctccagtccgttggttcctacggctgctagagttaggagaaatacaaaatacgaagccgtttttgccgaacccacttcgcctaaagtctcctgcatcggtcaggtcaaactcgctagacctaaatgtccggagaagaagaacaaagcacctaagaatctcaaaacggcatcgtctttatcgtcttgtgttattaaagaagaagacaatggaagcttttcgaaactaaagcgtatcttctcaatgagaagttatccgtcgagaaaatccaactccactgccttcgcagccgccgcagcgagagaacatccaatcgcggaggttgatgcggttacggcagcgcttcattgggtgcaatgaagaaattcgcgagcagtagagaagctctcggtggatttgattggacggtccagatgaaacgtgagaaagaagatgtaatgattccatgctctgtgggtatacctctaactcagctagaggatttgagtttgtgtccgaagccaaagagtgaagttaatttgtggaagagaagaaccatggatcgaccaaaaccacttcaagtaattaagtaaaagctccttcttgaattttcttcgttgccttttctatgtccatttgttttatgtgtcggaatttcgtggctgccacgatgctacgttactacgtactaagtctgagttttgtgaatagactgaaaaagacagaaataattcaacgtgtgaatagatcaaaacgtttttttcttctgtctagacttttctaaatagcattttttgtcgggatatgataacgaaagatttgag

SEQ ID NO: 30614 - DNA, 1316 bp, Arabidopsis thaliana columbia
ggcagaaacggttgtagcaaaagactaattatggttggagtgaggaggaagaagacaaagacaagagtttagtttatgtttattgtaagggtaacggctagtttttacttcttggtcctgcgccaaaaaaacggtaagcgagagaaacatgaccaagaccaacggctataaagttatttcgaccgtttttaatcattcattattactaaaaatgtctcgagactcgttggggcatcaaaataattatttcaatggaattcactaatctttatatgacttggtcaaatcttgacacttttggccacgtcagtcctagtaccaatcgtgcggcacactagatatattcgtggtaataatatgtaattttttttgagaaatccttcaaacgtgtggcaaactacactaatatcattcatataaaatgtaacaaacctcaaatagaatacagtgatatcatagtagaggtacaattgttgtagcgatcattatttacacaaaggcaaagggacattttggaggatgtgtttgaatccatacatatagacactacacaaagtctgcaaccattctcatggagcagctcgtgttcctacttgtataacccataaggaattaaaatcctgttatagcaacgttttgaacattcaagaatcagccaactccggctgccttagaaccgatttctcaggggggcatgcgcgcaagagtgtgcagacgtcgtttttcactaggaattcctctgcatttacgagtatcagaggtccatattcaaacaccaacgtcttgcactgtaataacacaagacacaacaccataatatcagaaaagcgtacgctaactgctatgtgatcatgcagatgcgttgcaaaagttcgagaagaacaccaacagagaaagcagaatgaaatggttaatttgtaaacacgtgaaggcaatgttatggatttgagttgatcattttaaccttcttctcgtagttcttgagcgatttgcatcccttgataagcagttcaacgatatccagctagataatcaagagaatacaaagtcagtatataaaactcatcatcaatataagatagaaagaaagtcttcacgaggattgtttacaaagatccctgatagttaaacacttttatcagttggcgtaatcgttgaacataataacaatgcaaacacaactacacgagggcatatcagtttggactgtgattgtgggtactcttatgacttaattaggtgctatgagtctatgagactgaatgcataaatgacaaatacactgacagaagagagataaagtcatgatcttgtag

SEQ ID NO: 30615 - DNA, 1358 bp, Arabidopsis thaliana
ccatataaaaccccattactaaagcccatataaaagcccaaaatacaaccggaagctagattcaggagttctatacttgtaaaagctagagtcaacgccgttcagtctcagaccagacgaaacaacgatgcttaactctatcactttaacccggaaaccaccactcccgttcaactctgttgggttttcaggtaatcactcttcgtcttttggtcgaagaactataacggaaggtagttcgagcaaggctctttcgtttgggtacaaaaatgttggttcactgaagtgtggtcggagcaattggccggggcgttctgggactgcgtttgggcatctagtccgggtctctgcggtcccaggtgggaattcaggtggctctggcgggttaggtggttcaggcggtggtggtggtggttccggcggcggtggtggtgatggaagcgacggaaaaggaaagaagtggtcacttctctcatggtaatttttcttacttgctcctgtcactactcctgttcttgtgtaaagatgtttctttgaaaagcaattcattgaagcagatgttggaaatttttcttggatgtgttaataatttactcacggaacactttttttctagtatgattctttgcttttgacttgagcataaacacactttgtgtgcctttttctatggtgcttcaggtaccaggctcttctctcaaactctcctgttttgaccaaagctgtgaccgcagcacttttgaaccctcgttggagatttgatctgtcaggtaactctctcatttttgtgctatctttgaagtttggattcttcactattcaggatatatcgagataaaacagtattcatgagctgctgcattatgtatttctgaacagacagactttaacttgaattgtgctatctcttttttaaagttagaatggaagctaatagacccaaaatacaggataatgtagtaaagccccattttctttataatgcttgatcgtattctgctagatatgtgagcgacattgcttattcgtatcacttttggttgcagcttactatcaacaagacctcatcgctggacaagaagaggacactcacctttaccttcttgggcttagggctagtcggtccaacattgcatttctggtatttccgtggacctttcactcgtatgacaccgcaaaagctaactatattacgtctctgctagtggttcttcagttgaagagacttatgcatccattggtatattacttatgcttattctctgttctctgaaatctctcaactccatccattaggtatttgtatttgagcaaagtggtgacagcttctggattatcaggcgcagttatacgacttc

SEQ ID NO: 30616 - DNA, 530 bp, Arabidopsis thaliana columbia
tgactggttcatatgttgatgcgacctaattccggttgattgctcgagtaattattatcttatagacttaactgtaaaatagtacatacagagtagatcacataaatcaatgatattctaaagatttgcgagagtcgtttttacctaaacggacaaattaaatgtttgttagtttttatgcttaaaattaaaattatgaaagaaactaaacgattaaaattatatgataaaacacattaaaccacaaaataattcaaagattgatgattaacgaaactatgaaataaaaaattcaacaaccaaacaccgctttcgaacatgaacacaatattagattactcctctttcaagaaattagtcattaagattgactacttaattactaaactttcatttgtaatattagtcaaattcgcattatcaaacaaatttgttaaactaacaatatgtgttctaatattaaatttcattggctaaaaatatattgctcaattcagttcgtgaattcctaaaaatagtcaatttttaat

SEQ ID NO: 30617 - DNA, 569 bp, Arabidopsis thaliana columbia
aatgcccaactttatatttttctctattttagagaaaatatagatggttttgctccattgtatgactctaaaatagagttaactctaaaatagaggaaaagtgtaaagattgttcttttttgctttatatgaagaggaaacgtacatttttgttttggtcaactagtagatagtacttagatcatcattaagtactaaaaagaactttgaccaaaataatagtactaaaatagtctcataggaaaactgggaagaacctgctataagaaaagcaaattaatcttaagttatatatcactttgatctataaggaaatgtcattcattttctttagtttcttcatatttgaagacccaagaactcagtgaggatgctaaaaaagtctcgaatttaattgattattttctttacacacatttcagttggcaataaaattcggaaaattaaataatgaaaaaagggaattagagggtcaaccacaaaacaagaagaagcaacagaccgtagcagtgatagctaaagattcaatgattgagacaaactccacaaaagatcatcaactatggaga

SEQ ID NO: 30618 - DNA, 588 bp, Arabidopsis thaliana columbia
gtgagcttctttccttaatttactttaaagcgtatttggattactaataagtaatattgtaagtttttatagaagtgcctggtaattgaattgatttgtgggatcctattaaaaccgaatgttgttttgtggttggcagattggtgtgcctggatgcacaaggataactatcgatggtattttgagcgtcttgagggatctgaagtctgcgggaaagcttcaagtgaagcatttacaacttcgtggcctctttggagtgactaaagatcactacgatgaactgattgacttgttgaacattgacaataaagtcaagcagactattcagaagccgcgtttttaccatagaggagaagcttgtgtgtcctgtgatgatgaccgggcactagatattgagatgtgcccaaagtgtcaaaattttaagcttgtgtatgactgtccagcagaagattgtaaagggaaaaagaaaggttctgaggaatgccgtgcttgttctctttgcatacagaggtgttatcattgtggtcggtgcatcattgacactgaatacgaagaaatgttttgtttagagcttttgtgtgctgtttg

SEQ ID NO: 30619 - DNA, 562 bp, Arabidopsis thaliana columbia
ttgggatatgtgacttatctgataaagaactcgttcatttttttgtcttaattttttttattaggagtggaagtgaacaaaaaaaaaatcgctaaaatcgcaaaaccatattttcagctttatagtaaacccgcattttccgctaaaatggcaaaactatattttcagccaaaatctgagatttgatttcccaattttgtagtttaaacatgtaccatcaacaatggatttctggggtaagaatataagttcacttctaaaattattcattttttattcttatcgtgtttattttgttttttaaaatcattattttatttcgatttgggacatgtgacttatttgataaagaacacgttgatttttctgttttaatttttttttattagaagtagaagtgaacaaaataaaaccttcaaaacttcagcgtagagtcaacaagtcatccatgtttctaagattagttttgatattcatattttatatataactgatgttaatttcggcagtcaacaaaaaaattagacccacatataataaatgggtgtgtataagagcattg

SEQ ID NO: 30620 - DNA, 501 bp, Arabidopsis thaliana columbia
ggacgattgtagtttggagatgatgcttgaggtaccatgctaccatccatctatcaacagtctggaggtgtatttagagatcaaaccgttttctgatgaagttactgtttctatatctcatcagtccccattggaaagtaatgtgccccgaaagcgttatcggcaagaggatgctagtagtgtcaatgcagatgtagatgtgagtgggagaaatactaaactaggaagtcctccggaggataaccataatggttggattgaagatgaggagagtacggatgtcggaaactctggtgataatggggtcgcacagaaggattcgaaaatgaaaaagccaactctaacggaaggcgtcagtgatagtgtctcgaagcagttgattttctctagttcatggctcgatgaaagtgagttgcatgttgggatgatttttagaggtaaagatgagctggcgaaacgagtgaagttgtactctaatagaaggcaacgtgaatacaatgt

SEQ ID NO: 30621 - DNA, 195 bp, Arabidopsis thaliana columbia
gtcctctcgttcatttttattcagtctgctgtttcttctttttttttatcatgtcatatctatcattgttcctcttcaattgtctccgatgattacgattgtggtatagttttttggcgagtgggtatgtattcttagaatggtaatggttgattaagtggaggacggtctggagtcgtgtgtcggttctgcatt

SEQ ID NO: 30622 - DNA, 381 bp, Arabidopsis thaliana columbia
gaggaaccctaaagagtataaaaaaactataacaattgcagaatcaaatgaaatgtatataaagtaataattaaaaaaaacaacgtgttaaaagtaagaattaaagtaatacaaaaaaataaaaaaatcagatattgaagccacgacgattcactcatttaggcagcttgttaacatttgatcggcaactatcatgagttcgagacctagttttattgtacgcctctataggcttttccttctcacacttaacacgatgttgttaataactcttgacccatcctagatatgacacttcgtttttcccctgatttgctgttcgccccacgagactcatgacccgagcctaggtcgtttgcttgtcttccggcgtacgctgtc

SEQ ID NO: 30623 - DNA, 557 bp, Arabidopsis thaliana columbia
  unsure (1)..(557): unsure at all n locations
nnnnnnnnnnnnnnnnnnnnnnntaaaggaactgatagtattgtactctacagtaatagtttcttcaagcaccaacatcgcgggctaacatgatatttacttgaggtaccgacctgacagtcggacaattagacagtcagattaattaatggattcaccgcaaatcgacgctgcggctacggactcagtgtggagttatctctacgctatcgtcaaatgcaaatgtctgacagtctgcaggtcaacaaggtacgtaacacctcgccctttgccatgacaagatatccttcttactgcatccttgcgaatttggcagctaccgagcatctcgtcgccgcttgactctgctcgttgcctgacagtcagggctcctgcagttctttcacgcttcccaagatggcagttcgatatctgcgccaagttctgaactgggcttagctcgttccagacgatggagaccaggggtctcgggatcacccttggccacctagtccagcaactagcagtagaggtggtcgtagaaagttgtcctatccagcacgttatctctgcttagt

SEQ ID NO: 30624 - DNA, 497 bp, Arabidopsis thaliana columbia
tttttttttttggtaagtatcaaatttcctatgatatgtattcatttgtgaatacgtcaacttcttattattgtaagccaaaaatgtaaaatttgatcacctatatttaatcgacatattagtgatatttaataaattaattgcacccatgtttttttttttgacatctttgaatcgataatatccgatctataaccaatctctataatacgggataatacggcttaatggaattgaactctgataggaaaggtgtaatcaaaatggagttagccacttaactaaaactacatccctgaccatatttttatttgtttaaaagtgttctctccattagacaaaggagaaactcttatacagtggaccaacaatcgataagaaaaacgactgacacaattagtacaacataaaaatcgtgagctaagtattgtttttgcaggaatatcgtattacggaactagtcgtaagagtatagcggtatcacaacatgttatatg

SEQ ID NO: 30625 - DNA, 424 bp, Arabidopsis thaliana columbia
tcactgataatgaagagaatggttacagtatttagtcaatcgcttactcattttacaaatttcattagaaaatccatagctaaaaaatctttaagtaaggatgtaacttatctaatttgatggagataaaaagttacataaggaatcaaaatttgttacaaaagccatcatctgttatatcttgtgacatcaaatcaagagtaaagtatcagaaaatgttgttccttctccttactattgttttttcatatgaaataaatgatttacttcatatatttattaaaaatgaattttcagtgttttcaattaattacatcaaaatgatattcttaagaacaattaagaatgtggaaaaggcccaataagcccaaattaaatccagtaaatgggcccccattataatatttttcactaaaccttatgg

SEQ ID NO: 30626 - DNA, 533 bp, Arabidopsis thaliana columbia
tttttcatgtgctaattggtattgttttttatctaaaactatttccaatttttctgtataaaaaatgtttaattttataatttgaaccagatgttaatcaaattttttttttccgctatactagtaactttaaaggtattttaaaaagtggtctgaaccatgccttcaagatcaatgtttacgtcaaacttaactaactacagactataaacgaaacgttagttctatttttcggctagctcgctttcgcatcatcataaaactcttcatatatatatgagatattgtatacattattaatttagaaaaaggaacatcacattcaatttagatttttttatctaccctacattctacacatatagacttagtgcaggcgcaaacgaagagcctcagatcaagttttcaaaaatatagacttcaccataaggaatagaacatccaattccatcactcacacaatttacgaactataggtttccactggcttcaaacttggtttccagcgaacaacaacggccgtgacgtgagag

SEQ ID NO: 30627 - DNA, 686 bp, Arabidopsis thaliana columbia
caaactacagtactcctagaactacacaggtaagcatatcaatgtctgaaattagaatcacaatcattccgctaatcttgttctaactcatcaacttcgtatcaccaatatccaaaataaagtaaaaccagacattagtaatacgaaattatacctggcgagcttgtcctgatgatgaagtagaatcactcttgtccatttctgactgtctgctttgtccagaattaggccttggtttctccgagatcttgcccaaagagttccctgcaggaagtttcggatcattcctttggagtccggcagtagcggtgccacttctctgccttgaccctctcccatcagatcgacccctattagctgaaccagtctcaaccaaagagtttgtagagctattcgagacaatctcaggttgaattgcatatggaacaaaagtaggcgacgttgcaacactctggtaaggaggaatagagtaaaattgttgaggagcaacaaaagcagaatcaacgccaattgaagcgccaggtatgtaaggattgaatggattataaggagactgtgcatatccataactaggtgtatagcatatatagggagaattttcattctgcccacctctggagaaacaaaaaaaggatatcatgtcaacaaatacaaaatgtataagaacaaatcaacgattaatgaga

SEQ ID NO: 30628 - DNA, 964 bp, Arabidopsis thaliana columbia
caagtgttctagaatatgaaaataagtgtttttgccttcaaagtcagagcgtttttgatagcctgaagttgagagcgtttttgtgcgtgcctcttctctcatcccttgaggtgatttatataaggctttgagccgcccctggcaatattcttgggagatttgttgttatctttgaggtggcagtgataaatctttatcctctggagattttcgcgggattttctctttgttgttaatatcctgaaatgattttcaaatatcatttccagatctttcggatatggtattttgaccatgcgtcgggtctatatctttcctttaggattgagatgttttggccttaagtgtgaattttcttccgagccaggtacctcttgtcggtttgtagtcgaacggctcgtttcgtgcgagttagaccgtttacccgaagcgtttacgagattcgcctcggggtggtatcctgaagtacccgaggcgctgctaaattcgggtcggaagatttcctgtagggtctccgaggtgttttctaatctggctcgggatgattccttgatgcgatttccgaggtacttgtcatcagcccggagtacgcgtcttggaacgacttccgagccaaatatacccgacagatatttccgaggcgttctcggagtttgtttagttggctcggttcctacgagaccaaatccgaccccaacagtttgcccccagctcgttgtctttgtttacgagcgacgagtttcgtgcggttaaataaccgagccggcggtatatcttttcagttcacgatccttggcgcttcgacttcccggacggtcaaacttccatacatgcgtggccgccttctttcttgagaagtggaagcgtcttgcttattcccgaggtttgcgcgcgtgttttctcctaccgagtcacgcgctgttgaagtgttttaatttctcttcggacccgacgcgcctttatg

SEQ ID NO: 30629 - DNA, 1368 bp, Arabidopsis thaliana columbia
tagcctattctctcacaaacgaatcattcctaaacgtagaccttttctcaacgtgccattgaccagatcccatctccttaaaaccttaatttccacacacacaaaaaaagagagagtcaaagtctcatagtcaaagaggaacaacaacaacacaccaatacttaacctaaatggcaccacagagaaattcgtcaaaaaaataaaattcacagcctcggtttcatcacagagatcgaatctcatcatccaaaaaaaaataaagaagagaaatcgaacaataattagaagcatgaatcgagagcaaagagaaggaaaaaaatcaaacggatcgtagaaaaatctttcgtctcattttttttaactttcagaattacgatcatggaaaaaacaagacggagatctgaataagaaggacagagaaatcaacctgagagaagaagtacgattctttggcgagagagatagagaagaagtattaggtgaagaagaagaagaagaaggaagcttcaactactagtacaaaatggaggaggaaggggttggtgtggttttagcttccgtcattttctcccacttttttttgtcgacaatttttttcagatttttgttagaatacgtacggatgcacttagtactttgtagaaagcagttttgttgttttcttcattttatttttttcaatttactaatttccaagaaaaaaagagacaaagaaaaaaaaagtcacaaaaccaaattttaaccaataatattaagaaaatattaacacttgattaataatatgatgaaagcgtggaatcaaaaggttaacaccacctgattgggaccttactagaaggatccttaaagacaagctcacaactgattgggaccttactaaagggattcttaaagacaagctcacaactgattgagaccaaattgcaacacttattgcaagggcaacgttatatcgttagagcatccttaataggggatattagggaaatagtagagaattcttagattatatatgattaaatttaattattatttgagcaaattattttagaggagctctaagctaagaggggcttttaatcaaaacgcggtcgtgacgtgtcaatatttttttggttgtgagacttttaataaagccaaaaaaatctctctttcagcccgattgaagtagtcgacgatttcaccaaagtccgatcggccgtctcgcgttctctggtactcgtttatcagatccggccgtcctcccgattgtagctctcatctccaacgtatatgattaccccattgttgcttatgaggctctctagtccaatttaagaatttaggatttctgtccttcaagaattttcaaaaaattcacactcaata

SEQ ID NO: 30630 - DNA, 565 bp, Arabidopsis thaliana columbia
cgccagtgtgctctaaagacctagaaatgataaaagtcagctcaggacagcggcgtagtggcacagcgggtaaggtaccttcagcatgaccttcttccgtgatgacatggttgtggctggatagtcaataagagcgcaaagcaaaattttagaaaagaccgataagagttcccaaaagcgagagattgtaggctcaaggaccggcgccgacgcaagatgataatcagttgggagaggcgatggtgaggagtagtagttgggatctccgctcctgatgatgaaagcggtgtgacgggggaggcacttaaagatatgaggggtcgtctgttttagccttattgcacttatatagtgcagcctgccccatcgcggcggtttctgaccagagcgatcttagaagattgaaacctcgcttggttgcgccctgcgatgcgtccctgagcattatctttaccccatgaccttctgtcgtgatttgtatggctcactggagggaagagtacgcggcggcgttggcagctcgtgatcggcgtgagaaggcaacgtcgctatctacaatgcttgt

SEQ ID NO: 30631 - DNA, 431 bp, Arabidopsis thaliana columbia
gaggaagaagatgaagaagagatctgatgtatctggaaattgaaaacgaagaatagttagtttgttacagttatacacctctagctcaaccagaggctcttaaaaccaaataaagtcaagtccttcttttagcctcagcgggttctcgtttggctaagtttttctacatttaattttagcaatagtgaagacattttcatgcgttttaggacaacggtttttatcacattttatgtaacaaataacaaagaatgcaacaaacaagtaaagagagagaacaagagtgaaagatataagtagtcttagatcttgtcgtgaagattgacgactaagtcatgagcatcgtctagaagtttccaaacatcaagatgaccagccatgctgttacattccttcattatctcatccatcccacatgtatttctctatta

SEQ ID NO: 30632 - DNA, 581 bp, Arabidopsis thaliana columbia
  unsure (1)..(581): unsure at all n locations
atctattaaaagcgtaagaatatttgaagacaaaaatacgaaagtttactatcaattattctttgatctgacaccgcagtctgtcattatcaaaggcaatttcatctacaaatttacatgtgacaagaaatgttgtaggttttgaaaattgttttcagttgtggtagattttgaatgagaagcggtacatttgcaagattcccaaaaattaaagactaataaaatatatttaattattgatgctacaaatcttcgaaacattttttatgcaaatttacgaagttagcccaataagttattatacgagtacggcccatttaagttatctacagcccaatatcaatttcccagatcgtcacgtccaaatttgtcggttcatacacctccgcggctcggtacaaatcccaaattccccaaatgattcactgagtcgactcgacctcctcatatcccaagtgagatcttcttattgtttatccgtttggttcgtgattataaattttaaatcttgcaagatgttctcatacagttatcgctacagatttcgttcgaattgtttggttgaaatgtntggattatgg

SEQ ID NO: 30633 - DNA, 588 bp, Arabidopsis thaliana
ttccagatacatcagatctcttcttcatcttcttcctcttgggagacttgatttattttgtgatcagtctcggattgtaacatactgcgatcttttttcagcttctctaatggcggatactgttgaagagcctcaattacaaaatggagcggcaccagctgagtccgaaaccgagcaaaatccgattccggaaccacaactccaaactgagcccaaactaaccggagaaattccggaaatagaagcggatttaacgccggaggaagtacaatcggaggtaacggatgcaaagccagaggaagtacaatctgaggtaaagccggaggaagtaaaaactgtggtaaccgatgcgaaaccggaggaagcacaatctgaggtgaagccggaggaggtacaatctgtggtaaccgatacgaaaccggatttaaccgatgtggatctgtctccgggaggatctgaggagatccgatccggtcgacggaggttgaacaggaatctactacttctgttctgaagaaagatgatgatgggaacaagacatttcccatgagagagcttcttagtgaattaaaaagcgaggaaggagat

SEQ ID NO: 30634 - DNA, 542 bp, Arabidopsis thaliana columbia
taatcttcaacttgttgttgacttaacaaatttgacccaaaatttggtcaatgtttactagttaataagaaaaccctaaataactagattaaaacttaataaaattagaaaatcctcaaaaatgttctcaaactaagaattctatgtgattttttctcaagatcgattgataaacacgtaaaacttaaagtcgaattcgcatattttgacgagagtatgatgaatagatgaagaagaagcttctaattcgaaagaataactaagaactatggatatcagctttcaattttggagaaattttaggattttctgagtttattaggttttaatcgagtaatttaatgtttctctattggaccaaatttgttaaattaacgacaagttgaggattaaatttgtacacacgatagttgaagaataattgtgttaattgcaaatagttgagaaatgagatgatcattttcccctaaactaactgacatatttttgagggattagtttttataaaatttggaaagtggttccacttacaaattaaatat

SEQ ID NO: 30635 - DNA, 550 bp, Arabidopsis thaliana columbia
tccagagcatttattgtgaaacagagaaatttcaaaatttgtaatctcgagtttcgaaatttcacctccagatctgaaaatggaagacgagtagcgatttcgttagtttcgctgctggaacaaccagagctgatgcttgagcttagatgatcgtcttcttcttcagataacgcgacggagcagaaacctccggaatctgaaaccgagtaagccagagaagaagaggaagaagaagaaagagttctcgtcggtgagcgtaaaacgtcatcatcatcatcgagtctcatcctcttgatgtttgatccttcgtactcagaatctctcttgggttttgtttcgctcatttctctcaagctcattatagttttctctggagagagtttatgaaaaagttggggtttctctggttaataaaaacagaggaagggttttgggtatttgggggagaggaagatgaaggatctagagccgttgattaattcaacggctgagatttaattattgggccttgcatatagcggatgggccgttgttgtgccggttttgagtg

SEQ ID NO: 30636 - DNA, 494 bp, Arabidopsis thaliana columbia
tatttcccaccaacccccatacaatttactgacttataatgtttcccgtttaattccttattgataaatttttggaggttgaataaacgacacgtggaaaatatgacgtggcagaaagacaaactaaaaaggccacgtcttcgtgctgaatgaattcataatttcgtactacaaaattaatatcacctaccattttcgtctatgaccttaatcgatctcatccgttcatctctttattcgtggatccaacggtctatatcaaatcatatccccatatttatcaacagtggatagattaagaaaataccgaattaaaaggccacgtcctcttatgctgcatgaattcgtatattacctaccatttgccatgcccataatcgatcccaaccgtccatcttcctgttattagatccaacggtgtagattaaatcgtatcctaagcttccccatgagctccacctatatatatcatcagccagtgcatagatcaagag

SEQ ID NO: 30637 - DNA, 525 bp, Arabidopsis thaliana columbia
gtataaattaaaagtacaaaaagtaacaaataagctaaatctcaacttattgagcaatataatcgtaaaattttccaaatcgttcggagagattaattagcaaatcttaacaacttacccttaagcaattcgatctctatataagagagttaaatctttctctcttaagtatcagagaacgagttcttcttagtaacttgaactattgaaaatttatatttgtaagaataattagctaaaatgacatagttattttttttagtatatgttctttcaccaaaatcccacaaattatatgcaaggacgttacattttttttttccaccacaattctattaaggaaccttctattaattcatcaacaattccacaaagagttggtcttgtgcggaacgaagcaaattacatgtttgtagaatgaaagatagtatgtgaagttgtgtgatagaaagtagaaacagtttagttttaaaaaacatacagaacaatttttttatttgtccccaaatatggtcatcttacaat

SEQ ID NO: 30638 - DNA, 561 bp, Arabidopsis thaliana columbia
gtgagagaagctcataactcggtgttgcctgcgtcaacgaggctacgtttcttgaagcagtatctgtggccatggatcgtcgtctggacgagctaactaagtaaccagtcttaagtacataataaagtttggttttatggtatgtatatgtatatgatgtaatgtatctattatgtttgttttcgttgagaaaaacgttgataggctcttcttggataattttttccttccatgaaagaagcctttaagcttttgtgtttttttccctaaaccataaattaaacgttgttgctaatttgttcgtatcatccaattgtgctgtggtaaggaagatgttaagacattcttgttcattatgaaaccaaattacaaattaagaatgacatataatgggcctaaatcgggcctgtattcaatgaccgcgggcctatctctggcctgttttcaatgtccccggatgggcatttgtgtcattttcgctttagtgataatttttgcaagtgggatcaaccaaacttactgcagtgtgcaataaaacaatttctctaatacaaggcttgc

SEQ ID NO: 30639 - DNA, 264 bp, Arabidopsis thaliana columbia
tttctttgtatttagttcttcggttatctagtgctaaattcgacccgcacaatcacttatatatgttgaatcagtgtgaattaggtaagtcaataaaataagcaaaattatcagacgaaaaaattagttcataaaagtaactcttcaacaagaaattgttacacttacaaaaatctattagaccgtaaataccaaggtgtaggctagcgagaaggaggagaagagaagaaaatgacaaggaaataaacgagaaaaccagccaca

SEQ ID NO: 30640 - DNA, 450 bp, Arabidopsis thaliana columbia
gaaagcacagttctaagcttcccgtttatcctattgagctttacctcagggcaagagatattaccatgatcaaatctagaggaggatcaaatatgaaaaatccttcatcatccaaacgaataatcttcttctaatcgttttcgaaatgagtgctaatggcatattgcacataatgtcagtgtataacgatcgtcgcatcaggagattaagtttgattgtaacagaaacgtagtcatatgagccctatgcgctccgttgggagatgcaagcttattcaccaagctctagcaagtaagctacacagtgctagcctgttccacacagaaacaaccatattgacagagaatgtcacaaatgtaccacaaatctacataagcaatgaatcatatctcgggaatgacacacagatctatcaagcacatattaagccatagattatgatccagcaag

SEQ ID NO: 30641 - DNA, 506 bp, Arabidopsis thaliana columbia
tatcatttttctcgcaattaagctagagaagttcaaacaatttcaaagagagattcattaagtcaaagtcttagagatgtgatagtatggtacacgttagtttggagtcgtataacgcaatcattgtttttaaatcataaccaagagattggtaatgatgattatacattaattcttggctattggggcagttaggcacatgacatgaatgcaagtagaaacactgtaaggcatagtaaagatgaaggatctaactgtaattacgggtagttgtggaatataatggccgaatacttagaaaatatcatttggaattaaacgtaacaatcaagaaatggtatagctagtagcttttatgttggtcattagcagaatcactaaacataaaattgtgattgtgcaccattgaggtttagacctttatatgaacaattgaactaaacttaccaaagcgaaacctttatatgtcaatgatagggtcgcactatcaagaaacgttattggga

SEQ ID NO: 30642 - DNA, 537 bp, Arabidopsis thaliana columbia
tgtaaaagtgatctttctaataaacataacatggtttcttttactacaaaaaaaaaaaaaactgaaaattaacatatgtagcgaaagagacaaagagtagttatgcgaaatggagaaattatagatatctggcaacatcattgaatccgccttgatatatatttttcacataggttgtgatgattctgtatgtaacatatgtatgtaaatattatttgacaacgatagactaaaatatgtagacagtttgagtatactaattgcatttattagaggagctttgacgactatcagacttgggtgaatggaggagaagataggcaatcactagaaactaataaagtaaacattattgagttttgtcaacgacaaactgaatagagattgaaaaaaaaaaaaaaatctaaaaaaacaagaaaagactgatgcaaaaaaaaaaaattgtcgaatcaagaataatgtgaaccgctcctgcatgcataggcccctgtatgaaaactcgtgttgcttgacttcttggcatcgtagtaagcggtg

SEQ ID NO: 30643 - DNA, 477 bp, Arabidopsis thaliana columbia
tcaattttgtttggcctccaaatttggggatcatagtggactttgtcaatgtataagcattgggacaatgtgttttgaataatcgagggcgttgcttcactgtggccaagaaacttcacgtggagaatctatggatcttgtctttgatcactgatcagcatgtgtagtttctatgttaggccatcataagtgcctaagtggtctgcggaaaaaaaacttatgtattcaccaaaaaggtatttctttgatccagctgatttatgcgtttttttttttccgtctggatatcaaatatcaactatgctagtcttgagtcatgacatccattagcaattgtttaatagaaagaaaaatatttcaaaacaagttaaaattattaatgttaaaagatattccttaaaatatcttaagacaactcttcaccgtggcccgaagacgactggagcaaattccggacacaaagatctcaaattttga

SEQ ID NO: 30644 - DNA, 812 bp, Arabidopsis thaliana columbia
attattctcatttactttttcaaaggatctcaaacaaaaaaataataacacatttactttgttttcccaaaagtaatttatgtttgctattttagatttagcaaacttacgtttatatgttttcattttcttaattagtaaccaagtttttttttgtgtgcaaaatacttgtattcaatcaatcaagaaagaaccaaatacaaagaaaactgagatcaaaagattcagagtttagaacataaacaagaaggacattccccaatgccacaaacagataaatagtagaaatcgacaaaggttccatgagagctttgagacaaatgcttgaaggtgatttgacacatgtgaggtcacggtttgacgaaggatcttccatgaacgaatcaatggatgacaagatagtcacagtcataagactatgtaacgttgataagtgaaccatggctagacttctcgtcttgagaaggactacacgaagtagtacagcagcgcgggttcgggcagctatggatttgtagcttgaaggagtttgctttacgacataaagcaggggtttgggatcacttctatgaagatagtaaatgtcttgagagcacatgatccggttcttggagatgatgatacttgggcaagagttgaagacattcaataatattgtcgtagcgtagagatttaaacaagggccttcatggcacacacaaatctccagcaaaaacggttcaaatgcaaggacctataagtcttcaaaattttggaaacaatattcaaagccataggtgcaactaaaatcagggttctcagaagattggagt

SEQ ID NO: 30645 - DNA, 1058 bp, Arabidopsis thaliana columbia
tgaatcctgtctggggtgtcttcgacgaactccccacggtcgctttcatgttcgcttcccggcatccttccttctcgtagatcttcctcggctttctcttctccttttcttgtggtagacccctacctggcgcgccaattgttggagtataaaaccgaacctccaaaccggagaatgaaatgacgagccttaaggaagatctttattgatatccttgaagttcggctgtttacaaggtgtttccacagccgagcctaaacttacgtaaatacaaactttgcaagtcaaaactagacttatgcttttgaatctgaattagaagtttctattgcttttctctgcccatttttcggtccccgcttctgacattcctttgtcagtatttatagtactgcaaggacagtctatagtacagttttcttctcgatgtgggactttctcttgatcaacagcttcctcgaggcgggcttcgtctgatgctaggctcttttatctttaatgggccgatcttttcttccttccttccttgttgctgatttcaatgtgttgggctcttaaacatgttggtgggcgaagcccatgtccaacagttactcccccccttcgaaatccactcaggaccttgaggaagccgtacagtttcacgctgccagctgctaagcttctggatctttccctgccgcgcgtgaagtccctgaagacgattgggcgggcccagctgcaatcattattgctaggttttaggcatagagcccattacttctgtcgttcccggaaagtctattctgtcttaaatcaacatcagccgtctccgaagcactctgctctaaaggtaataactttcttcgacccttcgactttgattttctgattcgttctgcattctcttgtattcgtgccttctgttacattttctgcctttcttccaaatctgcgtttttctcgtctcaagcaatgggttcttcatctccaaacaactctgtcgactcttacatccgcgagaggacttcttcggacctttcagggaagaaatctccttcaataggttggtctgagga

SEQ ID NO: 30646 - DNA, 1459 bp, Arabidopsis thaliana columbia
cccttttttaagggtacgtaggcagtctttcacaagacccagctatctcaaaacaaaatataaaaaaaaattgaaatactttttttctacaagtatttgcgaaatcataccctcgatgagctctttcgaacaagcccgtcttatcgatcgcctacctcccacatcgttgtcctggcaagacatacgatttaaaacgcgttccacacggatgcagtggtgaaataatccacaactttacttgtgtaaagaataaaagccgagtccagcctcgcacaataagctagcaggcggaagaactaataagccaagttccggcttgcacgttcttgccgacctcaaggcacccacaggataagccggacaccatagtcgcacctaaaaagcacgacgagtccgcctcgtctacatatttcacaactctacttctgtaaagattcaaaagccgagcctagtcttgcacactatctttcatgcaacaaacatgtagaataagccaagagacgttcttgcatcggaaaaataatatcaaagccgaagttgcataaccgagataacaagaaaaaaacaatagcaaatcataataaccatcaagttatgaaatctaaagaaaacaaccatagtttgcaacaaagacccaacagagggtcgaacataccgaataccggtccaacaagccacaaatggcttaaaaggctggacaaagtctacaacaccgaaagaaagaaaaattacaaaagcccgaagcaaactgcgatcatatcacacagcggtgtcgccgtccccatctctcggcggcgcctggaaggggtcgaggtcgtttgcaagaatctctggaaccacgatcgcatcgacctttagactgccaaatcggacgacccttggctaatatcttcatcctagactcgggaatggcagtccctttggcaatcatcgtctcgagacattcttgaactcccttcacctgacaaagcgtgtattttcggacactgtaagctcgcaatccgataatatggttcctcaatctttcgatacgagcatgactatcctcgatttcagtcaccaccttgcgacgctcctaccgctacagcatcctcgcgagatttcctaagtcacgctactttggactcaagttttgccttcgcaaccttaagggcatcctttagcgacttaacctctagctcgaagccgctagcgtttccttactcataatgcctatccgctctagacgttgcaagagattttctcgcagtctccaaagcaactttgagcaaatctctctccctcatgacttccctcacctttttctcataaaaaccgaccatacggtttgtctggctcatctcctgcaatatagacaatgtcaaaacccgataaaacttgagaataaaagagaaggggaagattacaacctgaaacttttgacgacatacatcgcggtagagatctggcgcgagaagag

SEQ ID NO: 30647 - DNA, 526 bp, Arabidopsis thaliana columbia
taaagagatcaaagacaaaaactaaccaaaaagcacataaatttttggttcttaacctcaccttgaaagtatgaacagatttccttggcgtgagatcttcaaggatgactgagaagagaatgccctgaaaatagcagggaggaggaaactaacagcacaagaacgatgttctacactttgtgacaaaagccgctcagtcgtattacacaaatcccaaagcataccagctgcaaaactttccaccttcggagctgcttggcgactttgaaaagcagcattcagaatcaaattcagaagatggcacgacaatggaattggaaatgatccagacaactgtgcaatgtagttttcatccatatctattgtattcaaagaatcacggaggcagaggtcgcccatttgatgaaatctgattcttcgtgttgacgcattcccatcgaaaaaccaactgatcttagtaaaaatggcaccaagctcactcccaacatatccaatacattagtctcgatcactacatcaaagaacg

SEQ ID NO: 30648 - DNA, 526 bp, Arabidopsis thaliana columbia
ctatgccttgttctaaccaaagaggggcatggtcccatttgggatttaggtgctgcaatagcaagaagtcctgcacttgaacacatggatataagttctagaaagcagttgcttggttttgctttgggtcactgtgatgatgaatcgattagtgagttattgcacgcatggaaagattttgacctgcaaggccagtgcgagactctgggaatgttatctgagtcgaattctcctgagtttcaaaagatggacggtgtttcttgtcttactgatttccctcaaatgcttgatggactaagcagtgatcaacaactagatttggatagagccaaagattcaatttcttgtgttgctaaggatatgccggttgatgatagcgtggacttggaatctctgctaaaggaaaatgggaagcttttctcatttgctgcttcacatcttccttggttgcttaagctgggaagaaataggaaactggataaaagtctagtgcttgattcaattcctggaaagcagtttgtcagca

SEQ ID NO: 30649 - DNA, 635 bp, Arabidopsis thaliana columbia
tatttttcttttgtgttttgacccaattacttggaaaacaattcattttattaaaaaatacaaaccatgtttgatttaattacataaatttttgtaatgaataaacgtgttattataaaaaacaaattaatattttttagaagttttaaccaaaaatatcttggtaccgtgttttttagtcaacccagagaaaacatcacgaacggctattttttaaaattaaacaaaaaaaaattaagttctttgttatttctagaaaatggggaagacatgcatttgttggaagcacgtagtttcgatatggacactctcccacatgattattctttaagaactatacaaatcataaaatatcaccattcattaataacttaaggtgttgtaagaataataaagtcagaaattataactttagcactatggatataagaatacaacgaataatcacaaatcacaaccataataaaatctctgtctgacttttgaatttggaactaatttagaattattttttgttgacagcaaatctttataatttacagatattaagttacatcaaatagaagtatcatctatacctatagtcatattgaattaagatacaaattccataaatttgatgtaatagcaaattt

SEQ ID NO: 30650 - DNA, 864 bp, Arabidopsis thaliana
  unsure (1)..(864): unsure at all n locations
gctccagcatagtaataagttggggaaaatatcgggcttgaaagtgggtcttatgggtcagtcaggcccaactatgattaaacaaagcccaaatcgcgaatgttccaaaacaactctcttgctcaggtggcgggtaattaattactaattccccgttcgatgaagcgactagttacatcgtagccatatatttattcagcttaatcaacggttacaaattaccctgaagcttcggtcgttttgcaatttgtatcgaaagtttcactttttttttaaaatctttattttactttctcacaagcgacgcnaccctcgatctcaaggcgaaacgagatttcgtagcttccatggcgagaaattcgaattccgatgaggctttctcgtcagaggaggaagaagagcgggttaaggataatgaagaagaagatgaggaggagctcgaggctgttgctcgttcttctggctccgacgatgacgaagtagccgccgccgacgaatcaccagtctccgacggagaggctgctcccgtagaagatgattacgaggtagctgcaggctaatttcgttttgatggctgtgatttttgaaatctcagtgaactgcatcttttttgtacttggaaagttgaaatttcatttaatgcaatggattcggcgttcgcgtcttccttcgtttgttagttttagtcgaatttttgttgagtgaaagttcattgaatgtctgcgcatggtggctcattgtggtataagcaggacgaagaagatgaggaaaaagctgaaatcagcaaacgtgagaaagccagacttaaagagatgcagaagttgaagaagcagaagattcaagagatgctggagtcgcagaatg

SEQ ID NO: 30651 - DNA, 384 bp, Arabidopsis thaliana columbia
ccatccatgaagcagtcacctatcacctggtcaaagtgttccagaataactgcaagctaacgagtggttacacaaacatttatcaaaacgaaagagtgagaaaattgagtagtacagccatacaagtgcaatagtttgatggactgtttgtcaccttgctcaccattctcaaatgatttttcaactatcgattcaacttcgccatctgcagctgccgtaaatatccttaaaacactcctccatcccgatttggtacttccaactttagattttatcatctaaaattaaaagattggttagctgctggaataatggctgcatactaccgggttaccaaaacccagggaacctattaattttaggatattggataggtccagccag

SEQ ID NO: 30652 - DNA, 585 bp, Arabidopsis thaliana columbia
ggtataagctacaaaaatcacttcaaccaaatcaataccaattgtaatactacaacgcggctgtataaaaaaaaaaaaaacgtcggaatcttcaaactgacgtcgtttgaaaccaaatcatcttcacaaaatccgacactgtggctcgccggtaacgccgtctcgcgtcggtaactgcggcggcgaagaataccacatttccggtacgtaataaggataataataatacggatacgtcgcaggaggttgttgttgttcagtatacggaaattgttggtagttcatatactgagacatcggagacattggcgccgacacctgttgatacatcggcgaatattgttgccacggtggcagaaagttttgaggaggaggaggagtaacgtgaccataatccatgtggattaattgagcatgtttcttagctttacgaatcctcagaataatctcagggctgatcttgcctgagagataagctaatcctttcgtcgcatcgattgtgtatgttcatctgtcaaaatcattcaaaacatacaacattgtctaatcgcaagatttaataaaatgagaaaaaaaaatccatga

SEQ ID NO: 30653 - DNA, 601 bp, Arabidopsis thaliana columbia
catagtgcaaagcaagctgcagaaataaaaagattagaaattgaatgcacatgtctgtgaatcataacccagaagcttcaaaacaacaacatggtaaatcggataagcctatgcttcagacaatacaattgcaaaacggtatcatggatacggtaaccgaatgttccaatgctaaaaagcaatcagcaacaagaacttgtggcaaaacaagcaagctacacaaggagaagggacaaacctcattcccatgtccactgctgagacaatctgcaacaggtttcgagttgagattgagcttctcataacacgtctcccacttgtcatacttatgttcagtcaccaacttctcgacacagtatatgaacgggaaatgatcgctctgcaaccaacaaaagtgacgatgtttcttatctcacaaccatgcctcaccaaatgaagttaacgtttcaaatttgtgacagcaacaaaatagatctcatcatcacacttactactttaggccaagcatcaattgcacaagcttctacggtatccaagaagcattcaaatgcccatgctgcacacaaaagcacaagatttatcaaatgagagaagccaattt

SEQ ID NO: 30654 - DNA, 629 bp, Arabidopsis thaliana columbia
gattattttctggtttagaagactctcgatacttataaaagataataccacaataatataagtgcatgcatgtgagaatatggagatttgtagatagatactaaagcaaaatgatgatttcaaaagaagcatgtgtatttcggcaaaagccaaaaaacttatatagaactttaagacacgcaagagcacatgatcgaaggagttgatgagagatggcatgttcttttggggacagccttgactttctcacaaagccttgagggtttatgagacatgtcttcgcttagacatttcacactttggtcctaagcaaacccttaaaaaggtcaaacagaggccatttttgtcagctttccagcccaaaaatattccttttttgcatgaagaaactaatagcatctcgagacggttttggcaatgaagacgttttagtttaccccgaaagtcacaaaaataagacaataatcttggtgaagcggtttccataatgggcagcttcactggcaccgtacttcgtccgtactttccaacaaccgaacaaagagatggccttacgattcaaatattatcatcgatactataattagtttaatctgatatatatatgtgatagatagtgatcagtgtga

SEQ ID NO: 30655 - DNA, 384 bp, Arabidopsis thaliana columbia
catgctaatgcactcaccggatatgatactatcagcgggtacaagttcttctccgcgtagtaagtaacttggtgaggtgtggcctttagaggaatctagacaaaaatataggtatcaacgtgatcagtccttgtacacttattattttccatctaatcaacagtaagcaaagatgattaaaaaaactggaatttaccttctgcactggccaataattatcatagattgatgctgaaggtaattggcaaatcttcaaaactccctgatataaataaatataaaccatcttgtcaacgaaattaatagtcaagatgctacgataatgagaatagcgaaagcaacaacggaaatgacgtgtagaaaaattattaaacctgtgctgtg

SEQ ID NO: 30656 - DNA, 615 bp, Arabidopsis thaliana columbia
  unsure (1)..(615): unsure at all n locations
agattttaaaaaggataattggcaaatctctcaagaaattggcaatagtaaagtcaacaacttgaaagggtttgcttgcttcttcccgacccgagatcaagcaggaggtctaaagagtaagaacatttgaaaacaattatctaaaaaacctcgttctatctagtataggcccaatagtatgggccagatcaggagctggaaaacccatcaggcacttgtatatatgaacacctaggaaaaggaggcggcacggagagcaataatgggtagaatttatgcccatcacgcatacagagcctctttttgctctcaaattcatatctgcgtttccagacttcaagtgcgaagttatactacaaatccgcgtttcgcccgccgctatgattttgaggttattttccattgtacctttgcaattgaaatttccgtctaggcttattgattgattcttacaaattgttgtttatacataacaggaaaagttgtcgcctgatgttactgagtcacaggaaaagttgttgtccctgatgttagtgcncttcgacaaggtatcaattcattttactctcgatcggctttgaattacgacgaggttgttgccatatgtgttagtgt

SEQ ID NO: 30657 - DNA, 1345 bp, Arabidopsis thaliana columbia
gacttatattatctccaaactccttcagttgatattttaatgttgcttattgcatgagtgaatgattagataaataaaaattatatttaaattaaaaataaaaaaaatccgaaaagaccgcggcgtacgcggtgtatcacctagtaagaataataattgcctgtttgtttatcttctcgatcgctttaccttatgtcttgccagtttccttatagtagaacgaaccaatggggaaacaaaactatttaaaaatagattcgtcctcattgtcatcatcactccatcctctggcaagacacctacatcaaacatccaagggtaaatcctatcctatctaacataattgccaaggacgtgaccagtttcctaatttacctttgtgactcttttgactccataaaacattcgaaaaatcatcccacgtccatgagagcatcatgaaccatgctctgataccaccttgtaacactcctaccccgtcctaggaccaggagcgaatagaagcgtcatgtggacgcccgtagtcagccaacccaggttcccggaatgaatccattcacccaagccgtccgaccgtgagtgtcgttcctcacaaacacggcctaaggctttgtaactcgtaccgcggacgcgagttgtgatagtcagacaagactaaatacatcattgggagacatggggttttaataaaatcagatctttataaaaatatcgagtcttacatactatacgcaaaactatatcttacaaaggcaaagcaaatctacactggttggcctaacgtcctttgccccttaaggtctccctactaaaggttgccttttaaaaaaagtagcatttgagtaatctagtattactcagtaagtgcgggatctataaaaataaaacccaacccaacccccaaacaacaagcaaagaggcaatcaaatgcaatgcaataagcaactatatgtagcgaaactactatgcctaaacatgctcctaactacttaagtaaggccttctatgaacacatgataccccgaggcaatggcctgcacactcctagacacaaagtgtaaagaagattaacattttcttatattacatcgtcatgtagtgccttgtcggtagcgaaacagcccgagcctttgtatgccataacagaacggagttacatgcgacacacaacatacggatggaatcctcatgatttggctaatcctagttatctaacaatcaaagtataacagtcgggcagcatgacgtcaataccaacatccttccggcataaaagttatacgaccacgactttatactatcaagcaacaatcattgataagtgtacattttacatgtttttgag

SEQ ID NO: 30658 - DNA, 605 bp, Arabidopsis thaliana columbia
gaaaccttattatatataaccaactttttgtatatccttttttcagttttgatcttcaactcagttatgtagaaacttaaatttgaactgatctttatgctttttcgataactatatagtactccaactttatttattggaatattgacttttccataggactatgtacgttcgaattcggttaggtaacacacttacactgaattggacatcctatgtgatgctgccgcttatccaaccaaactcacatgcatgttgttgtgatttttaatgttcattaaatgcacaaaactcaaatcaaatcgaaaacataaaacattcttttgatcaaacaaagtttatatacttctttaccttcatctaatattcattcctcacatccacttatgtaacatagtaaatgcatgctccacatatgtataaacaaatatacatacagacacgcacacatggaaaatgcatacacatataaaagaatatgaacgtatcgtaaggttcgaagtaggccgcgcaattactgaccacacataatttgtatatatataaacatgcatgataggagacagagaatagtagcatttatttacatatataagttggaggtg

SEQ ID NO: 30659 - DNA, 422 bp, Arabidopsis thaliana columbia
taggggatacaaatactatattttctctctcttttctttatttgatttcttttttgattttattcccttccatcattcttaagtcccataagtttgatcctatagaatctgacccattttctcattgagcgaaggggtacgaaataaattcaatcagatttatttttgatcactgtcgtgaaagaaaatcactatgtgaaatcatcgtctaatctcaacctctgctcaatcgctttcccataagtacagcacttgttgaatcgatagagacccttttcttctgtatcgatatgaatccattaggaatcgatattattacattccaattccttaccaatatccctcaaggaaaatcccgaattggatcccaaattgacgggttagtgtgagcttatccatgcggttatgcactcttcgaatag

SEQ ID NO: 30660 - DNA, 524 bp, Arabidopsis thaliana columbia
agaatctaatctactgatatgtttatcatcaaattcaaaactaaaattatacctttgatttgcaggtatcttcacggtatcgggaatagtagattcgttcatataccatggacaacgagcaattaagaagaaaatggagattggtaaattcaactgagttgtctgatattctccacactttcttgatcagctactggagaatcatctctacgggttttacagttagacattaggtttgaatttgtgacaatgcgatgatttaaagaattttgtagtactgtaagatattccaggatctgaactttgcctttcactattcactatctcttcataggcaacatacaaagtgtaaaatgttgttatcccgattgaaacgaatgttaatttttcctatttaatttgagctcatttgtttaaagtgtagtctaaatctgaagataccgatcttgctttatgttattaaactaaagccttgtttttttaagtgctacgtttgttgataacagagaaagtggttcttagat

SEQ ID NO: 30661 - DNA, 554 bp, Arabidopsis thaliana columbia
tacaaatgaacgtgtatgtttttatattctatatgcaatttcaaaattcaacatttgattgtttaattatatccgttaggtttagtaatagttgtattaatcatttattgaagttttttatattaaaaaactgacataattcacttttcgtggtttagtgaaaccattaatgttccatctcttttccatggactcacagaccagtaaccacacgtcctaatggtggggttgacgcacatgacgtcgtcgtccctcaagtgtaaacattaacctgccgcgtatggatatcgacttcggttctaaaatattatagttacatgttttttgttgtttttggtaaaaggttaaattaacaatttgtattcttttttgttaaaattcacccttatggtgtcactaattgtttttttttttttagattttaaattaaccgctattaatgatttattttcaaaagttgataggaaaaaataaaaatataaagagcaaaaaagagtttagaaaatgtatgtcgtttttctataaaaaggataagccgcaaggaggcaaaagac

SEQ ID NO: 30662 - DNA, 485 bp, Arabidopsis thaliana columbia
tacaccatcaaactcttactggttcagctcataagtcttctggtggtggtgataagctgaattcccgtaatggaagccagattagttcatttagcactccctcaaaacaaatgggttcaccgtctatgtatcttgtcccttctagctcaccagtttcttctaaccgtctttcgtcgggtcaggataaggctgtctctagtccttggtctggtagacgaagttctgcaaaagacataactaccgaggagcagcttgagcagcttttggcagaaatagatgagaaaatcactgagtcggctgggaagatgcgtacgcctccaccaacagttgggagttttgccatggctagcccgagtacagttggtggttcaactggtgcatctggggctactaggagtacccactaagacctgtcaggatgtctcctggcgctcagaaatttacgactccccaaagaaaggagagggtgatttcccaacccaatg

SEQ ID NO: 30663 - DNA, 568 bp, Arabidopsis thaliana columbia
atagcgaatttattcgtttgattagtcgtgttcaaagctaacattaaaggaaggagtcataaaaatattcgatttacgtggagggttcttagtcttacaagtggattgatggaaaccgttggatggtaagctttctaatgacatcacgtggctgcgtgaattttcgtaatcgatccgttttaggaaacgtttccgtctcgaaggcaacagctttgttggatacgagtttctctgtacggtggtccacgtggtcgacatgcaatagatttgggcctttaaaaatctgagtttttgggcctttcactaacgacgagaaaccttaaggtggttttcattttgagtttttgagttcagacttgaaaagttttaggacgatgggtcttcggtaatgttttagacctttactttatttgtcagcaacgagattttattttagtttgtcaattcactgattttttatttatttactaggagttcgcggacaatcggtttatttgattcttatactaaatttttgaatgaatttgatattttaaacttataaatataaaactttttaattaaatat

SEQ ID NO: 30664 - DNA, 602 bp, Arabidopsis thaliana columbia
  unsure (1)..(602): unsure at all n locations
atttcaaattgatcagtattatttattatgacttgcaatttcgtaatgaacaaattcccttagcttatatgaagccgtcttgagtttgatcagtatataataagcttcccaaccgtttaaaatgttattacatagatacgaaccgtgacgttttattgatgtttcgattattttctacatgttctttgtctagttccattggagttttgcaaatagcatcatctgtttgccatgagttaaattttgtggatttcgcctactacataagagaataatcatttccaatgatccatgcaaaataggtaatgcaatccttaaacaagacccacgtcagaggatacataattatcaaaagctataaagtcaagaatataattcaaatttccaaaggacttcatatagattgattgcaagcatacctttacacatatagaagaagaaaacatgacaccatacaaaagttttttacccagattattgatgcaaccaaatgaagattaatagatacaagaacagaaggcgagaagcaatcaactaaaatttggtaatttatttgattanaaatcccttttaggcatgtcaagaatagaaatatgatggtg

SEQ ID NO: 30665 - DNA, 368 bp, Arabidopsis thaliana columbia
ccatgaagaagcagatcttgtcgcaaacatcatgggcaccatcaccaacgtatgttgcatcaaacatacgaccagtgcgttgttctcttctctcttggtgcggtttaatcatttcatagtaactgccatgtctctctttcataaaattttcttatggtttgcattacaatggagccgatttctttgcctccttctcttcatgggaacggtaaatttctatttcgatgccggtgtggagaagttgttcgacggatccgctaagcatcttttatgtctgtgatgggaacatcccattgcgatgtcaatttggcaatacattgccaatcttcgattgactctggtgcgcttcctagtgaaccgttgcaaga

SEQ ID NO: 30666 - DNA, 532 bp, Arabidopsis thaliana columbia
gtaacaaacgaaagaaaaaccaaaaaaaatattataagaaaagaaaaagagtataaaaaaaaggaatgaaattgaaagtgaaggagaatcgttactgaaagtataaaaaaaaggttgtggagttaatataatacaccgtaccaagaagaagaacaaaagcaatcactcagcaacttctttctatgattaaagacccttcagacgagtctctgtctaataagtcctctctcagttcagattctttgctcgccttctgtttctctacttgggatctaaactctacacacatctcctggaagctctgctaatccggtatttgctgctcgtaatctccattctccgacgactcatgtcctatccttcctgcacaagattacatccatcagcgtttcaagccattgccacaacggagaagagctttagcctgtaatcttctagaactctacaaaatactaatttccaccaatctccatagcaattctaatctgtccttgtttggatttaagggtttgaactttgatgaagaaagatg

SEQ ID NO: 30667 - DNA, 558 bp, Arabidopsis thaliana columbia
tccccggaacaaaatagctttttgaagaagcatgtttatgtcttataatatcagagacaaaacaaaaaccactttcaactcgaaaacagagctccaaaatgtcttctcttcttatcctcatcttcattgcttcaaccataaaattcagtaattactcttcagttgctacaactctacctgacactgtccaatataacaacaataacctcttcacagtctcaggtatcatcaccaaaaacaagttttagtatttagaaacttttctcctttctgttctgagaaagttttgtcttcttctgagtggatttgtgcaggtcagcttgattgcagacaagaagaaccaagtttcagatatgagacaaaaagttatcacagagaatttcaggttttgtgtcctatctctgaggtgagatgtgcaaagactcgacggattctgaaacatattaggcaaaccagaagaagagatcatcaacacaaaaagaggagatcatcaagatacctgcaaaacaaagcaaacataattacgacagacaataagttgttttcccacatccatgg

SEQ ID NO: 30668 - DNA, 481 bp, Arabidopsis thaliana columbia
tgcggatacctcttgtgaactttctggttagtgaatttcctcacatctctcttgtatctttctattttatttctgaagttttataaagaaggtacaacagaaattatgagcttagacatatagatataaaattacgtcttttcaaggaaggtaaatacgtaaaggtgaaaatgacagctacttctcctattgctaaatatcactcaattgattgctaggcccaaccaaatatgggacaattatgtacaaataagtcccatgtgatatatggctgcaatcattttttcacattttgttgcatgtgacaatccacattaattgttaaaatgaaaggtaaccaaaaacttcctgcttatatatacttttgggtggctaactaatacacggttagttaccaacaccaatgtaaccatgtttatgtgtagctatatttatgtgataattttgcatgcatgtaaaactaaagaatcatagtggtatt

SEQ ID NO: 30669 - DNA, 482 bp, Arabidopsis thaliana columbia
gattcaacttctaattatatttcgtatatatatagaaaaatatagttcaaccacatgtaatcgcttctttttttaatgatacatttgaatgattatatatgaacggttgatattggaaaccttagcctttattatatcggattttttttaaactactaaagttttaaaattgccaaacgtcttaaatacataaactacacaacaatatgcataaaaacatgtcatgcatctactaatgacaagggaccaacaaagctcctagagaatttaccacttacgtgatgacacctcaaacaacaatcaaatactcatactaaaatttcaaattctcaaactaaaatttaaatttcctttcccgtcgggtttaacaatgaccctgcataagaacgagtcgggcgctccggaaccaaactggcacgtggagaccttggaggcacttgttttagctgatgtcactacaatcgtagtagatccgcctgagt

SEQ ID NO: 30670 - DNA, 538 bp, Arabidopsis thaliana columbia
tcatggcatgggctgacatggattctcctaggccgtttaggtaggcggcatagtatctttgagtagctcagaatctgcctgccatcatcaggcctagatttctgctgcttcttctttattgagttttgcacttgttacatttaacaaggcgttgctttgtagccatacgcaatgatggctcgagaagcaaggtctaatttcagcttcatggtaaagaggttctttagcagcaatggtttcatccttcaatctctctgcatattcttttgtgaccaaactcataagaacctcttttcagctacagggagcatttgccttttttcccctttcgattttgaaaccaaaagtctcataagcaaatgattatgtgcaacacaacggacagtttgatcaatgcctttctgtattgctcttgtttacgactgatgtttctgaagctttactgaatgttaccatgagaagtttgtaccaagtccaaaatacgattttaaaattcttcataaaccaaaagattgggtcaagtggaaactcagttgac

SEQ ID NO: 30671 - DNA, 514 bp, Arabidopsis thaliana columbia
aatgtctgaaagtatatgggcgactgggagttatcattcattaagaaaacaaagaaatctagatcgttaaattctacggttaagaaagactttttattatggtaaagaaaaatagtcaaataaccaaagtaagcaattaatatagtttgatcaatgagttcaaaagcctttggttggaataactcattaagaaaacagatagtttaaaatcaattgaattatgatttcagacatagtataagtttgggcaaagtattttaatggaaatagaatacaaacttgataacaagttattgccatttagaaaatgttataactccttatatagtgagaaccctattgcttgcttgtgttcaaggaattgctgtttatggaactccactttaaataaacatataaataatctatttagtatcaaaaacttaatatcccatctactttgaatttgccgatcatgaaacacctatttattgtacataaatatacatctttaacaaatatagatctatgcgtg

SEQ ID NO: 30672 - DNA, 554 bp, Arabidopsis thaliana columbia
ccgagttaatcgagaaatatgaaatgatttgactaaaatttaataaactcagaaaatatccaaatttctctccaaattaaaagctacgaacttagtttcttagttatccctttgaattgaaagtttcttcgttcatctaatgccattcttgtcaaaatatatgaaattcgactttaatctctatatgtctctcaatagatcatgagaaggaaacatttagagctcctaacttttaatttcaaaaataagtttaaaattttagaatatattaagtttgaatcgagttacttaacatttctttaataactaaaaaaggttgaccaaattttattaaatcaataacaaattaaggattaaatttgaacacgtgatagttaaaaaaattgtgataattacaaaatggtgagaaataaaataagcttttttcctttagctttacatgttcactttcttaacataaacaagaaaaataaaattataaaataaaaaatgataatcagttatagctcacaggaataaagctcacaggcactagtttcgagataactattttg

SEQ ID NO: 30673 - DNA, 521 bp, Arabidopsis thaliana columbia
tgtcattgtaattcttggaaacacttttgtataccaaaagaccaaggagaatattccatgatgaagcgtttaacttgatcacatgttatcatcgtcattagctcaaatcttcaaagatctaaaagtactacatctcttatgactcaaacttggcaatcactatgtatagtatatattctgatttagccactacacttagacgtatatgcttgctttgctttagtttaggttgaacctgatgttattgtgtatgattagaaattttggatcatgtatgtcccttgcttggatcaacatacataacttctttacaaaagctaatcaacgaatagaaatctgtttaaaaaaaatgatttggtcacctaagtcaccaaaattcggtcaaagatcttaagagaccccacagttaagagtgtttggatggaataatttcaggataggtgaccttcctgaataatttgtagggcaataacaaatctttgaacttcttagaacgtgacacgaccgccaacagtggtgtg

SEQ ID NO: 30674 - DNA, 403 bp, Arabidopsis thaliana columbia
gattgggagagattcatatcatcattgtcacgaggtccatttgtttttttgtcaattactttggattggaacttaataacgttttggcctttcgcgttacgaaatcacggattgaacgaatgcaactatggctcattattcatctttatggcttgatcagttttgaaatcgcattattatctcgtatgattggtttgaaggcttttagtggatgctatattccaattccattgttgctttgaagaaaggaacaatcaagttatatatgatttgctatgttctgacattgtaacctccttacattctgcttttcatttccactaatcacatggtttcatatcaacatgttacatgttatgtcttcttaagacgtggatgtgattgagaggacataacttgtaga

SEQ ID NO: 30675 - DNA, 780 bp, Arabidopsis thaliana
ttgtgctatttttgtcaattgcccaaaaatatatcgatgtgtttagatatagatataaccaagccacgttctattctgccatcattttggaaaaactattctggtgtaccatcttttattctgagtaccactcgagcatgtgcaattacatctctctccttaatgaataactgagggagaatttcaaaataaagagtaaatcatttagtaaaaaagaaaagaataacgaccgttaccaaaatcgcgaacctactctcctgccgacgtgattttctccgacttcgccgtcggcgacttgagcttcgatttcgccggcgatttgagctctaatttcaccggcgagttagcttccaagatagccgtagcttccaagccgataatctgctcccaaagtgagcttcctcttcaacggcaaaagtaaatccgatctcgttttcatatgtagattaatgtgaatttcttgttggagttagttgttaataacataaaattgttgtattgttcattctgggctgttgtatcgttttgaatcagagagtttagtgagtgttcaatcgaaatttacgatttgtgaaacccagaattgacgaactgggacaaatggtaaaactgagatataatagtataagcggtacaagtgttttattgagatacaataggacaggtggtacaaatggtattagtgagttataatataggtacaattatttctaaatctgaatgattacgtaattgtgtttttataatttatttgtaattacaggagacgatgaagaacaa

SEQ ID NO: 30676 - DNA, 1431 bp, Arabidopsis thaliana columbia
tacaggaaaaaacattaattcaattgttcgacgaagcaattgccatgaataattatactctcaagaatcctactgctatcggtagagagtatatggttgaaaatttcaatatagcattcaacatgaatattacttatggttttttcaaaaacaaacttgatgaattcaaaaaaagttacaagagatggaaagctcttacgcacaaaacaggcatcacggttgatcctaatacatctttcataaatgcatctaacgcatggtggacagaacaagagtttgtaagtacatcaaatatttgtattaatcaattataattcaaaatttttgtatcacgtatttatattattttaaaattacagggatgcaaattaacaaaaagcttgaaccgaaaaccacctgtattttgggacgtaatgcaacgatgtctcgtattacatgatgttcaatcacaatctcaacattttgctcgtcaaagaagagaacaattgatccacgagcatggagttgatgaagaaggtgaagattactcagatagtgacagtggtaacatgccacaaaccaaagttcctgaaacgctagaagaagaagaagtgtatcgtgttaccattgatgatgatgaaatattccaaaattctgccgctagaaggcaacaacgaggtaggccaaattttcagtcaaccgctagacgtggaagtagtgcacaaagatctggaggaagctcacaagtttctattggaagtggttcacgaggaagtcggcgacgacaatcctttgaaacaacaatacaagacagcatcattggcttcagagaattccaacgacaaagttttcaacaacttcgttctggtgcttttgaccaagatgattacgatgaatttaaaaaagcggaagcgatatttatcgcgctagatcttccctagcacactagatttcattgggcatgcattaatgcacttaaagagctagtattttggcgtaagtatttcattgatatagctgcaagcactgacgaggataaggtacaactgttagaagctatgagtggtgtttcacgcaacaaccaagatatgccaaaacagttaggttcagaccattcatttgggagtccagattcaggaggtatatcatctggaagtccatcttcagtgggtaataatttgggagggcaaaattcacccggtttttggggtcccatttatccacagtggggaacaccaccaaacgttgcacagtggggaacacaaccaaatactccatagtggggaacaccaccaaatgcacagtggagcacgtcaccaaatgttccacaatggggaatatcccaaatgctccacaatggcggcaaacagaaaattttcaacaaggtggttcaagcggaacgactcccacaaatgttcaatatggtttttcagttggaggtcaaggagatgg

SEQ ID NO: 30677 - DNA, 983 bp, Arabidopsis thaliana columbia
tgaaaggttctggttttttattgaaagaaatgaattaagtgaaagaagttttaaaggttttagtaatggcatataagggagactatatcctactgaacatttgtagatttccaagtcgccaatgttgactgatattttctcatcttctgcattttgtttaggttatttatcttctcgatggttaatgtgatttaagttttcaatgagggtaagctttcattatctacttttgtaggctaagattatcaaagattacttgagaagtttaaattttaaatgcataggtatgataaatgcatatttagattttatatcctttataccaacaacaatatttagaaatttgagattattttcaatattttaggtttaacttgatgttattggacaacaacattttagctaaaatacgttatatgtatgaaagaatctatcatacaagtaatgatatttaaaacgaatattgtcaagaagtagaaaattatataagatttgggaagagtaaacttttatttattgaaaaaactaactctttgtctttgtgttaagtgtgaaaataaaaaattattttcttagaagaccttgacaagtcacttacataaaagaagattgatgggtaactatacagtttggattcctcatggtgaaaactacaatatagcaaacaatcattttgctatgtttttaggcttgaatcttatacgaaaacagtgaatccttaaataacaatggttttagatgaatttgatcatccatagccaagatttggttaaaatatagaagaagattataatgatgaagaaaaaggttttattatattatgaatgctgtaaaaaatccaatttatgatggatataaagaaggtctttagaaccagtgttaaaaaatggatagacggtagctaggtggtcaacatgggcctagcgcgtagagcgattaatcagggccgagcagagcctaggcgttaatgtatttttatttag

SEQ ID NO: 30678 - DNA, 1033 bp, Arabidopsis thaliana columbia
  unsure (1)..(1033): unsure at all n locations
gagacatatggttactcaaactcatagaatcatcaatattcttactcatcacaacctcccaaacctaacccttaagcataagaatctaaaagatctcatatgcggcttagtaccatcacaccattagttaatactcatataattcatgaaataaatcaatgaatgcaagagtatatgatcatgcaaccaaacaagcaatcaatcacccaaataaacactcaaacctatcatttgccatatcacacgcttcgagactcacagagattcggttgaaggtttaaggttagcttcaacgattctcggacattccatggcttcccaatcttgatcccagctcaatttacctctcttcatcttgatctaacatctcttgatagaagcaaccttgattcatgaagctttactctgaacacacatttatgggacgggttcctcggaaggttctcgatcggacaggataacagcatggatttctcgctcatgggcaggaattctcgatcacggacatgatttcttcactcacggtcaaagaatcgcagtcacgggcagagtttttcaattgtgggcaagttttctctcgattacgggcgatttttatgagtcgggcagccattcggatcactctccattctcccatcaaatggctcgagtttggccaagcatttataggtggaacagcttgggctccaagcaaacgcatgtcatctggtggtgacccttgcgggacacatgtcgcccgcccgtgaagacacatatgctgcaggaatgggacgatgacacgtggaaggggaaacttcggctccaatcctcataattttggctccaagcaactttcttgggctccaagtaagccagtccacgtgtccatggcgcggtcaaagggcggtcaatgcccgacacgatannnttttcgcccgtggaacagcccgtattgcccaatcttgcccatctttgcccattattgccaaatagtaatatcttttgccctttgatggtttacactttttgggccatatgggaacgccatgtccca

SEQ ID NO: 30679 - DNA, 594 bp, Arabidopsis thaliana columbia
aacggccgccagtgtgctctaaagcgctgtttcccttccgtaaagtcatcgaagttttcttgaatcattccctgccgtgaaggacaaccggctgaatgataactttgacacagtcagctgtagacttgttaaacccaacccgcgaaatccgccccgaccctgctatatggtaactcacatagaccgttcagcgcactcgaatcatcgagctctgggaggtcgccggccacctcgcgatcaagacggaatacgtcaggccgaagattctcagggatgatatccagtgcatcttgccatccgcgtctgctgttaacagcaggtgattgtaggaaggtatggatagctcgctcgacaaatcccccgctccagaaccctctccgggttttagcattgttagcgggctgttcatgagcgtaacctgtccgtcccgatgctaatgacgaggtctggccgtgtgcatccgggccagatgatctcgccctcgcgaatagcggcctgagcggacaattggcgctgataccccatcttgaaatgtccaatatttggaagatgcttggttgtgaaatacctgtgagtttgttttgcacaatgaat

SEQ ID NO: 30680 - DNA, 421 bp, Arabidopsis thaliana columbia
tgtaattcacataagccacctatagttgctcactgaaagaaaggtccagcagagcatttggttactagatgaatttctccggtttaatgacgataaaacccggttaaagttaacctactcagtaattcataagcatccggtacatctaagcaaagtgccttatttgcagtaacagatcaagaattggaataagagacttctcgaataaacaagacattcttcaactttaacattaccattaccaatggaccgattacacttatcatagtgtcaagaagatgaaacaactataaaataccgagaaaatggtcaagattttgagcattcagggcaagggaaacaacctttggcttggcaattatcgcaatgcactgatcttgtgtttgatgagtcactgaaaccaaagaatcctcctgatttg

SEQ ID NO: 30681 - DNA, 582 bp, Arabidopsis thaliana columbia
ctatggtcatttgttctctatgaaacagagacattaagcagctatccatcgaactcaaaggtttgattaatcgcctgaaccgctggtttctcctaaatgaagaattcaactgtgtgtcacctacaagattaccactggttttccaagtccccagttccatctccgggaactcgggcatcaaaccgaacaaagtatctgaatggttagtttcgtaatatcctgagctttccccactcgtagatgcatctggattatccccatctgatagcattttctcatccccaaacttattttcattagcctttttgactcttactaatctgctaagcaagcaaccaggaggagattctggcttcacatcttcagaagaagattcaagaacgttatctttacctttggttacattctgcaactgcttagctatatatcccgtagcagcagtcgctgcgattaaccaaacatccatttcgtcctctcttgccttgaggaatcaagagagcaacccaaaaatacaacagtacaatctctccttcttcattccaattcaaacaccaatccaatgaaagaagttgaaagctcagg

SEQ ID NO: 30682 - DNA, 434 bp, Arabidopsis thaliana columbia
ccatcgaaatcaaggaactgaaaatcaacataccatctggaccaagagcggatcgctttcccgaatcgttcaagatcgagagaccatgcttgagcacaatctctgatcggcgaaccttgagcttacgaacgaggcacagatactcccaaacacctcctcctccattctcaacttgattctcgagtcggtttaactgtatctcctccgttttcgtcaccatctctctctctccgacttgctctgaaccttatgaaatttgtggctctgttagtagtggaaggtcgatcagggaagtctctgtccacaatgaggacattgacatgaaccggttcggtttaatattcgcaccgatctggtttagacttacagcatattgacgagcgaaacgctgcgtcttaacaaaacatctgattcattggtacatcaatttggtc

SEQ ID NO: 30683 - DNA, 634 bp, Arabidopsis thaliana columbia
ccctgcggattatgttcgaatgaatgcacgcggattacgtacggctatttgaaaaatgtaagcattttctcaagaacattaaaacaaacgtacggaaatagattgcttccgctttccacgtcatcaccgctacctcatgcgatggactgcccgagaagtgcttagggaagaaaaagacgtggctctcgcagatagagccgagccatactcatgaatcaatctcataagcagccatggccacattagcgtttagttttatcttctcacggtgacggacgttgaagccgtcaaagaaagtgatagctggtcacgaaactatatattgtctcctacaacgttgaaaaagaccctccgttatacaactctagaagcagataatatcgccacgcatgtctacaatctttgccgatcagagtcaatgacgaagccggttcaagtgaaggatttcgtcgccttataggatagctaggttgagttcatatgttcattcatccgggaaatgaagcaccaaaccgcaacaaagatagaaacaagaacgagaaacagacacctgtatatacatctgttaattgtgttgtctttattattggactaagaaatcattatatgagtactcaggactggagagaagaag

SEQ ID NO: 30684 - DNA, 462 bp, Arabidopsis thaliana columbia
tctttctaaaggcatcattctagggttgagatcggacggatgataattaagagtcatgtactatagtctataggatttacgacacgcaaattgctgagtatatcccctccgaagtttgattttgatgtgttagaaatatatggtgaagatatggagaaatacgtcgaaggtgatttctgatccgcccaaaaaaatagagaggtaatattctgatgtaatttacgaattagtttgataacttagcttatggtaagaatgctgtatacatacctttgcatgcttctctaatttgctgctagcgcattattaacagctccgcttgggattaaagacagtagtctcgaatttaatcagagagcattgctgtgactaatgtattcatggaagaaataagcgagcgtctggtctaattgagaagagaactgtcactagcggtcgtgcaagaggacaaagattcaagat

SEQ ID NO: 30685 - DNA, 548 bp, Arabidopsis thaliana columbia
aaccacttcatgataattataatcttccttctcttctgacgattgaattacatcttcttctgatagctgttctgatttttttctgtatacaaagtaaattcaaaggtgagagttgtgtcatcttttgctttttatatacttgttcaataagtcaaagttctttatgttgctgttgggttttagtttattggaatcaacttgcgaaatttgattacttttagcttcgagatcccttctattactcactggaacttagggtttgtgttacttggaaaagaatttggatctgttgggtctaaaggccttcctctctgttaagtggttttgtacttgggggaagccttaactttggaaatgcttgtactttgcagattagttgttcgataatatgcttcaatggttttgattttgtggttcggtatatgttatatgatcattatcagtgttttattggtgcctgcagtggcaaacatcggtattttaacccctctcgataatgaagtgtttcttgttctctggtggggatagagaggggacagaagacccta

SEQ ID NO: 30686 - DNA, 208 bp, Arabidopsis thaliana columbia
ataaattcacattcaaagcaaattcaccaccccaatcttctcaatggttcggtttcttttttcaattcttacattgtactaaaagctaaaaattcagactgatacgatacgaataggtttttgaaaatataaaaattaatcaatttccattaaagggctgaatagtctaaaactccatagagtacaagtcgctttattggatttagat

SEQ ID NO: 30687 - DNA, 552 bp, Arabidopsis thaliana columbia
ctttcttagtcatcaaataaggaccatcaaaatttcaattgcttaatgacaattgacaaaagcacaaatgtccatgttccaatttattgaccaatttaaaacgtttagaaatgttcacagaaaagtcagcaatgctaatctacaaccattgaaaacttggctattgaaaaacatggatgaaacataagtgtcattgacaaacttcaacctcatctgtgttcgctattacttgtttttgtattaatttctatgcgtgaaagtctacatacgctatcaattttttcaaaaagatggctcaaacaagaggacagtaagctcgtagagaagaacagaaacatctcaagagaccgtaatgatcaaattacaggttcatcatgaagcaaaaggagactatgatggtttgttcttctaccttgaaacagtttaacatctactaaacaaatcagacaagacacacaaagaatcttcaatttgtcagatatagctatcactacaatgatgaagcacttgagccaattgaagcagaaaacttaagatggaaacttgagaatt

SEQ ID NO: 30688 - DNA, 702 bp, Arabidopsis thaliana columbia
ccagtctttgcctttgagtggatcgaaataaaccgaacctttgatgtgattgcttgaactgaaattctccgtggccttctctaactcttcaaacgcgtaaatctccagaacgggttttcggggcgttgtggtgccgacggtgttgtgagaatccaagatggaaccgtcctgcgacccttcaaacgagattttcttgtcactcgtggttcggatgctcagactcagctgccgcgtctcggggtctttgttgctaatccacttttgcgtttgcgtttgaatctgcgtctctttcttccagtgtaagtaaccaaacaccatgagagtgacaagaccgcaaactccagcaatcgcgctgctcacagcgatcatgagcttcatctttgaccgtttcttcttggatggatttcttttccgggatccttgtttctctggtttgtgatcaagagggatgagagcaggcttgagtggaaccacaccagatttgttgtttgcagagacaatggcatcctctgttgtgttaaacctaaccgccaggcttgaaacgtgtcgcggacgcccaccggatacgtaacgagaaaactagcgtttgaaacgccttcttgtggacaagagcacctgatcgccaaacgcagtttaatgttgtcgccaagcttgtcttcggaaatatgtggattcttctctctgatagatctgcagtgaata

SEQ ID NO: 30689 - DNA, 564 bp, Arabidopsis thaliana columbia
aaaaaaaaaattgcaacttattatttcgatatttttaaattacaattagactaaccatttaaaagaaaattttgtgtataagatttttaatattattcacatatagttttttatggtatcagagctatatgtgatatggtaaactattcacattacagattggaatactcacccaagttatgtagccaacttcggtgtgcgtacctaaaaggttaatatgtggtcactagtactgtaaggaatgcctctacgaatggatttatgcatatttacttaaacagaaaataccaatcgcaatgagagacatacaaaaacataaagctttaaatatggaatcgttaggtgtcactcagaaatcagaatctccaacctggaaacttttacaagatgcgtttggttcctaatccaccagagaagagatatgatgtgattctctatgaacaatgtgcaaatattcttccgagtcaactctcgcagacaaagctcaataagtggcaaaactttcaacgattaactacaaagtacaaacacattttactccaatataaacgaatatttatttag

SEQ ID NO: 30690 - DNA, 505 bp, Arabidopsis thaliana columbia
atcttcagagccacagaagcatagagatggacaaagtcacagaggcaatatagtctactccatattgaaagactgcagctctcgggctgattttgaacgagataccatatcaattaatggcgggagtgtcaaaacaactgatagcaacaatgttgcatgtattcaagccaaagaccgcacaagtggaaggattgagattgctgcttgcgtgagagttgcagaggtattttgaatgtggaagtctgtatattaactatcttttagtttgtagatcgttgtctgctctagtttatagccaatcgattagttaatctagtaatttcttgcttcatttatcttctgttagtctactttgttggtaacatagaattctgtcaggttgctcaaataagaatgaagagtgaggggatcctttccacgtgatagatcttgctgttggcggtgaacttgaacttccaataaattactatgacactttaggtactctctcatacttttatgtgga

SEQ ID NO: 30691 - DNA, 501 bp, Arabidopsis thaliana columbia
gaatgattagacggaagaaagataagataatatgaaatgttaaaaagagaaaaaaaattgtgacgtggattgcatagaattgtgagtgagagaagttttgagagttgatgatccggcaacttgagaacacattgtttaaaagctgaggtggacatcttgagaggcctcaaagagtttcttttattagtagtaaatataaatcataactttaaagaaatcaatcttcaagaacccttcaaggactaccattggacttggtcttactcctcaagcctctcttttttcttttgtctaccggtttattaccccccctccatttatgggacatgttgtttacatatatcccccccctgcggttcggtatgaatttctcgtgctaaattatccgcttttatatttgcactgcgagacattaattataaagacaaagtagagacttcttccctatcgctatgaaaatccgctaaatatgctgaattaacctgccattctactcctcaa

SEQ ID NO: 30692 - DNA, 489 bp, Arabidopsis thaliana columbia
caataaaattggggacatattttataaacaaaaaacgtcagaaattttggatcaattatgggatcggcacaattaagtgatggacattataagataaaggcttttttaatagcttatgggattgagtacttatactgaattctcaagactgttttaccctcttcttcagaaaagctagaacaagatccttcaaaccaattaaacaataagacatcatgtctttttttttttttgaacaaagagatcatgtctctcatatacactaacaaaaggaaatccaaaacccagaattcgaaacatacacaaccaatgaagaagaacaacccgtgattgttatcgttcaaagaacgccataaacatttcaatctatcattttttttcttttttccccaaaaccaggccaaaggtttcatgaatttgattccaaactccaatttgagatttgaaagttgcagtttgaaggccaaatcgacccgcctttgaaattga

SEQ ID NO: 30693 - DNA, 462 bp, Arabidopsis thaliana columbia
gaaaggaacttgtacaaatgttaaaaggaaatgagccttttaaggcctttaaagattattattataccacaataaaactagtttcttctatgtttttcttagagattttaataaaggatatgaagaaaattacatcaagaaaaattacaccggcataaatgttcgtatccaaggttatcacactcgcaactaatgggcttattcatcacacctcctttcttaacacagtctttcatgcatgtcttgtttccgtcccggccgcatcctccgataaatatatccttccggacgcgtaggttagccgccatgggatccaatccagcttccacttctatatattgtcttatatcaaccacaagacttgttaaagtttgaacgaaagattctagttattcataattcatatcaacaagttttttttggttcaaagcaaaaaaaaaagacaaaacgtattataccttt

SEQ ID NO: 30694 - DNA, 511 bp, Arabidopsis thaliana columbia
aattttagttttttgttgtggttttttttcgttgttgtctattttagtgattgaaattcatttagaggactgattgtcaaaaaaataaaaaataatcatttagaggacttggatgagcagaagcagaaaattaaaaaaaaaataagcatgagaaaataagtaagcagaaatttgggtgaccaagaagcagacacgtgcagtggtctggtaaaggcaacagtgatcgagaagtgagcaagtgtccgttaagacagcgacacgtgctctcgagaccgtcgtgaaccacttgctctacttctttccctttttcgtcatttgttcttaatcgcagttattgaattcacaaaccacattaactaataactaatctgtacttattaaagttaatagagtatggtgtaataccacttgactaaaaaaatactactagattattaaaattgcaaacgatttgtactaattcttgaattaaattgtgcgtgtttttccatgaagtctagtgatgtgatgt

SEQ ID NO: 30695 - DNA, 564 bp, Arabidopsis thaliana columbia
gggtaccgagctcaacgacaccgtttggtcatcagaattcccaactctgaaactctgtttctcacatctccttctcttagcttccattctcctaagcgattgcatctctttccttttcctccattcctcttccatctccgccggtaacgacgtcgttctctctaaacccaccgtgtaattctcaggctcagccacagttgaatcgttgaatggtacagtgtccaaaacagaagaagatcgtttcagcttcctcggagtcttgtctactccgaatctaccacctaaagacaaaccaagattgagctcaatcgtactctcatcatcgcagtttgtttctccgccgtgaaagactcttccaccgccgttttcagacatgaaacctcgtaacagatctctcgggtatttatctatgtctagagaaagatttgtcgtaaccgtcatttctctgttccatgccctttgttgtctgcttgcttcacccatagattccgaaacaatagaaagaaagaaaaaaaaagttttgtgttttgttcttcgttgttataagatgatgaagaagaatga

SEQ ID NO: 30696 - DNA, 614 bp, Arabidopsis thaliana columbia
tagtaacggcagccagtgtgctctaaaggtaccattcattgcggtgccatagaaggtatctgagcgagttgacagcggagatggctctgagctggcaaggagtctcaacacggacgaaggaaggtgcgcctcgcataaggcagcaggtagcatcttatcagtctccgtcacgccgttttcagtgagcaaactgacccgcccacctctgctagaagccaaagtgagcttcaagtctccgccaatgtggatatgagacagcccgtctagcttctgacgatcatatgcgtgaagagccagcttgtcctctgtgttctttagcaccataagggattctctggccgtcgatagatagtcaaagggctcatgagaggacatcgagataactggggacaagaccgagaaccgtgcagagcgagcacggcgtgattgtgcaaatttcggctccaatgctacaatttcatgaccggtagataccattaaggtgaattcaccgtaagaactatggtataaaccgggtcctaaacttgtgaatatacttgacagaacattcgatttgagaatctggcgatgaaccggggaacttgaaggaagatacccgccctcggtcttgttgg

SEQ ID NO: 30697 - DNA, 838 bp, Arabidopsis thaliana columbia
ctcatcggctcagttgtatttaacactttagtatcattcttctcatttacaggtatcagtggaggagtggactcattgaatcaggctctttaggattagtgttcgtcgaattactagttggcagagttggttctgatgaggtcacattagattttccatctccgatgggttgaggattaatcaacggagactcctgaagcataaacacagagtaaattcaaatcacattgttcaaaacccttaaaaacacataaaggaatcgaattttacttgtttagtggttgaatttgaattatccttttgtgtttcttcatcaactagctcacgaaatctatcgaaggaggaagcattggagatgaacaaaatcaatagaagaagtgttaagaccgaacttctatccatcgcaataagagtcaaaccctaaattatgattcgttcgcttgatttattcgccggtggtgctcttgatttgatccaaagatacttactggatttgaaaatttgcagcagcagctcatatttcagggtatcagtggtccaaaacgcatcgcagatacgcagatcacagttcaggcgattgcgaaaatcaccaagcttagatttcacgcaaaggattggcaacacagtgggagagagatggatgatcgatgtaaacagagttgttgaaaccgaagatcgatgagagaagacgaagagtggctctggctcgtgtcgtgttggtcgcgtctgaaagaaattggatcaaatcgcagagccaaagtagtgtttcacgatccctccacctccacggagccgtcggagaattatttgggccgtaattttaaaagcgtattagttg

SEQ ID NO: 30698 - DNA, 547 bp, Arabidopsis thaliana columbia
catttgtatgagcttaatttgcaacatattgaatattagaattacctctatagcttgtccagcattaacatataacgtcagtgtataatagactaatagtggtggatttccagcgcatgcatacattagccactatatacttctttttaatatatggagcaccattagccgccattagatatcaatagtgtgctttattcatcactttgaaagtcagaatatagagatagtagtacttatttgtagcctgtatatcaaaccttattactgaaagagaaaactgcttaattatataatgtgtgtcatttaggttataattggtaatttgcgttttaaacctatctattgcagtttttagacttttataattttattcttctgatttttttttctatactttttatcaccacttgaattaactacacaacgacaataaatttatattgtccaccactaaattttaaattcaaataaagtcaacttatttcttgtttttttcgatcagaaagctaaaagcagctcatacaattttgtactcataatgatg

SEQ ID NO: 30699 - DNA, 439 bp, Arabidopsis thaliana columbia
ctacctcggagacattgatcgaatcagctttcttagaagcttcgagagcgaactctttggattttttagcggtttcggtgacgagattgacgtatgatgttgaagatgattgtagtgtgacggtttgtgatttcttcgctgcttcctctgcaaactacgtcgctctcatcgatagatcttccatcgttatctctgtgtgttgatctgcattcattcgtatctgaaagctctgcgagactcactatacgaaaggtaacgctacgtcaaacgcctagtgaaacttctgactcacgcagacgtgtttgacttttaagagtttattggtcacaccattcctaatttcctattgcgccaatggataattttggcgacgattgaaaataagggttataatgttatatacgaaatgtttcaagtttaagaagagtagtattcacat

SEQ ID NO: 30700 - DNA, 442 bp, Arabidopsis thaliana columbia
gaggatcccgtacaaactagaataatgattggaagagtttttttaattttttttttttttgtatttttggattgtagtatgataaaaatctggcttttaaaaaacacacttttatgaaaactaatttccttaattttgattggatgtttagtgagtttttttgaaatagcaaaaaccggttcattgaaaattactcccattccaagctttaatgatgcggaaattaagttatagttttgaatggtatagaaatggaaatagagaacaagaccaaaagagagattaaaggtttttgaggtaatatgcaaggacagttcatagtttatttgggcctttacagacaaaacatgggcctatgttaaggcataatatgataagactaaggcccatgtcgtcctacctgttcacctacatggccaaacccagtcgataaggttgtgac

SEQ ID NO: 30701 - DNA, 584 bp, Arabidopsis thaliana columbia
gtgagtttagaattgaagcaaatatagtttgttgcactgtgtataatatactaatgatattcaataaatggatatgcaaagcaagaaagatggtagcatgacacaactatacaagggacaatgattcgagaaaacgaattaattggaaaatttgtgtaaatcactagacatacctgtagattaaaaccagagatattgaaggaaaagagagaagcttcaagattctcataagactagaaagatctcacatagtataaagcaagaggcataatctagtgctacgcactttggagtgtcacctttttttttcctaacaacggtgaagattgaagattcgatgatcaacggcttgtttgcgagttcatgtgcttagtttgacaactgtaacacaagtcagcgccggtgagagccacgtgtgtggaagtatgagtttggttcccattgatttttttttttcttccaaacttataaccggatagtagtcatggacaagatcgaaccggttcttgggttaattagagtcattagacagtttttgagttaatgaatatactgtatatatatgtattgttataggatttagt

SEQ ID NO: 30702 - DNA, 548 bp, Arabidopsis thaliana columbia
ataagtgaagctcacgaaacccccaaaacaagatggcagccctttcaacgggaatccgagcacatcagggagctccggaattgccgagccaaaagtgttaggcaatgcttactcactctaacgagtcccacttggaaacggaagcttagaatcttgccaacatcttaaccacaaagagccatactaacaccaccaatcgcaaagagcaaaacagagacttcaacaaaatcttcgcaagattacacatagacacaaatctgatgtggttgagcttaggtaataacataagtgacaagaggagacagataaacttgaacgcaacaaagaggactcaagagagacatgccatggaaatgcacggagatggtataggcagcgacgggccgtccacaaacccatggtcaagcgtacgcctcaaatccatcctagacgaaactcaccagaacctacagaggcaaaactagtctcgggctaaaaccagtccacaaacaaagtaacacctttggcttgggaaatggaaagaggaagcttgcaagcagctagagaac

SEQ ID NO: 30703 - DNA, 481 bp, Arabidopsis thaliana columbia
agaatttggataaacgaatcaagatcaaaactaattcgactctaagaacaccaaaaggccactaatttctgggtttctgtagctcaatttccagaacaaattcgtaatcacacagtgtaaaggagacgccttttcaaaagggtatttcagaatcattcaaaagaagaagaatttgatcaatgatcgatccaaagagaaagaaaaaccaaatcacaaaccttcaaactcaatgttgtgactccaaaagtctatctggagagtcacgttcggttctagagccaagggcaaggcaaagagtggggagagttaaaatattagtgtgtgtgattttaaaagtattttgtgtagcagattacaaatgtgtgtatgacgatgagtttggatcattcctcaatctaatctatgtggctcacaacaaaggaagcagcagagcgactgaaattgacgaagaggatttgtcagacaaaagtcaattcacgat

SEQ ID NO: 30704 - DNA, 506 bp, Arabidopsis thaliana columbia
cttcgctttcctactacaacaccaacatttctcagaagcttctaattctgtgttcattctctgctctcaatcaatggtcttcaccatttattgaaaaatatacgtgaaaatctaatatttcagaaatttgataaaccatgcatatgatataactatcatttagtctaaagcctttaattttggacccatgagattttgatattacatgagatatttgaaaggatcgaggttttctcataaagaagttttttttttgtcggactcataaagaagttaatctcgtcacggaaaagatttcgtatttacttaagatttttagtgaaattttaaaaaaaaattaaatgcaaaggatgacgtaaaaaagtataagggtataaacgtaatttcgtaaggtcatagttgcagatgttagtgtctctgcctgccactagacggtgttgggtcggccgtcgcccagacagagtattgagagctttttgtcatttgtctttttcattttatttttg

SEQ ID NO: 30705 - DNA, 463 bp, Arabidopsis thaliana columbia
attgagactatcttacggtttaaaaagaattatagcttttgaaaccgattcattgtgtggttacttaacggagacggcctctcgctttctataattattgaatcattaaaacttaagataatggaactaaaagagttttgtacctttgtgaaactcaaaggatggatggagccatggaggtgatgtcataagtgacatgtggagttttataattggttgggtgaagcgtaagtcagctatagagattatgtaactccttgctaacatctcagaattatatatgctgaagtatgaagctcctcttaaagtaatatgatatgcctttgttaaaagagtgttaaaaaaataagggttcaagtaaaagtaaaactcaaatttgaaatctttggctcttcaatcttaagtacaacattataagggccactttctcaggctctgtgatcagatacctatttagaactat

SEQ ID NO: 30706 - DNA, 558 bp, Arabidopsis thaliana columbia
  unsure (1)..(558): unsure at all n locations
atgatgagatttgggaatgctcaaaaagccaggtaacaattactgttttgtcactggacggaatatggatagacaccaaatctggtgtaaggtttgcagtttcaagtatttcattttactcatatattatttctactgtctagtgaattgaaggaaacaatacaaaatctgaaggagtcagaacatgctgagaaagccgaatgtagtacacaagatgaatgctctgaaactgactcagaagggcatgcgaatgtatcgaatgataggccaaatgcatgtagctcaccgcaaacaccaaattcacttagatcagaacggttagcagatctggatgaagcaaatgatgatgtgccactaatttcatttctccagcctggaaaacgtctgttcaaaaggaaacaagtttcaggaaaacaagatgctgacactgatcagacgaagaaagatttctctgtagtagcagactctcagcagacagttgctggtcgaaagcgtattcgagtaatccctctgatgatganagtgagaccgaatatgagctgggatgcctaaagacag

SEQ ID NO: 30707 - DNA, 1104 bp, Arabidopsis thaliana columbia
cctagatgtttaattatttccgatgtctgatatattcttttatagtgaagtaatcaagtttaataaatgggattagaaaatgtaaaccttttctagtagctgcaactgaattaggagattaatgtgattgaacaaacattttctctaagctttaatttgatgtaacatttttataagttaatttctgccatccactactcgtttgcaggtattacaatgatctctatgtgtttgacctggaccaatacaaggtaaacctacattccattgaagtttccacccatttcaattcctagctctccagaactttctataccttttagtgaatatatttggtgtctatttgatagtggctagaaataaaacctaagcctggtgccatgtgggctacagctagaagtggcttccagttttttgattatcaagatgaggttagtttacaatgcacatgtctatatcatattctttaagtccaagcataaccatttacttataggaaagccttttatgctgcagatattcttatatggtggttattcaaaagaagtctcatccgagaagagctctgagaaaggaattgttcatgcagatttgtggtctcttgatcccaggacttgggaatggaacaaagtatgtaattctagatggcatcacttttaattatacttcttgtactgttttcatgataatactagtatcaccgggagagtaatacccacacttagttcatatatgttttgccatttttatcaattagaaatcttaacaacccagttgatttaacaattttctttctttgtaatgtaataatactttctgtactcaggtgaagaaaattgggatgccacctagctcccgtgccggattttcggtatgtgccacaaaaagcgtgctttgctgtttgggggtgtcgtggacatggaaatggaaggtcaggaaatggtatactagtatcatttttgtttatcagaatctgtaagctgaattattgacatctgtaattttttggcaggtgatgtaatgatgagtttattcttaaatgaactctatggcttccagttagataatcgtcgctggtaagaatccaatgttattatgagtatt

SEQ ID NO: 30708 - DNA, 514 bp, Arabidopsis thaliana columbia
tgacaaataatgggctctttctctaatagcccaatccgttttattgttcagttttggcgccatttagaccggaaaaaaattcgtcaatttaacgagcaagaagactacagaagaattatgaagacttcagcttccaaaatttcaacatagatatcaaattcaaattcgaaaaatgaaccaagccatacataagagaaaataaaggaaactctccagatatcatcaacagacagatacagagagtcaaggggcattgcatttcttattataactcaacaaaaataagctgaaacaatttgttttcgtgttctatgatgaaataaagccctacacaacaacatggaaacattgaattcagaataagcacaaaaacagagtgtgagagagagagagagagaataacctcaaatcaagggactgtgtccatgctttactgactcttccttgcaagcttagtccattcagtgtggtatgcccaggacgatcggtccctcatatgtatgagcccaaagag

SEQ ID NO: 30709 - DNA, 320 bp, Arabidopsis thaliana columbia
tccccaatccctacatcacggcatgatgttcggatgaggtgctttgttttttacatacgcctcgggactttaaccaacgacatttggttggaccaattaatagtaagtttaaccgacccaatgtccggtttctgttcagcttgataacttaccctggttggaacttggaaactgccagcattcagccatctggtatacacacgataggtggcaaaactacacagacttctctggagcatcattttaggatgatgtacgctaggcccatcttaatgtccatgagtgacttgctagacttgagatccaaggtagtcccagat

SEQ ID NO: 30710 - DNA, 986 bp, Arabidopsis thaliana columbia
gacttctgtttgttgtttgtatggttgcaagtgtgttgatttttggaggtcttgtggttgttttctggcatcgctgggaacacaaaaccggtgaagtggaagcaaatggcaacgacaaggtagatttgaatggagaagaaacccataatccatctgcagcagagcttaagggcttggcaatagaagaagatgtccagaattacaccactattcgttatggcaccagaccggcctttagaggtatacactacaaaattagcggtgtcaagtccagttatctcgtttttttatttataaaattatagaaactgaaatcattcggaacggtttgacacggtttcgttcggttcttgaatccgacttttggtgtagatatttggctcgattcggttaagttaaatctttgattggttcatgtaatatttttattttgtaattgcagagatatttgagtcattgaatgggaaatgggggagtgtggatgttggagtgatagtatgcggtccagcgactcttcagacgaccgtagccaaagaaatacggtcacatagcatctggcgatcggcgaatcatcctcttttccacttcaacagccacagtttcgatctctaacgatgctctcaaggccaaagaacattatggaaattcgaagatatattatcgatgcatataatttatataatcacagtctgtatgtattatggaaacaactttaactaatttttgagattgatgctacttcatgatagcaatttcttagttcttttgagttaataacttaatatataaatataatggtacaacaaccattacaatcgtcattataatcatcttatccatactcaatagtcaatactctcaccttccctaaagtgtggttgaaatcaaactttactctctctaggcctgattataattcttttttgtctacacatacaacttcatgagacttaattataattgcttagtgttcttttgtcgacatg

SEQ ID NO: 30711 - DNA, 585 bp, Arabidopsis thaliana columbia
cctagctttgtttaatatttatgcaagttgctgcggttgaggcagataaatccatttgtttgaccgcttttgatttaccattcacaaattatgtctatactggtgcggaccaaaaaaaatattagaagtgatgattgaaggagggaggctactcaactggattcggagaaaggcaggttgattcatggagttcttagttggagtcatcggatgtcgagcttcttcgaccaggtggtgtgtgggtctcttgttgcaatctttatctttcttgctggtctttgggcttattttaaactttagattttgggcttcatatccaattgtacttcatgggccaagtttttgggtatcaatgaaaatattgccaaaaaaaaatgtgaaatgaactatttttttcgaattataatcaacatcctcctggaaccaagtacaagaaaaaaataattatattttagaaaataatacaaaaggttttagtttagtaaaaaaatattagaaatgtgtttgcaaaatattaatgaaattttaacaatgagtttaccacaaattaatgaaaatttaagaaaaccaccataataaatcata

SEQ ID NO: 30712 - DNA, 482 bp, Arabidopsis thaliana columbia
ctagaggacctgtagctcatattattgaccttactattggcttgctctttgcgcatttcaaagaaagaatgcgaaatttgcattgctcaattatctgcaaaatttgaatgtcactcaaatatgttttgttaagttacggatgcaaagaactagcataaaagtttaaatgtcagtctataaagcattaataattaaggcagtagtaatcaacctcgtttctcgtcatatcatggacttcaaatagggttcccagaatctgaatgctaagcttctcaataccgagtacacctttcgaatcaccaaactcattggatctaccttcttcaacagattctagcaacataaagccaaactgaataacacttggaaccacatgctctctcccatatcggcactcactaacctaacacaatataacaaaatacttttttaatcgtctcgcaatgctgtcctggtatgatagaaagggctaaaagtccaaa

SEQ ID NO: 30713 - DNA, 1456 bp, Arabidopsis thaliana columbia
tctcattgggcctggttcgggttgggtatattctggcccgcccattccaagttgggagttgaggcatgggcttcgagcgaaggctcgggtctcatgtcttctagagtgggggagaccgcgtgaggctggttcacagagcagcgtccacctcccgctcttgacggtggaaggattacgggccattgccttccgagcccactatgacccaataagccgctccgattggaccatcacttttttattttctctttcttatttttttgtgtactctctcgtttttttcagtatttcaaaactggacaataatattaacgtttaactataaagaaagcaaaatcattagccctaattttgattagagataacattccaagaactatctaaaaagaaaaaaaaatgtgacaaaaggaagcttctgtgatgtttgttgcatcaaattattttacataattatttatttccaatcacatgagtaatattcattatgcctcctttttatgcaatatttctgttgttttgtgaagtactatcaactaacgataggaaaaatacaaaagtttaattataaatatgaaaggaaacaaaatatgtccaattataagggaataattattagttcgttggggaaatgtcagctagctcgtaaatgacatttattttggtatttaaaaacaaaataaacacactatcaaaatttgcataacatatagtaccaagtaatcaaccactgggtcgggttgataaagtttgggttgcgatcttctctttttattggtcgaacagtgacgtgtgcgctaacgctgtcctaactggccagaaagagacacggctggtgaacagaacccacacgtggcgatgtcttattgctggaaagatcctctcgtgtcccacgtgcctgattattctttcatatttcatctcctttaccgtaaaaattccaccattggatctcccaatttttccagtgatttttcttctcttcagccaaatgaattgagctcacaaaactgagagagtgagagattatggcgatgcctttggaaatggcgatgcttttgacgaaaacggtttggtttgctctgagcggctggattttaacatgtttgtccatcgccgacgagattgctggttcactcagaaaccgagaagttggtcctcctttacatctcgcatgatcacatttacattcttcacctctttcctagctcctactcgattttcagcttttttttttccggtgtgaatcgtcccaaaagattgaagagtttgggtttatagaggagataaatatataggtataggtgatttgtttgctcatagatatattatacgtgttaattatttgtgtgtgtcctgctgatttgagagaattataatatgtgtgtcaattgatgcttgtcttctggttcttattccaaaagtgaatactttcaactgtgatgaagatatgtgaatt

SEQ ID NO: 30714 - DNA, 615 bp, Arabidopsis thaliana columbia
gattcctgcagtctcaaatgctacaaagcggttcaggggcaacagattgcacctccttaagagatattgatatgatttttttgatggaaatgagaagaagaacttagcttccttacctgattttattgatggtacagaactacagaaaacaattgtttagtactttgcttttagacttgtctgatcattttgactagatattgtttttctccccttttcctttgtgacgagatcgtggccgtccattggctttttcaccaaaccatcacatcatagccgttcttatatacaaatcttcaacggctatctctcctagatttaaataataaaagggatacatttgttttctaagacatgatacgaaatgctctattattggaagcaagcaagtgcatcatcatggattaccaccagtacgtcgtcgtttctgagctgtgtgtttgcgtctctccacttatgatttcttaacattatcgttccttctccataattgtttttgcagttgacaatttgtattagggacaaatgaaacttaaattacttggaaagaataaaggcaatgatttctcatcactcttctatctgttttaataatcaagtaaccttgttatgcgt

SEQ ID NO: 30715 - DNA, 549 bp, Arabidopsis thaliana columbia
ctcttttgtttggactgtaaatggtagaacatctttgtaaatatttaagtaatgagatctcatcattctttgagattcataattgtccaaatgctctcagattttattcaaaggttaatagacaacgacatatgtttgttacatcatcatttccgggagggattcactcggtaacgtcgacaaaattgaacagatactttttgacttttgagagactgatttatagttttggcagtttcgcaaccaccaacgttgaaccactttaattgtgtcattgtattggtggcccaattcataactccattctaactaactcataccaatagttgtatcataaatctgcatattaattattttcatgtatcacgaaaattaagttgcatattagtattgctttttgctataaatagagttctctacaatgacagtaatggataaagttcttacatgaaaaatgagaaagcatggcaagtaaagtcgcaaaattacgtaaccaatagtttacacttaaaaaaaactgaagaatcatgtagcatggaataaaattac

SEQ ID NO: 30716 - DNA, 474 bp, Arabidopsis thaliana columbia
tgacaaacttggttaaatattaaaattatgtcaaattttctgaagtcataagtgtatttgtctaggtcgaattgacatggaagtttagaacactatatggctgttttgcttggtacaatttctctaattttcttatgaagtctcatgttcatgagtccaaagaatagagggtaaaaggctgatttatcttttaaagtcatgctcatgttcacggctattgttttttttttttttttctaaatcaaaattgatcacataataaaggtacaaaaatatgatccatcaagcagaaaacatttcaaacaacaaaccctcacaagagtaacccccttaaacctcctttacagtcaaagtgtctttgccacaaaactgaaattatgcctttttttgcgcaaacatattctcatacttaaactctttaccctctctctctgcttgtttcaccaggaatctgtacattccaaaaccaaatag

SEQ ID NO: 30717 - DNA, 591 bp, Arabidopsis thaliana columbia
tactcttcgtcttatcaactttcttcatcagaattgactcctccaggctacctccttgtaggattcatgccacccgttttcgttatccgaatggtactaaaccgtgcgattcgaccattgagcgtggataatgaggcagtattgaatattatatatatatttatccctctcacctaataaaataaatttcacaaggaaacttaattactgtactagtttagtaactttagtaactttgttaattttaagttttccctttttctcttataaaatactatatgaaaatctaaatttttatgcaattttcattttttgtaagtgattatgtagtttgatttctatcccaaagctagcacaagggaaatttggtatgaatggactggatttggatctgataacagacaaagcgttaggacctgattttatcaatattggccctttatcaagccatgtccaacattgaacccacaactcatttttgtgcttgatcctaaggtataataaaccttcaaaacatgcaagaaatttctggaggaaattaacataaatgagatcagtgggtggaaaaagtaatttctattgataaagtga

SEQ ID NO: 30718 - DNA, 459 bp, Arabidopsis thaliana columbia
  unsure (1)..(459): unsure at all n locations
gttcgagaaggtttagagaagctgagtgtgtgctaatatttgcagataacttactatctctatctaatcagaacacttttactaagaatgaggtctgtctatcttcaactgaattaaggacgatttgatgcttaacgatgcctacttaggcgaaaacagaatgacgagatacttatgtctcgattcgtagagtggacactgtggaaatttcgaaaaacatttttgccactattattgtgttggtacaaagatgctactgtagacgtggtttgtaccagaaatttgtgcgattcgggcttggagattcacccacttaagttatgtttcattgggtttgactctcttggggttggaatatccattttaatcgggcttcaccccaaaatacggtngctaaggaatttgtaatgttgtgacaaaccagctgattttaggtagctcgtagttaacactatctat

SEQ ID NO: 30719 - DNA, 501 bp, Arabidopsis thaliana columbia
tcgactcgatcccctttgaccctgaattagagagacgttgttcaagttattttgtttgaaagttacatgagtttccaacccaaaattgattggttatatgtggagtggatcatgtctcttatattatattcaaggtatttctcatctttcaaatgtggaacattacatgctacctaaggattatggaccttaatctcatggcccagtaatccttactttaatctctaacaacctctctcgagataatagctatacaacaattaatctcggagattttatgacacctctctcatggatccaaggtgtgggcccatcgcgaacttgattacagaagcatttggatcgtgctttgataccatattaaagttacataagttttcaacccaaaaccaattggctatatataagtagagtgactcatatctcttatatattacttaaaatcgctctcacttttcagatatgggacagtacatgtttcctaaggattataagttttat

SEQ ID NO: 30720 - DNA, 457 bp, Arabidopsis thaliana columbia
cctttacatattcatgttgtcgtacatatatcaacacatatataattacatctttttaagaacaataaactcataatttatgttatgttcccaattaatttatatattacttttgctttgatgttttatcatagtttttataacaagtattgttttgagtatatatgtaaaagactttatattcgggtatcttctttgttaaactaatgacaacctccattatgattctatttcccttaacacaggagaactcaatttgtattaattcatacacttttatgaaatatcttagggtagttattaacatatcactgggtcatggtttgggttatggagaaggttaatgggccataagatccataatattcgacattcgtctcaagtcaacactataatgactcgacttaaatcatttttttttgttaatactgataacagtaatagaatcatctagagt

SEQ ID NO: 30721 - DNA, 459 bp, Arabidopsis thaliana columbia
ttttgcttatattttatgtactttttgctttaaaaacaatatgagcaaactttatattctaataattctagaacaactataaaatattaacagagttataaaataaataagttatcataatgcatgtgcattataaacctacactacatttggtattatatttttgacattaaatgtaatttatctttattaggatataaacttggtcttgctttgcttgttctaggtgggacactattaaaaatattagccactaagattagagaacatcttacgtaccaataatcaaataatggggttacaatcagctttttctaagattacgagtaacctatttgggtactcatttagttctatatgatctattaatactactaccatatgtaatcatgttctctccccatttgcttctcactctcggtgttgtcctcaacacaatggctttggcatttgacggcg

SEQ ID NO: 30722 - DNA, 701 bp, Arabidopsis thaliana columbia
tcataaaatttgtcaggaacattagcaggtttaggagccaagaaaaacttccagtaaccagataaagacttaacaaacggcaagccgtcaacccaaaaagcagcgctatcaagagcagcttgaacagcatcatcattccaaacagcagattttgatacggtgagatccacgttgttccgctgataccagtacctcaaagcccctatacaatcacataaaattttcactctcccctgacttactgtttaataacaagtcaaaaccacactcaaaacgaagatgaattgcagctatacagaatttaaagacccgaactttagctaccatgagcacggaattggtaacaccagaagaatttcaattgaaaaggatcattctttacaaaccaattgttccaatttggtcaaaatctctcgattaagtaattgagtgagtataaagaagaaagcatgaagttttaggactgttgggtaccttggacggattcatggcaacgcaaggtgacatgaggatctctcttacgccatttgaaaagggtctgatcctcccaaactctatacccattttcagatggaagaatcatttgggtcgctaacgaaaccatgcttacttactttactagctgtgaatttaaggagaatgaatgattcgtcgcgtaaggttgccaaggaaggatcaaagtcgatcgatttttgtgtgat

SEQ ID NO: 30723 - DNA, 515 bp, Arabidopsis thaliana columbia
ttttttttggagtagacatcaccgtaaactctaatgagacactgagcccttgaacattgatattggagtgcaacactcggaggttgaagatgggattcggagaccatcacttcaagagttatcctagggttaagctcgaactcgaatcccatcgccacagtggacgggagtgatatgcgccagaaatacagtgatctcagctcagtgagcgacacaaatctcgggtgaatatgatggcgggttgaaacaacgtatctatcagcctctctgcaaagaggaaacatattcagaattcaccacacaatgcttattgttctataagaggtggaggaatcaacgttttaaaactactaaccgtctaatctgcacagaggcgttccctgcaatgagagtgagcccaacatgccacttatcgagcttgtgtccgttaatgtcaacaatactcatggaagtgagtccaaaccagagagtttccgaggtgtctacagtccagtgactgagcataggcgggatga

SEQ ID NO: 30724 - DNA, 662 bp, Arabidopsis thaliana columbia
gatctcaaatcaggtaataaactttctgaaagtttcagtagaagctctagcatgaacaaagtttcaggtagcccgaaacggcctcctagtgttgttgccaagctaatgggcttggaaacattaccgggttctcctttgagcagagacagattcaacatgtttgatgataacagtgatccattcgcaagatcattgagggaaaatagcctgaaccgttctcttcggttctctcctagctcgcccagaagcttaggaaaggaccctgctgcttcttcttcttctccaagatggagaagctctgagtttgttatgaaacccttatcaagtttgagatatcccattgaaccagctccttggaagcaaaccgagagaaaccggttttctcaaaagcaagcctgcaggtctgtgaaatctctgtcacagtcgatggagggaaaattgaaagatcttgaggttaaacattcgggaaaggatctcagagctcttaaagatatattagaggcaatgcaatcaaaaggtctctttgatactcgaaagcaacaacaatgctcaaacttggaagctcaaagagattacgaactggcagattctgaacttctaagcatgattcaatagacctgagaaccccggtgattccatccatatgagaggtcaattgtgat

SEQ ID NO: 30725 - DNA, 347 bp, Arabidopsis thaliana columbia
atgatgaaaattgtcgccaaaggaccacaataaagacgaacgactattttcttttaaatgaatgaaattgtgatatttatgatgttccaagaggcaaatcctattacgtcagccaatgaggttccttgcagagtggaagaatctatcataatattttaaataaaaatgaattatatatcacagaaaaagtacaataaaggcatataataaaaggaatctttactagtcggcgattccgtcagcttcggcctcaactctccacgcgaaacggctgacgtcgacgatattttataccttcttaatcatttaataacatatctggtaacaaatgtgtatgtggaaacacg

SEQ ID NO: 30726 - DNA, 837 bp, Arabidopsis thaliana columbia
ccgctatcgaagctgtacttcaggcataccaagcgtctccaaacacaaccggaattgtcaactctatcccttatattatttctggctctggaacttcctcattgccttgggagctgtgaatgcgggaaatgacggatcagtaggcgtaccgaagatgatattcgctccactcgaccttgtcaaaaagccgtttcagagaaaagacactgtttttccagtggatggtgtgaattctctttgcgagcttgtccatcgtgtccttcaaactcaagaagaagcttgctttgaggtattattactctcttacctgattcagtgcttaatgaaaataatgatattgatgtcgttgtaatgcccaagtcacttcaattttatatctctccattaaactttcaggaacttgctagagacagactgctggtggaactagccaaagaccgtgtcgtagatggttcacaggccaagtcatcatcaatgtcagcagcagctgtaggtgcttcacttggagctggtcttggccttgtcttggcagtagtaatgggtgctggttccgctttacgaaaaccctgattgtacttgatcaaccattccatctgttaatgttatatatttttctatgtacataactcccactaaagttcatgttttcgccattttctctagtcggtcaggtcatttttgtttaatccctcggccagaaccaatgtgtagtatcaagacgaaacagattgcaagtatcttattataagtctgacgtcataaatgataagtataaccttagtgttctgtctctggtaaaaacaagattgattgaaatcatcgggagcaacaagacgg

SEQ ID NO: 30727 - DNA, 481 bp, Arabidopsis thaliana columbia
gtctaggcaaaaactgaaaccaaagaatattttaatttttgccaatcgagttttcttattaacggaatattggtttggtttagatcggacaacttggtttggtccgaatgccaaactctaatattgtcattttaactacatacatgtatgacaaatgaatatagtacaaagtccaaaactgaggggtgttacacccatttgtgcaaagaagatgtaagacagcatcaaataaagaaaaagcggttaagaagggaatggtggagaagaagagataaaagtagaaaggagtaaatggccataaatggaggatatgagagcaagttagttttttttaccattgattaaccttgtgtgacccatctcctctttctcttctttttccttgcctctaactaaacgaggaaaacaagcaggagaggggattcatgttctgttctcgctgtaagatctctcttgcacaattttcttaaatgtgacaatt

SEQ ID NO: 30728 - DNA, 704 bp, Arabidopsis thaliana columbia
caaaaatcatgtaaaatgtaaaagttccattttaattatatttgaaatattaatgtccctataaatttatagacatattctttatatattttcttgttgttttctataaataaggattcctatcctaatattcatacaatagatatccataaataagactttatctatttttaattgatgtactaccaaaataagcaaaaggtaataatctcatttatttattactatatataagatatctttacatatacatatgtatgtgtaagatctagatagtgagagatcagaacaagagagagattaaaaaaaaaaatggagaagcaaatattttgtcaattcttagtcgtaatgatgttattgtcatcatctcaaattcagggagatttgaggaaaggatgttatgatttagggatcacagttttgatgggttgtccagattctattgacaagaagcttccagctcctccgacaccatccgaaggttgttgcactcttgtccgaaccatcggaatgaaatgtgtatgtgaaatcgtcaacaagaaaatcgaagacaccattgatatgcaaaagctcgtcaatgtcgccgcagcttgtggtcgtccccttgctcctggttcacaatgcggaagtgagtcgttgttcatttcattttttcatgtatccattaattaggaatctaagacattttaaccatgcaaaagata

SEQ ID NO: 30729 - DNA, 556 bp, Arabidopsis thaliana columbia
ttcatggggggaactaagaatcaacatttgatgctgacgcaaaccctatatctggcgaaacggaacagatgcattacgcaattcctgggatcattagagaataaaaaaccacgtcttcacgtgcgcgatgatcaatgatctcattagagacaccaattctcttgtgctatgaacagaacactctgtttttcagttggagtatttaaattacaagtaaaaccccaacttttattgtgctttacattttagccccaaagttcggttacgttaatattggacatcaaccaaaccgaatgcaacctggacccaaattggagtactcatcggattcactcacatccgatcgcttcatttggattttgtattgactcggatccaaattttgtagatttgattttgttcaaaagcaaattgcaaagagcgacaaataagaacacaaagaaacacatctccatttaactaattaacaaaagaacacacaagattcgttcgtttgtcagatggataggaattacattattacataacttgaaaaaacataaactataataagtac

SEQ ID NO: 30730 - DNA, 541 bp, Arabidopsis thaliana columbia
cacaagttcaaaagtattcaatgcttttgcgttaaattagctgttctaattcatataacgcatactatatattaacaaaaactctcctactatctttcaattgctttcacaaaacattttttctacttttccacaaattataaattcacgaatactatggtctatggctgctcgcgctctatgtaacttttggagctagagcttaaatggtatggtgtaaaaatgcaatggtctaaaggccatgttttatataaaaaaataatttaatgtttggcgtcaaagggatgaaaccattatatatatacgctactaattagtaaattcattatgcacgaaagaaagtcaaacatgattgataagtagcttcttgttttggtaacgtattttttttggatttaccaaatatagaccaccatattcatgattccaagtcatcaaaaaatgactacaaaatcatgattccaagtcttttatttgggaatatctaatcatatacgtaatcgtaatgtactaatgtggattggaaatgttagtgcaaaaa

SEQ ID NO: 30731 - DNA, 506 bp, Arabidopsis thaliana columbia
gactcactagcaaacatgttaaatacttcttgaatcctcccccaaacttaaactacacagtcccttgtgtagtagaagtctaaagacgagttcaagagacactaaaaaaaaacaaaaacagaaaatggtatatacaatgatggttgtctgtggtacctcagttgaaggcactggagacgtagcgtccacctcctctctggtgtaatcccatggaatactgggaccttgtagttgttctccctcctctggtgcgggatactcgatctccatgtcaatcgagtgctcaatcgcacactcataacgctttgttccccttgtgatcgagtattggtgaattttttttgaatttttatgaacgaaaccaaaaggtactcgaccctccaactggatctccacctatgagatggagtaaaattttttgaatttttactctatctccaggttacttctctattcctgagcaccacaaacacaaccaaacgaatcaaaaataacaagaaagaaaa

SEQ ID NO: 30732 - DNA, 693 bp, Arabidopsis thaliana columbia
tctcatttgctttctttttctatctagctaccattttttttaaaagaaaattatcgttctaatcatctttaaaatagtggaagtaatttttattttattttatcaagacaaatacaggtagaaaactatttgggatcattataaggatatatcatttcttcgaaatattggagcaatgtaaagatagataattcactccttagtaatgtatgcatctaaaaatagaggtttaacacacacccacacacagtagagattcaaaatagtaattccacatttgttcacacatcaaaataaagaaaacatttctaagatcataacaaatgtatttttatttgagatgtttgaaccaagctagtatattgtttacagaagaattttccaaaatctccgagtacatttagaacatataactaaataagatactcataggtatcaaataccaattgaaaatgaagaaatcggaaatgatcaccttcccacttcacagtttacactataatatggtaatctctagcagatgagctgcatgctacttaagcaaatcgacggttaagattaaaagctgcctttacacgcactttctcaatcctcattgtaattattcattttatttctcttaagtgttaactaataccttaacataattaatcattactattgggacagtgtcgtgtaacattagctgagata

SEQ ID NO: 30733 - DNA, 579 bp, Arabidopsis thaliana columbia
tggatctacatcatatcaaaatatataggtagcaatcaatataaaacattaaatatatgaacaatgtaagactatagtgttagatacaattgcgtacaaaaagttcaaaatatatatgagtcaggcccaactaagatatgaatgcccaataaagaactaagaaattggttgccagaactgtattcctatgggagtcttcttacttctgacttctaatttctaacaacaatttagttttttttttctctttttttttttttttttcttttggctgtcaaagatctaagttgtaatagttttgtcatttgatgaacttttcaattgtaatagctgactcaaaaatttacccaatcaccatcagtataccttatggtatgaatgcatgaatctatggtctaccaaccatcaatctttcacttgctccattacccaactatcaacatctactatgatatatgacagaaatggaaaacgaatataaattcgttcaataaaataaaaaatatatatgtagtagataaagttgtggttgacctatgaatgaatattggatagatgtgcaacaaatgtgtggagtgt

SEQ ID NO: 30734 - DNA, 555 bp, Arabidopsis thaliana columbia
caagtttcatctctctattcgccacgtcagaaaagaactgccgcgcgtgttgcgaactccataccgtccagacgcgccggtagccggagaagctgacaagatctcgccggttgcgagccagctttgacctcagctgagccaagaaccgtgccatcgtagaggattgtcatcttggtggaggagtaatggatggctgcgatgttagggttagtgacgtgtacggtaagcattagctctgcgtcgaggacagggaggtttagtttcagtgaggtaaggtctatggagataaggtggaatgttggatcttttggcttggcgcttaggagtgaagctgctgctgttgctgatgctgctccgattaaggctgagctccagctccattttaccttttggtcccttgaccccatctcgaaattacagtctatgcccttgcgatttgaagaggagaagttcgattttcaattgtgccgaccagaacgaggaagctatcgagatagagaagagttcagacaaacaaaactagcacaaaagtgtcaaaataccaaatgactacga

SEQ ID NO: 30735 - DNA, 536 bp, Arabidopsis thaliana columbia
tgcagagcttcaaaatcttaagcatcgtttcaagaatcatgtaatcacgttctcactcttcttaagatatttgcatatcatagacgccaagtgttacaagcaatcaatcaaatcatattctacatatattgtactaaaattcatctaaagagagacaggaacttcgctatgcttattgtggcaataatggtctgaccaatgcaaaaggacgatctgaattcacagacattaataattccaacacaactacttttttgggagggtgactcttaagaccaggctcaatcagccctgcaaagcaaagaatgacacaacacataatcagataaacttaaaaggatacgaatagcattgaatttaaggaattgaaagaagaaccatggtgtgttaccaggcttgagttttttcctccataaagttctctagctaaaggattagcagcccagtgattcacagccacccggcttgtcggttggaccctatgattttacttcggatgataaactacctgcttcattaaagaccagacgagatga

SEQ ID NO: 30736 - DNA, 547 bp, Arabidopsis thaliana columbia
ccgataataatttgggtgttccgatccatttataaattagaagacgacgaaatactcatactgacccaaaagtctttgttttgaattaatatccgacttatgtatttatacagttttgatgtgatctctaaccaaagttgaccataaggttattgcttgttattaccgttagaataaaagtttcattgacacttgctaaaatcaattattcaatgtatatattgctaattacatatcattaacggtctagttagatacatacaaggttttcggtgacaataaatttgtgtacagctggaatggcaatgatcaccaaaatatttatttcagtctatttagattcttcaccattgatgacaaattcataatcatattggtttcgttgactagaagttagaacacataaataatctaatggaatgtgattgaactgttgttatatgagtattcgaatttaacacctttaaatattgaataatatttaatatacaccacgatttgtgccgtgaactccgttacccgattcaaccagatgcattattatttt

SEQ ID NO: 30737 - DNA, 558 bp, Arabidopsis thaliana columbia
atataaagcactaattgctgagataaaaccattcatcaggtatatatgtaaaactattctcgagataaaacaagaaagtgaatacacaattttcttgcctctattcataagaaataaacctgttttcattgtgtttatttaacaccaaaagcactcaaaattgaggcttaacattcagacaaaccgtaactatagaacataagaaaaacctaactattgaagaggttgcattatatcacaagtttaaaacaccaaagctcaagctgagtagcaaaaataggtctcttcttccgccaccaaaacctcaacaggaacgtctacaaaagccttgaccgccacaacgaccaccggaaaaacgaccaccgacgaaaagaccacgaccaccaccaggaccaaagacaggagtaccaaaacggctataaggttcctcatcagaagatgatccatccacagacatgctctctgcctgggctttacagagccaattttaacttcattatttgacctaaacaatgagataacagatcatcttctctccattttatgaagcgaatccaa

SEQ ID NO: 30738 - DNA, 542 bp, Arabidopsis thaliana columbia
gaacaggaaaaaacaaactcagaaacattgaaaatgaagaagccagaagaggaatagtgttttagacggagattacataatagaggtggcgatcgaagaggcctaaggatcgaaggagaccgatgcattgattctccgcgccggcgcagcgtgttccgatcagaactgctcgtttcaccgtgcggaaaacacatccttggagattctccgataaaccagtgacggccagttcccgtggctgtgttcgtcgcattagaggtgaaacttgaaaggaaaagaaagttcagtgacgagagggattcctgacgagagtgatgacgactgaccagctagaccaaaccgaagttgaaatcagaataaatcgaaaatcaatttggagcgggaatcggaacgaattaagccttcttcagctatttcaagcgttctaatttttttttgattattagcaagttgatttctaaagagttttaaaatttaagattctaactccttgtggatttctatatttttactagattaaattattgtattatttgtgttga

SEQ ID NO: 30739 - DNA, 575 bp, Arabidopsis thaliana columbia
cctctaactttatctatttatcgaaatagtcctctatcgaacgaattatggggttcacaaaattcctgatttcgaatttggctgactatattatcgggatatcattaatgggaaattaataaaaatattattgggatgtcattccaaattgttttcatttatagaaaaaaagattataataaaatattatatttccattgcaaatttattttactgtatctaattcgtaatcctcgtataaaatgggacaaagattatagtatgttaaaaaagattataatataaaatcatacagtcgttactatgatggaaaattgcataattattttgctttctttttagggatctgtaaattttgtgatcttactttaatactttttctttgcctcgagaaaattatgtggaagttatatagtaaacatgaaaattcagaaaaaatgaacaccacaaaaattgtatgctatatatagttcttataaaatggattataacaaaaatgtctaagttgaattaaaagaagagaaaatataattctcttatccaagagggaccacagaaggagagtgatagagagc

SEQ ID NO: 30740 - DNA, 564 bp, Arabidopsis thaliana columbia
aacacgcaaaaatgatcaagctagattcgatttgttttctccacaaataagaagcatagtgactttaattttgtgatgtaaagtgtaaaatgctatttttcggttacgtaaagacatcttcgatggttacttctatattttcctttatttttgaaaaaactttattttggagatgatcattagaatacaattcttttaaaatagagttgaaaatggtttaaaacttttttttttttaagaagcttaaattacagcgtaaatacaatttaagacaatatttgcggtactctcctcacgctgatttttcatgctatcataattctgaatttctgatgtccacgaaaaaataaaaatataaaaataatatcttgtattagaaaattgagagagagagagaaaagattcttttctgacaaataatatcttatcatatccaactaagttaggctgttttttttcctttaattcctgacaaatagtttattgtaatttagaaatcgtaactactctctctttgtctttttttaataatagttattattttgcgcgatacaagtttgacat

SEQ ID NO: 30741 - DNA, 524 bp, Arabidopsis thaliana columbia
tgcctcataaataatggtgatgacaaatatatacaaacaaatctttagaggtttaccgtgtccattcccaaatgagttgtagctattctgtaaccgcgagacttcaaaactttgaaacattctttaggtgtgtcccaaaactcaatgtccagccatttctcagctcccatactcacatggcgatttccgttatacctacacatatataatatacattaacacacacatagcacggtaaatgaattcacacaatgcaatcaaaccttttttacatttcagtcaacaactaatggatcaatcttttcagatattacctatgactcttgtatcactgcatagttcaaaaaaccgtaacaattctccattctatctcgtatgaactaagaaaaaggaaagccaacttatgatcaatcttggactcagaaggaaaatgtaatagtagtgactcacaatcagcgtagattcaatgttttacggaaatttaagagtcctcacttatccccgatcctgtgatccaagaaaca

SEQ ID NO: 30742 - DNA, 456 bp, Arabidopsis thaliana columbia
gtttcttattttccaaagaaaagatatcatttcttatatttcttccaaattccaggcgttgtccttgtttctactgtcagcatactacaagtttctcggaggctttccccttgtcgctgttggtgcactgcttctctatgttggttgttaccaggtttgtactctagctcactgttagctgtggctacatagttttatctagcatattactaaagtctcagcgcgaacagatctcatttggacccatcagctggctaatggtgtcagagattttcccgctccgcacaagagggagagggatcagtcctgcaagtcctacaaactttggctccaatgcttattgtgacatttgaattttcacctttaaaggtaaattttccggtccctgctggtcaaacccttgaagttattagtaactcttatcaaaatatgcattctctgaaggaattccttgga

SEQ ID NO: 30743 - DNA, 610 bp, Arabidopsis thaliana columbia
atttgttccttttgactacactactcaccaagaacagagttgctaacacgggccttttccttccacgaatcccgaccttatcgttttcaaaccaagatcaaggtgagattcgcggatatcatctctctctttgctcttgtagtttctacgtttgttttgtataagatttcaggtaattcctctaaagtaagtaagcttagttttttgtatacgtaagtttttctaatgggattctttggcttgtgtacatataaagatgtagtagtaatgtatgctctgatgaatcactgattttgtctatttttctagttctagacgccgttttttcatatcaagatgtcttgtcgtttctagttgtcttgaaggagtctatcaacaactaaaaacaagtacaagttaaaaaggacactcacacttcaattttaatggttccttttgcttttgtcgaacctccaaaagctccgtaatactcgtataaaaaaagcccaaaactgtcccacatcagggaatgagatgacatcaacatagatagatgtcatcaactaacctaatctaaaattgaccaatctatatgagagaattcaataaaccaaaacaaaacaagtgtgta

SEQ ID NO: 30744 - DNA, 589 bp, Arabidopsis thaliana columbia
ttccgattttgatttcttttttggtttgagatacgtttccttacgggtttagaaatctcgatttttttttttctttatttattctcaatttccttattctaagcctaattgtgtataaataaaaaaaaaaggtatatgccggattcaaatttgggttgttttccattaaagagttttctaaaaccattctaatacactacatttatgataattaggggccctaaaattttttaatattttcgttatctgaaataaatatcttttttttgctaaataactaattagttttaagttggaatctcataatctaatatattggaatgttaccactctgacaacattaattagttctaatatatatatacatgctaaacttttctattgaaataaacaacgtgagatcaaagagtggaaaacaaaactaagacgagataaatagagttttttaaaaatttgtccgtaaggatatttgggccaaacatacacctgaaagagtagattaacaggctttatttcggtccatagtatcacttgaaacgtttacttatgcaagcaccgaagcacccaaattttgaccatccaaaagaga

SEQ ID NO: 30745 - DNA, 466 bp, Arabidopsis thaliana columbia
  unsure (1)..(466): unsure at all n locations
ctgtcagacacgcaaaaccctaactagatttcttgcaagcataagcaaataacgctaaatacatatttccctgataagagaacaactctcttctattcgtaaaacttgttgnaagatatacagatgaaatgagaaactggggatgaagatgatgacaattgaagagatttgattagattaaaaaaacagtgttgagatagaagaatattggtggggagagagatgattaaggaagagatattgagttcaagagaccatgaatgtactccttaagcttggcctttgtaatagnaccttcggttctgntcnatggaaattcgttagcgtcattgaagagaatgaaatgaggtaaacgataaacgttgaattccgctattaactttggattagcgtcgtgagtaatctttacaatcgtgaatttgtgancactattgtgagaagaaaaggaaacattttgagtttaaat

SEQ ID NO: 30746 - DNA, 547 bp, Arabidopsis thaliana columbia
ctactcgaagaagcacatgacagttatgatgaggaaattgtcactgaactacaaagtaacacaatcgaagatatctctaacaatgtctccactttgacggattggattaatgcatggcaaccctgatgatcatcatattggaatctgatgacaatgcatctgaatcgatcttgggtgcaatttgtatactgagattctgaagcacaataattcagcttatgtatgctttactttgatatttaatgaaaagaagaagtttctaatcttttaattgtttttgtgaaactttacaaatgtgtgaaaacttgattgttctgataaattatgattaagaaacattaatctggatcatacacatccttcaagctcaataagaaactcaaaagccaaagaaacaagtaagattaaacttgaagaagaaaataaaagtctctgtcttttctgattttgacgaggttaattgttctttctgtcattattctaagaattgtggttatgaaagattagcatctgatcatatatttttagcaattggtgaataattttg

SEQ ID NO: 30747 - DNA, 518 bp, Arabidopsis thaliana columbia
tcatatgaataaggattgaatgtttgctctaacttatcatcatatgccacatattcttattcaacctcatagcttcaactaaacaacagaaagatgttccccaaaaaagacatagtgccattttcacacacaagttatcaccattctaccataaactcaacagaaatgagaacacttgttaaacgttttcttttattcaactaaacaacagaaacgtgtaccctcaaacaagacacattgccatttccacacacaagttatcaccaatccaccttaaattcaacagaaatgagaacacttgttaaacttattatagaatcaacttagcaatagaaacgtgtaccctcaaagataaaatcagatttcagagaaatgtcaacctcaaagttcacatttttatcatcatacataatcatcagagacacttgcaaactctggtctaagccaaatcacaacattacaagaagtgaagattaagagctacccaagacagagaggaagtgagaccacggtttagt

SEQ ID NO: 30748 - DNA, 974 bp, Arabidopsis thaliana columbia
ggcattatcactagttggagatgatcaccatcctcaatatccgtatgcacacaacattgctagaggatcaggtttattctctaataaatcattatacaatcccttttttgagatgattccttcttcttcttcttcgtcttcctcgctgagagatcttcgccgtattggaaaaatacggctaacttgggaggaatcggttaacttgtgggctgaaggagaggttgattatgggagaattagggttagtgggtcgagtttcttgaatgcggatgagctcacatacttggatgattccatggtggcttgtacaatggaatccttccaagatggacctctcaagggattttgtttggataaatttatttctggtcaacatcttaaagtctttgggagacaaaggtcaacttcatcatctgctccctcaccttcaggtaacacacatacataaattcgtttagtaataaattatggctacaaatgaaattatggctacacacatatataagttcaatgaacctctctaatcagcaagatatttattattttttcattgatcttaatgtatctatgaaagtttctgatcttatagagcaagaaaaaaaaaaaagcctttagtgatagatatacaaaattaaaaaggaagaacaaggcaactctctaatcccatattttgtttcaattaatgtggcaagtttggttgatcaataatcgtttggtgataactaaagtaaagaggaaaatcaatgcaactcataatatgtttgtttaaccttttcagtaaatgtggctggtgtgtttgatcgacctcagcttcaactttcagaacccatttataaatgtaagtttttccgaatcttataccttcaaatttgcattattcttttatattgttaacatgtgatctaatgctactacagcaatatcaacattggagttccaagacccatcggagcattgcttaagtaaattgcgag

SEQ ID NO: 30749 - DNA, 513 bp, Arabidopsis thaliana columbia
cccggtacgtagaagacgaaaataagcccgccttcgtcgcagttcatggaacattgaaatcttctattatacaaaaggtgaacaaaaacaacgatttgttgtaactctggatacgagacgagattcttcttcgtactactcacttaatattattgtgttaaatcgtggagtcgtatgtaaattagttggggattctcatcttaatgtcagcaatttgtgttgtgtgtatcacatagaggctaactaattcttatttcaacctgttatcactagatagggtattaggtttaccggatggccaattgaaccaaacttgtgttttgggtcaaaatagtagttttctgctatgaatcaaggtgatcatatacaatttgctggtgggtgaatattgatattacaatagcgaattaaggaaaagtctttgtagaagacaagagtatgagaaatgcatgtgaggtatcattccatgactcgaagcctagtacattgacgacattgatatgactgatggtg

SEQ ID NO: 30750 - DNA, 582 bp, Arabidopsis thaliana columbia
gacttacaacgatagtaatacaaatcctggtcgattaacaatctaatagtcgatcaatcatcactgctagaaacagtgccgcctaacagtacccctgaaaccataaatgggtttctagttaggtaaacaatataaattagtaactacaacataccaatgtaaggacgtgaatttatatttgtcctatcaatctttaattttataagaatgaattagtatgaatcaatggtaaattaattgcagggatactttgattaataatgtcatattacaagatcttcataatatctcgaatggccatgcatctcgcatctaccctaaaagtttatatacaatgcatgctttttctcaattattgtcaaatttatattctttctctaatagaaaaaaaccttttaaatcaccaattgacttttcttttcgaaataatggaatcatatatattgacacctaataaattaaaatgattaagaaaaacttaatagtgaagaattccgtttctgttacgagtgaggaggagctctatggccaaatttaatatcaagaaattggaaatattaaaatgaatacgaataaatgttt

SEQ ID NO: 30751 - DNA, 448 bp, Arabidopsis thaliana columbia
cctgaatgtaaaacaccatcttctctgggattagattcaagttttttatttcagtcgtagaataaattacaattgctttttaatcttttgacttccatttcaagatgtccgaaatttcagttctacatttagactattttcatacattttttcttaaaacatgtccttgacaatcattcattattcacataaccataacaagtcaatcagtttatagaaaaagtcatctgataggatctaaacgtggactcactcactcagaacagatgagttgatcctaaaatttggggattctcgcggcttctggcactggtctccgattacgtcacttcccgaatgatttcatcttggactcatagcgcgtataccaagagtcaatgcccaacaatctcactcctttcaaggcgtttccgatcattgttacgttgcacagaacattgtctctatg

SEQ ID NO: 30752 - DNA, 478 bp, Arabidopsis thaliana columbia
  unsure (1)..(478): unsure at all n locations
ttcgcatcgcaatgcctattgatcaaatagtgctattttgaaagttaaagagacatgtgttattattgttaataaaacttgttttagtgttattttaaggaatttctctataaattacctacgctaactaaaatattaaatatcatccaaaattatttagactactagctgaatttgacagtgatatgtttaaatgagagtttttgggatagtgtatttcgatgcactcggggttgtgtctttccaaaatgtcatctgatatcagaataatactttttttggggtgcaaattatatgtaaacttgttaatctaaacaaaatgtccaaaaccaatacctattagcctacaactgcaattcatacataacccttggtccgtgattttttagtgggccctacaaacaccactanaaataacacccacctagttgaacaaatgactgaaacacctctgtcacgtttacgacaacaagtacag

SEQ ID NO: 30753 - DNA, 507 bp, Arabidopsis thaliana columbia
gtgctgcttgaagtctccacacctagagatatcaaattagattgaatgcaaacaacacttaagcaatgctgaaactagaagaaacaagattcaacaacaaagagaacctaaagttaatatcagcactgaattgggaaacaaaaaaatgccagagaggtaaagttacgtcttctgcaagatcttcctttggcattttcttgactatctcaggcggatgaccactgaatgtattgtaactgcacaattatattataatgaaatcttcagcagatcccataacatctttgtttgaccatatagaaggttggaatatactaactaacccagattcttgatcaaagtacagtcgagcttgttcctcccggcttccttcgtcaattgaccaccaacctaatagcctgaacaagtgaattgattgattgattttttgttagtactacattttgtaaattaaaacttttgggaaaatagacagacgtgtttgtcccgtggaccatggtgcaagaa

SEQ ID NO: 30754 - DNA, 1542 bp, Arabidopsis thaliana columbia
tgtgacgttggtctccaccatattggcatagcagctaacggaggccagcaatctacatgtatgtcatgctattattatgtagaggaaggactgaagagggaaaaacctatatgagccaacttgaatgggctaaagacaccaccatggctgaaacgtgttggaaacaaatcaaaacttcactaaatgggattagagtggcgagaaaaagattgtacatgatatcacttcgcaacatgaaaccccccgacgtgtgccatccaagagatttggacaacacatgtgagaaatgttttttctacaaacaaatgtttaagtttatttttatggtataacttaaacaaaacatttagagagttggaaactgtttttaaaaaattccctataatgtttgagcagtgaactatcacaaagactcaaaacaaagttattactcttatttcttttgctttaatgtgtgtctttccttgctgttgtaaggaaatttatatttacaataaaatcaaacttttaattaattatctaagcatatcgtactttcaatgttaatattgttataatccaactctttttggctaattcgcgaagagacgttgaaaagtgaaatcttcccaaaaccaaagagtagtttctaagattttaacagagacacaaagagaaaaaacaaatgggcgggttcatattgggccaaaattaacaatggcaacgatgtgtaaaataacttcgtcgttagtctctgttcttcgctatcctctgcagcaaccgcttaatacgagagagagagagagatttccattgtatttttaatttaaaataaaatatataaaaacaagaccaatgtaacaaatgcattgcttagatatatataactctaaaaaatattcttacaagatagtaagtttggtctattgtcctataaattctagcatataactggtaacaatatgaaaaaaaaatgtaaaactatacatagattacaaaaatgtagaaatcaaaagataagattagcaaataacaaagatattccctttttaatcaaagatcagtaaaaaaaatcgaagttataattacatactaacaaaaccaaaaacaaaaccaaaaacaacgcgggtctcctccctagtcttagtaacgaaggagtgattttaggatttgataatatccactaaacaagtaaatatttgctataactatcaataaagtgggcccccactggttcagtcttcagtgtgtcaaataattgtggagcccggttgtcttcggtgagatcaaccaagtcggtacagattcgaaccggaaaattgccaagaggttcaagcgtgtgcatgatgagttcagatttaagagacaactttatgaatcaaagtaacaaaattggtcaaaatagaaaactcacagaacaaaaaatgagacaaattcttggctcaaatctaataatacagtgatctctgtgtcaagaatttcataagaagcaaagtgagagcgggttcaaattcagagaagcatctcagcgatctgaacagcattcagagcagctcctttgcg

SEQ ID NO: 30755 - DNA, 583 bp, Arabidopsis thaliana columbia
  unsure (1)..(583): unsure at all n locations
tgtatagtatgatcttactttgtagattctgtctttctctattgtttttgtagtggagaaagggtctaaagctaagtggtgaagctgctgttgataaatgtactttagacggtgtacggcgtttccgagagatgctaagcgcaactgttcatgatgtgttatactacatgagccccatttattgtcaggctataattgattcggtattgatatatcccaaattttatgctctctctgtcttcttaccaaattgaaacctattcgtgattgagtttttagattttgtgacaccagaaaaccttaatagatattgttactttaattttctgtattgttataactgataatcttgtttagtatgaaaagtgaattgtgctccattttcgttttgcaggtttcaaagcaactgaatagactgtatctaacatttttaaagcggaatccagactatgtcggacaggtgccatcttgttttgtctttcattcaattgttgactggtgtaagcttgcatgaagttggaattcatggtctgttcatggacatattacagatttccatttatggacaatcntctggggagtg

SEQ ID NO: 30756 - DNA, 563 bp, Arabidopsis thaliana columbia
  unsure (1)..(563): unsure at all n locations
tgagaatgtgacaatgtcatccatttaatacaacttttattattgttcagaaaaatcataaataaacaatattcatatgctgatgctgcaaaactaatttatttatttgtatgtcgaccttagtctaaccacatgctcttaatgtgatgctcgattcgtttggttcatttataagatatgttcacaagaaaatatagaggaaaacttcatacatgtttttacgtttgtttaatacatttatatatgttaacaacttaacatgctctgtgactaaaaaaacttatacatgcgtgcatgcgtagataatggcaaataaaataactataacctttttacttcgtgaaaaggaaagacaaacatacgtgactgtgtttggcatataattttggtttgttttaccaaaaaaaatattatatttataattttggtttgattcggttatacgaaattcgagcttttggttttttcggttttcaactatgaataccgaaattaaattttgggttgagagctgtttggtttcggatataacataactanaacaacatctatttttcagtttt

SEQ ID NO: 30757 - DNA, 500 bp, Arabidopsis thaliana columbia
ataaagagcatccaacctatcaaaatatggcaacagtggtagaacttcaaccggctgcaagtttttattggtggcatgaactggtcgagacttgcatgcctcaaaggatgcttcaatatccttgatttgtctctctctagagaccaaagacaaataaaccattagacctttattattctcactttccttagaaatacacatatttgagaaacaacacacctattgttaagattgtgcaagatgttgatgcctcctttcatctctcgcagttcctttgcttgcttctccgttagcgactacacaaggtataacataggaaattggaaactgtctctagaagctatacatggcaaaacaaatttccaacaagcgagatggatagagtacctgtcttgccgattcgttattaatagaagaaatgtattgtgttttgacgagccaagacatgcctttatcagtaggtctttctttcctccggatgccatctttcttaataggtg

SEQ ID NO: 30758 - DNA, 360 bp, Arabidopsis thaliana columbia
atctgcatcggcatgtgtggaccatgagggatccaagtaaaggtaaaaaatatttcccgctaaacatgagactggcattctctaagaggttgttgtaaccagttagggacttagggcgttacaaatatgaaagatttggtctctcatttaaacccatatgcgggttcattaagataaacgcttcccacagtggatcttgtggtgattccttctttttgcttgtcgaaattggagtttttttttttttgtgttggattgtggattatttgaatggaagatctttgacccaccaaaccgacctttcgcttcgtatggtggacagtggatgtctttatagaatacgtgtctgatggaggggtg

SEQ ID NO: 30759 - DNA, 444 bp, Arabidopsis thaliana columbia
tgaccatttttaaatttaaaacttgaaaagttaaacaaattcgaacaaaaattatgttaataattaattttgacccattttaaatttataacttaaaaagttagaacaaattcgaacaaaaaatatggactttgtttatatatttgatttacagtgtaatttacaataaagttacattattttcatgaaatgtttatggactttctatacattttttttctaaatacttgcattaatttacttgtcgaattacatccaatttgttttctctaaatattggaaactatcaaactctccatcaatttgaatttaattacttatagacttaagatctagttctagggtttattatggggaaaatgtagaaaaatgcgtcaactatcaaatttgggacgaaaaacatgaacttttgaaatctcatttaaatcgtaaagtttggttgac

SEQ ID NO: 30760 - DNA, 489 bp, Arabidopsis thaliana columbia
gctaactaaatttgttgataattgattgcatggttaggatcaaaaagagctggagttgtcaaggctgaaagagcagattgacaaagaaaaggtaagatactactctcacatattcttgcaaaggctgatacttgtttgtgtcctaatctccaatttcctgggttcagctgtctctttcagttctccaaagacaggctgaaacagagatccaaaaggcccaaatgcttatctcagagaaggaagttgaattgcaagaagctgaggaaagtctttcaggattgcaagaggtagcttaatactgcttcgtaattactgttttgtcttggttacagtttatactatcaagtattaatacaattccagagccagagccataattgcactcttaccactgaaagccaagactattaaagtgattttcgtcttcaggttgtgattgaatattgcggagatggtaacgatgtggaagtgactggcagtttacatggg

SEQ ID NO: 30761 - DNA, 455 bp, Arabidopsis thaliana columbia
catatatatatatatatctatatatatattacacaaatattataaataatattaaaacattcttaagtaacactctacacacatcctctccaagatcataaatatcacaactcattgccctattttatgcttaacattctcacaggataccaacgcataatatatctcttttcataaggttctccttctacattcagtccgttccattagaaccgcatgttctctacgtgtatctgattttctattacgcgtgagtatgtgtcatcctgtgtactagacgttgatacttagcttcgtatatgggtcttgtgatcctctagatatttacgtagttctgagaaccatgaacttgttagcgagtctaaattcgatattgtcattagttcattgtgttctgtatcagatatattacagatgaatcacttcacatgaagatggtaggagggccaagagtg

SEQ ID NO: 30762 - DNA, 437 bp, Arabidopsis thaliana columbia
cctgtcacattttgagaacaacggcgaaaacaatgccggtggttgctgagtacgcgaagtcgaatcggtcgtcgtgtgaggtcatgttcgaacaagatagctgtgaaatccgcttaggttagggttgattagcaaaggacgtggcggtgttgacatgaccaggtggcaccatttcgattgttttccgactgattctgagtcgattgcttccgttgatgatattctaggcttatccgctttagaggttaggggttccgatacatttctgtacattggactccctaggttcttgggcgtctaaagctgttcactttcggttacttgtgttaacgcttgtgcttatggttacagttagaagatcaagatgccttgacgaaattggtggaacaatgtggtcaagtacctgcgcataaagtcagacttcggaaagtgatgct

SEQ ID NO: 30763 - DNA, 537 bp, Arabidopsis thaliana columbia
taacgagttgttgaaacttgtgaatcagtctaactttaaatttctatagcaaacaaagtctacagattctgtttgaaatggagtactcattcgcttatgcaatgtttgattagcaattactcgtctatctaaatctggataaaaactactaaactggtattaaggtatcacccaaataaatatataatgagctcactgacaaaattgacccaaacaaacaacaaactatatcaaatttgtttccttaaattatagaagagtattgttcagctatactccatttgtatacaagtatggttcatgctactttgttttggtaaaaatggttttgatactttttacacaaagtttaaaaaatgatatgctactatacccttgcaaaatttaattgacttttttgaattttattctattgatttgattacataaaaaaattacactaaactttacaaaaattagtaaattactgctaattttgaatttattttggaatattgaaatggatataatatataatatagcaggggcacaagtggt

SEQ ID NO: 30764 - DNA, 512 bp, Arabidopsis thaliana columbia
ggtatgggtttcatttgaggtagattcagcagattgcttgagaggtccattagagatagatgcaccagctccatctgaatctatgacactttgttggctattatcaacaggttgtgtattctgtgatgcctttttagctttttctgctgcttttcgtttacgaaactgctcaagctgaaaatccagaaattaaacgataagaaacacacaattttacgcattcatctttaaaaaaaacaagctttttgtcgaataaatctcaattctgattgcatgcgttaggacatcaatctcaattccaatataaacaacccacctaaaaaaaatgatcaattgactcagcaccgacaaattttaggggcaaattcaaagtaacgagagaatcaaacaaaagatgatgattatgatgatgatgatctaccttacggcgtccagcttcaacgtcctcttgcctccgggaactagtagctgatgccattgaaaaatactcgaaatctcgcagagggaaatgt

SEQ ID NO: 30765 - DNA, 968 bp, Arabidopsis thaliana columbia
gcatctagaaacacttttcaacacaaaatataatattaataagaaatatccagcaaacattcgtttctaaaacatagtatagaattaatttgagttcataacatataattctcatagaatagaaagaagtgcataacatataattctcatataataaaaaggagtaattataatcatcaaaatcttcggaagtagaccaaatcacatgtcttcttcaggctctgcaacatcattttgtcctaaatgaaaccagaagagtagacaaacaatacactcgcacacggagaacccaaccatagctagaattggcactattggatagagcacaataaaagccctaaattagacagcagaggaaaatttaacgttagcagagacggtacggactgagagtctccggtgaaagtttgcatagtcgacatcgttgaaagggaattcagactgagattcgtcgttggtgagtgagacgacagtggagagagattagacagcagagggagatttgacgttagcatggatggtgtaagtgtgcaagagctagagaatcccgaggtatagtgagagattttgcatagtcgacgaaggcgttgaaagagaattcagactgagatttgtcgttggtggctgaaacgacggtggagggagatttgacgttagcagggacgataaggattgagagcctctggtggaattttgcatagtcgacggaggcgttgaaagagaatccatgactgctatgttttgtttttttttctgcgaataaacgaacaaatactgtacaaaaaccaaaccctttctctcttcaaaaaccctcatgcttctctcttaaagaaacttagtcgccgctgattgtgttatcggttctggtggctcttttaacaccaaaatcggaattttttagttttttcgagctgtattttcgtttgccttcgtttatgctacatatagtttttttcttaacatatatg

SEQ ID NO: 30766 - DNA, 1369 bp, Arabidopsis thaliana columbia
tgtgtattatttcagttcaatatgaaggatagttcagttagactcgcctacgaagctcagccacgtcctaaagccatcgcctctcttgcaggggaaaccattgtcaaagttgcatgtggaacaaatcatactggtagaaaccatatttctttctctctctatcctcaatctttacctttcaggggagctaattactcattctgataattaaaatttctcgtaatcagtggccgtagatgagaatggatatggtgacacgtaagtgacttatctgtgcaggattttggttaatttgaactggtccttctatgtgtgttatctctgatgcatcattttttgaaacatatcacaggtggggatttggtggatatggaaggttggtactagctcatgtttaatatttgtaaatggaaactaacttcctcttcctcatgagatgtttggttgccaatttcaggcttggacatagggagcagaaagatgagtgggctccacgccgtattgatgtgtttcagaggaataatgttttgcctcctaatgccattctttctgctggttctgcaaactccgcttgtacagctggcaagtgactttaacctgaactgtctttttgcttcttgtgttagtcttctggtcctatattaaaacgaaatttaacttgtttgggttgtcaggtggtggacagttatatatgtggggaaagataaagaacaatggtgatgattggatgtaccctaaaccgatgatggatttaaggtttgtttaaaacagattccaccgattgatatattgcttttgatttgatgattaatgtaaaattattctttcctcatacagtggttggaacttgcgttggatggattcaggaagcatgcatcattttgttggtgccgacagttcttgcataagttggggtcatgctcagtatggagaacttggttatggccccaacggtcaaaagtatgccacaccataagtaacttttagttttataaccacatacgactatcattataaaccatgcttctttctcgtttcagatcctctgcagcacctaagaaggtggatatgctcgagggaatgcatgtaatggggtgagttctcacttctcaagtgttcgcctcagagaataataattggatgtttttctaaattccctgtgaatgtttttatgtagtgtggcatgcggtttttgccattcaatggtcattgttgacagaacagatatcgctgataggcttgagcaggtaactaaagcaagagagcctttaaatattcgagccctcaatagaaagctgaagagatatatttcttcaaggtttggtatccctcatctgtatccttacactgtttaatttgtctgcagctc

SEQ ID NO: 30767 - DNA, 447 bp, Arabidopsis thaliana columbia
tgatagatttgtttaggtttagaaattatcttgtgaaaaaatcaatttcattaagttatcgaaaagacacagtcatctgaaacgtcaatgcatgcattcgatgacaacaacacaaaagattaggtttggaagtggagactatgtttaatcgatctcttatcagtttgtcttggtgagatttgatataggaacaggtgggaggcgatcactttcacttttttcggtaagaaaaaaccggatttgctcgaaaggcaaggagaggatttggtgactctactcaaaatgtatcatcataaatctgttgaatgagataagattttgagcgagagttgggttagagatatgtatgttctcgattgacggttttctccgtttgtatgttgattgtgtcatgaaggtttcacctaatatcactcgagatttttggaagagaaaactttttatgga

SEQ ID NO: 30768 - DNA, 530 bp, Arabidopsis thaliana columbia
tctgggtgtgttcattggctggggcaccaccaacacataaacagaccaatgttagccatataaaactttcagatagaggtatttgaagctttgaattaaaactgaaacaaagatatgatcatatagacaatttcatgatatgcttcaacagacatatactatgatagaagagaagggtcagaagatacatgaaaactagttttaatacctgattagtgcatgaactctgagccaagcatcgaacaaattcttctttcttcttgccaaagttgaagacggcatgctcacggagcacttgctcccgcttaatgtcctccagcgttttctcctttttccatttcagctctttcattttcttctccgcctcactatagttgtccatcgtgcgagaagcagttggctttgcaaatctcacgttcacctcatcactgaaaatcatattgatttcagttcaggacagcggataagagcaagaaggaaatggaagaatccaaagagggaaataagttcagaggttataaaattgtgag

SEQ ID NO: 30769 - DNA, 526 bp, Arabidopsis thaliana columbia
ttttttattgtgtgctcactaagctcttcctatcaccaaactcacggctagattcacttgtaattctttagatctaataaatcttcgttggattttcaattttcttacttccatctctaattttttcaattcagattgtatatttatgatgacgatatctaatagatcttgttggtggcagattttcttatggttggcaaattacaagcttcatcggacgaaaagattggtcatcattgtcgccgtcgcgggttcgttgtcaccgtcggcgtcccgtctgtcaccgtcgccgtggctctttgtcgccgttaacccttgtcaaaaaccctaaaattttaatgggttgagccttgtgaattcgggttgggccttgtaaattttataattgggtttgtaaatttgttaatgtattttgatggtgtaataagtttgggctttgttttcagcctatttgtttgtttttgttgtaattcaatttaaattaaccgaaatagaaaacatttggtttaattttggatatattttt

SEQ ID NO: 30770 - DNA, 462 bp, Arabidopsis thaliana columbia
aattcgatagttaattatagcagatgttatgttccaatttgaaagcatacgaacgaggtatatagttgaaaacacacaccgtaaagttaataattttcacaacacaagaacaaatcaaagtcgcaagtaatttaacgcatgtcagtagcatgggcttcttatatactagtcaatagaataaactagcaaacaagcaactaatgtattcttgtttatcacgccacgggttacaatatcatacaaaatttgaatactaattaatggtaacaagtaaaaaaacaaattactagaaatggaaatacttttgtcaaacaaccaagacgtataactttcgttttctatagattaatggacttcttaaaaatctctccatcagattaaactttgagatatacaaatacagtttttgttttcttctaaatgatatgaatattaactttatcgatttcatccgtagcagat

SEQ ID NO: 30771 - DNA, 359 bp, Arabidopsis thaliana columbia
caatagtgaaagggatgaaagcgagacgacggcgagaagcagggtcacgaatctcagagagaacctcagggacagttacgaatttgtcggcgaagtttgttaagctctgacgtccttcaatgatggcgttggcgtcaacaaccgcaatagatattccttttgtggatttgcagtttccgaccatcccgagaatcgctgccggagctccgtcgttaaccggaggctttgaaggtggatctttcttcacaattgagctccacatcgaggttggtttcggatccatggttttcggtaattgccgcttcaaatgtgggtgggtttaacgaagagactgagagatggagagaagaagaagagtg

SEQ ID NO: 30772 - DNA, 555 bp, Arabidopsis thaliana columbia
tcccttctccgttttgttgtaatttcttcggtaattttatcactgttcctttctcgatctgggtttcgatgctgaattgtttaaccctagattcgatttcatctccttgagttggcattttcgattaggttttttttttcttgataatttcttgttcttgttccaaatattttcgttaatcggaatcaaaattgtgttaacaatggttgctggggtttccggaatttctagggttttcgattgttactggggaaatttctggtggtggtgaacaatgagtagacctaacacccgaaacaaaaacaagagacaaagaccagacgctgttgattcttcttctcagattctccggtacgataaacaaaaacccaccttcttgaatattagcttttcacaaagctagcatctttttgtttaaaaaatgtgttctttttgcaggaaaattcacgaggctaatgatgtaactgatgatgacattaaccaacttttcatgatttggaagccagtttgtcaaggttgtcgtgtaacactcgtgacaacctaactgcttttgtg

SEQ ID NO: 30773 - DNA, 1194 bp, Arabidopsis thaliana columbia
  unsure (1)..(1194): unsure at all n locations
tattattttgttacgatttatgaacatagtactactcatgtgtgtgtaaaagatcatactgcctggacacgaagcggatatccggaaaaattataatatttgttttttgattcgttttaaccgaatacttgattttgtgatttgcttcgattcgaaaatttccggatatccggaaattcgaatatccgattttttttgtgatatttgcggatatctgctttgatacatataaataataaaaaaaatctgtaaactatacaagcatatcaaatattcaatgtttttatttaacatcctttcaaaataagttctaaataccaaacataactgttgttgttatcaccagtcaacaaaatgttatcaaattaattaaaacaaaaacaaaaaccgatagtttaagatgccattaatcaaaacataacataaaagaaaaatgatcaaacaaacatcttaacataaaaacagaagataacaacaatacacaaactatttatgatatttatatatagacataattatatattctaatatatatatatatatatatatatatatatatatatatatatataaatacggatcgaagcggatattcgatttttacaaaaaaanacatattattagacacgatttatatgnataccatatctatatataagctttgctccaaaatcttacggatgttcggatttttcaaatcgaatcaaatcgaataccgagtcaaagtggatcgaacgaatattttgtccagcaatcgatcaatgatactaaaaatatggaaccataattatgcaaatgtgaacatgaaacgtaattattcttttctctttgaccaagtcttctccggttcaatcatggtatttaagattcggtttcctctatcgaaccggtaaataaaccaaacttggaatttttcggacacaatccataaaaacccaaaaaacataagtagaaaaaagtacatttttttttgttttcgtcaagtagagaaagtgcattaacatttaacagagtttgtttgtctctctggacccaaacttggctgcaagaccgccatgagaggaacacacggaggcagtggaagaaatcacgaccgccgctacatccgccgtgacgctgggattgtgaatccagtcaacgatcatccaaaatcagagcatcagaaagaagacacgacttcgacggatttatcat

SEQ ID NO: 30774 - DNA, 480 bp, Arabidopsis thaliana columbia
tatctattttgttgatgtaacttatgtaatatgttgacgttatagcattgttgaatccaacacgaattgttaatgggctacaaaataattacatgggcttcttacgatgggccactaatataaggtcaaatgtgaattacacaataagctgaagacaaatttggaattagtcttgttgacaaaaccaaaaaaagaaattgaaactgggctcaatttcaatccatgtttttaggataacaaatcacacaaagagagactatagaagctagagagagtattgcagaacagttttgaagcattcttcttcctctgcaatggcaatggcaatggcaatgacaaacgaagactggacaaatcacgttttaattaattgatcagaaccatcccaaaaataacaccaagccatgtctgtaaacaataagacatggattacaacttatgactcccagagaatagatagaaagacaggtttacttgcga

SEQ ID NO: 30775 - DNA, 821 bp, Arabidopsis thaliana columbia
tttaaaaagtggtggatcaaatgcagggctggaaccagttgtgtttgcagctatggttccgaacagtgctgataaacctatctttgagttaactgaagaaatcatgggagatcatgagttactggttagtcaatcttaaaaatgttgcaccaaagtcacctatggtcttaaatctatgcataaataatgaaacacttgttctctacgcagaccgggagcagttccagctgaaagttttgagtgaggaagacagcaggacagctttaaaattcttcaggtttctgcaacaagactcttaagactttgtgcattacccaaagtatattgtacaacagtgcagtcttcaaataaaaaagtgagctgcacaagaatgcaatcagaaattaagaacttacacaagttatatgagtcaaaatgtaacttcacttggacatatccagtcatcaaacaaatgtaaaatgaagacgaaaccaaatcaatctcttttttctctgattggtgttgtttcacaattcacatacctgaaaaaatgattttactatacataaactcaataagttgcagagatacaatggactgttaagaactcataaaaatcaagagctaaaatgcattgatgaacaacaatgtaatcttcaaaccaagaactatatcactcaagacagaacaaccagagtcatcaaacatgatcacatacgaagacgaaaccagaagattgtaattgttcctgaactttgatcaatctctctctttcagtattcacaaaccataaaatgaatctaagaagctaatcttcatcatcactctcatcactaaagtag

SEQ ID NO: 30776 - DNA, 500 bp, Arabidopsis thaliana columbia
taatagattttcacaagtatcataattttagttattgtcccacgcatagctagctaggcttatatagagcagtagaacattattaatttaattgtacgcaattgaattacgtgcaagtccatccccaataattaaacctttgatgataaattataaataaattcatgagtgatgttttttcggggtcagttgttattttatttcttgcaatatttgataagggtttaggtttaattagagtggggataggattgtatttgtatattaaattcaggaaactaaatccaaaactgaaccacatcggaagaaattcgaagtcatccaaatcttagttatatatattaatacatatcttgtccaagtttcttagatatctccttagctagaagtttatttgttgtgaatcagggggagtaatggcattgacagtggatacagcggatttggtatttgccattgcagccatcggtttgtttttgttttgcctcatcgacggcata

SEQ ID NO: 30777 - DNA, 546 bp, Arabidopsis thaliana columbia
cctaaaataatatagatttttatcaattaagattttctttacaaaaatatcattatatgacaaatatcagttgtttagatttttttcctcagatattttcagtataaagataacaatcattttcttaagtttgacaaaaaaataaaacaatcattttctaaattatgttctttaattgatcaaaaagcataaaaccaatcacttttaataacgtaaaaagaaaagagaaacagtaatttgactaatttttttatataagtggtcctttacacgtcataactgcgtcttctacgaaaagccctgtcaacatagcgaaaccttaatgacctttctttggttataccgacgttgaagcccacgtggcaatacttcacacgtgcacatgcgtgtgtatatatataacccacacatacataaacctctttgagagcaaatcaaagtgtaaaaagaagaagaaaaaaaagagaacgaagaagatagaaaaatggaatgcagaaaacacaaccaccaaggcaacagaggagtttgtccttgttgtttaagaga

SEQ ID NO: 30778 - DNA, 476 bp, Arabidopsis thaliana columbia
gtaactaacacaaaactgttattaagacagaaagagagagaagaggcatgtttctcggaatgaagacagagcaaatctcaatcttcctttttcaccttattcctattatcattttctgatcaaatgttcaaaaactctctccccttaatctcttcctctaaggtacacactttcatgctaatctcttaactaattttgtattaatctcttatatttagcattacctgttttgttaacgatctaacgaacataataagacaagaacttgttccaacgttaacaccattttgattatgatctgttttttctacgtgttgttgttgttgttctcagaataattgagtggttaagggagagaggagacggagagtttttattttcgttaccggaaaattttgatctccgatggcttcttctcctgaatctgctcctccaacaaactccacctcttctccatctccaccgtctaataccaa

SEQ ID NO: 30779 - DNA, 571 bp, Arabidopsis thaliana columbia
cttttcatagtaatatatatttttatatggataagaaccattaaacgagactatctttttttgttttatcggtgaccgaaaaaaacaacacaaaataattccatacaaagagatgtaagatatccattttgttgatacaaaacccacaacacagatggttgaagcttttattgttgtttcactttgatgtctactctaagtgtgtaacccatgaattaatacagtaaattcttaacccacaatatgtaaagctaagcattaaccagacaatgtttcttcttattgtaccatcaaatttctaagtatacaaacattctgcaaaagctgttatatcgtcgaatggggtagacatgaggtgtaccgctatattccccgcctggtaattatccagggaggtggaacaataatgtcttcccgaatttcgaatcaatggttaaaaagagaatcggtttagcgataaacggagtaaaccagattagaaccttgctcatcggttgtgttattgccttctgccaattgttcaagatagataaaccgatagcatgaagagccaaccaggctcactgtgttt

SEQ ID NO: 30780 - DNA, 415 bp, Arabidopsis thaliana columbia
  unsure (1)..(415): unsure at all n locations
tataatcaaaaacaaaagagaaaattttcagaatcctgaactaaaagtgataacaacagctagaatcctagaacggcagagagtacacaaacgaactataagcaatttcagtagcagcccttaattcatgtaaacatcttttatcatgttcaagaagatggagaaacaaacaagagggacaatcaaaagtctagcagcagaaactaaaacatcatataccaaatcctataaaactatatcttcaatagtaacaaagtgttagttttgctataaccaattccacagccaatactaggtctattttataatccaactagaaacagaaccagtgaagaacataaacattattataccttatgtatctgcgacaagccagcaacaaattgctanctttccttttgatgtagagcataag

SEQ ID NO: 30781 - DNA, 566 bp, Arabidopsis thaliana columbia
ttgttgagttgttagacaatggtgtagcgtttacattgtgaatgaagaatttagagtgattctgctaaagatctctcatccaacattttgtttacctgtgagattttcatttcaactagtgatgtactatttgtttcgtagaactatgataccacacatgctttgagaggatatataactaatattgatagtaactgttgaattatcaacataatgtgatgaatcgatttctcgtgacaactttaaaatcctttatgatcatgtcgactaaaccattttctgctatctctgccagtgactggtctgtgctgatacccaaatccttctttgtcctccactgataagattcatcaggtcacagaatctcttacatctcagcgacaaaacagaagaacatgagacgttttctcaccaaccctactctttcttaaactctaacatgttagacttactaagcgtcaaacatgagactttgcgagttcctgaatcaatcatgaacattaacactaaccagtaatacgtaatgtaccaaatcagtcctgcatctaatgccaaaatacctttgt

SEQ ID NO: 30782 - DNA, 589 bp, Arabidopsis thaliana columbia
gatcttgtgttgaacccatcaacgaagcttccaaaggagatagaaaacctcagtagtaagtaaagcaaaaaagttggaagagagaaaacctcaagaagctgcctcttgtgttactttgaaaactttatccaagagctttgtccattgtgtattttatttagtgcatatttccaaataagaatgatgatttctgagcattagtgaaaaagaataaactggaattctcaccaaacacacagttcaggttttttttttttatatgcaattgtctcatatgataaaataattaagagtgtgaataaagagatccgcgtttatggaaaaagacgatgaaataaatattattttctaaaacgcacatttttatttatttatgaaaacattattcgatgacataactttatgaactcttctggatatataaaattgtcatttaccaccaaccaatatgctctctccctctttttgctttctaaatttgatgtcagaatctcaaaaacctaaaggctttgagttattaagcccaacaaacaatgggccgcaactacaacccaagtactaaagcccgtgtaaaatatgagtggacaaa

SEQ ID NO: 30783 - DNA, 605 bp, Arabidopsis thaliana columbia
catcttcatcgatgttcttttaattcttcctcaaaatcttttctctttttttggttatatatatttgaattttgatttatgaacctcctcaagaaggaaagacagaggaggagacaaagaagtataggttcacattgcatagccagtttagttttgaaggatggatatatgaaaaaaatatgaagagagagaagagagaagaagaggaggattaaagagggtgaggccagcttttgtgctttggtagtagatgaggtttaaatgctccataccttccatttccttctctcttaccctaatttaattcttcctctcctttataactccccacagacattctcacttctcctcctcacacttcacatcaacacttctttcttgttttttcattttacaatgtttcctttgatatccgcactttaagcatgagagagtccctttgatattggcctggttcactcagatcttacctgaccacacacgtagatatacattattctctctagattatctgattgagccgcgccaatatctcagtactctctcgtctctattttggactttgtggtcttgtagatcgatttgtatgtgtgtgttgaaatgga

SEQ ID NO: 30784 - DNA, 530 bp, Arabidopsis thaliana columbia
tagaaaatcgtagtaaaaagtttggttaaccattttcgttaaataactttatgagtcagtccgagaattaatacatgatgctgttgtaacaatttcttttatcatctagtagcctctttgacaaaggcccattaaagcccataacaagtagctctaacaaaaccaagacgcaaacgcttcttctgacttggtgacgaagggacacgcaaaaagaggacctttaactctctctgagtcaccactttcacgttaatcgaaccaaagttcacgtttctctctttgacttttcaaaacgttaaataatagtagtaatacaaagtctaaaacttcaattaagcgttattaatcagaccaaacaacgagattatacagtgattaatttgagcataaacacaattaaagacgaaacaaacactaatccaaaaccttttagaaacaataacaaggttcgtgtaagtgaagaagtcgaaaaaaacgtctctgacggtagtaaaaagctgatctgagtcgtgccaaacgacgccgttcaa

SEQ ID NO: 30785 - DNA, 508 bp, Arabidopsis thaliana columbia
tctaagaaaaaactaaaataacacaaagatataaaaaaaaaaatttttaccaaaacaaatttaagaaaaaaagaaagaaaaattaaacgtaccatgtgtagccatgatttctttgagtgttggtggtttaatttgaggaggatcttcggtcttcttcacaataagagttacttcttttactcttttggactcttcctccctagcattttttgttcttgagaacttcattaactttgccaaaaacttgtgatccataacttagcacattgtaaagatcggaagctttttttcctttaaatagttggtaaatctttgaagccatttttcttaaaagagaaagctcttgttcgttgtgagcaaaaagaagaatatgtagagactagatagagtatgttatgtatctaatgttggccttggacacaaggaatttagttttgttttgttgttatactagagttcaagtgttgttactagtggagttcaagtgcattttcattttcagtggagt

SEQ ID NO: 30786 - DNA, 605 bp, Arabidopsis thaliana columbia
  unsure (1)..(605): unsure at all n locations
gcttgtactaggtacatgccatgttgtaacattggttagatatttgtaaattttagaggctttaaatgcaaaagattatattcggactactcgatcataaattttggtctagtaatctgcttgaacattgattttgcggagaattcttgatgagaagcaattttatgattttatcccaaaactaatcgcgacatgatcattcggtgaatttgttgctaggagaaacaatggtctaagataaactgaaaaagggaagagaacaaatattagttaagattgatcaatgagaagtgaagtgagtcagtgtactttgcacaaacatcgatctttcgtctttgagtcatgagatggccagtttaggttagtccaaacattgcctcctcgtgagttcttgctgtatatatttgcaaggacaataattcctcttatttggcgttaatttatttataatgtctagagttcgtaaatgaattgaagaaaattatttactaaacaataaaggttttgctctcccgcagaatttttgcctatgcattaagaanaaaaagcgtgaanatataagataacagtcaattttggattatatgtgaagtttccatatattt

SEQ ID NO: 30787 - DNA, 426 bp, Arabidopsis thaliana columbia
ctcgctcgagggatacgaaaccggtatcatgaatcagtgtccaataagagccagtggtcgtaaattccaaatgacagatggatgactcattttaattcgtaacttttgtcagctgcgatatatgctaatgcaacctgaggtgctagattttgattttaatggctttagattcttactcaacactcaatggcccactcgttaatgtcttaccttctaaagtgagttatgatccactgcttctttcttcttgtagatagatggacctgttttactttaggttgtgatttgtggacattaatcatcaacccatgtttatacgtgataatgtctggagctatatgtaaaggcgatatggaggacaacattcctctattctaactttcaaagccatgtagttagggctggacacctatattctgatatggt

SEQ ID NO: 30788 - DNA, 579 bp, Arabidopsis thaliana columbia
ccccatgtactaccaaaaaatatccgcttgtactatggtcagctttcgaatatttatggtggtgtacgattttaccaaatatccttgagaataaaatccacttggcgaatattagtcaacgattatttgactttagaagtagtcaaggttctacagaattagcagtaaataacattgtagaaataagtttctagctatcccgtgaattttggaaggaaaaaaaacatatttttgttccttcactcattttatcattggtttcttatagatttttcaaattctataaactttttgaatgatttatcgaaaattttgggtctacaacaactatggcgagaaatgcataaacgatcccataagttaagttgttagaaatattttaacttctaatattctcaaagagactaggttctgaaccatctatttttagaatttttagtcaatttttgtgtggctcttaaccatatttataccaaaagtttagaaccatcatggctttttatttttgaactagtccaatggtaaaacttctagtgatacgttgttcaaagaaagtgaactgaatagagttagtacatg

SEQ ID NO: 30789 - DNA, 974 bp, Arabidopsis thaliana columbia
tgctttgagtttctactcgatcaatttgtttttcacatcatgataaactaacttgttttacgtcaaatcctttattttcagtttgttgttgtctaacagggagatgtttttcgtattatttatctaatgtaactattaattgttgctaaccaaaatatcatttgatcctaaacctaaactaaaagggcagaaaattgcttagaatcactagtgtctcaatcattgcataattcatacaattagatgttttagagtgcattggtagaaggatttcaccaaaaccactggctcctaccatcctattttttaggtgatggtgttttgattcaagcaggtctggttagaagacatcatcaagggtgaagagttttgttaatgacaactatatagtagagctattattattattaatttgtagtactagtttaaaaccacaattagtcgaacaattgggattcttttgtaagaagcaaaatcaaatcatcaaaactgaaaatcaaaagacagatacatgcgaaaaggtccaaaaacaaaaattggttaaaaatcaagttttaatcatcttatagcccaagattctcagcccaattttgtctttgttggtgggccttgtattcacttttatttttattagagtcaaccagatcaacagactacagtcaccactcaccgtatcagaaagtcgagaaatgaaaaacgtagaacaaatcattacacttacgtttatttcatcaattattgtatcgaaagtagacaaaactcaaaagcaaagagatcatcaacatttgtctaaaaagtaaaaacaattgaacatgaagaaaaaaaaaaaactctcgttattgtaactataatcaataatcgattaaaacgccgatcggtaaaataaacagagagctgagaatttgaagcaatcaaaaaaaaaactcatatttgaatttcgaaatcgttcttacaaaggcgtcgttgtgacgttg

SEQ ID NO: 30790 - DNA, 374 bp, Arabidopsis thaliana columbia
tctcgcatatctgcgccgtgcccattctagctatggcgtacgcaaaatcattgccacgagacatacttcttttcccttgtagttctctccgctgacttccaccctctccacctccattgatcatattcaaactttattacaactttacacaccgtcaaatgtagaaccatttcttgaatcagcacaacgtaaagtgcattcctttgacactgattcaactcatctcccacggagttctagtctaggtaccttatcaaacggagacaatacaatcaaattcgacattgagctgaagcagacattgagccgaatgacatacaagaacgaagaatgagaccctagttgcccagattaggacaacgaaacattgaact

SEQ ID NO: 30791 - DNA, 557 bp, Arabidopsis thaliana columbia
  unsure (1)..(557): unsure at all n locations
atcccaattcgatggggnggtattaaacaatgaatagaaaaaaatcacaagacattattgaatagatgtcggattatctactatatatgtgtgcgcatgtgagatagcacagtgatagagggctacaggccaaattcggcgttacaagaggatggatatctcgtgactttgcgaagctagatcctaaatgctactacgactcctggcataccacagtgatgcggaaacacacaaccgaagtcactcatgtgatatcatcagtagctgcattcaacgctaatatccgaaaccagtttacgctggtctaagatccatttgcaagaaatgtcaacaagataaaaagctcttatcattcccacgagttttagttaaggtaatctattattccaagacttccacgaaccacctatatatagaagcttacatattctatagacttaataaatgtacagttcaacattatgtcactaacgtacgcggctaacaggtgtgctaatctcctatcacatgattgcgatcacacacgcacacgcgcacgacacattatttgtatcagt

SEQ ID NO: 30792 - DNA, 536 bp, Arabidopsis thaliana columbia
tgaggtcaagctggttgtgtgattttgcattattgcattgttggatcatatggtcaaactggttgtgtaatttttatgaatcattgtgatatctacaaacatacacacatttgattttgtgagctttaaatgtccgtagatatgcatatctattaactgaactactgatgtggtggtggttggctttagagaaggccattcgcgagattccaatacaaatattaaattagtacaaactaaaaaattgtgaagaaatgtagaaaagatcaaagaaagaggtggatgaagcggcatggcatgtatcatttggcagctaacttaatctagaaacaaaaaaagaatcgccttcaattgcggtcgtgtgtcaaagcttaaaagaaaattattcaggaaaaaaggaaacattatctatattttattacaatttagaccctaatttgaattgggaatacagttgagtcactaattcacaaaagccagacactaagtagtcatatcgctcgaccagtgaaacgacaagcagttttcagttgcac

SEQ ID NO: 30793 - DNA, 920 bp, Arabidopsis thaliana columbia
tataacgttattccactggattcaatctcggagctagataccttttgttgcacaatttcgattaattattctctaaaattttcaaaattcttttgatttcttttttcaaaattcttatgcacaagttgtaaaaccgtatatatttttcttttaaatataattcgacattacattaaaaaaaaaaggcttccgattgattagtccaagttaatccatatgagtatagctaaattgatgatctcaactaaatggaagaggagaagtaaacataaactcagtgaagttttctgtggacttacaatcaatggcggaaccaaaataattactcatggaggtcataactattaagtagtggcatgacagtcatcaaccaaaatgtaagacccttaattgtccagttcttcctgtgaacgaatgtggctactcgagttgttctaggtagaaaagcgaatgtgatttttgagttcgacgcagttgccgatgtgtttcggcaatatttgttggatcaacacaaattgcacttctttaatttgtcataaatttcgaaacctctagagtaaatgtaaaacaaaaatccttccttgtcttatttttaaaaaatgttgataaaacatgtgtcactatattcaaagttcgtcccttatttgacttttttttttatgcttgatataaaatacctaactgctataagttttacgtagtcttaaagttaccaatcaaaagcacattgaactaatattcaacatatgataaataaaaatcttacactcgtagttcgtagttgaataaagttagcatataagtacattataagaattaaaccatattcatacaatatgagatacataacatataaccattttatcattcagacgacgtagtagtgggctcatatagttaatgtgacttgtcctgatgag

SEQ ID NO: 30794 - DNA, 214 bp, Arabidopsis thaliana columbia
tgacgtgcagctgtccggaatcttccaggactagggccatattaagtaggtcagagatgccgtcgggacgtcggcctggatggcttcaggtttaatcggccacccctgacacaacgcctcagcaagctcggtgaagcggagatcccctagggcagctagtgcggtcagaagactcaaccgccaacgatcgaggctggagatcgccgcaatgatg

SEQ ID NO: 30795 - DNA, 630 bp, Arabidopsis thaliana columbia
ttgatccaagtccatgttcatctccactgatagaagaagaaagcactttcctgatacctaaacttggtgaatatatctttgccgacagaaaacggggatatcttcggtacttacctcctctcaaatatcaaaaaactgatgtagagggagaagttcttatggtcaaatcgattgggacggctttattaacggcgaaggagaaattttccagaaaagctactatgaaagagaacagagagtttttttttttttttttaagtactattggagactaattattcatagtagttaccatttaaacacgtaatgttttcatttagatacgataaaaaaagttaacaaaactctagtgtccttgactacacttttcttacttttgacgtggtcactattattgtggacccccaatatctgactaactcaaattttacctttcttcatacgttttttttatctgtttgttaattaattccagaatgagttgcaaaccagtaggattctctgcatgtcgtgtccttgcattttaaggcagattacggttatgctagggcggtaaagaaataatcgacaaattagcacaaagaatgtggaaaacagtcaaagagaaatgttgcaatgtccgattgggtt

SEQ ID NO: 30796 - DNA, 514 bp, Arabidopsis thaliana columbia
taaagtatgagctgatagggttgccctttttttaaaaaaaaaaaagtctataagtcgatacatgcataactattcttacgtaaataccaaattatcacctagtcggtgacttgtattaatggttagataacatagtaacatgaaaatattcttttaattgttgttgcttcacattaatttttttatgatacgcttatctactacgacgtacactttcagcatttgactttttctttcttcccaccactcggtacgattttgactattttaaataacgtacgaattgtatttctttgtcataatcccacccaacttatcattagcttacaagtaaatattttcttgtgttggaaattgaattagataataggcgtggagaaagagaagctaccatttcatctggtttcagttttaatcattagcatatacaactgtacaaccgactaatcgagatattcgatagtatttgcaagtttctgatttatcaataagtaatttaacgcaatttgttatt

SEQ ID NO: 30797 - DNA, 565 bp, Arabidopsis thaliana columbia
aaaatattattcaacctttttcttcgttttgtaattgagtaacattgaaaaatctcgtgatttgcgggagattagctgagtcagcctcgtgattataaaaccattggtcgagagagtggcgtgaccttggccggccgtacagttttctcaatactccttgaccagtcaacgttgactccgttagtttaatccgttaattaacctcgttccgtcttctctcttccacaagccgtcttgtggctgtcgtgtgctctccatctgactccacgtgtcattccagttaattgggctcacaaaatcaatactacgagttctataactaatgagcccataccaatttttccagcccattaaggtttaaatagtttttccaaaatcaatctgtttgaataaagaaaaaaagaaaaaaaagttttgtgatcgtgtcgcttcgtcgtccttgagcaggggaaaaagctctggctttctctttttttccggcgaggaaggtggtggtaattggcggcgatggagatactaagaccgaaatgggtggctatgacagctagtatatggatacaatgcg

SEQ ID NO: 30798 - DNA, 1155 bp, Arabidopsis thaliana columbia
cattgactgctcatggactcatcattcaaggagctgagtgtcattaccttgaaccttctgcaggttctgatccccttcttcttctgtcagtggttcattcaactcttcaattagaggactctcctcttcaacctcttctgttatggctagacccttgagcttttgtggtttgcatttatggccttgaaaccatctatctccactgtagcggcacgggtttgagttcctggcttccccactgcctgaagcacgagttgtatccctactaggaatgaagggttgtctcgttggagcacggtctaccactctagatcctgtggagacctgattgttgaatggagctgtgttggttctagcttgatttcgcacttggtaactaacagcattccgctcttgtgactcaatgagtttagctatctcaacaatatctgcaagattcactggcctacagcgaactacctggtctcgaagacttcttctcagtccattgaggaatgcagattccaatatgtcagatgtgacatggggtaagtcgactgtgagctcttcaaaacgttctctgtattcctccacggttcctgtttgtctcacgttgaggagatgatccacagcagaactgcctctgcttggtcgaaaacgtaacatgaacttttcttgaaattccctccaggtatagatttgttctctgtccttagagcagcgccaccatgtaactgatgctcctgttaaacaagacacagccttttccagtttttcttcctctagggtgcgattggataagaagcactgttctagccggaacaaccaatcgtcggcattgcctccttcataagccggataatccacagtcctacgcggggctgcttcaaaccgaggttgatgtggcgcagattgaggcggaaacgtttgtgtttggaaggttggagtagtctgaaaccccgtggaaggattagatggaaaacctgaagatgatggaagacccgtggaggcattcagctgaaaccctggtggttctaatggtgacgagtgaaagcgacgcggttcgaagggtgaagctggaagtcgaggtatctctgaagtcgacgcctggtatcgcgactggtcaaagagtaagggccgagggtgtgtgtcccgttgatttgtgccggaaaacag

SEQ ID NO: 30799 - DNA, 370 bp, Arabidopsis thaliana columbia
ctagaggatgaggatccccgttaacaacgttacttgtccgtttagctatcttctccgaatgacaaataatctgcggatcatcctcgtagagaaaatcaaagtcagaatcatcctgattctctttgtaatgcttttcaaggagatcatagactttcattctgaaaatcgtcctagtcccgaaaagcaaaaccaatctttatgtcgcacacaactttcttcttattggaaggatctaaaagaccttcctttgaaatatacttagcaatagtgtcactaacatcataacgagagatcatttctggagtatctttaccaagagagtgtagaaactcaatgagttgtctcgagccccatcctacaaattcgaatc

SEQ ID NO: 30800 - DNA, 561 bp, Arabidopsis thaliana columbia
cgtttttaaaaattcaaattatggcatatgcgaaaaaactctaattatttttttataacgatgatattattttttcgcaaaaatagaatcatataaagatgagagctgaactataataattaataaaaaattaatatgataatttagtatcaaatctaatttgttgattttaattggttacttttttgaaaattaataatgtatttcatttttaattaaattagtatttgactttttaatttttaaagagatgaattaatttactatttaaattttatttctaatggcatacatatgtaattacttacaaaaaataaggttacatttaaaatgtacttcccaaataatatagtaggattgttttcatttctatgatatatttacattcgtaaaaataataaaaatacaattaacataagacatagaaccaaatcaataaagccaagactataaaataaagtaaaacggaattagcaaaattacaaaatagaaaacaaaggtcaacaagaaataaatgttgaaatcttcatcaacacaaactctcttttctctccatatata

SEQ ID NO: 30801 - DNA, 531 bp, Arabidopsis thaliana columbia
aattacagtgaaatctacaaaaacaaaagagctataacgagaacactacgaaatgcaaactaaaagatgcaacagtagcaagaaaaatcaaaactttcagattcagtctacacattcctctgaacataaacataacccagaagaataaacgttaccacataatctgtggtgtcttgtgaatccgaaacggcgcgccactcttttcttgacggagccgtcgggacggattctgaagggaaccgccacgagttgtagctacgctcgaagcggcggtctccattagtaaagaaactcaccgaagagacttcaattccactatcgcactgaaaaaaaaaactagggtttatcggaaatgtgagtcaagaaaaaaccgtaaagtattgtaacccagaaaatttacagagatgatgaaagaacccacgattgacgaagagaagagctgaagaaaggtttaagaaacgaaaatggtggaaatgtttgacgcagaagagacgaacaaaagtgagagcctagcgagacgactcgctgaaa

SEQ ID NO: 30802 - DNA, 539 bp, Arabidopsis thaliana columbia
caatgtcagaaaggcatagttttacctactaattagctatgacgtacatttcttagtttggtcaagacaaataaaatgtttggttttttatttcgccaagcaaatgacttgtcgatcaaactggtctctgattctataagtaccaaaaacttcgagcttcttctctcatagttaaataaaattcatcttttcacggatatatttaatttggagccatgatgaattcaagaatttctattatcattgcgttatcttgcattatgatcacttcaattcgtgcatacgatcccgacgctcttcaagatctctgcgttgccgataaatctcacggtagaaattacctttgttcgaaaatttaatctatcgtgatgttataataatatctatgtatcaggaggatcatctcaaactctatgaacatcttatctaaatttcaaatcaaaaataaaattaatatgttgaaattagagatattttaatatatagatattttgtgggaatattcaccattattaaatctatgttgacttgatataaaa

SEQ ID NO: 30803 - DNA, 867 bp, Arabidopsis thaliana columbia
  unsure (1)..(867): unsure at all n locations
tacacagtgaacaaacaagaggagagcctcacacgattcatagttcagaacctagtcatgactatcacacactaatcaagctttatgaaaatcaagataaatcataggtagatcgaatctatcaggaactgtttcactaatctgacatcaagtaatataaattgagaacaagaaggggcaatttcgaagatctagagatcagatcaattattagcttacatgaagaagatagcggaaatgacgagaccaatcgcaagagtgaacaccgatanagtcggatacagcgccactggatccgactcgcaatcggatatcgcgccttctcaccgggaacgagcacaaacacaccagacaaaatcagaaatcgtaaagcaacaaatagagagatcaaattagctgtgactgaaagcacttggacggatctagatttaccattgttgctaagctcttcttcttcttcttcgatctgaggaacaatgaaaaagctatttgactgatctcgctcgcttgatcgcttcactaaacaaacacgagtcgcttccggtttgtacttaaccggcttgttataacacaaccacggttattttatgggccagtttttctgtttaaaggttcgatttaataggcccaaatatacttattaaggcctttgatataaaatgtgttcatatctttatcttcttttaacgttgtataactttattcaaagtgcaatgtgatcctttaccattttcgaaaattgaaatccacttcaatgtagagttgtccaactccttgtcaatcaatttccggattgaagattcggtactctctctagatttagttcccacctgaaaatatgggaccggatgtaatacttacagattt

SEQ ID NO: 30804 - DNA, 747 bp, Arabidopsis thaliana
gctaataacctgaaaccaacatgttcaatttcaccggtttacgagcctaatgtcatgacttcttaaagtttattttattacctcattgggtgacataaacgggaggccgagatcagaaatcgggagagcggaaatgtgatcaaaccaatctctacctttgcaaccttcaagaccatgaacaactgcagattgagtaacgtagttcttgatatccggttctcctgttttaataaccggcacatttcttaaccgatatttcgagagtaacaacataacactcaacatcgaactctctgttgaaaccggaagaaaaggagcccatctaaacgacttaagtattgttctaacctgacaacataaacatatatccatgatcaatcaggaccatcacaacacaaataacttaatgttctgttaaaaaacttacagtggttgatttaaaaggctcttcttgaagaataacttcatagaaatctttccccaacttatcagcagcagttggagcatcttttccaatcccacgttcagctgcaacaccaccagcaaccgcggctccaaccgacagctgcggctagccccgcagcagcaaccggaccggtcatcccgagcgctgcaacaccaagagctccaacagctccagcaccaacaccagcagcagttgctgacgtagcggacaacgcgattgcagcgagttcagcactctctagcacccataagatgattgaagagtagtcaatgattcctaaa

SEQ ID NO: 30805 - DNA, 503 bp, Arabidopsis thaliana columbia
ctctctttcctcagtggcaacagttccacaaatcgggataacaatcaccgtcaacacgacacagatcaccggagctcagcctaaagtatctacaacttcaacagagatgaatacacgagtttgcttcacgattcacagtacctcttcaagatcatgctttgatgaaaccaaaaccagacagtctactttgtgaatattgaaacccagaagatatgcagaaaaaaaaacaaggacaatcgagaaggaaaagaaactcctttatcacgaattattgtactttactctttcaaactctgtacatattcaaagtttcatatattatagataggtcaataatcccatgaacactaatgtggatcatggtttcttcttctaacttaccagtagttaagagttcaagagaaccaccactagtctttcaagagaagacttctacctgagactcgaactgtggctaccacacccagaagatggacacaaagcaccacgattgataatagaag

SEQ ID NO: 30806 - DNA, 533 bp, Arabidopsis thaliana columbia
cagagtctagatatttgtggtttgttttgtagcaaagtagagcaactcttgtaacattccaagataagtttctggagaagatatcaatacgatttcagattaaagatgaactctttgtttagtccatgtccacttctcagttctcacacgcattcaagcaaatgaaactgcggaaaactacaaatagatcggcaatgagaaatgttaagatttcatttcgaatctgtgcttacatcactgataacagctttcacaactttgttaagagtgtctctttgtttcacaacttaatcggaagagaagtagaggaaaagatcgttacgattatccagcgggaaaaaaaaaacgaattctaatgtgcccgctataaaatcttccgcaagagtgtaagagtgatgcagctgaatcaataagactgtcttcttctccgaatttgaaaattaaattccagttttttcagtttgactcagcttcttcatccgcgtgggtaacgacgatataccgttaaaattaggaaccaaattacccaatgg

SEQ ID NO: 30807 - DNA, 506 bp, Arabidopsis thaliana columbia
tgctagctggataaatttctgagactgtaagtcttcggtcattttctgaagaaataggttcagcatcttttgattggagatactgttctccagatatataagaagcctcctcggcataagactgatcatctgcgtctttgtttgcatctctttcatggtgatcaggacttccacgggtcgttcctttctcatgatcacttggataatcaatttcatgggcaagaaaccatggttcatcttcaataggttgtctgacataaccaatgtcgtcatcatcctcatactcatcagagtcccagtattcattacgatagtcaacagattcactttaaccatcaccaatagtagcaaaacccgaaacaagatcagatgcgtcctctgctattccctgacttactgaaagccagtttcgcccacatagatgttctcccacctattatgaaataattaggagattataacttactttcacacctgaagtataactggtaaggttcaagttgaac

SEQ ID NO: 30808 - DNA, 551 bp, Arabidopsis thaliana columbia
aaaacatgacctgaaaagaagtaacataatcaatcagtctccaccatgaaaacataaaaagcttgatagatttattgttcaaacatggatagagttctaatcaaaaacagcaatgttgtcaaaaaacaatcaggtcttctgatgaaaatgagggagactgattcgccggaaattggtcatcacccaccaaagactcattgatatcacattcttggttcatgatattggtcatttgattttgctatatttgggatgtagcttttgtaatactgtctaaagcaagactggatgagtactcttaatgctgtagacatattttgctgttgagtacaaaataactttgatgagtacaaaataattttgggctgtggaaagactttacagcaacaaccaatcatcccttttgttgttgttttttagatctcctgttattcaactaataatttctaattaaatatctttctaaatcctatgttattaaacatgaaatttatttaaagtcattcaaaaccatttataatctcttgtaattgaattaaacatttataaaa

SEQ ID NO: 30809 - DNA, 567 bp, Arabidopsis thaliana columbia
tatcgcgtcctcaaagtttatagtcatatacgggctattttactcattatgtttgagtttattctctttcatttgtttttagagtttagtatttgatataagtacgtatttttccaaaataaaatcataaatacatatatttttaaatgttaaaaatggcaaattcgtcagattttcgtaaaaatagcattttgaaaattttattttttaatagatttgaaaaattcttacttttgcaggaaaacaaaaaataaactacaacattaaagaatgttgaagatatgatcgattttgttaaatcagagataaaaaccacaagtaagaatttttagggtgcttatgatttgttttaactgttttcattataatattaatctccaacaccacatagataatcactttataatacgatatatgcccatatctaaaatttaggttgtaataaatattttggcaattttagttcagactatttacaagattgaagagataattatggttaggcattggggcttataagtcatgttcacaaaatttatgaacttcagttattcaatttgaaagaag

SEQ ID NO: 30810 - DNA, 514 bp, Arabidopsis thaliana columbia
aaccatctttatgtctactacttttagtattagatgctgctctaaaatcctttcaatctcaacttctcccaaccatcagtactgtttcacagcacatttaatcacctaattgggcttcaactatttaaagcccgtgaaactagttgttgtttttgtcccacatcgaccccaatcacattcttcaagccacaaatttttattataaataaaggcctggtgctgcttctgaacatcgagttgggcttcaaattttaacaggttcctcacgtccccatagcctacaagttgtgtcttcaaagtttaacagcactcatataagtacgtatgttctacagttgaccaaacatggaattcctaaaaccacataaacatgacaaagggaaagtcacaaaaacaacgacttttaatccctccaacagccactacaaccataatctcacacatacatatagctccttaatttgcttctaacgattggagtcagatcagaatatggaatcaacatacgagtggt

SEQ ID NO: 30811 - DNA, 603 bp, Arabidopsis thaliana columbia
cagttgattcaacggatctataaattgtggaatgaacataatttgaaaataattttttttgcttacaatttaatttgagcaaatgggctatataacacaaatgtacttcattactacatacattggacatattctgctcatcaatgccatgtgagaggggatatgaatgttggtgatacaattaaaataataataatgcacttgaaataagtgagattaaattacttgggttcgctctcctttagcctttatgtttaattttatgccctctgatttggcccaatgtatctactccaatattgggtttagacccaattgtttgtttgaggctgaaagacaaactcattgtgattggttcaaattgaaaatgaatattcctatattttttgagttaaaagaataaataaataacaggagccagtggtagtgggaagctagacaggaagtggttccgataagccggagtttgtttaaactgagagagatacttgagaactgagtaatgcagaactaagcagccaaactttgatcattcttctgctcacttttggattctaattctctctactcccatggcgatcgtagtaccctggcttcacccaa

SEQ ID NO: 30812 - DNA, 544 bp, Arabidopsis thaliana
ccaattcagtggacaagaaagaaacccaataaacaaactaagagcattctaaaatgagctttccaagttcatatttttagtttactgagtaaatccccaaacttgactattagttaaaaaaatccatatccagttcgcaaaatcccccatctgtaacagaaagggaacgaaaaataactcaacaaacaatggatcacaatttccacaaagctagcaacctatatcacatacaaggaggagtgccctgagtgcagccgcgaatgcatggttaactagcccgttcttgaactgcgagcttgactccacaaattggtcaatcagcagataatattcacataaaggaaatattcttttcgccaattcctgcaaaattatttgcaacggtcaatatatatgagaagagccaattaaataaagaattacaatgttaatccgttataacatctctaaaaatcctattcaaaagagagaaccatcctagacataacatagtaatgcatgtgtccattttattggacttcggagataattgaactttcaagaa

SEQ ID NO: 30813 - DNA, 562 bp, Arabidopsis thaliana columbia
tcgcgagcaaactgggaacacttttggattctaattctctctactcccatggcgatagtcagtaccctggcttcaacccaaaacccctttctatgtctccgtcaaccaccgtctccggggaaccgctccgtcgtcttccgtcgctgtcaagacccctgtggtagacgatggatttccagatccattagagcatgccaaccttccgacaaggtctctggtcaatttccattcgattttatgtattcttctatgcttattccaagttcgtgtggagaatggaatcggattcatgtaaatgatcaaactttattgtgaatgtggagatttttttttgtgttcacagcttggtggtgacggaggcatttcagcttcagctcaaagattatattttggcaaggaattgctgagtcttgcttcagataacttcttgccgctaggtaacagtacagattgctcttgccctttttttccttccaatttccacgtaatcccatttccctaacgattgctgagatgcagttgaggctagatgttttacagctgatgcaaggttgactgcaca

SEQ ID NO: 30814 - DNA, 543 bp, Arabidopsis thaliana columbia
tttttcttcttcttctttggttttatcgttttcgcgtgatatcgtgattaacgtgacatatggtccatttctccatttttatatactaagctattaagtacaagtttcttttttcatcaatggaggagatcaaaaaataagtacagaattttggacgctattacatttgccttttcagttgcacatagttcccaatttgaattgtaataccattattgttgaatctcgatgaaagatatcaaagagttgttgttctcttagaaattagaatgcaattataatatgtgacacgttttaaagaaaaaagaaaaggttattgaagaaatagaatcaaaggactctttattttctgttataagaagaaggttaggtgtaattgaggaatgtttcgtaaagctttaacattacattaagtggctcactcacacatgagtacatgacacttccttaattgctttattcgtcttgagaaaaagatagaaatctcgactatcaaaatctccttaaccatctttatgtctactacttttagtattagatgct

SEQ ID NO: 30815 - DNA, 413 bp, Arabidopsis thaliana columbia
tcccgaagatttcatcgctaaattatccaaagatcttcaaaactttttcagattaagaaatcatccgaagaaaaacacaaattgcagaaaatccaagtttaatcatagagagatggagaaataagagagagagagagaagcttttgtcttcattgtctgctttggattccagctggaagagtgagagcgaattttccgaggaagtgagtgtgggagactaaaatagtaatatcgcgaaacatttgggggtaaaatcggaacttcgcatgtggccactggtgtgagtgtgagtgtgtgaccgtgtgagtgagctagtgatagtgaacataatttatgtcgttattggctcgaaattcatggcttctttttcgtgacctttttcctaatctctcaacggtaaaccatggtatgta

SEQ ID NO: 30816 - DNA, 611 bp, Arabidopsis thaliana columbia
tgtgtgttatttgcgtcaatgaggatcttgtgtatttggaattcatctcaaacatatacatatataaacactcttttcattcttctggtgatttattttttcatttttcatttcttttttttactatcttacggatcaacagaactatccatatatttcacactcaaaataaaagagatagtccattgtaaagatgcaattggcgaaacggtcttttctaaagaagctagagaaaacaacattttgggtcataaaaagaccaaaaatgtctttgatatatatatatttataatgatttgtacggttgtacctactgccaagttttgattaacccctacggtaaatgcatcactattactattaggttatcagtcaacacaccgataaaaattgccagcacaaattagcacttaaagtgagtatggacaaatgacaaatcattgaaagataatagtacagattcgtattgtttgtagttttgtaccctagtttggcacaccatagctattgaattttatttaaacacacaaattattattttccctacaaatgtatatattttattattcatcgtaaggtaaagataattcagatgtcttataaaatatata

SEQ ID NO: 30817 - DNA, 593 bp, Arabidopsis thaliana columbia
ggtcgactccctgatttatcgataaatatggttttaccagttgttagatatttattgtaatgatatctaaacaacatggtgaatgttaatcgatcgaataagatatgaaattaaagtattaactaaaacctttgggagaacgacctgtgtccccctaccaagtttcacattgtatcacaactacacagaatctaacactcaatctcggtccccatggaatgaaagttaaaaacatgcttccccctaaatcgaaagttacagactctgatccccaaaaatgttaattccatggtttgccttcggtttattatacagaacccgatgtcaaaccaaaacccagaaggataaaccgaattaaaccttattctcgaggtatcacacaacccaacccgataaatcccaacccgataaatacaatccccaaattgagaaatcctagaaccctaatctcgattgttcttcttctcttttcttcaccattttcgaattcaattctgagcttgaatatgagcaattcatctggagctacgagtggagcacaaatgttggacagagaagaagattcgtgggtgtgccaagatgtgttggtgtgg

SEQ ID NO: 30818 - DNA, 705 bp, Arabidopsis thaliana columbia
cataacaactaatatcaccattccacaagatcatatataaatacaagcattatttactggccattaaaatcttccctatatttgtatgttgtgcaatcaagaacaaaaaataaatatgaattactgcttcaatatctccatcaagatttaaccattttagggttgtggactttaactaacagcatatgaatcatatgaattgtgaaacacgaaaaatttgttaagaacaaaaaaaaggctatagggaacaaagcagatcatatatgttgtggtggttgtgaagttaggttatccaccaatgagcaaccttaacctatgccttatataaaaacatatatatttccataattccattcacacatatgcatatagacaactatagcaatacaagaaaattaaacgcaatttattgagaaaatacaaacagcgtgcactatgaagaagacgtcgaagatacaatttcttttcaatctctgcatcatatttggggttgtagtaataagaagatgtaacgcaacgacatactttgtaggagacagctccggttgggacataagctccgatctcgagtcttggacttcaggcaagcgattctctcctggtgatgttctaagtaagtatctttgatcatgttggcttcatccaactatatatatactacataattaagactcaaattaatttacagtttccgttaatgaacta

SEQ ID NO: 30819 - DNA, 514 bp, Arabidopsis thaliana columbia
ccggtcgacgattcctcacgtgggtttaaggcaaatgaatgtgaacattgctctagaatgatatatgaactagccccttaaggaatatttcttgtaaatcttaaagttctgagatgaattattgttcaaaatacaagtgggagtacatatacgttttgttatcaagaatgcagctggtaaatttaaacaaagtaaaagaattgagtatatagataattcttgcatcccagtgtctgttggttcttctattcgacagagaaagcgagagaagaaggaggctcatgtgtttagttctaggctaagcatttactcatcttctcgagtgtactttcgataaaagcatctgaattcttatttatatcattcagtagggaccccaggcgtctatgaggctgtggtggttccctgcttcaggctgagtgatttgttgcttagggctgggctcacccagcatgctctttctccccgttctcctgtcacctcttctttgggccgttactccattcactagtgt

SEQ ID NO: 30820 - DNA, 517 bp, Arabidopsis thaliana columbia
cacaaacatgttgaaatgtttccttacgttataaataaaaagagattggtgcatgaacaatgaaaaacaatagtgggcaatgcatctttttgattagtgcattttgacaaaacctttcacaaccaatcccatacttcgtctgactctatgccgttgaaaagttggagactatcacccaccaccacaatatttgatgtccacgtgccactttcagctttccaatatatattactataatacgatttggtgaatggaaagttcaagagaattaataatatcactacagtccatcgactagctcacaacgaaatagtcacgttgaattttgcctcccacgctcattggataagaacaacccttttaaagtcttattcacacgtttctattatatcagcagtgacgtgacgacaatatattctaaacttaaagtttagagagttagatacaagacaaaaaatagagatcattgaattttctatagttgtgactagatgtctagatctctgggacttgaata

SEQ ID NO: 30821 - DNA, 570 bp, Arabidopsis thaliana columbia
gttttgaccagagttgtgtccgttgattattatgaccatagttctgcggagaagatctgacttggtgagagtcttctccacatctggtagtggaatcaacataatgatttgtggttgaggcccaatagaaaattttcacaaagtttccctcaaatagatccatcaatttttctaactaacacacagcaacagtgagtgcacccatacgacggataatcttgtgcacgcttaaaattttcccaaattgtgatcaacttcgtatagaaagtattgacaaccctgtttatgataccatacaatctctgctcaatctgatacaactttgaaacagtattattctctgctttaatcgtttcaacaatctttccactagctaatttcacaaagagaaacctcttgcctattgtctctctctccgtagatatttgattgggtgtagtcttatgttgcctacgtctgcttttttctcaagatatttttttatagttgcttgcttagcaagaaactttattaaaaaggtaataagaaagcagaatggaaagaatttgaaattgggaaagattggattta

SEQ ID NO: 30822 - DNA, 483 bp, Arabidopsis thaliana columbia
attctctatagctcggatttttaaagtcaaagcctgtaaagccaaaactaacagtcgctatcaatcggcccctagtccttccgagacgtgaaacagagcaaatgtaactcgattatacttaacagtatggtgcattttatctgagctccatcgtgagcaagccaaaccattatggtgcattttataatcacacaactcgattatacttaacagtaaacccaattgggatctagtataaatcagccatgaagtcaaggctcagaatgatgatatatttgttccaaccaaaaggtatttggtattaaatgttcaaataaaaattatgtggagttttttttggaaattttttcgattaagttttaaactataaaaataaatataattgattataagaagataagtgagatatgggtttcttaatagtttttcttgtttaaaaagactatatctcgtttcttctttatttgcctatgagtgattatg

SEQ ID NO: 30823 - DNA, 518 bp, Arabidopsis thaliana columbia
tgcctctttctgttttggttcctagaaccagcatgacatctcgagcacacttggctatggggagttacaatagatttatagtgcgtgtcggtttcttaaccaaaaaaacgtagacaatgtgtgattttctaacgaatggaagcacatcaatcataaatcttcgtcgaaagtttcctcctcgtcaatgtattggaaggaaatattttgatccccacctgactcaaactctccattaccatttttacgaaattctgacttgcatacgccttgcactaaagtttctgcaggagatgagatgatctctcctatgcgaatctgctatggagttcaatcatatctccagcttcgcagtcccttgttcatgatacagctaaaacagccaacctagtcaggtaaattctacgcggtacctatcaaactagagatcgctaaggttcatcgatgttttaacagagttatatgctttctacattcagctatatataggaactttggttaccaagttttctcaaagaaag

SEQ ID NO: 30824 - DNA, 542 bp, Arabidopsis thaliana columbia
gttcgtctcattttcgtccggtaacgatggaaattgagaatgatgtcttccggcaaggaaaaaaacaatctcgagacacgagcaaaacatggtgttctgtttctgcctttctgggaggctttagggtttctgtgctttgattttagataggagctttttttaccttcgatctatttatctattttactccgtctaggtctagcatcaacgcatgtttactacgactaagctaaaccctaaaatttcggaaacatttataaatggaaatttaggaaaatttccgagatctaagatagttttaagaatatcacgattaaacttttataatataagatagagagatattctcgctaccgggtttcatagatgcattagaaaaagcaaatcaaggaggtgttattgatatgcaacattataatccaaatatttaccaaccaaggaatatgatcagaataaattcgtgcgttgcgaacaaatagaatacccatagtcaaatgttgtatatgagaacaagaattgaagcgcagggacatatagtggaa

SEQ ID NO: 30825 - DNA, 537 bp, Arabidopsis thaliana columbia
taccgtcgcacatctcgcatgccctagtcaaaacggccctgcttattatggccgttctgtttttcttccgcatgagccaaattccaaactgttgaacatgtaattcgattcccgttttgccatattacattttaaataaacttcattttgcctagttaatcttagattttctaatttagaatgaaaaatgtacataagtagtgactacaaaaaatacatgtaaattagtgaaccatgcatatattgtatatttgtatgttagataacctgaactagattaacatatacctagaacactattataaactaataagctacaaatcatcattcgcatgtcatttaattttctaaataattcattcattattatctagacaagtgtttttcctttcaaacttttttctagccttttcattagagtggttacgtatgaaaaggatgatcaacattcaagaccatagtcatagcctaatggtatggccatagggacctctaatcacaatttatgtttcctcattaataatgccaatggaaaag

SEQ ID NO: 30826 - DNA, 451 bp, Arabidopsis thaliana columbia
ccctaatgcacatacgacaatccatctccagctgttatattcgaagaaactatttttgaagcttgtcgaaatcatgatttatacattttaaacattatatataactgatatacacacagataagagagatgaaaccttcaaatatgttaataatcactttgtgcttttctctagaacacaaaatgtgacaactgtttgagagctttttcttcgcattaccaatgtaaactattcatattaattaattcagaattgcaactagacttgtcaagatatgggaatcatattcaacgtggaactctctacgagaaagagagtctcggttacatatcagctatatatgagtgtgctgatctgtgtcatttgtctctgtcccatgtccttcagcagaagatctaatcaaagcatgcgaccgacatagacatatttccctgcctgacccttggtaatg

SEQ ID NO: 30827 - DNA, 465 bp, Arabidopsis thaliana columbia
tatagtttacttttaactaacggtgttcacatgcatttgaatatatataacttacacataatgtttaatatcagagatatatagtgtttgtcttttaccgcaaacttaaaatgcatttgaaacaacaacacaacaaataatttcttccgtaatttgattccatcttattttgagaaaattaaagggttttcttcttaatttaatattgttgaaaagattgtattggtacatgttaaaaggagatctacatgctggtttatttttctttatcttctttttttgatatattcatctagattcttttagcttattaggggacaaccaattaaataataccgttttcaaatatcatttaaaaacatactatcattagggacaaaaatcttgataaatagttttattattaaggagaatcatattgcgttaatcgtataaatagcattttgagcctagacaaaataaaaa

SEQ ID NO: 30828 - DNA, 499 bp, Arabidopsis thaliana columbia
tagaaccacatgcacgagaatcatgaaaacgtagtgagttttgatttttgtttagtagaacaaatattttgagatttttttagaaatttgttagaatttgagattttttatatgactaagacagagccaaacactagtgccgtcacgtgtaatagataagtttctatccggatgaagccattagcggtgacaaggtttaatagtattcaactactaattgcaagaactttagatacattgaatctagacagcatttcagattcattgaacttggacgtgtttggtttactctactacttctggtttccgcatcagatgtttagaatgtatcagcaaatctactgatgtgaaaaaagaaacaagacgaaagatccgaccacaacttgccacgtggtaacacaatttaacttgttgccggtacgtgtgtccacgcgctactatgtaaccgtgaccgtgacctagcttttttagtttttactcaactggaactggttatgga

SEQ ID NO: 30829 - DNA, 442 bp, Arabidopsis thaliana columbia
aatgaatgacaaagataacgacatatgttcaattaataagagattatcacttacgtattactatacaaagcttaaaaatagtattgaaaaacaaataaattatcatagaaatgtcatgtaatggacctcttcacatgcacgaaaccatatgatacttacattaatttatgagcaagacgcataagtcatacttaattacatcgttaataatccagtatagttattattaaactgctccagtatagaacgtgaaggataaaatgatatctgaatatagttacgggtatttatgtaattcctattcagcagactcctgaagtaactgtgcctacttaaagactacttgcatctgttctcatcacgctccatcgtctctatcgaagctcatttcacagatccagtggatcttcatgtccatggaggcttaaaaaccctagtagat

SEQ ID NO: 30830 - DNA, 216 bp, Arabidopsis thaliana columbia
ggttttagagtagagcagtctcctttatccttttcactttcagcttaattgatttccacccccacacttgcaattcagatcgtcagtggctattacctgttataccctgaagagtggccacaggacagacatcactctacagagaaattgaattttattcttttggaaaatggactgcaatcctgtctcatagcttgagatagtcacactattttt

SEQ ID NO: 30831 - DNA, 562 bp, Arabidopsis thaliana columbia
cctctctttaaaaaaatcaacaaagcctctgtctttcagtttagaagtccggttcacagcactctcaagaacctttctgtatgcttcaaaacttgtgacatcagtcacagggcgattcacaacgagtgaactactattagctttagaacattcacccaccctcaagctcccatttttcagactggcaacctcagaaaacaatccatttcccatctccgccttctcttccacctcgtccacctccatagccacgttttcgacaccctccctacttgtatcatcagatatcatttcaacatctccaagctcatcatcaacatcaattacttctctatccgttctatagcgtaaagacgaatcaagtgcatttcttttccacatgtcattgttccttgtgagaaaggttccaacacattaccagaaccttgtcgtgtgctacgatctcgaccgctattgagtatccgcacaggcgcatgaacttgtctccgcaacgaagatttcacttctgggtaacggtaaattcctggagccatgggtcttgatgaatgtgagaaccggagtg

SEQ ID NO: 30832 - DNA, 521 bp, Arabidopsis thaliana columbia
taaagtaaactttaatgtaaataatacttttaaatataaatataaatattttttaaagtaaaatatgttgatcttttagacccttctcgattttcatgatatctatatttttagataatcatctcggctgtcgatctcggtagatctccggttctcccaataacgattatttcttttgtttgcctacttatgtaaattctattgacctcttctaatttcattgacttgaagttatttggtgtttatcgcatagtgtggctcatgtggtttttaatttattgctattagttatatcaataacgactgcttgctcaactttttgtttacaatgaacattatttttaaatttgcagaagactctcgagatcattggagtcagctgtgttcttggctcttttcagtgaattagaatcaaagcaaatgaccaaggaaaaataaaaagacaaagaagtaacgcttcttatgaaaccaaagaaaacttatatttaattattcttggctcctttgtgacttgattgtgg

SEQ ID NO: 30833 - DNA, 770 bp, Arabidopsis thaliana columbia
tgagtttacgtaccaaaacagcggctgtgtaatagtggctaaagccatgttggctaagcctcgtccacataaggatttataatggattgctttcctgtcatcagcgtcatcaagcttgggtgcgtttgtagatagttcaatcgaaagaatgcgcgcatcctcgaaccttcggcaatggaatgccgagatcacaagcaaaatacacacgggaagcctaatcaacgtaccataagcgtcctctagatgtccagaattgtattgatatcgaccaagttggtccatgttaagtcggtgcacatcaagtacatttggtccatgttaagtcggtgagaattaatttccaaatcaaaatttcagtactctacacgagttagattataaaatgatgctctttcttgatcggttttgagaatcagtcttttggtaatttgatatagctaatgacttgttaagctcatgatcaacacttaaacccatggaagaaatgttgatgggaactaaaagccaaatttatctacaaaaacaaaaccatctaaagaggattagttgttgatatatagataatttgagtacgatttttcaaacctttctaagtccaaaacacttgaatataaaaagaaaacttgtaaacactcttgttccacgagagacaagcaaataatgtagccttacaaaaaagacaaaactagatagttttagagcaaacattttccaccgatagtggggaaagaccacgagcatcctgaatagtattggcaatgaagcagtaa

SEQ ID NO: 30834 - DNA, 490 bp, Arabidopsis thaliana columbia
ctctcccactgttataagaaatattattcttaagagtttcttttagcttttaatatttataatcagaagttaaacaaacattatttgacgaccagttatcaaaaaaactattagagacagctatatagtacaattactatgtatttaaatttgttagctataataatcatacataaaaaatactatgtttcataatctaatgtttagtacaattcaattaatttggttagaattgagaaatggtgatgcatatctctagttatttagaaaatttatattcggagcgaaatcgagctagattgtgaacagtataactagacctcataactagaataaatagataatgttgaaatatactttgaaacgaattagatgtgaaatgaaatgttccattgaagactttttattataagctacaaacttcacgtgaataatcttcaacatgtcagtcagacacacatgagacaacacaaaagtaccaccaaattcg

SEQ ID NO: 30835 - DNA, 507 bp, Arabidopsis thaliana columbia
tattctaagcaagtgtcatctgaagctcgctgggcttctatgcataattcaagcactttcaggtctgaagtattcttgtagctgctattaaacaaaagatcttctcctttttaaactatcaactaaatgctctgcagataataagaatcttgaagagcttaatctttctgacaatgctaagatagaagatgagactgtgtttggccaacctgtgaaggaaagatcagtaatggtagagcaagaacatggaacatgtaaatctgtcacctcaatggacaaagaacaagagctatgtgaaaccaatatggagtgtgatgatctcgaagttgcagacagcgaagatgaacaaatagaggaaggaactgcaacctcgagtagtcttagtttgccacgcaagaaccatatcgtgaaagagctttctaccgctctttcaatggctaaccagttgaagattctggacttaagcaacaatgggttctcagttgaagccttggaaacattatacat

SEQ ID NO: 30836 - DNA, 487 bp, Arabidopsis thaliana columbia
gtctcttcattagttaaacatattgtttttgccgacaagtatttgaggcacaaacgcatatgtatacccgtaaaaaaaagtgttacttattagtgcatgtgtcttaattgtttccctgactttctcaaggtaagattcatcattcatcaatcttctcttatgatgtgacttttggtaaacggcggctagtgtgtctcttttagaacttcttaataaggaaattcctagaaaagatagttaacaatttggaattttcttctctcaaacgatcatgacgactcttttttcttggtccattcttacacgcggtcgtatgaatataattttctactagtaggatttttagaaagttatggtactccgtactcgagtatttgatctatatgagaaatttacgagtactcgtatatgtatctaagcattcaaatacccaactggtgggtcaaagaagatagtaacggattgagtcggcaattccggttattat

SEQ ID NO: 30837 - DNA, 490 bp, Arabidopsis thaliana columbia
gaaagctgttgtacagagacttggtttatgtggcaaaggtgattttacatgtccagctgactctgttttttattcctttgctcgacacccggttccttaaagtatcagattcttcttgtttcagatgggacagcttctttcccggttgtaatggtaggcggagtccttaacgctaatcagaaatgggacattggaaaagaagtctctaagcgcattaacagatactttccaggggctcaaactatcataccaaaggttgaatattctctacgtctcattcattatctctctctctctctctctctctctttcccgtcaacgactgaataagtgtgtactggtatgtatcttcaggtagagccagctgttggagcagcattgttggccatgaacttcttatcaagttaacaagagaattaatcggccacgtatagcttcattattgaaatcaatgactcttgaatcttcagaaatgccatggtgatatata

SEQ ID NO: 30838 - DNA, 1071 bp, Arabidopsis thaliana columbia
acccaatatatccgcggtccgtatttacactttacctagttagtattctcatatatatatttcacattgtaccattgtaattcattggatctgattggttacatgtaaatagcataatagtatacagtacttgcaaattttatcttcacaagtaaataaaaaatcacccattaggtaaattttcaattaaatcaactttacctctaaatcttcaattgtttgtttgagttcaaaataatttgttattgttttatttttcattttacaaattatttaattaaggaaatccaaaagtctatatttagaaatgtaattatttatcaaaaaaaaaaaatgcatgcgaaaacaaaagcagcaattttaagactgaaataattttgagggttatatgaaaaacaggggcaagagtgagaatagtatgcaaagacagagtgacactaaaatcggagttggttggggtggcggtgacgggacctgatgggaaatacaaagtcgccgtcagaggagaccgacagaccagcaatgtctggcggagcttgttcacagtccactgtcccgctgccaagaggctgatcctggcagaagcaccgctaccgtgatcctcacgcgctccaacggaccgcctctactcgtcactacgccaacgccatgggtttcttcagggacgaaccgctccgtggctgcgccgctctccgcaaacgctacctcgcagacggcgataaccgggctatttgagtcatcttatgttcttgatgaaacagaacacaaaagtttatttagagtttttatttatttctattttattgtattgttgagtctctaaagatggtgagactatttagacatatctaagataaaccatataaaataaagtatttgcaaccttcaaaaaaaaaaatctcatgtccttggcaagaaagaggaatttgttgtatgttctgttacttatgtaggatcatcatttgatatgctgcgtataattacgatagttcttcaatattttatattttagttatcttattattacgagatctaaaagttattttattgtgttgtatagtactagagaag

SEQ ID NO: 30839 - DNA, 493 bp, Arabidopsis thaliana columbia
cagattggctcaaataagtactcggtaactgatgcttgtagctcgactctctttgcttcttagatatattctcatgtgttttatgtttttcttgttcacttggaaaactggtttctagaaaggtttactggtgatgattctttttttcgttttttatatttaaatttcactattttcttttacttacaaaagttaaatcaaagggtgttgttcctgctgcaggtttttatcttgttctcagggactgtatctctattactcgaggtcattttgttatcactgcttaaaggtatccatcattctatttcaagacaacctctttaaagcctttgatttggcttataagtaggatttgcgtggtggttgttggttcacttaaatttgcttcattaccactcctacaaaaactatggaaaaaaatgcaaaaggaaggattgtggttctctgattatgatgtgggagctgatgagttatgattacattactgcgatgg

SEQ ID NO: 30840 - DNA, 600 bp, Arabidopsis thaliana columbia
acgtttaagaaataattcactaaagtttgtaaaaataatgtaaaatctctaattaattttctggaaaatttctaaattcagtattttgtgtttatttgttgcttataattatgctaactacgagttagatatgggaacccgtatttatagggaatccaacaaaactaatgcaaaaaagtatttttgtttacgattttgctcatcaactaatttttgacgtatttatcacacacaattacatatttttcccttttaactctcaactgaaactacctaactgtgtattatgaattctatctgataaattttcaaagaccggtgacctacatcttcctactttgttcgtttcttactgtctaatatttatttggtaatctaatatcaattgacaaataccaacatcgactttcaacaattgaaggtctatgataactttttctcaatatgttcaactaattttatcgacttacgttgctgtgacacaaataatttctttagatgttgtatcatggagaaaaacaaaagaacgagaccaagaagaaaagtaaggtacatattatttctttggtcagaagaaagcaaacaaggacaatggagata

SEQ ID NO: 30841 - DNA, 511 bp, Arabidopsis thaliana columbia
tcacggtataaggaagcaagacacgtactcgctttattattatttttcattcatgctaattttcttacttttatatgtgccacaaatagatacggaccatctcttccgatttactaatatgactctgtgagttacatagataagttgggataagtagggagcgtgcgttggttcactccgaaaacatatcgagtggatcaacaaaatccctttggcaaactgttactcttattttggcgtcaagctggtaaggtgtgccttgtacgcccatatatgctaacatttcctcccggttttcattaatcacattgttgtggaattccactctccacttccctcaacacaaagagtggagagcaactattggaaatgatagtttgccaataataccgcgatgtttgacgttgcttcgtccggatgattccaaacaaggcgtcgaagcagcttcccttcccaaggaacggtcattcacaaccaaaccaaacttataatttatatttatttattatta

SEQ ID NO: 30842 - DNA, 560 bp, Arabidopsis thaliana columbia
tattttaatattatgataactttctaaaattttgtatgcataattatgtataaacatcatctaagcgacataagaaaataattttttcgatcttgttatttacagaaaaataaagaaaacaaattgtacaaaactcaaggcacgagtcctaatcttatatttggagatactataggtcacttcgtaggtggtgtttcgagatcaagttagccattgaagaagtcataattgtcatcaaagcagtaaacaaacgtaaaatgaggataaacaattgatgaaatcatagaaaaatcacacataatacggatattgtattattcaaacgtagttggattgtactgattttgagtataataacatcgaatatagattcaattattgagatgcgtattgctttattatcataaattaataaggttctgccattctggtcagttctagttggtggctttaacttgaatgtacaacagcctaagatttaatacggtaacaaaaagaagtgtacttgtacctgacccaaattagcaagaaaagatttgtagtatgatttattttgatgg

SEQ ID NO: 30843 - DNA, 547 bp, Arabidopsis thaliana columbia
atcagcatcactctctaagtttaaaccttcatcttctctatatccctacacgaacaagtaaatccttctcaggtcataaaacaccaatagaaacaggtaatcataaattcaaaagcaggctggcacgcaatatcactccacgaaaacctaagtttgtactcaattatctatatcaaatctcataaactcacacataagttttttacagatagacaatcatagcaaacacaaacagtttcaagaactcaccaataacaaaaacttgtatacagacatacaactacataaagatatggaacataagagaataacaaacctgcttgagagcattgggcaaagagtgacttgagctttggttaagacattcaacaccagaccagtcaataaaatctagtagatcaacctgataatcaaacacaacaaccagaacttagatagaatcgcttaactatatagacacatcagaaaacttcaaatcaagattcgaacaacagataagaaccctcgatactcttcccatccaagaattgaattcctcattgcagaa

SEQ ID NO: 30844 - DNA, 548 bp, Arabidopsis thaliana columbia
ctttattttggtctaatggatctcttatttgtgttatgcctcagaactgcagcagcagtttgaacactgtcatccaaaggtgtgacaacaaaatctcttttgcccggcaagcatcatctgaacagggcttttttatgaggccagcttcacccgatgatgtccttgaggtaccataagttttttattatgttttgaagtccctcctccttcttctctggtcacttactgtctaactacacttagttaacaaagtcatatctgtactgtaatgtaaatatgcccacaccattaacctcttctgtcacttgtgatgatgattcagaacttaggtatgaatttgaagaacactgtcgttagaaggggtgacaacaggctgtattttgctcggcaagcatcttctgcacaaggtttttttatgagacaggcttcgactaatgaggtaccattaatttcttattattatttttcaaagtttctcttctcatctatacttctgtaaaagagaattgattcaaaatgttctttgcagaggaccataccacatgatg

SEQ ID NO: 30845 - DNA, 561 bp, Arabidopsis thaliana columbia
gcaataagatgggatttaaaatgcataatcatatgaataaatcacttcaataactgctaacctgagttctctggcttcccaatttcgattctttccacctcaacctgcatacattacagaaaatgtaaacttaaaccagtagcagcaacattttataccatcaagcattcaataaatacaaaacctgaacacatcaaattggataaggaaaaagtaaaaggcatttggaaactcacaggcacatcaggaagcaaacttctattgacttgtggagatttagcagcacgaccaacaggagataaccgatgctccacaggcaccgcagattgagaagccgcagcagattcaccaggtgtcctaacatgtcgcagctgcgtaacagcccgatgcaacctctctaaacgaaacttctccccatcgaaaaacaacaccgcatcgctttctttgtaatcctcactactaccttcaaatgtcaccttgggtttacctggttggttattctgaaactcaactgaaactctgttatccttcttcttgtgcattgatcttgacctgatctta

SEQ ID NO: 30846 - DNA, 604 bp, Arabidopsis thaliana columbia
gttgaaggtacatgttgaaataacatttccagtgtcagttcacgatgtgaagtaggttcaagcttatcttgcttgtgtctagctgcattcctttttatctacgaatattctttactgtctgactgtcattctttgtggtgtgtatgatcagaaggttgtttgaattccttttgctttcggatgctttggcaaagcacacgtagcctccgattctgaccaagaggcaggccttcaggttcttgctatgattctggttcatcctctttggcttattgaagtatctttgaccaagtgtctcataggtttaagcagctgtgcaaaacgtagcggaacgtgtgccctgataagtgtcccattctctgtatattcctatatacgcaacaaacacaagacatgagaatcaaatgagttatctgaacaaataaaggaaaccaaagtaagatggtcggtcatctacttacagtttctttcaccattccaaccttgtgtatggtgcttagaaggtccctttatcaaatggcaaaagggcttcacccaaaccattgaatcctgttacagagttttaaactaaattctaatgtgcgacatcatgacccgaaaaaag

SEQ ID NO: 30847 - DNA, 853 bp, Arabidopsis thaliana columbia
agtcaaactggctcatagttctctaactttgccaacctattgcaatctgtacaagctatgcagaatggcagaagttacccatcatatggagagaagaaaccaagaggtctagaatcatcactgagaacagcaacctttgagccagagtcatcatagagctctaaagccatggaattaacagatgtaccacatgtctcacatagctagtctgtaacagctgctacactcatctacagaacaaaattcacacaaaaaagcctttatagatagcactacattgaaaaacagttggaatcagtactgaatgtaaaacgagactcacttgcggagagaaacgagcgtccgcagagaagcttttaaggttggcgtgagtaatgtgtagatgtacagagtcatctccttccaactgtaaacgcgaagttgccattttttcacctctagacctgacaaaaaagctctgttaaatcacttatctcaatgaaatcaaaaaaaaattcgactttctcgaattgggtaacaaaagacgcttaccttcttagctatttctgggcaaagagtttgacttgtcagcagaaatcgaatcgaatctcgccggatcggagacgcaccgctgagaatgtagctgagaaacgagagagacgattaataaaacgacgtagttttctctagtgttcaaaaggtcattagactcgttagatttaggcacgtgtatagtcgcacgttaaacactgtgtactcacccgcaggttagtataaatcctctaatccctggtctaaacaaaaaggacacgagagaatccgtgaggaggaggaatattccggtgatggctgaagatttttcggtggttgtgtt

SEQ ID NO: 30848 - DNA, 576 bp, Arabidopsis thaliana columbia
  unsure (1)..(576): unsure at all n locations
taaaatgaatatctatttataaaaatatcagattacgtttacaaaatttagtaatttgcctattattttgctaatatcagaagcacaatgaacatttgaacatttcagttgagggaaaaacagtttcattagatatgcaagtaaaatcgaataaacaaccaaatcaaatctttcttcaatatcgcatatcagctttctttgtacttctattaaaaaaccataaaaattcgttatatctaatttcagttatgatttctcgaaatctcataaacatccaaatcatatgtctatcttcaatatcacaactcaacttgatgtatctggcctaataaacgagcttaatccattatatcttataacagtttcgattccatatcttcaactaatgcagattttgttccagaatattcttaaattctattcgattcttgaaacagaattatactattatgctaacctaaacagtttatgcttggaaactataaatacacacatcatttacaaccctgaacacatcagcctactccattttaatagcataaagttcactagcaagatntaaacaaaatgaatggg

SEQ ID NO: 30849 - DNA, 627 bp, Arabidopsis thaliana columbia
ttcatgggaggtaaagaagaagaaaatcgaggtgaccgtacgccatgcaagaccagctgcatctaaactttgtcatctttgcgtagtgatttgtgatagccggggtttgtcaacagttgtttgtgataacaaagctcattggccgaaccaaaaacatactactgtagtgacacttacttcatgttctacctctttatccttgatcaatatcaaacccttctgacttcttatttttgatgtaggccgcctttgtagccagcaatggttctcagtccagcgtttcaaccaatcctttgaaggaaccagagggtttgcagcccgtgtggtgccaagtctgccagatcagctgcaacagcaaggttgcatttgcaagtcacacatatgggaaaaaacaccgacagaacttggaatcacaatcagccaagaacgaaactatgtctactggaccaggcaagctttctaaagattatggagaaaaaacgaagaaagtatcatgcaaaaaccaaaccacatttgattctcaactgaagagtcagaaccattataccatggcgaaggagcttgtagaggtaaatcttctatttaggtttctttcgtgacttggaactgcttttagtatgaatattc

SEQ ID NO: 30850 - DNA, 646 bp, Arabidopsis thaliana columbia
tattacttcttatgttggatgttcgtgtttggtctgagaattacctccttaagcacaagttgttcctttataaatgagctccatttaggcataatgatgtgaaccctttagtttttgttggtgtagactcaaattagagagaggagtcgctgagattgataagctagcaaacagaatcttccatatcgacaagcttgggaatcaacctgaattgtgatagaagagagaaaacattttctaggaaactaaattgtctcttttgaatttgaaatactttatttggagcttgtttgcttagcgcatatctcgaatttgattatatctcgcaagataattatgtgacgtttttgaattatgtaaacatctcaataagtgatataggaaaatttaacttacaaacagaaaaataagcgattttttcaatacattctaatagttgaatacattaattagaattaggagggatacaataatagataactacaattcattcgtcatgttctaaaaatagagagcaataagtacgacggacagtaccgtcactacttggcgtcatggtagataggtagtggatctgctagatatatgagaccggaaagacccagaagctattagaggcgggaggagatatgtggggatgattcag

SEQ ID NO: 30851 - DNA, 551 bp, Arabidopsis thaliana columbia
tctaatagaaaacagattttttgtaggatcgcattatcgagaaattaaagttggcaatattgagaaagaaattttcatcacttgaagcacatactgacatctactcattaaattaaaagttttataattcccaacaaagatgatcatgcacatggcaaattgaatttatatatgaatatttgcctagagagaaagataaatacatgacatgtaaggattaggatcggatcaaagtctatgatctattacgtgtccattaattaggttggttaagtcaaattgaactgcaatagacactcaaaaagcataaacaaatcttggtttgcattctttgcaaattttctatatctgacaacgttattgaaaccattgagcgaaacataattgttttaagaaattcgagttgtaatttgtcaggaacggagaaaattgaaaacatgctaaatcaaactagaatagcagcaaattttaatccaaaatccacacgtcaggacacagtgatctcgactcttaagttaatagcttccacttcagattagtcaacactttga

SEQ ID NO: 30852 - DNA, 510 bp, Arabidopsis thaliana columbia
ggggcaatggtttggctattctactcaaattattttttagttatgtgttgggaaagcatgtgatccttgctgatgatcatgttatcgcaggtaaatgtacaaagtgttaaggatgccatttgttcagcagttgatgttatgcaagcaatggcatcttccatatgcttgttgctgccaaaggtgactcttcttttctctcggataatgtttatggcacaatcttctattgcgttttattcatattgtatcttcaaagtgaaagccaatatcccaggttgggaaaataagtagcttggcagcagaacttggccgtgtgaatgccaaggacgaagggatgctcgacgtgtgccgggaccttctaaacacaatctcagctctgcaggtacaatatctcaaattcattatagatttgtctgcactatacctacagtgttggggattaatctctaaactatgcaggtaacagaatgcagtttgaggacacaggttacacagctacaatagtaaggt

SEQ ID NO: 30853 - DNA, 1255 bp, Arabidopsis thaliana columbia
catctgtctcaagataaaagttcccatcttaatcaattccaaagtccttacaaagttaaacgtctatacaaattataatgactgttgatcagaacttcaatatcatatatcaattttctcaaaggtattcattcttctggtgatatcatttttcctatctctagtcatgtcggggtatttctgctctaccatttggtaattggtatcaatatgtatgcaactaattagcttagtattaaacttcataaacatatattatacgcccaattatagaaactcttgacatgaatcaatcccattcttgattgtttctcttcaaacaaaaactagccatacaaggaaaagggatctcttgtgacaaatcaatctagccaggaaaggtttaactaggaaatcgctaaactataatacaaatcgtttcccgcatatagttccgattgcgctagccactactagccagtgttctcttggattgaattccaagtatatagactcgataaaaaaccttaaagaaattcagaagaagcctcatctcccgattctggctactcggtttctcaacttcctattatgcttttcctggaagaaccattgaagatgttgtattggtacaattcagtaacattttgctagacaacaatcaataacatgaacaacagcaccactataattcttgaatagcaataacatcgaattttgaagatggttttgtacctgttgaaataccctagccgagctcttctcaacatcagaagccaagctctcgatcttcgccagcattctctcatacatttcttcaatcccgcctgtgtaattcgcagcttcagctccaaccaaacgtttcaactctccaacttgaaacccctctgctaacgcatcgatctccttctgatctttcgctgattgtttcttcgcactcaaggaactctcatcgcaatccacgctcatggctgagctactcaactcgcagatcaacggtggaaatcccgatttcggactaaacgaaccgtaatggcctcgaaacgctggtccaatgttgactataccaacggatctaggttcgagccgttgtttcgaggatcggaactggtacgcacggtactcgtgcgtgtgaatgcactgatccgtcaatggcatagtaagaagaaagaacacggatgaagccatgttcatcgatctagggttttgaaacctcgattggtaagtgaaattgagacgagagagacgacgtgacggctaactctctcattgatgg

SEQ ID NO: 30854 - DNA, 523 bp, Arabidopsis thaliana columbia
tttcgctacgctctactatcaaatccaatttcgaatcgatctactcgaatttactggccatattctcgaaactatcgaattggaagcgattgttcaagcgacatggagagaagaaagaatcgattaccttgacggattccttcatcttgtggaggatttctctaccggtcatggttggaaaatgaagacactatctatatatgtgtatgaagaagaacgaaattaatgttgaatcgcgagtgtaagagagagagaaggagaagaagagaatgacacgaacgccattgttgcatgtctcagcttccaccgccgctttctttgcggcttcgcgccacctatgacttttccttccttttttttattacaaacggccaaaaatgttgttagatgggccgtttcacagcccaaactattatgggcttacttctaagattcatatctctaatgttaattataaacaaaatagccactagtttactgaagatctaaaatatgattagcactaatttaatgatgataggtt

SEQ ID NO: 30855 - DNA, 573 bp, Arabidopsis thaliana columbia
agagcttgttggtgaaataaacagactacagttttttttttgtcataaacagactacagtattttattttattttgtcaaacaaacagactacagtatttataatcgaaaaaataggtacattgatactgttaagttactcagcttatatatgtagatacaaaagaaaaccatatgtaacttcaaatttaatagaaaacaattaagaaaaaaactactactgttcttaagtactgtttaaaaatgaaaatagcatttcaaatttggggttcttttatttgttttctttggaacaataattattaaagaaacggtgagtttccttccagccaacattgttacatcctgacacagccactgacattgacagtgatttttatgtttagtttcatcaatacccttaaacttctatacattttcattttgacacctcatgtttatatacttttcaacaaaacccaacactattgatatatatgtcactgaatcactgttcagagttccagcaacccacttttcaaaatcagtttaagctgacttcattaggatatattatcttgtataaataattaat

SEQ ID NO: 30856 - DNA, 227 bp, Arabidopsis thaliana columbia
tagtatattatttattaatcgtatattatatttacatatttatattatataacattacacaaatatacatattgatcttctatatcattagaagtactttcattattctctcttagatatgtactattaattacatatttacacatacctgattctatgatggaatcttccccatgcatttatctatcgtagttgtgtgggataagtgatgtactacactatttatt

SEQ ID NO: 30857 - DNA, 548 bp, Arabidopsis thaliana columbia
tatcgagtcaacaaaacatctcgtccccaaataatgtctcaagaatacaaacaatgatcaactcgagaacttggagttggctagaaaaaaacaccaagctcgaagacaataccaggggacagatgcttcgtttactcgacattgtaaggggtttaatggatgaaaaagtagtattatatattaagaatgtgttgatatacaatgacgaagctgataccaagtagctgaaattgaagaactgaagataccagattctctagctactccgcaaaccttctaaagcatctgaaattgaacagtgaagtatatataaaaaaagcatccaatggcaggtgaattgatcagatcaactccgcgatgataagcattcatagaaaaagaaggctccagtttttatatattgtccatcctcttaagcaagaagaagtggtcaagcaaacaagacatgatccaaaagaagaaagagttgaatggatcataaatatcaacgacttactggtttctctgacttgatatgttagttttgagaacagaacatatgtatgtgt

SEQ ID NO: 30858 - DNA, 561 bp, Arabidopsis thaliana columbia
tatgaatctctctcaagcttttgatctaatttgatctggatggtgaaagcgaaccttgttgccacctctcaagtagacattgacaaatactatttacatctggagaagcctgtaaagagatgaacattatattaagcacatgacttcaaacctgtcatgtacaaaaattgaggaagagagctttcttggtaaaaccattagagctcgtagcggaattgacctgagagacctttctttctatgaaactagctgtatttcgaatgctatctgaaaacgtgactcccgttttgttgaagccggagattttctataagggactggtagtatgacttgaggcttcggatatcattgccctggaataccaaacacggaaaggagagactatgtttaagcacaagacgagataattttttatctacttatggtcgttttgagggagtaaaacttaacaaacctgcaacttttggcaatactgctccgccaaatcttgtggaatatgtgctgatgggaaacttttcgacataagatgcatgagaaacgtattaccaaatttttcataca

SEQ ID NO: 30859 - DNA, 478 bp, Arabidopsis thaliana columbia
aatttgggatacaaaaaataaacaaagtgttatcttaaatgctatagtctatagaatcttaactcgtataggacctctacactcttgagccatgaaaaaactgtacagtcccactgggtcgataattgttttacttttacaagattcagcagtaactaaaagcaggattagaatatgtttaagaataattgaagataatcgaactcgacctattgcatatgaatttgaattggatagaggatgtcatatttattcaaattaaaggagggaagagacggtagagagtggattgtgtcagagaaaaatcattaaccaaccgacaaagtaaccacacacagatgcatttgataatatgccacttttggctcctctactcctagtcttaatgggcaattccgagatatgcacgaagagtcacaagtcccattgtcgttgggttagcagtttgtcacggcccaagattcgacttattcacaac

SEQ ID NO: 30860 - DNA, 542 bp, Arabidopsis thaliana columbia
ggtcacttggtcagggaccataaaaaaattataaaccaataatatggaactttctaattagaagaaaaatgaagatggttatgtgtcatgacttcactttcaattttaagacggaaatttgaatgtgatggatattttgaggagtgaacgaactcatataacctgtggcattcgtgtacctaatcaaaaatttgtaagaaaaaatagaaaaataaagaaaacgaaggttctccccaaaattcccgtgcgtaaagtcaacttggatttaagtagtctgtcaattatatcaactgtatgaccacatggcctcattacccatatttaatacaattccattgttggtcaactcttaggtgtgagacccgaaatactttaaattctgctttgctctgttctgatatttttataccctttttatattacagcaatctgtactttaccaaatacaacaggtcagcagattcatgagcaatgtttttaaaaataaacgtaaaggacatgtgtatcataaaaagaaactcataagaaataaaattttagta

SEQ ID NO: 30861 - DNA, 466 bp, Arabidopsis thaliana columbia
ataatgtgagtggatcactcgtatctcggatttcagcccaatttgttttaacatgataggcttgttaaacgagaggctggctcatccatcgaattcctttgacatgatccaaagttactcttatcgcaaatagattagactacggttcaagccataacacttaaatccacacttcatagtctcttgaccaaacaacacacttatgcacactatctttttaaataaaacaaccgtaatttgggtcgatacatatagggttccttatgtaagcccaaaatgtaaattggctttaatcagccattaaatgggccaacaaggcctttaaatcaaaacagtataacgacaaaaacgtacttggacgtcaaaaacagatagacacgtggcagtttattgttgatagacaaaaatcgtgaagccgcttcttggaatggagattcttcactttggtggactagagactctttga

SEQ ID NO: 30862 - DNA, 684 bp, Arabidopsis thaliana columbia
tccagtttttattgagccgaaaccatcattgttagtttgggtgacgatagattctgcagtaccttgacacaaatcttcgtttcttggggaatggagcgacaagtgtgacgtagatgtgcatcgtaggctcctacaaataatgaccaaaaaggcctttttccatcaacaattgcttctttttcttttctctctttttttgccacttttttccccactatggtcatgagtcatgaccggcttcacataaacgatgttgaatcaaatagctttttgggcggggactgagtggaattaaagatgatggattcagttagggttttgaggtagttcttggcccataatatggcccaatatatgaattttgacttttttcgaattatcgttgaagttcatctcttaacaataataagcaacaactttatgagataatgaattattgcaatacaatgatgtagaaacggaccaatacagtgtcgtgtttgacgtttaggtgggtttggttataattgtcttatcactggcccacactacaacaacaactctcgtctaaaaccaaaccctctgacatggaaagagagttttgatctacgagccaattgctttggacccgagcctcgtatttgcctccggacccgaacctctgtttggctcctcagctcgccgttgaaaaatttcagcactgat

SEQ ID NO: 30863 - DNA, 599 bp, Arabidopsis thaliana columbia
atccctagttaacgtatgtagatgtcgtttgtgccaatcgggttctctgtttcctaaaattgacaaaacctcgactcttttccattttatcattgttattttagtgaagagtttgaatctatatggtacacgacttacttttaacaaaagaattttagaaaaaaaagaaagacatttgttattttccttcgaaacaaaaaacatatcatgagcattaagttatataatacttgaacatcacgcaggatgtctttattttcctagggtctacaatcatacaagtcgttggactaattattggcaaatatttattcaaatagactattttcaattatttgtttaccggtaactattaatgtcccaatatattttcttactatacgaagctaattcatcatctttaccattttagattctatcaaacataattaactatgacatattttgccatgcaatcagcacaacaatttccttccattcgttaaaatgtaaatggcacaagttccttaatctttgctcccaagttctgattgccttgatgttaatgtgcaacttcaaatgttctttgtcatcataatgtagctctatatccacattga

SEQ ID NO: 30864 - DNA, 502 bp, Arabidopsis thaliana columbia
cgactgatcccgatccctcaattgaaaggtagttgatatcttactcaaaacattattctgcttcttgagggtcacgttctcttgtagcatcgattctttttccttctccaaatttatggcatcagtttggaaactagctatggtctggtcatatagtcttatactatttttctaaggtgaataatctctttttatcgtcaaaatcatgatttaggcccatcaaccatatatgcataattgcattcaaacaaaataaataaagaaatacttactttacatagtgaaatatagacgtcgtatggataatggaaacaacatcaacaatgtaggatcaaaaatcaaaactcttcacaacctatctattgacaacgaatgcttattgttttttacataactttcaaaattgaattagaggctataacgacagtgagaatttcaaatttcatttctgaggcaatcgcataattcccaccggcgatcggagatgagcagccgagactgt

SEQ ID NO: 30865 - DNA, 711 bp, Arabidopsis thaliana columbia
aaatctttggatgcttgtccaagcgaggagcttacacaagatcaagcaaattccatctttggtacattgatctcttgccttgtacattacagtttggttatatttacacgtaaaactaagttattcgagttgttatgctttggagaatttgactgttagtttctttctaatggctaattacagaaatactcggagttagctacaacttagagatcactgaaactacaacagtgccacagacacctgctccttgctcaacaaaaccagctcggtcaagaagacgagcaaggattgaagaaacatcctctgatgaagaagaagtagcatctcctccaccttctgctcctaatactttgatgacccgatcacaccgtgcaagtaaagctgctgccttggccaaaataatggcaagcaaagtgaaaatgagcaatgtagacgaggatgatgaggaagaagaaggttcttctgatgttacagcagatgattcagatgaataactatagagagttgaattaggggttggctctgttgtttgtacgtttgctactaagtcgatgtgtgttttatgtcagttataaaaagattatagccaattcgtagcttgttatgtgtgagtgtcggttatgtttgctgtcgaaaatctttgtatttagattatagaacagataaataagaaagcacttgaatattattgaaaagactctgaagttg

SEQ ID NO: 30866 - DNA, 604 bp, Arabidopsis thaliana columbia
gaagcatcatatgcaggatgtgtataaatatttattaaaaaatacaaataagttaaaggcctctaaaaccaaaagaaaactctaggcttgctctaagaaaaaaatatattggcatttcttagagttagagcacgtaatattcttaaaaatccgtttccacatattttggttctacattcccgattattagaattcaccttagtggctgttgagaggacagactctccccagatgtagtggctgcggtcgtgaattgggttaccaaagcttgttgttattctgtttgtgaatcatgaaaacggtcaaagatgattctaaggtagaataggattagaaatcactagacaatgcatcctatattttaatgattatgtcattgaaaaactaattatggtacttattttaatcttcaattaattagatcaacaatttactcgttataaaacgatgaacagaaaaatactccattatgttactagaacgaagtctacgtcattgtaagcaactttgaactgtccgtcttgaatgtttggcaaacgatcatgtatgtgacatagtccatattaaaacgttaacatcttacaccatcaatggtgtatatata

SEQ ID NO: 30867 - DNA, 816 bp, Arabidopsis thaliana columbia
tggcaggttaggtctgcacgtcgtctcatgaaggtggttgtggactctcttttaattttagtaactgctcattcgatcaaaacataagaaactgcaagtttattgaatacttaataaaaatttgaaagacgtttgtataaagacaaatactattagtaccaccataactcatttcttcccctataaataacaactgatctttgtattgttaatcactcaacaacaaacacaagaaagaatcataaattggaatacttcaaacatcttttttcttttatcatggcaatcaaaaacgtgatttttcttctatcgattgtatgcgttgcaatgtctgcaaatgctcaattacctcaatttccggcaccgtttccttttccatttccattcctacccattcccggtgtactggtataacaaaatgtttatcatcctttatgaatattgcagggtgtatcgcagagttttcacaatctatactcactggaaagtttggcaacataggccctgtttgttgcaaagcaattttggaagctgaaaccaactgtattccgcaacttccattcaatccattttttcctcctctgctaaaggaacaatgttcaaaaaccgttggcgcaatttctcatacgagaaagtagaattcaaaaaccaataatgtaatcgttgctcttttttcaaaattagaaaaataaggttaggtttacgatttgtattcaaaattttcaaacatctaataatagcattataaaaaaataggcacatttttgtgacagtcatgaaatagttccaagtgctagcatctacatattgaaaaag

SEQ ID NO: 30868 - DNA, 1331 bp, Arabidopsis thaliana columbia
tcaaaagccccaccacctgcagccaccctacgcagaagctcatgtctactttcctttttcaggggttctacagagtaaaccaatcacctggacctaaatatggagcaacacttacacaaaattaaaaacatgaaatgaagctaatgaaaaatttagaaagtaagaagaaactaatcttaatattactcacatgaggagggcatttcttggtgagatgagataagacagtctccttgacgacctctagtaaagactttctctgaatccaaaacaaaaattctttaatcctttgtcccagcttatgctacagaactaatggcaagactaacaacagccataaaatccagagaacatgtaatatttgctacactacattgcaaaagcaattctagctatcctggtcgttctatgtagcaaaactcaagtcaattctagaaatatttttgtgtacattcagagggaaaatgcagaattggtttaccttctcgtcttggtctttgtctgcaagttggatcatgtaatcaagagccatcataaaccctgattccatttcatcaacccttttccctataactccttgtgcagccaattctacagcaacattctcagatgcttcattcatcttcatatcttccaactacacatcagagacatatcaagccattacggaaccaataattcccttaataaacaagtaacgattctatgtattaaaaagtgaacaatatgccccaaaaactactaagcctaacgccgttaagttgttcgacgaaaagcctagcttacaaaaaacaacactaaagcaagcccagatgaaaacataactctatggaaacgtagaaatacgtactaacgagtaagtaacgattacatgtaacataaagcttaatgcctataagttgttcgacgaaatgccaagcttagagaaacgaaacaaaagcaagttttgatgaaagataactcaaaatacatacgagggtaatcatttcttcaagaacggaagtcacttgttcgcctcctttaagcaaagcttcatactcagctggatctaatttatctttgacattagtttgattttgctgagttccgtatctttcgaacaattcttcatcggtgtatccacctccgacctcgtaaggagcgcaaaattgaaccagacgcttcagtttctgggtttgctttggacggaacgaagaagaggtgaaaggaaatgagcaaataaccgatggaattatgagagatctcttttagaaggtgatggtgtggaggaaaaacgagtatgaatggactgtaacatagtttgttttctcgtttcggattcacaaagtttg

SEQ ID NO: 30869 - DNA, 505 bp, Arabidopsis thaliana columbia
gcattgtcttttattctgattctttgctctttgtggttagttaggctatttgatgatttccagaggcagcaagggaacactctttatgaacacaattttaatgagcatacaatgtctgtaactgatattgttatagactatggaggctgcaatgctgtgataatttcctcttcagaagatcggacttgcaaggtacttatttggatcactaatgttatgcatttgttaactgcaatgaaagtttagctcttgtattgttaatgagattcattttgatatagctgagaaatagaacctgatatagcttttttatttgatgaccttggttggatttgtaaatccatataggtttggagcttgtcaagagggaaattgttgaaaaatatcatttttccttcagtcatcaatgcactcgcatccagacctggagggtgtgtgttctatgctggtgccagagacagcaaaatctatattggtgccattaatgccacaagtgaatacggga

SEQ ID NO: 30870 - DNA, 889 bp, Arabidopsis thaliana columbia
caaggagtaaccagattacattgggcatattgcagtcaatatataatcagaaggaaggagatagaacttacacttgtcaaaatcaggattagaggcacaagcctcaatgaactcaatgttattctcagagcaccactcaagacatgctcccctgatatctagtgatgcatcttcacttcccaacaagctgcttccttcagtttcggagatcccaaagtcatcaatgtccgaatacagatctctagaggggtctgatgccttcaaaaggcgccgtctatattcatcatgagcaaggtgatgagggacacgatctactttgttaccaatgcacaacaatatatcaaaactgttgatgtcagtatgagaaacccagtcttgaagagcaacaagggttgacagctgcaaagaatcgggtaaaaaagggttatgcagggatggtaaggtgagaagaatgaagcgtgtatcatcatcatcatcatcaatgtcaaacctcactcaagtcgaagaccataactaacgccaccagtggatgtgagttagggagattgggtagagagtattcatcgcaaatatgtgatatacatacagaaacatccgcagtgtaatacttagtgttaatcgtccagctgcccacattttacagagagaaaaaagtgttcaaacgatgaaacttgttagggtaagaaattcttcagtactagacgtacccatgaacttctgtttgagatgatgactccgatgaatcctcaaattccacagagagcaatcctgtgattgattacatattagagcaaaacaaaattttgaatcggatccgagagggagaagcgcgtacgagagaggagggtgcgcttgccgacgccagaggatccgacgaccaaaactccgg

SEQ ID NO: 30871 - DNA, 679 bp, Arabidopsis thaliana columbia
taactatctgtaatttatctctctacactttcttcatctcttaatcaccttaatcatcttaagctttgtatttctagatccttctcccaaaacaacgattcgtgatctccgttctcatagatcagtttcggatttggatatttcttagggatttgtgtgagatatttttagaattgtttcgatttagggatttgtgtgaagaagatggattttccagagaatttgccttcagatataggaagattagagcagattgtttctcatttcttcccaaaagcattacacatagttcttaattccagaatcccttcgttgcaatctcgtggtcgtactcgtgagcgtttatcaggtcttaacgttagaaaaagtgacaaatggtttaatcttgtgatgggagatcgtcctgctgcgttggagaaattgcattcttggcataggaatattctggattctatgattattgatatcattcttgtccatccgatttcaaacgataatttggatgatgatgatgatcatagtgattctgttgttagatcagctgagactgtgattgagcgttgggttgttcaatatgagaatcctttgattatgtctcctcagagttctgactctgcaacgcgttaccagaaggtttacaagaaatctatcattctgttgcggtctctttatgcacaga

SEQ ID NO: 30872 - DNA, 551 bp, Arabidopsis thaliana columbia
gaataacctataattcatcttcacctagtggacatagttacaaacacacattaatacacgacacattatccaaaactttgaatgtggttttttaatagccactctttaataaactataatttatgacaaaccatatttagtgtttgtggatattcacaaaaatgtggtccttcgtatatgcagaaacttgaatccatattttgctttaactgtttaacttgcatttgcatatgcatgcattattatgcatcagtctctcgctaaactattgaagtctatgaatcaaagtacccaaaattaattattttcaataactaaataatattgacaaatttaaaataataatatcctagtttgaaagacccaccaatctcagaccatgcaagctttcttccagttcaccaatccactttcccccctaataatttattttgattttatgttgccattagaatacaaattttatttatgatctcttattatcctttaagataaatatatgtattacaaatgctgtgtgtcctgacaaactcacatgcacatgtaaaaga

SEQ ID NO: 30873 - DNA, 768 bp, Arabidopsis thaliana columbia
gcagcatcccgggaggaagagagagagacgaaccgctcagcgcggcgacattggtggagatatcgtcggagcaagcgaattggagagatgaaacaaccacttctcgtcttcttccttccgtttccattgtttctctctctttctctgtgttttttctcacagtgaaggaatttaaggacgctcaaaatcgaatataaggtagctgactcatttgactgtgactagcagagagaacaaaatagaacagaacattttttcttttccaaaatcgaataaaggcgttcacaaacgcaagcgcaaacgcaaacgcagacgtaaaaccccaaattgagttggaacattttagatgttttatgaatgagggatcctaatccttgtatggtcttattttagattcttctacacttatctactatatgcacaagacataaacaagttgatacaaaataagtgttggtgggtaaaagttacattggtggatttaaaataactaaacttggaacataatcacttagaacataataactgaagagaaaccagagacataataactgaagagaaaccagggacaatatttcaattggtttgtacaataatcgaattttctgcaaccatgccttccaataatgtacatcatgttctccgtgaaatcctcgcatctcccacaatacataatcactttcttttcttcatcaataaaatctgtattcgactaaacaatctcttacctagaaaactagtatcccggagaagcaaaaggaaaacaaa

SEQ ID NO: 30874 - DNA, 554 bp, Arabidopsis thaliana columbia
gttattaaacggaaacactgtttatccctgcttaaaaataaacaaaaaaatatgaccaaaccattataatatagaaaacaaaagaaaaaaagatcgtcatgacaacgaaacgcgattttgccgtccaagaaacccgtccaaaacgacttttcttttatacgactccgaattcaaatccggcacagaagcagaaccgttgcgtttgcgtttggccaacgcggctgcgtctctgacacgaggtaggacgtaacaccaagcggatgtacagaggatcgcacagagtcgaccccacactaacataatcatcaacgtcaatataatgatcgatatcccaattaccgggtcaaaaggtttgacccttgacccgtttctcgaccgagttggtttcaagtcgggtttcccgtaacgggatgaaatagaagatatccgctctgtacacgtgtcttctttgaaggaacctaacggttcgatgggttttgatcggtcaggggttatgtctcgtaagtacattgattttgtctgtatagtatcatcttaactttggacttactcct

SEQ ID NO: 30875 - DNA, 945 bp, Arabidopsis thaliana columbia
cccctgcttgcatcttgcttttggtattgctgattttgttgatctctggatcttgttctgtttacagtagtatcatggctatgacatggtctaatttgttttctgttttgtgtaggtttgaagtttgcttcgctctgcctttgaagtctgttgattatttctccaacaggaccttggacagatattgttaatatgttttctgggataaagatcatacctcgtgatgaggtaaagtttctagtttcatatgatcctgaattttcttttgtgtttattcatcttggattgagtttgatgttatttttctttgctattaggtgcatgatgatagttgggagggggaaagagagaaatctaaaggtgggaaggatagaagaagaaagaacaaggacgtaaatagaaaggagcgtaggggagaaggaagtaagagagatgggaagaagattgccaagagtggagatggcgagaccgttgatgatgacttgcttgaaggggatattgttagaaagaaaatgggtctcgattggatgctgccgccaacccgaaaggctgatccaaaccctgcttcagatgtagaggataaatttgaagaaagtgcacctgaggtgagggaatttttatttgagagtatctttctaacaagtccgtattagatagttaagttaatgctttttattttctctgccaggtaactaaagttaacccaagggaactaaatccttatttgaaagaaaatggaaccggttatccagaggaagaatctgagaaaaaacatggtaaagaccagcttttaccttcttcggttgttggagatgggggtgcaagttggagaatgaaagcactcaagcgtgcgaaagaacaggctgcgagagaagggctaaggcttgaggaggtaagttttgtattgatttacgattaatatagtctcgttggtctttgagtatt

SEQ ID NO: 30876 - DNA, 623 bp, Arabidopsis thaliana columbia
taatcacatttccattataatatatttgtaaaaaaaaagtattcgagccaagtatatatgaatcaatgaaagatactatagtttgatgcttgattgggattaggataacacattatgcgatatgcgttagggataagttcttaatatatagtactatttagttaagacgtcgaagaagaaaggaatgttatctttcgttttggtaaacaaaagaatgatatcttaatgaatagattggaaaatattctcttagcttttaatatgcagattttgtttgacgacaactttagatgtcgattaggctcccaattatttaaacatgtttatttccgtttatgcggaacaagaattgtcaaagactttttctttttaccttgctagcagcatatcttcttttgagttttatatggactttgaccattaattttagagtaaattatctagagtgtcgcatatgggaagaacaatactcatgacacattaacatggggtttcaatatgattaaaaagaagaagaagtcatttttgatacgaacgaaagttcactactagcaaattgcacatcatgtaaatttcaaagaaagccttcaaaattggagagccagaagacatgaactttgagt

SEQ ID NO: 30877 - DNA, 1060 bp, Arabidopsis thaliana columbia
aaaaagtaacattgaatactactattaaaacaaacaaatcattccacgtgatgactccaccacattcccaaagtttagaaaaattatcaaaccctgtcataaagtaacacttgcctaaaatcgcaggtctttttttctacgaaaacgaaagagagttttgtaaagtaaattcatatgatctgcccccaccaattcatcatttatctctttttttttaccgcttgttaaaactcataatcaatgcatcccttgaccttagaacaaaacctgatgagtcccacacacatgtcacttcgctgtccatgaagttttttgaccggagctaaagtaatttaattgacttgatgttaagaaatgatatgtgcagagaatcgaatgtttctttgtgtgtgtggtgagtgtgtgatggatataattattggaattgaaatgtaatttatgtaaacttctagatttcgaaggcataataactctctaaaataattgagaattggataatatccgatgattaagatagcatttacttacaagtaatgttttcgatagaattaatggtcactatccaaattccaaaccatacgctaatggcttccaaaggaaaactaagactttatggagttttacataaagtcttcgttcaaacatcattttcataagtcttttgtaactttcctcctccttaacggcttcctacaatatctcgatttagaactccaatcaacatctaatattttgtctacaactttatgttttttcaccttactatatgatctagacaatcttttgttaggtaaagtgtctagatattctttcacctaattaacacggaaacgtaaacttgtacaaaaacatctattgattatagaagagaaccgagccgtgagagtcgtttctcgtcaagaccgcaccaatcgactcaaacatgagccaaactgtacgtagttcttataaggaacacaaacctccatcgtaaaccaacgttttcgatcggttctagctagactcgccatgcatgcatgtgcgttggtgcccgtaattacgtacaccgatcttgattgat

SEQ ID NO: 30878 - DNA, 1312 bp, Arabidopsis thaliana columbia
gttattagatatcttggagctcttgatgctacaggagaggttggtttctttcttagcatactagagtccagctatgtatctgtcgtttctatcacacacacatgacttgctaacaatttgcagaatccttgaaaacaagaatttttttttggtacgttagtcaatgtctgactgtggcactaggtttcttgatgtgtagaatctccaagcgagtcaaaagcaagatgcggctaaacattgcaaatgcactataactgatgtggagaatacgctgtccaaatttacttgggccaggcaagctcacaagaagatgacagagttgaaagaaggaggcaaaccgttaccaaagaatatgggagaggtattcttctcactttgtatactcatatgcttttttagctccataagctcctatgtatgactgtgtggtcacgtttctcatttcttagacttagaatagtgtctaatgagattttgcaataacacgctcttcttcgttttgatcatcctctaaaaaaactttaagtttctacacctaactaattcccggctcaagaacaggttcccttataacaagagctcgtttgtaacttggtgtttttggttagatttgatgttcattggttagaaacaggagtcatcttgcactatgttggtattcttaagattttagtttacatttaggcagtttgttacttgttggtttactgtttccctttgtcctgcatccatttagctagtagttatgatgacactaaattgttatattggtctattgaagctgcaaaaaatgatggggtcaacaccaatggatctggcgagatcaaacttagccaaaagtgggcagatcagccgcaatgcactttgtccctgtggttccaaaaagagatataaaaggtaaaaactttgaagagctttcctttttcccggcaaatacataagactgttaatcaaagttgcacttctatgtaaattcatcattttgttgcttttccatttatcgttgtgttgatatatttgcactctcttcttccttgaagatgttgcggaaaggattgaagaacacagaagttgatccaaagcatctaaagatacgagctttcttttgtttgactcttttcttggcttcatttactatttaagattgtagtatttgtatttttttaaggttacccataatcagttcatctgaatactttatttttgaaaaatagttcataacctaagttaaagtccatgtttgctaagtatatcatttcgttgaaagaacccaatcgacggctacaaaacagacagtcaatagtgaatagtt

SEQ ID NO: 30879 - DNA, 536 bp, Arabidopsis thaliana columbia
atcagatactccatatgaatgaacactcctcagtaaggacataacctgacctgcaaatggcggaacttagagaatgcttaaaccatgctggcttttaaggcctgaagagccatttgccaagaaattagacaaattattttacaacagattgttacagctttttctcatagtcaagcttgtttccttcctcctgtttttttctatcattcagcttctcttcttgatctatatgtccctttacttaaaggtttgacaaagcctttcaaattctttaatttctctcacaaaacaccctagttttatttatacgtctgggcctaaaatacctttatcactttcctacttgtatatatgaagataaatgccataaaaagagctttcaagtctatccataaggaataaggacactatctcagaaatgagagagagtgagactaacagtttgttgcaatttgtgcaggtgcaactctaaataatcctaatccacaaacatttcaacaagagaccagagtgacagtatttgaggacacagaaac

SEQ ID NO: 30880 - DNA, 771 bp, Arabidopsis thaliana columbia
taaaaatgtttactgtatgttcagaccgtctttcgcggattttaaatctggtatgtgtgattgtaaagaatatttccttgtactccttgatctatcattgagaatcccggtgagttagctctttggggtgtcttgtccgatccatatatctaatccgaaccggtgcaatagaaatcgtggtccaaaacaagaaaacaaaatgtgacattttcatagtttatgatgatttgaaaaacaaaatcttatacgaaagccaaacaaaaataaataaatgcatgtaaacatagcatacaaaaaaaagtaacgtgacaattgacatacacaccaaaaaaaggaataggaatatgtggcccgtatattagtagttatgtgatatacaccactattttcttacttgaaaacattattttttaaaaacaatttcacgcacttcaaatattgtggttcaaaactcattagattttttaaaaagaaatggccccaaaataaaaaaacaaaatttagtggcccaaaaccttgatttagcctgtatccagttttaccattcatttatgatttttggtgagctaccttgtctcctatatatggaagaggctcaagtttggccagtctaataaacacacaaaaaataatgttttgtttagtttagtttagcacgagtatgattttgatattctatgtatgggtcgattaagatgattatcctttggtacacatatttttgacaatcatattagttatcgggtcttgtgttttgagattcaaaattag

SEQ ID NO: 30881 - DNA, 541 bp, Arabidopsis thaliana columbia
gagcaatttttcctgaacggtaaggtacaagattgtagtgatgctgatagcttgagtggcagcagtagttgcttgcgcaatcatcatgaagaatgggaggtaatgtctgctaatccattatttgaatcttacttccttagaatatagtcggtaaattctatcattaaagttctttggatgtgcaatttcattgaaccggatcaatgtttgttacacaggttttggaatgccaaggacatccagtttttgagccttgtgaacctgcttgtagtttactcttctcataatatggaccaaatatcttctcatagtaagaccctcgcctactctcctaggctgatctgatacctagcctactagaacaagtgcaccatatccccaaaggtacccatattctaaaaagtgcacatgcttacgagtttggttccttgaaaactaatagcaaggattctttcatctcttctggtaaaaatattatgagtgtggagccagagaagaattatttcacctttgtttctccttgattttcaatttggtaaat

SEQ ID NO: 30882 - DNA, 1440 bp, Arabidopsis thaliana columbia
caactgtagaaagaatctccgatttgctcaaggagatcaaaacccttccaattcgccggaaaagtagataaagcggaggtttcgtttactaatagtaatattttaaattactccttttagtaatttgtatttacacattatatctccatgatactacctgagtttcaatttgcaccaaaatgttttggatgtttcaatttgatccttcatctttaatttgtggtaccacaaggtccactaggtccacccaacaagaacatgaatagacattgtatggctcgtgatctcatcaaaaccttctgtccctacaagctatatagattccatactacaaatcatgcaagtaacctcaaatcttaaaaaaaaattaatcaaaatttgactacctacctgattacaatttgatcattcatttctttgctaatcttgaaccaaaattttgactaccttcctgattaactctcaacttaaaaacaatacggaaggttacacaactttccaaaaccttacaatcatacaaaacgttacaatcatacgactaataacaaatgttacatttaattttttttcgtatgcacaataaatttatatagtttgcgttacgaagactacaacggatatatttaataccccacttatatctatacccaacacaatgaatcaacaaggtgagatgaaagattttattgatgggtatatagaaactataggttataaataccataatgatgaataaatctataacggtggaattcacatgaagctcaccaatttcacctatatacttagctctcaagatagactactaaaaaagaccccaaatttagcaaaaaatggaagccttgtggaagttggaggagaaactgaagctaactacgaaagaagccgttgtgatcttggtcggaacagcggctgcggtaacgctactctgcatagccgcagcgtttctcaaccgcaattctcgagggaagcaagtagcagacgcagagtgggcgtctgaaacagcgtttgggtcaaggactatggaggaaaagaggaaatgtaagtggagcaaagtgaaaagaacgttgatgggttctttttgttggagctctgctgcgaagtggatggagatggaaacaaggcggcacgaccattgcttgcggttaaagaaaggagtcttaatgcggttgatccggtttggcagcgaccaattctgatgggtgagaaatgtgaattgcctcggtttagcggccttatattgtatgatgaatgtggccatccgcgtcatcatcctcagcttcaagaaaaagtgagtgttaatttactcctgacctaaatttaacaacaaaagtgttttttggttttggtcagagatggatataagttcttgtcattgctgtgtttgtaggtaaaacagagttctgtggtaagacaactctgagagatttgctttgacag

SEQ ID NO: 30883 - DNA, 745 bp, Arabidopsis thaliana columbia
aaccccccattattaaaacatgatcattttctttcgtaataattaaacttcccaactaaatgcctcttaatatgtttaaatcttacatatcatcatcacttctcatccataatgattaaaggcttaaaataaaataatgttaagtgcaacagatgagtaatgaaacagagtgtgaccctatatgtatggtcaaccatgtttggtcaagtcgtcacataataaaactaatacttatttttattcagtaacagcaatgtatcacgtatgcaaaccattcatacactaataataagtgaatcatataatatgtcgtaaatcttgttgatcagtttatcagtgatgaccaataacatttactatttcctctaatttcgacatctattgattatctatagctttaagctgcattggatccaccaataaactttaactttaaatttctctccagaaaaaaagaaagataggttaaagaattcagataattaatgaaaggaaaggatcgaacaatacgagtaaaagggacacgaaactcctaaaattacgataccaccccactgattattgataatgatttcatttatgagattaattactctataagtcagcgtggcaattccgaaaataaaccataaaaacatgtcctaaaatgcaaaccttctttcctctgtagcaaccgcgtttagagaaaaacgctctgcttttttatcttcagccgtctcttttccgattcctctcaatctctctt

SEQ ID NO: 30884 - DNA, 407 bp, Arabidopsis thaliana columbia
taatgattaaacaaattattaagagagcttattctctaagattccaaaattgtgtgtatctctaattgcaaaaacttcaggtgattttaaagtaatggtgttttattatatggtgtatttatttttctctatttaatttatttggtggtttggttgttaattaccaaccaataattgtttgtatgtttattttagtgagttataattacaattgcgagctaacctccaaaacataaaatccagtgaacccggttagaattttgtaaagcctttcatcaaaaaacaaaacacacatcaatatttttaagaagtggtttgagattggacaagactactttcagataaagacaagtttaaggtcataaaagcaatatccaatcactaattttcttaatctatttaccaaa

SEQ ID NO: 30885 - DNA, 588 bp, Arabidopsis thaliana columbia
aattctccgtccccaaccaaacctgaagatgctgtgcaacaggagtttgcgagcattaccagtgactgagtacctacagcaacatcagtagaggaccgggtagtggcttggccaggaacaggttgatgattttgtgcaaggggcggcttattgcttaatgatggtggtgggcacaccagattgattaggacatttagtgcaggctggatgatcttcaataaagaaaacatgaaggaggtaagtatcaatgagaagcagaagaagaaagacaaaacccatgtgaataatggatagaagcggactactgacctcagggtctactatgctgttggaaatatttgctgcatccagaatgacagcaatgccagcacgattgttgctgagtgtggcatgtgcaattgctttgcggccatcaggtattgatgtaactatgtgaagaaccccaaaagcatactgaagaagatcatgcagataacgatctactggtggagtctgcgcatgtgaacataatgttaaaagatggtagacaaaacaatgtacatgtggagtaaaatgctacattacctgacaaagttccaacatggtaac

SEQ ID NO: 30886 - DNA, 588 bp, Arabidopsis thaliana columbia
tacaaacaaaagttaaaaacaaaagcttgatatttaaaagataaactcaacacatatgcatttgactggcgcacagaagacaattcaagacttgggaaaacagtgagccatcaaaatcgtcagataattcagggaatatattgaatgtggagatgtggtaatcacactattgcacacaaagagtggcaaacaagcggcgcccttggtttggtatagtaagagacaattgttttggactgtttgtgttgccatattcacaaaaatactattgagctatgtatgttaaacattatggtcaatgagtagtagtgaacattcaagtttttttttttttccacttcaagtttttcatcttattattatttttcgttgtgatgcagtagtacggcccatcttcaccagtagtatatcaaagccgaaacagatgacaaattgtttaacatgcacttggattattattgagagttgaaatacaaaggcccgttacaagcccaaacgaaggtacataaaagaaaagcagaaaatgaaaacgaaatcgatagggataagtttttccactgacggaaacacaaactacaccaggtgaaa

SEQ ID NO: 30887 - DNA, 1571 bp, Arabidopsis thaliana columbia
tactatgtgaatcaaacattttagagttgaaaagttcaaagtgtaatttaccatgaggatccaatgaagaaggcaagtaaagagatggtggctgtaaaaggtttgtaaactgtgtgagtccaagcggctgcgacaattaaacaaacgcagccgctgcagatgcctgtaaggaagcatatggagcttgttatgtctgcatctactatttcaaccatatcttcatcctcaaacagtttccatgtgtcttgcgatgccctcacaaatcctttcccataagccgctatctgtaacaacaatacggtttaaacaagtaaacaaccaatggtacaaaacactttcgaatggtgaaaaagtgatctagtctaagtttgttccgtctgttgttaccactcaaagctcaatactattgattcaatatgactatttttctaattcaaaataattactataaatgcaaaaagagcatgtggttgtgcctcgacttgtcaagatgatgcaagattctcatatcagaaatgatataaaaaataagacccaccacaatcaacttgattttaatactattactagactgattctctgtaagaagatattatatagaaacaaaatgactgcagcactgtttaaagaattaagaaaagagagtgggagtggcatggtttaaagaattagtttatagtacctgtacaaaggcccagccattgccatgttcaaatatgaagtccatgagtctgagacagcaattagcgcaaaaacatgaactcatcttcaccctttagcaaatttaatcctcttgccaagattcttaaggcttctattgttggaacaaacaaagatcctaaacacgcgctcccgaggttacgagacaaggccctttggaaactaaacctggtactagactgcattcccctaagatagtacaaagcaatgacccggctcacagttagattaacaatattcctcatcacttctgtcgtccaagccagacttaacaccaaaccaataatcacaagtggcggaaaatagaagttcaaggcaccgatgacaccgaaaatccacatagacatccagaggaaaccagcagctagcatgtagtaggtgggcaaattcaaatccgagaacttggaaacaggttctaacgacttgaccaaaatcttagaacagaacttgattctacgagtgacccagcaagcatataaaccattgccaattgagaaggcaatgaggcaaaccccaacagcatcagtggctggcatctggaaacacagtaagaggattcctgaggataaagacatcaaaaacgtactccaaagtatgaagtgaatcatgaaatcaggccaaatcctgaatgccatttgccaaaggaatgcaagaatgatgctcaagagcgatgcagcttcgacttgtggaagtaagaatctgaggatctttttctctttccttttgacgctaccatttgatccaattagaccttgaacgcctctgaagacaaggaagcctacaaacccaatagccacaaccttgtgaaagatgaagagcagcagaaagaacttgtttgtgtactttgttga

SEQ ID NO: 30888 - DNA, 689 bp, Arabidopsis thaliana columbia
aaacatatatttcaagaggtgagaaacacttacgtctttgcagatccgaatccttggaggcatctgcaagtgcccgttgaacttctttaatacggagtcgaagctctctcacaaaatgagcattggcctttgcagatggaagggaaagataaacctttgccctaataagctgatctttaagatgcctcacttgagcatcaggcatcaacacgtttccagtatctttcttagctccaaaagcattaggctctggttgctcatcaactttttcagaggtttgttgggtcaattgaacatgcatattttcctacaaggatccaaatatatactattaccaagcatcaaattcaaatctggagccaatcaacttagggaatatccaatctgattctccggaaaacacgtaccctattaatatgcgagtctgaggctgcatcatgagtgacttgtttgatggaaatgtcagtatgtgagtgagtatcatcgtcggtggcggaaagaactcgagcagacaattggtctgagaatgttaaaaaaaataatcaagtcaagtaaggtagacatcacagagagaggcgagtgagagaattgaagttacctagccgccgtgaattcttatcggaatagacagcaccgacgagtcctcctctgagcacagagggagattcctaaagatgaatgtgaagaag

SEQ ID NO: 30889 - DNA, 587 bp, Arabidopsis thaliana columbia
tcaccaattttattcattgtgtgaattaagttttgtccacatagtaagattcatcagtataataggacatatgataaaagtttgtatataatcaaagagtatatctaagaatatctaattaagatgaatgtttcagtccacattggattctgcttatagtcaaactgtcttgttcttaaacccaattaggttagaatacatgtaccaacaaatagcatttctataactaatcttttatcaatttactttatagcctacaaataattagaggaaaagaaaagagagttagtggaataattgtcctctaaatctcgatatcatcattaactaaatactatatttagaccatatatactatattttatagtatactatattttatagtatatatccccccctaatcatattagaccactattagaaatatggatctaaaaaaaacattctttaatcagtactattctcatccaaagacttgttttaagagactaaatatgaatatgtgtatgtgtatgtgtatgcaggagtagacacgtgcacgtggcacatgcagggaatgggaaggtggagtgttgacaagaagaaga

SEQ ID NO: 30890 - DNA, 757 bp, Arabidopsis thaliana columbia
cggtttgattaacttgtatgatacaagttgtatccaggtatgtcagtccttaactccatctttggatcccttgtcttagttaatttgagttcatttagttttataaaaagttcatgcttcttttttttttccctgtacatatatgatgttagtatgtataacattatatatatatgaatggattgttgaccagttggaaagaggagaaggaagcaaaggcaaaaaggagtgcaacatggattacctttcgcctcatgatcaacacagtgtcttctcatgtagatgatctaaccatctttcaaactttgtgtagagtttcgtgacttctgacttcagtttgttagaaatatcctcctcatgagttgtgtctttaacatctttcaaactttgttttaacattgtaacttcatcatgaattctttgttttgagaaaagaaacaaattctgtttaatatgttacagtttgcaatctccacggttaaaaacaatgttggttagaagtatctacatattaagggacttctgtgatcgaaaacaaaagtagggaacacattggtaaaacaaaaaacactagggttattttgttatataccaaagaggtcctcttttttttttttttggtcctcttcatattttctcatttgacccattttagtcaagatcccgtcactgccgctgattgtaatcacagtggctatgaactttcaagtggaacaccggagaagaagaagactaagaactcgtctccaccacattc

SEQ ID NO: 30891 - DNA, 476 bp, Arabidopsis thaliana columbia
gaacatactgtgtttgaacgctggaggctcttaaaatcatccaaagatattggaccattggaaccactgaagcctatacccttctgcctctaaatttcacaagtagtatcctcttcacatgagcaaaaacactaatcagaactcagaagtcaaaaaacatatgctttataatggtgaaaaaaagccctgagacgtgccattctttagttatatataaacatggaaagtaaggacagaaagaaaaaaatgtgtgaccttcgtgactcgtacctgcatttctttttctgttcatgcaggacagcgcaggattattaccaagtacttcgcggtaatcaaatgcaaatgacttctctgaaaaaatgcagatatctagtgttaacatgttaagtgatctagaaaaatgggcataaaactggaaacagtatagtaacccacacaaaacgaatcagtttaacttaaacaagtgataacaggtg

SEQ ID NO: 30892 - DNA, 267 bp, Arabidopsis thaliana columbia
aaacagaaaggcgaatctcttcttaaaaaggattgtcttgaagaaggaggtgatgatatcgattttgaccgcagacaactaagctcatccgatgagtctaactctaatgtaagtacattgactacatctgcttcatagcccgctgcattcagaattgaatgtttcataactcctggttgattctcttgcagtggtatatgtctgatgatgcagtcatgaaaccataatcccagtttggagacgttataacagatgtcagcaagacac

SEQ ID NO: 30893 - DNA, 568 bp, Arabidopsis thaliana columbia
tgtcgttaaactgttgtacatatatttgtacagatattatgctgtacagataattttgtcgttagactgttgtaaagtgctttgtaataaaaatttagaaaatcatgaaacaaaatgcatatcaaattatagagaagaaaatatagattttttattttatgataaattttagaaaaataaaatttacaaatgaagattttagttattaaacttagaagggatgaaatgtagtaaagaaagaaaaataaatttaaaaaaaaaaacagacccactaaacaaactctatacacgtctctctctttctcacccaacaaaaagcccttgtttgtaatttcctttctataccctctaccccactttcttttctatctcacaagttttctatttcacaaacagtaaaaccctgactatattactaattgtgaatagtgactgtactacctttataattaagttttgtactagtttgcaaacaaattctttattaatcaaagaaacaagcaggacggatcagaactgcaatgtgccatatctaggccttttgttctttatttgttatcagaactat

SEQ ID NO: 30894 - DNA, 459 bp, Arabidopsis thaliana columbia
tatctctgctacttttggttggtacgtctagcattgggataatgcatatagtacaaccgtctggtagcttaatctagtacatctatctaagggcgaagtctggtacaacactgtgagcagtgtgtcaggtacagctgtttggaggattcaagtcacgttggagatttgttagatatgacttgaattggattgggcccttaactttaggcccaattagtttagggttaattagggcttcttttgtataagtactcttcttaacctagcctccctgtattttgtactctatttcttaagtaataaatctatgtctttgcccgtggacgtagccaacaaaaagtgttggtgaaccacgttaaatttgtgtcgtgttttttacacctttggtgtcttgcctacatctgttataacgtctccaaactgggaatatggattcatgactgcatcatcagacctata

SEQ ID NO: 30895 - DNA, 558 bp, Arabidopsis thaliana columbia
ttttatttcagatttttagatgtactattcggttttttaggttcagataattgagtagaaacatttataatttgttcgagttttatgacaatttgattcggttcggttttggaaccgcatttttttggattgatttcagattttggattttagttttttgcccaaacctagcaatactggtttgtaaattatcaaaaagttggtaatctattaaatgaaaatttctcaactttattactattaaaagaacatgtgatgaattatggtgaattattaatgtttccaaccaaagaagagatcaattattgatattaatgtaatactactttatttgatgtgacctcggttttcaactttttttctcaataccgaaccaaaatcataatgaaaatcaaacaaacaaaactaaaccgggtaaaattgattcgatatcggttgatttatacctgacatgaagatgccacgtaaaccgacatgatttgtttctctatttagtcctttttttcgcagattcgtcgaaacaagtgaagaagctagaatcaaacgagtgagagagac

SEQ ID NO: 30896 - DNA, 1567 bp, Arabidopsis thaliana columbia
tgcaatggcatgtggaattgttttgtgagttgaatcattgtattggcaaaagctcaatctctgaacaaccacactaacttgcccatgtcgaaaatgtcatattcaaattttttcgttatgatcctctgctgtgtagaactttagctttggttcgttttcttcctacttggaaaacttgcattaatcaatttctgttcaccttttagtgtggccaggaatgttgaatgttttgttggttctccaattgcttacgagttaactatcttcgaaagtctttcaatatcaactcttgagcacttttctgtgtgtaatgcattagtgactaacctaggggtgcatcaattttcttttcctaatgaaagattttgttaattacctttgggcagctagaggcaaatttgcatcatcgtgtactttcacttgagtggctaagccatgtcgatgctgccgtagtgatgggctcagctatacatattctaattgcttcgacacgatcatggtcaaagactgctattggtaaaagaagggggacattgttggattctggggttaaccctactgcaaagaaaaatggtggattgaccatgtgctggtggagaggcgggcaactttcacgacggttattcaattggaaggttttacctcgcgctttaatctcgaaggctgctagacaaggtttacattttctcttttgttcttgctttcgcgtttgttcttctaccgtctttaataattatcgttcccatcacttccatagttccatttagttgtttcattctcgatgcactctacactatgcaggtggaagtatgaatattccaggaatattttatccggagaattcagagtctgctaagagaagccgacgtgttgcctgggaagcagcggtggagtcatctacgacttcagagcagctcggtttgcaggtaatataaactttgtcaaactgaatgtaattctcgtctcgttggtatgagtgagaaagtatcaatgttgaagtttcgaagggtatatgggtaatacaggtcgtgacacgaatttttgttttcatttcgtctacgcatgaatattgatggtgtcagtttcgttaaattttttagtgtgccatccatttcatatactgttacttggatttttactgacttttgcagtttttgtacactgaatatgttgtcttgtaacactgtcttctatagtcttctcagtgttggatgattatcagctaacaattctgtgatcacagattaggacactccaatcttacataaagtgggatgatattgaaaacagtcatcttcttcctacattagacaaagaatccagaaaatctgccaggctattcaaaaaagcaattgtccgtaggaagtgcacggaggaagagactgtgaaatatctccttgactttggtaagaggagaaatattccggatgttgtgtcgaagaatggttgcatggttgaagaatcctcgagtggaagaaaaaggttctggctgaatgaatcacatgtgcctttacatcttgtgaaaggatttgaagagaaaaaagctgtacggaaaactagcaagcca

SEQ ID NO: 30897 - DNA, 716 bp, Arabidopsis thaliana columbia
gagcttaaaaatgttgtattgtagagaatagcctgtagtgacaactctcactaccctcgatctgtctttatttggctagtcttttagctcgttattggccataacagcttgggcctatttctctgtataattggtttgattttgcaactgagaaaaaaaaggaaactctttaactgaatttgtggttagcttcaaaccaagaggaaacataacaattcttaattcggatacagcaatatactctagaagtctcgaaatcatcactaaccctatctggaacaattatgttagggttctcagaacctgaggtaacttgtgatgcttctctagcaatctagcaatagtctcaactctcaattgggagtgtaacgaaactgaagatcacatcaacaaaatcttgacacattttatagtaaattcaaaataaaacataaacatttcggacacatgaaaacaaacaaaaaacaataacaagaagtcttgaagcaaacaaatttagaaaggaaagccaacacttgagagcacaaaatagaaagagaagagatgaacacggatcactaattcactatgcccggtctctcacgacttgactctgcgtaagttttcaatatcgatacctttattccttaaccaaatcagtacacactaacacaccatacacgagagagactagcacaatcactaggtcagctcccactacaccatacgagagagac

SEQ ID NO: 30898 - DNA, 872 bp, Arabidopsis thaliana columbia
aggtccaaaaaggggttagtgaccatggttttctttctcacataacatgaatagtctaatcggaggacagcgagggcatcatcatcggaccaattccttcaatcgaaaaaatttgtttattgattccttaatcaaatacccaaatgacttccccaaacaatttgttaggagaaacttcatcggttctcaaccggagataacgtcggtgaactagaccaccggaaacaaactttataactgattcatcttgagtgaagccaatgcatcgaaagaaaaattatgaatgaaatgtcttcatgattggaggaaattgctggaaacataattgtttccacttaccaacaaatgaattctcaattgagacttcaaaatcaactcacttggatagatgtgtattattccttactgattttagatctgccatcaacactccatagaccaaaaattgcatcgagaacatcgaaggtctaccttgatatcttgccatcatcatcaagtggaagagaacatataggataaacaaagttctcaataatactacatccatctatatgtattgtaaaaaatacaaacagaaattaagaaaggacaaacgataaaataatagcaaggagtatggccgacgccggagtcaaagccagccggagaagataacggtttagaacctttaggtttaggttatgtcagttttgaagaaaaacggtttacaaaacatatgatgttttaattacttgttaattttagttatatatttataaatatatcgatgactaattaattacctagaacatttagtcataatgtttaattagcgtttacgatattttgaacattagtaacagaaacataaaatactgtgacatatgttattg

SEQ ID NO: 30899 - DNA, 434 bp, Arabidopsis thaliana columbia
acctaccattaatatatattctcaaataacaatgtaaatttttttattaaacgtattgaattaaaaaaaaattctcttaaattatataaaaatcaaacttgtgaaatataacacctataaatatattaccaaaaaataactttttatatactttccatctaattatgaataaaaaaattgatttgaagacggaataatgatcttatatttttcttttattaaatatttatcaaattaatttataaaatatatgtataataataaatcccatcgtatatgaagtgaagttgaatgaaattctatgtgcatgtatagattaatcctatattcatatgagaaggattgtgtaaattttaggtaattttctatattattgatttattttagttggttatttttaattagttacgtatatatatatatatatgcatatg

SEQ ID NO: 30900 - DNA, 498 bp, Arabidopsis thaliana columbia
atctcagctctaatatcacactgagtatatactgttgttttatttcttttatatcatcaaaatcaagagaatgtgtatatagacgaaactcaaagagttttgacaactctgtaattgaatccattttaatcaaaataatgaatcaatgcaagaacaaaagacaaagaaacacatgagataatttgcaagagcaaataaaatgcctttagttatcttccggttccttgattagtcttttagatattgttcttcatggttctttgttttctgaagctgcaaagctgtatcaagttatcatcaaacaatggagaaactaagtaaagagtaaagtattctgatgctttgtttaccttatgaactggaaactttgtaataagaaatattgcttggtctcagttccctgtagccgaaagtgactcaaacgcttgcaccaataactgaactttaagtttgcgagctggtgttagcttcgaaaccactccttgaagtgcgttatcg

SEQ ID NO: 30901 - DNA, 320 bp, Arabidopsis thaliana columbia
gaacaccattacaatgatttgaatttgagaactataaaaagtttgttatttatataaccacatctagaattgtgcaatgtatcgatgtgagtaaaagaatgtgaccatattacataaaacgatgatatatacatttgttgaattgagaataggtcctagttacattctccagagatatgagtttacatctttacctatcacatcattgtatactttctattctatccgtattcagattacctattagaataatcattaaaacgcattactccagccaattagtatttgatagtcagaactgaaattgttgcatttatgaa

SEQ ID NO: 30902 - DNA, 1055 bp, Arabidopsis thaliana columbia
tgcgaagaagagaaatgatggtataaatgagaacaacaaatgaagcaattttccctctaaaattcacaagttttctcattagtttctttctactccatttcttgattttgtggtgtttcgtttagaaatagaaagacgaaaacagaaattagggtcaaacaaacttggaccaagagtaactttttttgtggaaatttttgtactcagattatttatcatgccgttatgagatttctctgaaactgagctatttttcaggaatctgagtttcgatttcactgagatgttcgactcctactctctttatcccaccggaaaactatctccggtggttgattcgtacgtcaccgccgagctcgacggcgaagatatgagagacgactacgcgtttttagagtccggtttaaaagacaacaaatctcagtttatctcttacgcaaaacgcatcttagtcggagaagacgctgaatcagagagaatcgaagatttaaagcttcttaccgcttgttgcagttacgattccatcaactgtgcttcgtcaatcatcaacggcgacgttggatcggttccatatatcaacgatatttgttccgatacaggactctcgctgttgcacacagcggctgagtctcacgcgccactgtgtgttgagatgcttctgaaacgacgcgctcgtactgatatgagaagcaaagacgaacgcgctttgattcctctggagctttctctctccaatgtcaggtaatcgtctctttgaatcataagcttgaacctagtgttgactaattttgtttctatgtgtcaattttgcagcgtagatgtgaaatggaaaccaactagtgaatcgattgaagactgatcgttttgcttggtgacaaggttaaacactaattcctttggtttgcttggagcctgattatggaatgtgtggtgagtcatttcttatgtatataggacttgacggttgtgaaactactcgctgagaagacaaaggaagtggacgttgtggcttatgcatatgccaaggctggtgagatagtttcgttgactgcatt

SEQ ID NO: 30903 - DNA, 558 bp, Arabidopsis thaliana columbia
gagacttttagttctcaaagaagaaacctttacataaatgtgcatctatgtgtggaccttaaaagaagaagattgatgaggcttcttgctttttcctcccatcttcaccaccaaaactctacagctatcgtaagaacaagatgatgaagaccagttaaagtatacggcggaggaggaagaggaaccacctctctgcggcggcgctccggcggtcttcatctatttgactactgaagaattgaaaattctctcctttttttgaaaagtctataaaactagtggataatatcatgtcaacgttacgcttttgtatcaacgcattatatctttaagagagaaaaaaaaatccattttttacgtgtaagaaaaaaacaaaggatccttttttactggaaagatgttttttttttcttatcttctgagataaattgcgatagagagagagaacaaaaaaattctcagtgagcgcttattgatcaacaatggcgaaagagacagtgtgtgtaccggagctaatggttcatcggatcttggataaccgaacgttaattgagaaag

SEQ ID NO: 30904 - DNA, 591 bp, Arabidopsis thaliana columbia
gactctagacctcattctggtaaacctctcttcttttaccttgatcacaaaaccaaaaattccatgagaattccacatatgaaagtgttgatgtgtacaggaggtactacttcagtctatttctggagttatcagacatcgggatgccaattatcagagtggtgttggataaagtgagtagcgtcatatccttctttctcgtcaccttgatcggtagatcagtcggactcatcttcaccggcattagacagtctctccgctggaagtgaaatctcatataaccgtgatggtaatttttttgcgtcgacctcatttttggtgttcttttcattattcttgtttggtatgtgataaattggtgaaatatgatttttaacttgtagttttggcattgattcaacaatattaccaatgttcttgtgcttccggtttttttttttttttttcctctggaaaagagtaccttcatgtcttatgcaagttaggaaatttacgagctacctaggtatgtgtcaattaccaaaatgatactaccttttgtatcaatttttagagttgatctcgtatttgtgatggttaaataattgatgc

SEQ ID NO: 30905 - DNA, 611 bp, Arabidopsis thaliana columbia
ctcctgtcctttggagtttgcatgcttggttggttcttcttgtggctcatgtttcttggtttcggcccgacgccaactgttactttgggattggttgcaggttttgatgttttgagtttcagatttagatcttaagtttcttttaagcttaccttcttgtacttttatgcttatagtttgcttccctcttttgggcttaggtttccggggatattgatgtattccgccggcttagttcccgacagagttcgtctcttgtcgtcgttgtacttcaaaaatgcattctactttcgtataatataatgaaatcattcagtcggaaaaaaaaaatggaatatatgttaaggtatgaagtgtacctatttactattttcatcttccaagaatttcactaatattatcaaatccataagctgacatcaaactgctagagatatagcacaatcggtttctcatggactaatagaattagtgtcacgccagcactccatttatctaattttgcatcaacaatatctttgtcaactgtaccaataaatcatctggtaatttccaatttaatccccattttgataatttcacatcaaaattcaaaatgcacataatataaa

SEQ ID NO: 30906 - DNA, 806 bp, Arabidopsis thaliana columbia
aattgcccatttatggattttgaaatttccgaattatgaaaaagtaatgggaccttgattcctagagtggtaatcctaaaccgctgctacattgtatcctttatagccaaatcgtttatataagtactgcattgttaaaatagttgttaaacgtaccactttccctcaccaaaaattaatttttaaggtttttaaagtgaccaccatttttagaaatatgtgggcaaaataggtcaaacatgcggctaaatccttttttttttttttttttttcgactgaatgattccattatattatacgaaggtataatacatttttgaaatacaacaacgacaagagtcgaaactctgtcagaaactaaggcggaggaagacaacaatatctccagaaacctaagcccaaaagagggaaacaaaccgtaaacataaaggtacaagaaggtaagcctaaaaggaacctaagagctaaatctgaaactcaaaacatcgtaacctgcaaccaatcccaaagtaacggttgacgtcgggctgaaaccaagaaacatgagccacaagaagaaccaaccaagcatgcaaactccaaaggacaggagattccgaagaaaaatgaatctaaaggctcaacaagcaacaactcgacagaacagagtttatgtagcaatatttgttttgaatagagtttacatataggaatattgtatagtaaaaacagatgttaccatcacaacagttgaaaagtttagattataagaggttaactaacaataatgattagaaatatgcggctaaatgggtcaacatgcgat

SEQ ID NO: 30907 - DNA, 779 bp, Arabidopsis thaliana columbia
gttggtccagatgatcccaatcaaaaatcgagtaaacttttgaatctaatacggattccaagaaggtttaatggtccagcttaatcgtagtgtaggtacgttgtctaccgatgcagattcttccaaggcaaaaaaaaaaaaaatccaaccaagttaaaactttcaccacaaatagatctcgaactacagtagggtttcagagttgcatgcatattaacaaaaatcgaactatatttatggtttcaacttacaatattacaattttcttatagactgtttaaatctgacaaacttgaatttgaagacacacaacaaatcatatacttaactttagattctctcttttgtaataccttatctttttcgatctttgatggttatacacgtttgtgattgtaggttcgaatgattcatattcgaagaaaaaacaatcaaatttataaaaggatggagaagataaaatgtgaataaagcatcgtaaggagtatcaagtatgtaacaagaaccaaggatcacgttttggtaaccaaatgggccataaaaagaccacaaaacaaataatgcttcttatcatacaaacaatgtgaaacccataccatctacgtttccctttttcttgtcagaaaccgaaaatgttatcaaaataaaatagcttataaatcctaactcttaatattcatagctaaactagatgatacattgtgagatggtaaaaaaaagtcatttaacgtaaaaatgttggccttatatttcattctactcgtctgcgtgccttaggt

SEQ ID NO: 30908 - DNA, 1135 bp, Arabidopsis thaliana columbia
gagtaatttacgcaattaactaaaaccctaatggatactaatgtgggaatccaaggggacatagtcataaacaggggaatttggggatgcatagaacctgatacacattggtaaacttcgtctgcatcagactacattactaaatcttcactgaactgaaagatgcaaaaccgtgcataacataagtgcttggtactatccaagttaacacaataacggtacaacaagatgcttgtgaagtaaccaaagtagatctgaaagtatacagtgaacacaaaccaaggacgaaactaaatacgaaagatcgacgaaggtgcttacgtttaacgatgaatcgatgatggagaatgaaaatcagccaaacaaagacgatagggtgaaacggaatcaagtttctgtaatttctggtacatgcaaaagtagatcgacgcatcagaattcgataacaagtagatctgatggtagacagtaaacacaaaatcaaagacggaactgaatctcgatagatcgacgaagaatcttacgtttattgatgaatcgatgatggcgggtaaaaatcagtcggacatggccgacggggagaaacggaatcaactttctgaaacatccggtacatacaaaagtagatcaagggaaaatctcccgcttgttgatgaatcagagaaattctctggccgtgttggatgcgtaacaaaactaaggcgataacgatgaggtaacagagaagccaacactggacagccgcaataaatttgagccctcttgtctacaacagagatgtcgcatattttattctttagcttcgatattataattgaagggtagaacggtctatttgcaaagatgaaagtgtcgggttttgtaagtacatacgaaagttcctgatcttgtaagtttttattttttcggtcctttctcgtaattaatccatcatagtatgctttcaaaagtcttattcttttggacactaaatatttaatgttacatattacatgaaatatatacgatctcaacaactttttccaaacttatattcctttattgttgctttacgcgattgcaaattgttcaaatttgtatgttcattttttcttaatatatatttgtaatttactaatatgtctataagtattgt

SEQ ID NO: 30909 - DNA, 859 bp, Arabidopsis thaliana columbia
agaggatcccgaggtctaaagaacgaacttagattcaaaatctagctttataccagtcttctcgtctccacagggacgacaatcactctttcgggttgtgtcgacaatctggctgtgaaagaagcttgtggatttatagagtctgtctgatgctaatgccgttggtgagtatgagtaagttgcaaaagtataacatttgacagtgtccagtcttgttgattcaagtcttgtcttggttagcatctcaacttgctgtcttggaaatggcaaagtatttttgctttggacatgtttaaacaatgcatagtagaatctgcctctcgggtaatgttgtttcggtcacaaggaactagacctaaattctctggagttctcgaggatttggatgatgcaagcttgagtaataaggatagagaaagccctttgagaataaatacttcaggtggccagtaaaactttggacagtgctcaggtgatatctgttgcagcattatattaaagatccgtgcttaaggaataataagagtcatgatggtcttactagacaacgcagtatactttgaccacacaaaattatactttgagatatattacaagaaatcgataggtaacaatgcagtattaaagtagaccaaacaacaaaccagattcatgatataatgatctgaaacaatagaaggaacaagttactaacaatagagaggtatcctaattttcttaactaaacaatagaaggaacaagttactagacaaaaaaaaactccataatcgcctgaacttagatcgccatacgagttgataaccaatttatagtctcaagttgagcacaaggaacttagcagagacagagagcaaggga

SEQ ID NO: 30910 - DNA, 875 bp, Arabidopsis thaliana columbia
gttaacctagattgttcataccaccttactaagcactagtctaatattgttcatgattttagatattagcaattattaacaatatggcataggtgtaacacaatattaggacacaaacccttttcatggttaaaatttctttcccattgtgaggatagaccagccttccagaaataacagataaaatcatggctgtagaatctttccaagacttgcattcaacaatcacccccaaaatgtccaactctgtaataacttgagaagaacttctgtggaataaataagataacgaagaatgaaaatacaaactagttaaggcagaggccatgagataactgagaaattgtaacttacccacttatatgttgcaaagtagcagaaaatttgcgtacgttgagtcgaatggagcacgtacagatcttaccagttgcacttgtatttctaggagatgaagaaagagggtaaaactttgttgccttgtgtatatcctgcagtggatgaacagttactaggatgtttcgaagaattctagaattctgaaactctactgctattaattagtacttaaaataccttgacaacttcatcagaaacaacaccagaaaactgacttgaatcctctgtgcctccggcaccaagcattccccgtgacaaccagttcaaccacccacgcgacttatttaatgtaggatcgtcactcggttccttttcaggggcactctgttccttttcggatctagtggcaccagtcgctcccatgtttactgtcaattctgagcaagcttcctgcatagtaagatccaaggtaaaaggacagataagaaattgccattgctagggcatcaacttatggcagatatctgaacagactttgg

SEQ ID NO: 30911 - DNA, 618 bp, Arabidopsis thaliana columbia
tgaaagcgaggatatcggggacatctgctgcgcgtatttacttcgatcatttcatctttaaacttccaaatcaagaggttaatattctcactaagccttcgtgttttcgttgataagtttctaacttgtgaattactaactaatttcgaatgcttttgattgatatatataaaacagcctatattggaggcaaaaggaatagctgtgtggctcgacaacaagtaccgtcctgttcgcatcccatcttctatacgttctaaatttgttcacttcctacgccaagacgacgccgtttgattcacctcatcagcccaattgaatctacttaataagcctgtcattagcccatatatattataaatataaattatgtatattcggatcaaatgcaaatgcaacattgaatttctcacgccgttataagccaactagtaaaatcattcaaggatccatgtttatactattttatcaagagttagtgaaatctttcaattaaaaatttaaagtaaaacattagattaaaataattatgatgattaatgatcgcttgatatcataactatctattttatatatatttcggatttgaatttccgttttatagttgatgaagtatga

SEQ ID NO: 30912 - DNA, 560 bp, Arabidopsis thaliana columbia
ccgcgacgagagactatctctttgaagaggtcccggagattcgactacgagaacgatgatttattgggtgatgagtattatgaaaaggaatcaattccggtgatggaggatcgtgagtctgagccgttagtagttgctgatcaaattgttgattcttcactctctcttcctattgggcctagagtgtggagaaaaaagggaaggcccactcaaggaagaaggtggaacagaaactcaaaggcccatctgggtcatctgcttttattggggctgcgtcgaagaagctcagtaaggcgtcctcgaagaagcggccctccgacatgaaaactggtccaaccaaaacaaggaataccagaaaagctgcagcaagcccgagtagttatgttttccatcgtcaaagaacaagacatctttggttattttgagtaaggcgggatcgtctgatctccccgattccaagatatgaggattctagcatggaactatcaaggggcgggtgcagatctacaactcgtcgactggaggaaatgtgtcgtttgtattctccaggttttcttttt

SEQ ID NO: 30913 - DNA, 569 bp, Arabidopsis thaliana columbia
tttataatatatagcaaaattatttttcaaatatacagaaatgcaaaattttgacggatattctaactgataaaacatagctgatcatattttcaaatgtaaaaccatgaagcggtatattaattaactatcaacaaacaatttcacgaattattgtggaaattaatttaaattttattataagatctccggttaataaaaaatgtaaaaacacttatgggtttttattttggtaaccgaaaaatttggaccaatcttcgaaacatgatacaaagtttttatcatttaatgtgtttatagttaacaaattcatagtggtttagtggttgaataattcatgaaaaagttaaaaggtttagcatttcatgagtcttctcactgtattttcaatcaaaattaaaaggtaatggggtgtgttgtagaataatggctaatcataattaaaatcacaatgaaatacccattcagccactaaatcaccatgaataagtttttcattgtggtacttaactaagtaccataacatttgtgccaaaacgaaataaccaaaagtataaggggcaatgttt

SEQ ID NO: 30914 - DNA, 457 bp, Arabidopsis thaliana columbia
tagaggatccctcagtgaaatgattgattgtattatactaatattaagatatttatagattgttaagaggagtatatttttgtctctttcaattattactttttgatgacgactcattattaaacaaaactattaaaaaagtataccacgcgtttcacgagatcaggaacccttaataaacgtctcctgacatgtgacagtaaggtgttaacaaaagaagccgttgaatttcataatgagcaaatctacacggaaatcatataagatcgtaatattcgatataaaaccattttataatttatcacgtgaaatgattgatcttatgctgacccctatctattaattttaatatgaattttgtttaatcattattaatgtgttacgttattgagtccagatgcaaagaagaccaaccatcaaattttctctttcgaatgacatttgaattaataatgtt

SEQ ID NO: 30915 - DNA, 1472 bp, Arabidopsis thaliana columbia
tctttttttggattgtaaaacttaaaaccttaaacttatgtatcggaatgtattttggattgatttaggatttgtgttggaatttgtgaattgattgttgtatttaattgtatttagattcagaataaacgaaacattgttcagtggcgaccattgaacaaaaagagattgccactattatttcaaaacaaaattagtggctaagtttttgcaaagatggtggctaaatcagttccaaatattcaccaatagtggttacgattacagccaccactaattatggtgacaaaatagtgccattttgctatgataatagttagtaactcaatagctaattgctacaaaaaaaaatagtacccaagcagtagctacattagataccatcattttgtttctgattcagcagttaactactacataaccaatggttgccaattggtcaccatatagccactagtaagtgaagtagcaacgtagtagctaatcagccacacatggtgattacggcgactgaatttcatttagcttatttccataagcaaccgaataaaattagtgcagtaacagtggcaaatttaaatatagcgaccgatttgatatattaaagactggaaatgtagtgttctacgcaatctcaggctcgtccaatcacaaagacgaaaccaattttaggctcatcaaatcaattggcatgaaatcaatatcaggctcatccaagcatttggcataaaaccataaaaccaatctcaggtttgtcaaataatccatgtacgacacaaatcacaggttcgccgatcatgagacatgaaatgcaatcccaagctcgtgccgccaacacgtaaactcaaattatatcatcatgttatatataaagtattcctatcatacatcatatcttccttctatgtcacacaatttgaatcaatagacatacatcaagggacaaagtggctaagcctatacacgcaattcaagaagaaaatacttataaagtaaccacaatgtttccgcaaatcccgcctcacttttgccttaatttagttagaaatagtgactagcaagttgcaaatgcgactagaaacagcgacaatgttctggaaacttgcagctaaagaaataaattcaaacaatatattagggtttctttttttaacaagcacaattgtttcttgaacaacaagcaaacgtcgtgattgctagggtgtaccttttccggcaactttgaagacttaggtcgctttcctcacacctcctctgtcaataacaattgtaggtctcgcctagtttgctctaacttgaatctgataattttgttttaaaaagttaggttttctagaaatcaaaacaagtgatttttcatcaacttccaaaacaatttctgaatgcaatatacctccttttaacaaaacataaactgctatggattccttgaagcgagatgtatcgagagacgtcaaaatattgatctaagt

SEQ ID NO: 30916 - DNA, 655 bp, Arabidopsis thaliana columbia
gtgctccctctaatcactattttttttttaatttttttttggagagtatcctttggacttctaatctacattgattagaatcaggtttgtgatttatcgtgaatgaatcaccattttttctagggtgtctattttggatatcgagataggaagtaacatgtaattagagcagctaatttggataatcaatcatatttttccaaaatattcttcataaaatacgggacgaaaaattcagataacaatataggttcgagaaatttaggtatatagaacaagagtgagagaaacgcgagcttcttgagcaagttgttctttatcatctttgtgtctttgatcttggttcttctatcgcttgtatctgaaaccaaaagacaacatcacactttaagtggtgtcagtaacctcattctcatagtgaaagtggggagcaagaaatcttccccggaacatagcggctaagtcgtgaactcggtgatcaaatttctttgtgcttgtttctttttcaagcaaccgttacttttaagttttcttcacataaactttcactaatttgagtaaggtcaaatggataatttcggaaactatgataaatcatggacaaatttgggaaacttttgaataattttaaaattggtacaaatattttgaaaat

SEQ ID NO: 30917 - DNA, 580 bp, Arabidopsis thaliana columbia
cggtagagcatttctgtcactacacatcctgagtttagaaatgtcaattttttagctagtactattttatggtattcatcagtacatcaatgcctgtcagtattgaaacttcattgaaattctaagtagctcgctcatttcttgatatttgatatgtcataacttataggtaagactctttctggagaaggcttacaagctatcacaggaatggggaaatattcctgtggcgattgcaggtgatctgaatagcactccacaggtgatctctaccaacttttgttttttttgttctaatacttattttttagctgaattctaaaacttactctggatttgctgtacagagtgcaatctatgatttcatagcttcagctgatgtgagttccattgagggttctggactctttcttttacatttcgcctggtcataatttttttcctttctttactgggacagttagaatgaactctttatattccttttttaattttggacagttggatcacaacttcacgatcgcaggcaaatttctggccagactgaagtggaccacaggagaggtcatcagaaacatta

SEQ ID NO: 30918 - DNA, 348 bp, Arabidopsis thaliana columbia
agagtgcaattcacaccaagtactcgcatctacacgggatagtctcctccaacgtattcatatacaacaacaacgaccttaaaccagcacatttccccaaactctctggaatcctcccagtcaagaaattaccagacaaatctaaatgctcaagctttccacagctatccccaatatctttaggcaaagagccttgaagccagtttaacggcaaatgcaacactctgaatctcccaacaaaaccaggaacagttccattcaacttattaccacccaaattcaaaatctccaactttgtcagattctgcagcgaattagcgatttcacctgaaactctgctaaacccca

SEQ ID NO: 30919 - DNA, 641 bp, Arabidopsis thaliana columbia
  unsure (1)..(641): unsure at all n locations
acagcatatagctaaaaccacaagacactgatgtgaaacgacataaatggagatctaaaatcaccaatccataatacagaagcctatgcatcccaaggtttcatcaaattcttctacgtgtcattcttcacatatttctacagcaatcaatcaattaatcattcccgtgactaaatgccaaaaccaaaacatcggagaaatgtttgaaactccaagtaccagtaactgttaatgttcaaatcgcctcgtcgtcagccaaactatccacaaagcagaccgtcgtacggaaaaagagcaggcgagatccgtggtaagaagaaagaggacggaggctagatcgaaaagaagaacccgagtctgaagctgcgtaagtatcctggaaaatagtagtaatgtttgagagaagattgtttggagaagaagatggatttgggaattttgggaggaacaaaaagcttacagaaatggaggctgctgattctcatcaaaggtctcatcataaggactgttgccacgtgttactgtctcaacggtcacgattgctcgttacatgtgctggcctgtccaagagagatatcgattagggttatggatttaattttggagttttntaccanaatagtgaactagataatttataa

SEQ ID NO: 30920 - DNA, 517 bp, Arabidopsis thaliana columbia
gaagtcattgaaggttatatatatgtgaagttgttttgaatcttaacgcttaaatagtcatttcggattgtgatcccactaaaaacactcattcaggattatgagattatctaatagtactacaattcttcgtgagcaaaagagaagatcctaaaaataatgtttgcgttttcacttttcactcgtattcaccgaagctgtaataatcactcgacactcatgtgggtcacgactcggtcaccttaaattattgatcccaacatttacgacataagttcagaataaatagcaacgacataaaaattcattctcgactcttgggtttgggtaaaacaatatcaatagaaaatacaaacttcatcatcgcatccacgattctaacttagataacaagaatcgcatcccaattaagtgtggtgaaaaacgagattcctgttcactgtcgcttaaaatacaggtcactaatcatcgaactgaaaatgagcaatcatgcatgtttgtgaaacggtgaaaaaat

SEQ ID NO: 30921 - DNA, 585 bp, Arabidopsis thaliana columbia
tccaaattttaatatttttacgatcatttaccataaatttttatttatcttggcaagtcttccaaaatgtcaataaatcttattattatttttgaatgtaatctcaataaatcttatatgtacatgtttatatttttatgctttggttttcacatgttaatttatcagttagattgatgcacaactctatatattaaactaaatattccaaatttttatttttaccatcaattagcaaaacaaaatatttatcttggcaagtcttccaacaataaatcttattattattttttgtaatgtcaataaatcttatatgtacatgtttctatttctatgctttggttttcactaattaatatctttaatatctacatattgtttgccttacattttgaattcaaatcttctttacttaaagaaatggtgaactttttatttaaatctatatttcacccagtggtccattaacaggtgtacctattagtgttttcttgtaaagttgtaactatctggcatcaatctataaaaacattttttttatattctcatatttccaagtttccacactagctcatcaacatgtgt

SEQ ID NO: 30922 - DNA, 556 bp, Arabidopsis thaliana columbia
atctagaggaaatggtgctctaagagaccaaggggtgaagttaccacaccaccgaatttttacagacgtgtttagattggtctcatagagaaattttttgtcgcaattagaatatttaaatcagcttattcgattaaaataatcttatattgaagaagtgatccttaacaccagtatctatttctcttatatgattcacattttcattagggagatagaaatgatggttgattttctgcattggggatgggttattcgatgtttgaatcctggtttttgttaagaaatttcgtctaacaatctcattgctgttatcgaaccaagtttggttttgaaactgcatgccgtgacttctcatgttcacatatgtagtctgttaatacgattctaagcttcttaacatgcttaatccgactcagaaataatggagataaggatattgatttgtaaaagtaaagtttggcttatgagagatttatgattcttctggtgatttttctcctcaagataaggatcacattttgtgcattatgaatgaccatgatggtttggagga

SEQ ID NO: 30923 - DNA, 868 bp, Arabidopsis thaliana columbia
tgagaatcgtccatcgtcgaatgttgcttcatcggagtttcagggtcttctcgattcggactcgtcggagctccggaatcagttgggctccgctgattcaggtgccaattgcggagataaggactttattcttagccaagacttcttctggtaaatcttcggcatttcctgtaacacaattctggtaaatcttcggcatcaaatcagtacttgtaagtatctgtaacacaattctggtttagttattctgatatcttccgtagctaaaaaggaaatttctctcatcaccatttgattccaatattcctcagaacaagaagctgcgcaaaagaatttgaaaacgaaaacgactcacagttgcttccaccgttacatcaccgggatccctagcataatttagcgcaccacaacctgaaaacaacacataagcttcttatgaaaacactttccttaatcagttaatctatgaactgcaagaaggtacgggaaacctgactgaagttaagatagtcatagaaaaggcttgatcgcaaaatatatacctatgagtttttcgagctttgtttgaagtattaatcctccctacaatattcaagccaactatggtcaaaccacaatcaaattcaccctatagctcctcaaaactagtcaagccaacaacaatcaggaattgggcaaaatcaaaagttcccatgttctttctcaaagacaaattctcaggagttcccagagagctttatgcaagctcaagttgagattaaacattacctcttcttcctttgcattctcgcttggccacatatcattttctcccaaactaacattgatgatctcttcctcctcctctaaaagccccatcctgatcctc

SEQ ID NO: 30924 - DNA, 543 bp, Arabidopsis thaliana columbia
caaagagtgatggagagggtgaacaagtttcattgttaagatcattctttcaatgtttttgtgttagttcacagattcttgttgtctaaaacaaagaaactgactagttcttgtttgccttccttcagagtgtgcccttaattgtgtgtgagacgaagaagagagtaagtgataaaactggaattctcatccacaagttgtagatttcatgattctctcaagtcaccaccaaacttcttgtcgtagaccatataaataaaaaatatttgttttgctaaaacttagaaaagatcagtttttattttccaatatacatgatgatgaatgatccaccaacaccaagtgcgtccataatcgttattaattaatctgcaatacattagggctaatcacggaataatagttttttgtgttgggtttgtaatttatgtgtccggtgaaactaaatacagacaaaaaaagtgctggttagtgtttggtgagaatcggtaataaaaggtttaaaaaaccaaaccgggtcacgtagttttgtttgttgtgttt

SEQ ID NO: 30925 - DNA, 589 bp, Arabidopsis thaliana columbia
tactttcgatcagcttttgggtgttaaatcaatactatttaaatttttgtgtattataacaaattaatttatggttttcttggacccaaaaggatttttcttgtccttttctctctcctgaagcgacttttctggcgattgtcttctttctgccctagcgccgccgttggtcggcctctcgccggcattcgtgcccgttccgatgccaaagaaaaagaagaaggcctctcgcctcttccctgttcattctacctccaaatttgagcgggtcctcgcttcctctgcgggctcgtcttcgcttccagcttcccgagatgctctcgtctctccgctgcctctcatctctgctccagcgtccgtcagttcgtttgtcgcagcggtgtcgtctccttcagtcgagattacgggatctcttctcggttctcctgagtcgcatttggcctctgttcccccggatctgctttgggcgccgcaacttgtcccttgaaggagggatctgtagccttgctcttagagtcgtttgtgcctgttatctccgttgtgacccagcgtataagatctctccgttgttgcactggtctatttagga

SEQ ID NO: 30926 - DNA, 613 bp, Arabidopsis thaliana columbia
  unsure (1)..(613): unsure at all n locations
gattccaataaagaataacttcaacagatttggcttcttcattgtataacaaatggacatcttcatacacttgtgcatgaaatagtcaacataatgaggtatatatgtgaatctaagaagcacggggacggctaaaaggtgacgtatcccgtatcggaaacgttttagatcggggacgtttctcaaacttggggacgatagcagcttttggggacggcgccgaaccgtttgagggacgtttcagaaatgtttctaccccaaaaaagaaaatataacttttttttcttctataaattataaaagaaaaggaaaatatattcttaaactttgtgtaattagggtttaagaaacgtttaatctcccttaatatacaagagcccgttgttttttttttcatctaaactaaatcttctcgacttctctcctttcacaccctctggaaagtagatttctataaaaggtatatcatgactcatctctaagtttttaatatgattaaaatctctttttaatacaagttattagtcgagtacggttggttgantaacaaatagcgacgtgatgcttaagagattagaaatttgtttaactttgtttgcaaatagctttggtt

SEQ ID NO: 30927 - DNA, 150 bp, Arabidopsis thaliana columbia
ccagctaactcaaactccttagttactgtcttctaaatgcagtttaaatttcttgcatttgcttccttctagagcttcttttcagccactgccaccagcattgagatgtgtcgtttatcaaactagatacatgacactttcacattattg

SEQ ID NO: 30928 - DNA, 552 bp, Arabidopsis thaliana columbia
tttcttctcttttgatatgaatgaatcctctctactctccatcccacttttataaatactagatttttttattaggagatttaggggattacgagatcgacttgaaagtaaaattcatattgtaaaatatattcttgttattaaataggtagatttagtattatcataaatctaaagaacttgcttgctatgcaagtaacattcttgtataaataagcttattggctaattaatataattgagagaaactatttcacatatctgcactatgtgtgaaataaaaaaatattaagtaatttttatatataatcaatattgaaggtattcaattttatattattaattagataatcagtttgtattaatgactatcaagattagtaaatatatatttatgtttatcgtgatttatgatatatatattttgtatattaatagatacaaaatattagatacttcattttgaatagatttgtatttcttagttgcatacattttaattgaattttcgttttaataattaagtagtaaaaaccataaattatggtttgg

SEQ ID NO: 30929 - DNA, 565 bp, Arabidopsis thaliana columbia
cgtctggctaagcagttatcggggtctctaaggtgaatacgctgcgactttatgtcttggacgagaaatcgtctggaatttggaagctttaaggctgtctcacaatggaggttgaatcctgggtagtcacatgacgaagattgctcaggagatagccagaaagggaagctaacgtcaaggttgtttcctccacatgaagaactgtagcaacgttttggttttgaggcatttaggagaggaaagtagaagaagaagaagaaatagagaagaagagggaattgttttgagaaagtcatattgtggtaaggcactaagggaattggaatttacatacttatagacaatggaaaaagtcatagaacagtaaagcttatgtttatctttattttactgaagaggagaaggatttgtataccagaaatactgactatgagacaatgcactgtgaaagaatcagagaagctgctgggagattctgatggaaacaatgtcaccgtctgttcctgctttcattgtgtggtactcacaaggattcctcaatcaaatatgtaagacaaaaaaaagt

SEQ ID NO: 30930 - DNA, 615 bp, Arabidopsis thaliana columbia
ggaaatctctctatttaaatttgattgaaaaacattgaaaaaatgggaaatttgtttaaatgtgttttttgtttgagtaatttgttcaaagaaagtttgaagtttccatttattttgggtgtcttgtattttccatttgagataatacgtccttgcttctcaagctactgtgtagtatataaattttacacttctctcaattgtcccacatcgagtaaattagtataaaggaagctaaacttttgcctctataaataaagatacttcatttcccaccgacttttacatttgggcttcttaaaaaataggcttgacaataaatggcctttaacgcaaggtcttgttgttttgctagtagcaacgagcgggttacttgtaactgcaattgtctgaaagatcagccagtgccaaggtacttgtaattacaagtacaaaaaattgatttctttgagttcatgttcatgtcggattttttctagtgtggtcggatgtgcacaaaaaaattggctgaattttggagttttaagatccaaagatatgtgattttcgttaaggttttattaagaatgaagcattcgaaggatctgtttgaagcagcaatggaggagcaagagg

SEQ ID NO: 30931 - DNA, 511 bp, Arabidopsis thaliana columbia
taagatttttggataggtcacttggcgtgttaaatgaacagtacaacttcactctctaatgtcctccccaacccaagaaagaaaaggaccatttgttcctatccttagtttctaaataaaactataaaacatatagatagaattggagataatttgctaacaaaacagtttgaagaattatttggacttttgtttactatatatactttgtttatcggatgtggacaagataacgtcttggtaagtgcatggtaactatatatgcaaaaaagggtcaaaccaactcaattaactttctttgaatttgaaaacgcgtgaatgagaaacgtaaaatgtcggttaaaatgatattgacatctacttaatatcactagctaatacatgtagactttaacaaaacgaaaattaactaacgtaccatgtagtacggaggaggatagtgttgttgttgagggtagaaatgaaactggtcgtgattggttgtatatgtgttagaccgtcaggtgtggat

SEQ ID NO: 30932 - DNA, 451 bp, Arabidopsis thaliana columbia
cccgttcctggtctgtctctcgattgctttataccaccagctgatcttaagaccggttctttaaccgaatcctgcgagtacccacaagaggaaagaggcaagaacaacacactcgcattgtctgcagctcacagggccaaagttgcagccttggagaacgggagcttggaagatcaccgcccggtttggcatactgatgtctaacgcttaaagagagagcttatgactaaaaacaacctttgaaggtagcattagccaaggatgattctcaaagatcagatgcaatgtgtttatatgccggtaactcaagctaaccccttttagcagctttatcgattaggaatcaggttcgttagcttaaccgatgatttgcgggttcaaacagaactcaaatgaatcatcctttttactcaagaatctcaggagaatgagatggagtttggatttggtt

SEQ ID NO: 30933 - DNA, 1066 bp, Arabidopsis thaliana columbia
agttattacagttcagcctttccgtgaattttccggtaaccatcttaccccaaacaagtttctttcactagaaaatcttaatcagtgactcctcatgcaagtggagatgtttctcatcctcggtttctcgaacatatctaagagtttttcggattatgtaagactcgtaagagaattgtagaagatgtaataaaaattggcacttttttatttctcaacctttgttccttggagatgtgatagagcaacttcctctgtttcttgattactttgttttcatttcctaagcaatcacaaaggcttatagtgtattaaaagtgaaaaaagtaaacgaaaagttaggttaagttacaaatggttagagataaacgccaagaggtgataatcaaataatcttaatatctagcaagaaatgttgtaaagtgttttggttgtcccaggagcaaaggaataattttggactaggatccagattaaatttttagtctctgtggtcctactaaatagaagtctttgagtttgcagttgattactcaaatggtttgggtaccaatatttgactccccatcataactcagacctaaacccctgtttgaatgtttttttttggttattgtccttggggaaccaaatttatagatttttctattttgttgcgcaatgatgatttacccttcacaaataataccaaaaactagttcctgatcactaacaatatttttgtttcctgaaaattgcattattagtcaatgacagtaaaaaaattggagttgtttgtgtggcaaagaaaaaaagaacactgaaaaatataaatgataaattcagaaaatctattttttttttttgagaatgctattgctaggggtgaaagttggttaaaattgaagaggaggtagttcagataggtttcaatatactatttaaaagtaatgttttcatttaaatcaaatataaatgcaatagtaattgaggcagttgagaattatgagcgttacgtaagaatgataaatacgaatttaattccaccttcaataatttattaattttggtcaaaattaaccaagga

SEQ ID NO: 30934 - DNA, 775 bp, Arabidopsis thaliana columbia
  unsure (1)..(775): unsure at all n locations
ttcatataaagtatgatgtctgacacatatgaattattgtctcaagcagatccttacttgtccggagaagtcagaccaatacacgatcgtatgaattatgagagcagcaatgaattaacctcaaaaatctcccagctgaaggaatctattaaaaatcttaacagcttggagatcaaacttaaggtagaaaaaatccttctccttcatcgtgttttacttggaaacaacacaaatgataacattcgtcctcgtggatgtgtttattgcatatactaagaaatgagatgtggtaagttctatctaagttgtatgtacatcttttacattctcagaagttttgagtgtcggattatctccttttgcaataggctccagcagactcgccgctacaaactcgtctcattaactctctaaactgggctgaagatgagccgccggtcgactttgacgaatcattcgtaccttctctccaagaacgtctatcattttcagcatttcaacccatctctggtaatttcacatattttcactatcgtgtttttatgtttcaagaagattttcaggtttcagctatcagattttacatcacagttcacaaatccattttattcctttggaagtgtgctgatttctgtgagtccgagagagttaatagcgaaaaatagtcagtttttcgggttttcttggctgcaggatcgacgaatcgganactatcaaggttacaacaagagaaaataaaagcaatggatatgaaagatacaatagagagattaga

SEQ ID NO: 30935 - DNA, 1134 bp, Arabidopsis thaliana columbia
ccccggtttcagaaatacggtgatgtatgtggagaggtttaaaagaattgatttggccacatttcaccaaagtgcacttttctttttggttaaacgtcgttagaaaactccacagttaaacgtgtttgggcaccaataatttcagaatgggtgtgcttctggaatgtaattgtcggaaccatgtgagtgaggacaaagcatagggaaagatcatgtggtagtttgtaggatcggtaaacaagttttccaagcctcctggacatagcagactgaccgtcggacaagggtgggctcacatgcccgagagagaacgagggcacattagtaaggacggtcgggatgttacaagtggtatcagagctaaactaagacaagtatgggatcaagagggctcacactgtcggggtgacaatcttggtgtgcaatgaggatgttgcgtttggttagtgggatgaattgtaacaccacagtctcagaaatatggtaccgcacgcatatatatttaaaagaattgatttacctacttgtattaccaaactgctcttatcattttggctaaacgcgctgaaagaaatccattgttaaaggtgcttgggctggagtaattttaggatgtgtgaccttccgacaagtgattgtcggaaccatgcgagtgaggacaaagcatggagaaagatcatgtggtgatttgtagagtcggtaaacaaatattaaagtctgctggacgtagcagaccgaccatcgggcaaggatggacagagtgtccaaaagaggacctgggaccctagtaaggactgtcgggcgttacaaaataaatagttaaactgtattgcaaaattgaatgtgtaagatagaaaactgtatttttctaaatactatattaaatatagaaaaagcgtatgggctattatttagaattcaaaaatcattaaaagaatgtgtgtgtagaattaaaatgtataaaaaatataatacataagacttaagttttgtttaaaacaaaaattattcaattaaatatctagaaaaatttatagattactattttactattctcaattcaaatactatccataaacatttacatttatatcttacacctgtctatttaggttggcattatctagtatgata

SEQ ID NO: 30936 - DNA, 553 bp, Arabidopsis thaliana columbia
cttgttgattttaatccccatgcaagagtttaatacataaacacaaaattaaaacaatacgacgtaagtggacaaggtatttaaaaaataaataaaattgatttatacatgtttataggttttcttcgttttccattcgtttaaaccattataaaatataactaacaacaaattttgtggtccattccccggttctttatcttcaatattcttaatcacatatgtgtcgtgcgtgagcacagcgacaataaacaattgattgtggtctccaaaattctagagattttttctttacaaaaacacctccaattttaaaaacttacaaataaaatcttttaaaaattttagaccctcgaaatttcaggccgacagtgcatatatgtaagctcaagaacacaaggaatcttaactagttgagcatgttccaacaactttcgaaatatacaaaacatatatatatatatatatggccctttcgggaacttctgctaataaaacaaagtccatacgaatcacgagttaagttaattgttatcgtggtcatcatttaata

SEQ ID NO: 30937 - DNA, 528 bp, Arabidopsis thaliana columbia
atctatcaacgtgatgaatgaacaaatcaagctcactactttcagaaacaattcgaaaaatgtatggattcaaatctaacaagcacaaagagaaagaaactcactttgtagtgaacggatgagagagttttgaatcagacccaaatcagaaaccctcagatgaagtaaagatgattggttcaaaaatcaagagaagcctttgtttaaattttcttcaacagtaagcaaaaaaaagaccaaagagaaagagagagagaagaagacgaatgtgtttgttgtaatgtttcaacttccgaggaggtaagagaaccacaagtaaggggaagcgcgtgagataaagggcgcgtgaggtagatcttgttttcgtggctcagaattcatagacgagatttgtggctcttatctttcctccatctaaagcgctcttctcattggcccacgtgtactgtcatatcttttattgtctccaaagtcggcattggaaattaaatacttctgcaagttgctgaattgaagaccctccttatg

SEQ ID NO: 30938 - DNA, 648 bp, Arabidopsis thaliana columbia
cttgttatgttttgatgaaaatctgtttccttttacttaaattaattcaaaagattaatgtgctttgagttttatggataaacatcatgcgtacccaattattgtaagacacaatatcaaattatcaattaattgtgattctttcaattaattacctataaaatccactttgttgtatatataaataaatgttgtaagaagagatagaaacaggaaacgttttgccaacttcaaactccgtttctaacaaaaaaaaaacgtgatatcttttagttgttttacaaattacaatggacctatggattatagtgatattagttattgttgcagtgttattcgtggcgattgggtgtactatcagttgttgttgccccagagtgtgtccaatgaagaagacggagactaatgcgagaaggacgcatcaagcatctatatggcaaaagaaatctcttttatgaaatatttaaataaattttaatttgtaacttctcaatttaataaattgttggaggttgttactatgatataaaaaaaagctaattttcaaattttataatacttcgtagttactaatatcactagaaaaataacggaaaatctatatgatcactagtgaatgctttagatagtaagaattttttttttttt

SEQ ID NO: 30939 - DNA, 621 bp, Arabidopsis thaliana columbia
taatgtcttgcattgtagccttgtaggccaagatatatatatgttctttcaagtagagtagagaacaaatcaagggatgggaccatgaaagctctcctacggcttccgattgagaacgcctgcaggtttaaaatcttaccattcgattttttttcttttctgtttactctgtttcattagtcacaacaactaattctgttataacttcatggctaattcatgtttcttagagtaatagacttggggaagttttctgtgtctcattaaaccaaaaatttatataccaaaccatatggttaacagataatcaaatgctaccttatatcttcatatagaacatgaaattctgtttgtctcatttcttcaaactttgtttcagttagcttcaaagtaactcgttaagtgattaactttaaccttttagggctttagagtaatctttcgttgctctggtggtgcaacttttgttgatctgtttctcagtcataattcaagactccaaactcttatctgaaattatataaccttgatggtcaaacgctacagttaacaggtgcaaatgagatattgactcaagacaaatgtagagacaatgaaccaaaacatgtgtgcttagtttgt

SEQ ID NO: 30940 - DNA, 552 bp, Arabidopsis thaliana columbia
gtgagatacaaagtgaaacatcaagaacagatgaaatcatagaggccttagagaggaacggtgtgagtttcataaactctgcaacgaggagcaaaacaaaaggaggcaaaccaaaaatgtctctccgcgtcgacattcccgacgctgtggccggagccgaaggtggtatcgcaagatccatcgccaccgccatgtctgttctttgggaagagctcgttaacaacccaagatcagatttcaccaactggaaaaatattcaaagcgccgagaagaagatacgaagtgcctttgttgaactctatagaggtcttggcttgttaaagacttacaggtatattcattaatgactcaatatcatttatttatttagtgatgatcttatcatttttaattcttttgttggctttattatggcagctcgttgaatatgatagctttcacaaaaataatgaagaaattcgataaggtaaattggttatagattgtactttcggtgataaccaatgaaaaagataatcatagtggttaatgatgaatctttgatatatatat

SEQ ID NO: 30941 - DNA, 508 bp, Arabidopsis thaliana columbia
tcatctttgtactttctaaatacttttgtaaatcaagttggtaaaagaaaaatcagaccattaaggaacatactaaactatacattaactatttaagggtccatatacattaacgatgtgtaatcaatttgttttagttggagttcgatatttttaattgttttatgtatatcgtttgcaactcacttatggactaccgaatttaaatgacggatctaatacggcgacgacgttttatctcaaatccactttgttctcaataggtgaatatcgttttgttttgcctttaacctatctaaaaccccatttatctcacttatagaactcagtgccatgctaagacaattgcaatcgtcaattgacaaagtggcatataccactcatgcagaattgtatggccagtgaaaaaggattagtttgcaaatatctcagatcaaaaatacaagatatgttattcttatatacaaagataacacaaaacctacacatgagtttagcaacatgggga

SEQ ID NO: 30942 - DNA, 606 bp, Arabidopsis thaliana columbia
tatatcacaactctaatttacacactaattataatattttcaactttgtctcaagagagtaaaatccattaatgaatttacattttctccttagttttattttgacaatgtcctgagttctagaggtcaagcaagacagccacagacttcgaaacagcaaccaatacactggaaacaagccaatgctgcacagagctgagagaagacaatggtgcactgatcactcacccttgacatacactgcaagcaacacatacagcaaacgcggtcaaccactcctgacgccgctcttatcagaagttcagttccttccacctccttcggctcctccatccacggtggcacgttctttaaagtagctgcaacgttcccgaacccatacccttgtttcccaagcaaactccttctcatgctgttgctcctctgcatctgcttgtggatttggtatggtgggttcttagaatcctttgattgaaactggtcttgcatcgtcttatcttctcgtcgtgtttgactgataatccatttgcgtgtatcgctaggaaacctgtttgtatatcaatccatgcctgattagcaaaaaaagatgtattaggtagaagaaga

SEQ ID NO: 30943 - DNA, 491 bp, Arabidopsis thaliana columbia
gtacataaaaaactatctatatattaataatctaatattactatctcaatagtgtttcatatagcgttgatcggtttaattattgtggtgatcgagttttgacaattttataaattattggcgttgatctgttatcatgaaagtattaaaaatattaatttttgaaaggtacctaattaaattgtaattgcaatgtcgatgatatgatctctacgtatatatgaatacgacttttaactattccaatttttttttgttttaaaaaactttaacactaaaaaaagattgaaccgacaacgcaaaaccaccattatattagctgctagctagaccaccacctctttgatccattaaactattacgcgttcttttatcttttagttcgaatccgaatgtatctttaccttgctcgcatgtatatatgtaatgaatcctttagcgttcaacccacgataggttaatttatggtctactatcttgatccacttggt

SEQ ID NO: 30944 - DNA, 463 bp, Arabidopsis thaliana columbia
tcaaacagtcacatgccacttttcttgatctccactatgttgaggcgatgacatgttctagttgagctgaaaagtttggtttaaagatacatatctaagacatgaatgagcacatcttgaaatcaaagaaaataaaaagacaacattgtaaatgtgccaataaagaaggaagagaaaatgagttgcggaacacaatactagtaactaagcccaatttatggttcgctaacatggaaagagagttctgaaaaacaagctcaggactacctagaaggctgaatctatggctaatacaagatgggaaagccgaaacaagctcaggactacctagaaatgcttcttgaacccggttggtttaactaaattcactggctgaaaaatgctgctattataagaacccaactgtgagagtcataacaagagaaacaactcaacaagagcaaaaatgtgacctgatattttg

SEQ ID NO: 30945 - DNA, 585 bp, Arabidopsis thaliana columbia
ttgcccacttggaccaataattgacttaaaaacacacacaagttgaacagttttgaatctactagaacttcctattcaattcgtaatcacgagttaagaagaggtttaaaaaaagagaacctgatgtgcatcttgtgaaggtatgatataagcgtcgattccaacacccggctccgaaaacagtcgccggatcgagctaagcttctcgtcgacaactactttggtttgagctttacgaatctctttggaagactttgccgtgaaggaggaagagctgctgctgctgctactagcatgacaccttgcgccaaaaagaggtttatacggtaatttccggtggatcagagagagcgaattgaaattgctgagaaatagagagtgtgagtaacgtgatgtggataaaacgagccgattcagagacggcgacgaaagagttagaggaatcatcaccagcgattgcaggagaatcacacaagaggagaagcttcttgagcagagtgattacggataaatgtgtatactactgaaaattgcaaaacacccccgtattcttttaaatgttgtataatgtgcatgactattgat

SEQ ID NO: 30946 - DNA, 410 bp, Arabidopsis thaliana columbia
tagatctctagtaacgaaaagtgcttcatccgtgacaagtgcctcaaaaagaataaaattctttaaaaatgtctaaacgtgtcaaattcccttatttttaaccgccatagaaagtgagttcatgcttgttaaaacaaaatgcacgactttttaacacatcttccaaaatatcatattgacaaacaaagttttaatgattcttatacaaacaaataaccaatgtcggctcaaaccaatcaaaaactgatatatagtatataatttgatttgatattctatagtttatacgagaattgtagttgatatcataggcacaaatttgctaatgaggaaaaagcaaaaacaatgatcatgtaaaacaagtttcaaggtttgtaaatttcttcccacaaaaaaaagtgtctttgtac

SEQ ID NO: 30947 - DNA, 504 bp, Arabidopsis thaliana columbia
gaacatggaattagtgttcagaaaattagaaaaatcattatttcttcacttcaaatgcacactacatataatataatccaattttaggaaccatttgatcttgatagcttttcgtacgatttcctcaacacctgcaaggcaacaacgcaaacaataaacaaagtgcggaattaacttccagcgcaagaaagatactgcaaagcaatttcttgaggctcacggtacgtaccctactaggcgacaagtaataataacgctcattattactgtccggagagagtatggaaggagattgcgctggtggagaagcgtggagtgttggtcggagtaacagagagtgacggtaaggtgaatttattggtgaccgcagcagcgtagagatcatgatgctcggcgacagaagacttgagcgatacggcgagataggagatgccagctccgaagcccaagtggcagtttccggcgaatttccgacattggcatgtttattgttatcctgtagta

SEQ ID NO: 30948 - DNA, 1253 bp, Arabidopsis thaliana columbia
ttttatggtgtggccgatgttctcatgagttttaggttttgaatcttacaacaaggaagcactactttacttttcgggatctggttgaggttcttcactacaaaaaaagtcttcattgatagcataccattatagcacagattactcaattgctattgaagatgtcatgtaattttcgttattatattacagcagttgataaacgctaagatatagttttaatattacagcactttataaacgctgatataaagttttaatgagcgggagcacgaaatacttattccgccatataacacttagtcattttcgagaaaaaaaaacaaacacaaaacaagttttcgaaaaccctaagaaagaaaactctctcagtcctcagccgtatgtccgacgaactcactattctggccaccgattaaaccctccgttgcctctccgtcgtcgccgtgaaagctctccgtgcaactggaacctccgccggtactcaatctgctctatatctgtccacttcgagatcgaatcgaaggcaagtcattttctatgttgtttttttctcctttgacactcaattcgttaccctagatctgtttccatcaatctctgagactcaataaccgatgtttgtgtgattttagaattcgttaccctagatctgttttctttatcgattcttaaaattttgtctactttgcatgcctttgtttattgcgaattcatatgaatttcgtcttagtaatggtaacctgaactgctctaggtgcttgtgaacaattttgcattcgaaattgtgtatttattagggcattagagttgcaaattttggattttggctctgtaatgtttgattttttattgagtgataaaacttgagaatttcattgtcagattgattaagcttcgtctgttgtctgaatcgtgttgttattgtctcatcgatttagttattttgttatgtcaaactatcattgattcactttcttaaatataaaacattttgctcattcactatattttgtttaatttgtaagcgttgctgagcgaatcaatggacatttggaagcttatcaattctctcttttcacaggaaaggttagtatcattgtctcccttttgtgaattgttttctcttgtcatagttagtattatttgtgaatattgtctgcttgttctgtgattgtttacttagaagaattcttttcagtttcatttattttaaaacatgctaatataatctagtaactgtacttatctac

SEQ ID NO: 30949 - DNA, 1338 bp, Arabidopsis thaliana columbia
cgacggaataattgtcttgctaaactctcgcaatttgcaagggatattaaatgtcgcaaattcactgcaaatgagctgtctcgctaattcctcgcaaaatttgcgagggatttgcaatgaatatttctgtagcaaacctgcgagggagttgcaagttccagcgttcgtagtagcaaatccctcgcaatgtttgcgatggacttgctaggtttttgcaacgttcttaattattagattaacgtgagtactgttctgtttagcttaatcaaatcttaatttttggttaatcttaggttaatctaatcttaatgtttggtattagcactgaattagaaacttaattgatagcctaaacacatattattaatactgaaactttggtgttcaaataaaataagaaagcttacaaaataaatataacaagttttaggtttagatgagagaaataaaatagagtgttgcaaattttttagaaagcaagagatggagaggatccagtgttatttgcctcagtctcaactgcctcctcagctctaattggttcagcttcaacaacaacagttcctgtggcatttcactacaagaaaacaaccgttttgcaatggaagaatatgtaggtaatccctcgcaaaacgtcattcgcaagggaattgcaaagacagactattcgtcgcaatacgcttctcgcaaatcgggatacgttgctaatccgtcgcaacgcttgcgacgaaaacttttcattgcaaattgtgcaaggaagaatcttcgtcgcaaacgcctcgtattttgcgacgaacatattacttgcaatagcattgctaattattgtgtcgtacatccgtcgcaaatattgcgaggcatttgcgacattgcttttgttgcgacggacatattacttgcaatgtcattgctaattatagtgtcgtacgtccgtcgcaaatattgcgaggcatttgctaggtttttgttttctattgtaatctcgtagcatgtgtttgcaacgaatatgcaagaccaagctgaactgttacagtctgtttctcttatttggtaatttgattttgttgagaaaacaattcaaaagctgagaagaaattgaactggaattgaaattgaaattgaaaattcaaatgttggatacaaaaactgaaattcaaaagtcttagaaagttggttacaaggaaacaagttaagaaagagtgacattgtttaaaaggacttagataaagaggcggttgaggttgcggtaccattaccggggttgtccccatgttttccccgtcaaaggtgtcacggtgtagtctgaggagtgctactcggttagcttctgtgttggtg

SEQ ID NO: 30950 - DNA, 1489 bp, Arabidopsis thaliana columbia
tcgaaaactatgtccgaacatatgatttttgccctgtaatatagcaaagatcacaaaaaggcccgaaaagtacattaaggttaaaatttggagtagaaaaagaaacaatagaagaattccattttccttcctcattgatcggagagctctctttgggctttccgaaaaagtatcacatgtcaagtttggcatcacggtcttaaagttctagagtcatacattttaataaaaaaaagagaaaaaccgaaaaaagagggattcaacacgaggactttcctggaggtcacccatcctagtactactctcgcccaagcacgcttaactgcggagttctaatgggatcttgtgcattagtgctggtatgatcgcatctattactacatgcaatgcaatcgtatctattcttttttgaagattttatgatccatttgccgtgggtcccaccatctatgtaggaataccctatcttgtttatgagagctttgatacatgcaaaatattcaaaaacaatgtccgaacatataattttcgccccgtaatatagcaaagatcacgaaatgcacgaaaatgtacattaagatcagaatttggagtagaaaacaaacaatagaagaactccattttccttcctcattcatcggagagctctctttgggctttctgaaaaggtatcacataccaagtttggctcacggtctaaaagttctagagtcatacatttttaacaaaaaaaaaagagaaaaaacaaaaaaaaagagggatgcaacacgaggactttcctggaggtcacccatcctagtactactctcgtccaagcacgcttaactgcacagttttgatgggatctggtgcattagtgctagtatgatcgcatcagttactacatgcaatgcaatcgtatatattcttttttgacgactttatgatcgatttaccgtgggtccctccagctatgtaggaataccctatcttatttattagagctttgatacatgcaaaatattcgaaaacaatgtccgaacatataattttcgccccgttatatagcaaagatcacgaaatgcatgaaaaagtacattaaggtcaaaatttggagtagaaaaaaaaaaaaatagaagaattctattttgcttcctcattcatcggagagctctctttgggctttccgaaaacgtattcacataccaagtttggcctcacggtataaaagttctagagtcatacatttttaacaataaaacagagcaataccaaaaaaaaagatttatgcaacacgaggactttcctggaggtcacccatcctagtactactctcgtccaagcacgcttaactgcagagttttgatgggatctggtgcattagtgctggtatgatcgcgtccgttactacatgcaatgcaatcgtatatattcttttttgacgactttatgatcgatttgccatgggtcccaccagctatgtaggaataccctatcttatttataagag

SEQ ID NO: 30951 - DNA, 1775 bp, Arabidopsis thaliana columbia
tgctggaggtactttcatgaaattagtttgttggaaacattaggatcaatgaaattagtgacagagataagtttttgttgaagttttggaatctgttttggttgtagaagaaaaatctgcagagaagaagaaaaagaagagagagatggaaacagaaacaaaagaagagaagaaaatagataaagatgagaagagtttgtcagatcatgttgtgcttccttgcatagataagcttcgagatgaattgtcttgcgcggtatgtatctgaatcttgaggctgagactgttttgtttttttgcaattcattgatttagggttcttgagcttgacatttttgcttcgtgattctgcagatttgtcttgagatttgctttgaacctagtactacaacttgtggacacaggtagatttaactagacaagaaaaagttatctttgtatggtgaatttggtactgaattgtccaattttggttctctgcagcttctgcaaaaagtgtttgcgatctgcggcggataagtgtggaaggaaatgccctaaatgcaggcaactaatagggtaaatagcatagaactttgatgagttttggattaaaagcttcgagatttgtctaacagtgttatttatctatgtagaaatggaagatattgtactgtcaatacggttctttggaacacaatccagcttttgttccctaaagaagtcgaagcacagagagctgcttctgctaacttgaaaggcaaggagacaccgagtcctagaaatccgaatcaaaggctaagaagcagaaacagggaaactgcattgtttcaagagaggttacaaagagaggatatttcgagattgcttgtatctgaagagagaagtgagaggagcgaaagaaggaggagaagtacaagtatgaggttggatcaaaatagggatgcagcattagcgatgcggttacagcgacaggagttcgcatcagcttttggcgcaacgacggctgaaacttcttcttcatcggtttctactctgtcgcgagcaagagctaacctgcaagctatggcgtcaagagctgttcgcaggcaaggatgaaatgtgatcatcatcttgaatgacattcatcatcatctttagcctgaatctgccacagatcaaggcaattttcacattgtaaaactacactattattcggttccgtattcctgaaatttccttagaaatccatagtctgatcatgaagattgtaatcgatccgttaccatggaacctttgttggtgtcagagacttgtgagagtttgataatgggaagacatactaaattaggttaacttgtgtttttgtaataacttgtgtgtcacaaataggttaaagagttactaagtccaacatcggtagttatcaaatatacaatctaatataaaaggtacaattcattctgtgctattgtcgtcaattggtggggagatataagctggtggttcttcttgtggtgatgggtttggtgagatcgaatgagtaaagatacattccatagataaaagcatctatccaaggctcatcaccaattgacaatttttatgtttttctttgccaaatgataatacttgagatcaagatacaaatttatcaatatatatatttttcttacgtttaaatcataatataatttgagaagattttttctcatacatgtataatttcttttgtttttaaatcataagaaaactcttctttttcatttttagatagtttgtcaataattttaataaatccaagcatactctttatg

SEQ ID NO: 30952 - DNA, 830 bp, Arabidopsis thaliana columbia
caaacaaagctttagaaaccgccaacctagacttttgatctaaaagtccccatgaattcccctttgaaaccccctccaacccaactagaaatctactcgctcatggcaaaggagctaatcaaaagttcggttgagtaaaccataacaaaaagatgaataacacttaaaaagggtgtagagattacttctttaaatgtagaatacaagagacaaaactccaccttaacgagtcttacacaaaacgaggaagagaaagagagagatggtgatgttcaagcttcaagaggtgcggcggcgagttggcagctctcggcgatacgtagggttcgcttgtgatgaaggcacacctagggttaggacttagaacaagtatttatacttgagggccaagaattaggtttaggggtaagaacgtcattccgccggataagtaagtgatcgggccgagaagtcaggaaaggagcctaatgacggtggcgcaaggagggaaggacttgggcgtgacctaatggtcggtgttgagctactcggagctgcccgggttcaagtctccttggccggatgtgttttggatttattatttccaaaaggccggttcttgacatgtcttcactcttcaggtcatatcttccaaacggcttcatggattgctgtgattcgacttcgactttaatcttgactcttctcgctttccatgcataccaaatatctcgtttccgttatggggaagacctcggccggataataaacttctgaagtactagaatgattgccttctgatacttttagcttcaaaactcttaaaacgttcttggcacctagaatatgtg

SEQ ID NO: 30953 - DNA, 565 bp, Arabidopsis thaliana columbia
tggtcgacatggatcaacttctctcgattatctccctgcattttccacgcggacgtggtcccagtgaccgtaacacaccatgcagaaccaaataaagtttgattcattagaaacatacagaatcatctcagacatttagagatctgctaacaaaatataaatgactaaattaaattatgactacggtggcgaaatactacatagggcatcaggaggtaaggtattttcgtgtggattgaccaaagtattttaattactcattcacataaaggggattttgcaccatacaaagttttggaactgtaaaccaaattcttgtgtttcatttaacaaaattttcatgtgtcgtgtcgtgtcgtgatcagttggtgggacaaaaaaaataaggactagtctttgcctcgccaaataatttcgcccccacgtttttaatacaaacaatcaggtgtcttgtttgtttcttctaattattataaaagaccgagtcaccttctgttcaaaagtgaaaaaaaaataggaaaataaatttacgttgcacttctatacggacattgttgtaagaaat

SEQ ID NO: 30954 - DNA, 590 bp, Arabidopsis thaliana columbia
catctctaacaccaattaaaaccaaaccatccataatcaatatagacaaaacgtaagcacaacgaagtggaccaagaacatgaatattcaaaagaagaagaaaaaatattcacaaaagaagcaaaacaggatttacatacagagacagtggaactccaaaggtatagaaacatgtcagtcaaaggatctctcacagacagtaaagtaaagtaatctaaactaagctcattgacagtgaaggatttctaaatcacccttttaggctgattgtgatgaagattttcctagtgagactgatgcaagtgcgttctttgctctttcttggaagttccttgttttggtgagtctcagttttatccatagtctcctcacatcgatcatgtgtagggcacggcaaacagttggctagtctcaccaagtattcccaagctcagatgcggaacatacaatgcccataacgttttcaaccgtgatcccatgatggggaagatcaaaattgccagtttcaaagacagaaccattagtgcaagtcccatatatggctctctttctgctatttctctgatagatgacccgttgtgtagcatgtg

SEQ ID NO: 30955 - DNA, 459 bp, Arabidopsis thaliana columbia
cgccagtgtccgtaatccacttgtaagttaattacataatttaatcggtgtgtgtttgtaacaacagatgcttgaaggtctcgtgaagaagatagcgatagattttgatgtagagagcatcgcaaaatcagcgaaggcgtcaaaggaagccaagattgcagaagttggggccgatatcgatcttgtaattcgtcagtaaccttaaaagagagtctgtgatcgaacccgggatttgaattttcaatgattccctcaagaattttcatatgattcaaaatcacttttccttgaaatgcaattcaacttttttgttttcagatttctgaatactaacatatgttaaaacttaaaagattatggcttatggcttccattttgagtagaatttttgatcaccccacattaacattctgctaagcgaaccctaacgttcttcttcttcaaatgccaatgtcttgg

SEQ ID NO: 30956 - DNA, 616 bp, Arabidopsis thaliana columbia
caagacaaacaaaagcaaacctttttcacataatccattgatgaacaccaccaccaccagaatctctcaccatatctgacttgaaaaaccaaattacaaccatgatagaacagatttttgcttaatctgatttgcttagcatttaatcacctaatcattcaaaaatgttttgattcgtatctatttttcttttaccaacaactttacagaaccaaattgctactaaaatagaataaaaagaaagaaaatttaaaaaacttgatagagaatcagaggaagagaagactgggattttttgggaggtggtagaacaaaaaggtcagagaagatattattttggagtttgatgacgtggcagaactaacctacgtgtcaagtaggaccagataaatttacgcatgctgagattagtgacgtggacaaaatcaaaagcttggactgcgaggggttggtttagactttagagattatcgacatgttaaattattgtcgatttacaacaaaacaaattacatatttccatttgtttcagatagattattattatcttcacacaccaaaaaaagatagattaaaatcatgacagttacgaaaatgcaaagaaaaaaggaaaatt

SEQ ID NO: 30957 - DNA, 370 bp, Arabidopsis thaliana columbia
gacgctgagatgaatcggatcgagagaaatctggcagaaataaggcgtattactggtgttaggtttacgccctcccaaactggaagcgttctaggttttctaatgggccttgactatttgggcttattatttgtaacgcttattgagttaatgtcttgtgattgggtcatttagcaagcagtgtcttattattggctctgagtgtataaggatacccaatgtcacaccatttaagtagatttgttaatgatatttaacttaattcattatggtcatgtgttaactgttacttatacaataccttctgtggtgtcagcagtgtcaagatggggatgtcattattgcattggaatagcttttagggccagat

SEQ ID NO: 30958 - DNA, 597 bp, Arabidopsis thaliana columbia
cctcacaagtttgttaaactaaccaatcacaaagccgatggtccagaggtaattccataggttgctgtctttagttttttgagttttcatggctggtttttgtagcaagatcataaaataacagttacattgctttgtacagcagatacgcggagtgcaaagagggttttctggagaaggtagtcacatgggtcatcatcgtagaatctataatcaacggatgctagcaaaacgtggtctggtttcaaagaagctaaatgagaaaggacatgaattatctgaagatgatgaagatacatggtcaggaggagatcctactgtgttgagaggtactgatttgtctgccacagattcttatcctttaaagaaacagaagctggggagcgaagttgctggacgaaaaaagactttgtttaggagtcaaagtgctcaaagtcgttcatttagagtcctcagagtgaaaaagaggatgagtcacttgagggagttaatataaaccgattaaagaagagcgttgcttcatttcaagaagataagtatcccctggaaagaagttttgctcagatgcatctcctcgtggaactagcatgagaaagt

SEQ ID NO: 30959 - DNA, 482 bp, Arabidopsis thaliana columbia
tataattaattgtatatttctcactacgtacaaaatctttttgtgatagccgaaatgtattttggaatggaggcgacagtagaatccataaacgatagtgggccaagtcatagaggaagaggccacgacagcccaccagcgaatggcatcgtttaatcctatgtaatttaaaaacatttctctgttgattcattgtttgggaaataaataagaaaactttatatgactttgattcatgtgaatatgcccaaatttaaataacaagcctcacccaaatggagctgatcacagactcacgacatggcacaatccaaattttattcaaaactcatcaatttgataaaattaaagcaaatatgtgaatgaatattaaaaatgactagtaacgaaaaagctttaacgaacagacacataaataattcaatatacaacattttaaacatatttattagacagctgtgataaattacttctttacatat

SEQ ID NO: 30960 - DNA, 318 bp, Arabidopsis thaliana columbia
cgcacagacgtcgcgttcgtgcggtaggacccacacgtgtgtagtattgttcggagcggtcttgttaggttgaaatggcagtaacgtgttgagcgtgattatatcccatgctatgccacgtgtatggtagattgtacatctgtccgtgtgaatcgttcggtctagattcctcctttatgtcttcgatccacttttaccggtttgtcaaaagaatttgcgggcaagctagttgtatttttagtcaacgatattttccaaagttcaatttctcgattttaaattttatcgaaatcaagaatatcgtatcgtgtgtatatg

SEQ ID NO: 30961 - DNA, 556 bp, Arabidopsis thaliana columbia
gattcgaatcgatgatgttgtagtctgtgacttctgtgtttggccgtttgtgtttttgaggagtgatcacgtcaagtctatcgaacaagattattgttgggaatgactgttcaaataacttttgtcactgtcactgatagtgatcattcataggcaaaggatattttcttagtaattacgcaatgtggaaaacaagaaagcaaagaaatgcaaaaaagaaagtaggtccatatagatgtgatttatcttataactatataccaatcatacattagtctcttaactatataccaatcataaatgaagcaaatcttattgtcttttcttgctttggtattgtattcaaagttggaatatgctaagagttgaaacgttaaaagttaaaacacgtcgtaattaaacatagtgggcttgctggatcggcccaaatgcttttctattttatcaaatacgttgacccattaattcttccaactctttcaattatcagatgaaagtaaaacgcagcgtgttcattacattcttctgtcaacctctaaaccgtaatatttggaaa

SEQ ID NO: 30962 - DNA, 536 bp, Arabidopsis thaliana columbia
agaagtagatgagcagaaaatgagcaacttcgtccagtaagtttagaaagaaaaaaaattacataaaaccaaaccaaatgtagtgataaaaagctttctttgaacaaataagacaggctaaatggtacatgttatgtcctatattcatatatgttaaaaataattgaaagtatcaatggagttctatcacacatcagaagacctaagactcttaaccacttcatcactacatacagaaacagtccaagagatgccaagaattagaataaggaccagaagacaaaagatcatatcaggctgcaattattcgatccaactcttcatggtatgcatatttatgatgcagaacttaaacaaaatagcttcattgcttgggttgtagaaagagttataacaacaaaaacagatttctgaattcgatgataagagatttagcaacaaaaagcttatgtatctgacaaaattgcaaaagaagaaacacaaatacaaagcttggggagttgattatcgagagttcctttaggagtttatacaaa

SEQ ID NO: 30963 - DNA, 609 bp, Arabidopsis thaliana columbia
gcttcatcttcttcgtcctcatccccatcatctgccaaatgccaacacattgatctcgagatggtccctctataggaagcgttccttattaatctctgctgcttatgctttaagctgttttttctgtgcagagaagttttcgtaccagatgactctattgtccttaggttttaaatatgcaaaagtttgttctaagaacaagttcaatagtactcttaagttttacagaacttaaattcatgacttcattgaatctcttggaagaaggaagaaaactattttgtgattaaacactgcatgattggtaaatttgtttcgtatttcgttattttgttcttttttattataaaacttcaaagtaattacacaagcacccgtggcctaatggataaggcgtttgacttctaatcaagcgattgtgggttcgagtcccaccgggtgtgctattctaattttactgaagctgacgaccacacattagcattttacccgactttttgtccctcacattttatctgctaaatttttttctgtcagtagtcatcacatcctgatccactacaaggttatgcgttataaaatgttaatgttactaattttcgcacaaat

SEQ ID NO: 30964 - DNA, 213 bp, Arabidopsis thaliana columbia
cctatgcatgcatctccattgtcactagaccctcttctattgttacttacagcaccgatatatctagcaatgcaactatcatcatactcgttcctctttctcttcttaccaacactctcagcacaagtccctttcatcaaagtctctgaaacagctctccttcttaaaagcttgtttgaagtggtatctatcatcaaacaaaaggacaataag

SEQ ID NO: 30965 - DNA, 670 bp, Arabidopsis thaliana columbia
ccccaataataataaacactttttctttagcagatggttaacgttcagatattgatgtcattacgagtgaagcgaacgaaaaggttacgcgagagagacataaactcgtttcattacactataaattattgtatatatattaaatcaatagaagcatattaaaaacgaccgcgtggcctaatggataaggcgctcgcctccggagcgggagattgtgggttcgagtcccaccgtggtcgttaattttttttcacagccttttggaaggatatctgagatgttgttaaagctggctgagatatcttaaaatcagaaacacggatgcgtggacaaaatcataaaactcttaactatgtcctattcaagaaaatcctcaagttcctgcgagcacaggttgatcagtggaagaaacgtaagttaagggatatgacgacagtttcaccatttgcatattatagcacaagacactctctaccaaacatatagcaaaatctccttcattaggaggaatatgagcaaacaccaatacacaagataggataaaggtctgaaatatgcataagtagtagcacaccatcatttacctgcccccaaaatcacaaatagtataaccttatggttttctctttcggaaaatggacatcatctatgagacacgacacacaaatag

SEQ ID NO: 30966 - DNA, 579 bp, Arabidopsis thaliana columbia
aatgccgtcagataagaaaacgaataccttgaattagagaattctgaatatgaaaatgttattgacttctacataagttcaaggagtgatgtatttgtaccagccattcccggtctgttttacgccaatacagttggaaaaaggatagctttaggcaagcctcaagttctcgttccagccgagatctcagggacatccggtcttcccgctaattacatatctccctatatatcaaagaagaaccacttggcgtattcatgcttttgctgaacttctctggtgtaacttttgagggaaatattttgctaaagtgatcttgtagccaaaatctgttgaaatggtcttctgcaaatgtaagccaatatagtaaccaggtttttccggttgtttattgataagtttagctcgataccaattcgatttttagtcaaaagtattctcattggggttgtcttgtttaggtaaagaaagtaaactgttgaagttacaatttgattctattggctcatataacgtttgcatactattcatttcataaccatatggtcgacttgagagagacgtcatagtcaaaggagg

SEQ ID NO: 30967 - DNA, 552 bp, Arabidopsis thaliana columbia
gccaaaaaagttttaatctttgagctaaaagcaacgtacccagaagagggaagctagtgacgagacgatcagaagaagcggctccagccatagtcgagagaaggcaaaaaaaagggataagctttaagagaaggaaaaccctagaaggttgggcagatgaaagcaaacgcaacctcgaaaaacccagagagagagagcgcttttggtgtgtggggggttttagaaagttccgttcttttttgttttcttcgtcttccttcccctttaacgtaaggcggtgatctttaacaaagaacagaaatgcccccaaatgggtcaaatttacgaggaattctaagcgacaaatttcgatttttttgctcctttaacccaaaaagataaggctcctcttcttaatgacgatttttcgtcacacgagaagattctgaaaatttgacgttgattgcttttattagtgagacctctttttcttcttaacttaaaatcaatatagcgaatcagtaaagcttaacttacacttttaggacttttgcttaagagaaattatcatga

SEQ ID NO: 30968 - DNA, 520 bp, Arabidopsis thaliana columbia
tgcgtatgtgctcaagaagctccaacacagcagcagtcatcaggttgtcccgatgacgattagcaacaaaaacttcgataatcggtttcagcgtgttgttctcaacaatgtaactctggacattatcattctgaaatagaacaatattttagaaattgcataacttacctaaagacttattgtcatccgagaacattttctagccattatagaatcaattgtctaattcattctcaagagagaatgcacagatgagcctataagaaaaaatgctgatcgaagactactttacttacatggacagagaggagagtgcggacaaatcgaacagctgcagccactagggttttttcctttcttcgagtgagaagcaaaaccttttctatcacactgttatggagaaaactgcacgtagcagacaagagaagtaaatgcacaagaatattagatggctactgtagtgatacctaaaacagaaataatgtgataatcatcataaaggttactttgtcctggatgg

SEQ ID NO: 30969 - DNA, 561 bp, Arabidopsis thaliana columbia
tgatcccctatagaaacgttttgaaatcaagtttagtgaggggcagagacaaagtagaaccaactcatcaagaactcaattttaaacatctaaatggatctccatgcaacattattacactaataaataatatgaaaagtttggatttggtaccggtctgtttcactatcattgttacaattattgtattcctcggcaggagcaccttagtttattagaacaattagaccccattgacgaaccaatatggtgtagaagtatctggaaagaaaaaaggaacgtcccacatttcaaacaaatcttgctaaccacgtattatctagctggaggaatgagaatgacacattgtccttgctctagatgtaaatcaccataccataagtaggatcggttctattaaaacattaattggaaagcatttcaaactcgggatagtaagtgtggtggagacatgacgtattggtgacaaaaaaaattatagagagaagaaacaagcttcaaaccctccccaagacaacaaaaccatcattgtggggagcattaagagtatgcaaccaaaga

SEQ ID NO: 30970 - DNA, 524 bp, Arabidopsis thaliana columbia
tagtgaatcatgactctgccatgcacaatacttttattattatgtattttgtttgaataatcactcttatccatttgttgtttcaatacttttcatgtggtatgagcccatcttttcaagtagattggtattgaataatacataatgcatactattaacatatacaggcggataaactggaaactcgtttgaaagtggttggattggttggagagttgttttccttgcctggacgtgtcatctctgaagagttcgattcaatttttttggagtttctgaaaaggctgaccgatagggtagttgaagttaggatggccatccttgaccatattaaggactgtttgctctcagatcctttgagagctgaggcttctcaaattatatgtaagctttctttatcatgccattaatatgcattagaattgactaatcttatagtgttaaacttatgtagctgtctctgtgacgtgtcttggattatgatgagaatatccgaaacacagtgttgctgttatttgtgatgt

SEQ ID NO: 30971 - DNA, 490 bp, Arabidopsis thaliana columbia
ctgatggattacttttgtttgatctcatcatcaaatataaatacaagaaattttatgattttccatatatttttactttttctaattgaagtttttcttcaaattaattaaaatatatagaatatctaaataatatattattaaacttaccaattattatttcttttttaattagaacaaaatgtcattgttaaatatagatgaaaatcaactctcatgaatcattattttgcatttaatttttgtttctagttttacgtagatttctttctatttagtttagactttagaggatacaactaacttgatatttttttcgcgttttggatccaaattgaaactatacacatggcatacataatctcatcaatttaagtatataacacacttcaaaaagagatagaaacaattagactcgtgttttttttttggtcaacaaaaaatctagacatatgaaatgccaatgcacatatcatcgtacattaacaca

SEQ ID NO: 30972 - DNA, 580 bp, Arabidopsis thaliana columbia
tccccaaccgccatcagatccaaaggcttatactttgaaggatcgaagaaaccgacatctacaggctgcacaatcttgacaaccttagatgaatcaaccccactttgtacaaacgaagagacgtgaaaatcagtaggaacccaaacatgatccatttgattacatcgcttcacatgctctggattgactctatcagtctcaaacattgttctaccaatcacagataagaaatcttcgtagccagttggaggacaaggtagagtctcaaacaatggtggataccaagcaccaggctcactatgacaaacaactatcgtctcattgggtctacactgttctctatacatttcaatcgctacctccttcgtctccttagctaaaccattccaaaactccactgattctagatcaccatggtgctcgatggtgattcgaaatctagggtttgtgagatggttacgaagtgataaaacgtaagaccaagcatctgagctgtaaccacactcgagagaaaaggagcatccatacacgcagtcggcgtagaagaagctggatttagggttcggatttggatttggga

SEQ ID NO: 30973 - DNA, 601 bp, Arabidopsis thaliana columbia
  unsure (1)..(601): unsure at all n locations
tcgactctataccatttttgccaaaatacatacatgctattaagtaggaataaaatatttataagtagaaggatttaatactttaactgcatgtgactaaaactgcttgcattggacctgttgaaaaaaaatttgcattagatttttaggtgttgaatctattcaacatatagaaaaaaatttatttgggttcgcccatgccacgtatcaccatatgattggaagatgtttcacacacctagctcgcaagtaaagcgttttctattattatttgttcaaaaaagaaagaaattattgagagacacacttgttgtaatgttattggcaattgagattttggagatttttatctcaccttatttatttacaatcaattattatgtagcatactagatatgaacccgtgatacaccgcatgcatatattttagttaaaacaaattctgtagatatatgttattgttttgtttggttttaatgtaagatagactatattttataactanatatttgaaatttttagttgtatttgtcttgttaataatgtntactttatttagtgttttaagattttataattgtattttaattattaattttag

SEQ ID NO: 30974 - DNA, 624 bp, Arabidopsis thaliana columbia
tgacgacgatgacgatgctaagtatcttcctctcgtcgtctccgctactcctcgtccctccgaagacattgtgtaactgtcagtctccgattccaattccattagtctctaataagattcgttaggaatgggtttagggtttcttcattgctatataaatcatcttttgtaacgaataatattattgataatgagaaaagaatttggatgattttgatcatactcagtgtttttcttgatcatgaacttaaaaagcttaggcatgtatgtttgtatctcaaatcgtttcaagattatgaacttgactacttgcattcatataatttttgtacatataaacatagttgattgttccaagatttggactgactttataacattaaagaatcagtctctgaatccttcatagtgctaaagccttagaaaacaaatatacctacgaatacaaatgcctaacttgtacacctacaaacgcaaacaaatccttcatatactcatagtggtaatttgtcttctatgtgtttcttaatgctgaggtttgtatagcatctgcattgaaaatgtttgacgccttccgtataacttctccatccaaagcaatgtgtggcttcttgtggacagggg

SEQ ID NO: 30975 - DNA, 566 bp, Arabidopsis thaliana columbia
aaattagaactaggaaacacacaaacccaacaataaaccctagcacttaggaagactcttgatgaaatcttgccaaatccaatcctattgttggtgctattgaatccttgatgaagctctagtcataattacatttctcccaaccatgtttaggtagcttccaatatcgaatcctagctagattgatatattgtgctatagaagatatttcctaattttctagttgatccctctgttaatttttgtcatttggaagtgtcaagtcttttacatttgcttcgttatgtacataatggatgtatttattaattcgggagtgagtgaattgaaggcatttcgggtaattattttgacaatttcaaatcataaagtttaataaaccaagaaactagttgacgaaaaaaaacaaacaagagataacaacatctaccactaatctgtgcatagtttgcaaaaatacaagaattctttgctcttataaaaaacaattactttttttttgttgttggtcacaaattataatttattcctaaaccgttaaggacatagccaacaaaggaaagaag

SEQ ID NO: 30976 - DNA, 582 bp, Arabidopsis thaliana columbia
gaatatctgaacgagtagggcggtaaattcacataaatcagacaatgcattacacaagaagaggaatttcactggttcataaatcaattcaaacagactatcctagttttattacgaaaaaagaaagtaacaaatttaccatcacataccactatatctccatttggtaaggcacagcattttgccttacttctagctacacctccagaaacattaggatcgaagtctcctctatctacaaaagcactgacacaaggtctactttttgttcttttcctctcttcatccatctctgtatctgcgaccagagaacttttctttgaccaaagtggctcaccagactctgcaatcctaacaaagaaatgagacttctgaaacctggaaagcaaatcttctgttcgtctcttatgatcttccatcctcaagattgattcaccatcagataagtctttttgtgaaccaaactctctttacaaggactgtcaccattctgagtagcaaattgagcatcaggactcatttctccatccccctgatggcgtactcgccgcatcagacatatctccattttgtttgtcagag

SEQ ID NO: 30977 - DNA, 590 bp, Arabidopsis thaliana columbia
atccctgaagaaaatttgttgctaacagaaatatgatttcataaatgagaattcaaaatgataaaacccaaatctctgtaaatagttggcctatgaggaatcatgcttttatttgagtgtttcaggtttgtcggttcctttttttgtctgactgtgggatgtattacttatttgtcaaacattcctgaagtgtgattgttcacaaaatcgcgaagttaactgctgcaaaatttgatcctgaaacaggtggggctggttctttaatttcaggtccttgcagaggtttagaagatttttagatgaaaacagagcaaaggtggaatctgtaactgcggctagataccgcagatagacaattgtgttctgtataaactgtattacgttataatcttagtgcatattcttcaccccacaactaaatctttcacacatttctagttctttcattttctttgcatacatagcatcttgtcattgtgcgcataagagtgaatccttatgtgtcagctggaccaggagcaatggaaggtctgcggtagatggagcaccagtggagcatgggtgacattcgtggtcatacagctatgggg

SEQ ID NO: 30978 - DNA, 498 bp, Arabidopsis thaliana columbia
gacctttaaaccattaaccctacaaacattcttttctatgcaaatcttagtctcatatactaaatgaaacggaaccattacagccctcgtatctccacaaaatcaaactctgaatcatcaccaaaccaatcttatacaagcctagcctaccatggacagttaatactacacaaacattgcaatttacagacctagattattaattttcttcgtttcaaccctattttcgccaaatttaacaaacatcaaagactacaaaacctagtttctacacagaatccaattctaaatcatcaccaaaacaatcttatacaaacctagcacaccatagacactaaatgctactcaaacatctcaattcacagacctagattctcactttcttcgtttcaacaatatttcaccaaattcaacaaacatcacaaaccataaaacctagttttcccacagaatccaactctagatcatcaccagaccaatcttatacaaacttagcca

SEQ ID NO: 30979 - DNA, 517 bp, Arabidopsis thaliana columbia
tgagtcgtcgtggtttatcgagtgacgcgttgagagtcttgagacagagttactgataatcattgttttaggctaagatcggtgagccacccaaccaccttcctattttaatttaatgcttctttttaaaaaaattgtagaaaataaaaagcccagaaagagcccaaagaacgcagcagagaaaaaaaaaacaaagaagaaagaaaacttgctcaacgacgattcatcaatcatcatctccgatcttcttccaaatccctccggtgaaaaagacgatgtacgtaagagcacttccgacgacggatgtgaatcggaacacagagtggttcacatatcctggtgtttggactacttatattctcatcctcttcttctcttggcgcctcgttctctccgtcttccattgttctcctggcatcgcttggaccattgttcagctcgctcatttcaccgtagtattcccgatctcttccgatcaatttcgaaattgttggttctagatttgaattttgagttt

SEQ ID NO: 30980 - DNA, 370 bp, Arabidopsis thaliana columbia
ctaggccgcaaggtgctctatgttttacgggggaggaatatgcccgtcatgtgtagggagtactgtgcgtcggagtgcgcgttatccgatgtaattcttttatcttcttcttcttgtttagagaatttccatgattgtgatacatgttgaactgacattaattattaaaccctaaccctgatcctagttcttatgtcttaatagcttgtagaaactcgatagggtcaagtgttgtttaagggattgctaactgaatattttattgcattagggtttctctcgcttttagagattgctaactgatttgttacattgctgatgtatcttaattagggttttgatgccgaggatatgtggagtccagtagtgc

SEQ ID NO: 30981 - DNA, 488 bp, Arabidopsis thaliana columbia
gtaaatatgtcatttgagatgtgaattttgttaaactcacattgggaaaaatatctaggcacacaacttgtataatcaagaggttttgaaagaaataagccatataacatatacttcatgtccgaaattttcaacggcttgaaacagagagggtatcaattgtttcctaacttttgatctaacgtcggttgattactaaattatactactaaacaggtattagagttacgtcattttatgcgaaatattaaatgttgcgttataaacttataagttataacttacaccaattcgaaccaaagaccaataagaattggattattcttctcccgattgtgatgattgatttgaaatgcggtcctatatgacttaatgttagtcggttgtgttacgtaccgatattgaatatgtatccatttcatccttaagattccttacacatccaacattttagaacgaaataaaaacgagttgataagatcaagtta

SEQ ID NO: 30982 - DNA, 591 bp, Arabidopsis thaliana columbia
tgtaaccaaaaggtgaatacaacggcagagaaagcatcgaatacagcggaggttgggtggttgatgatgtttgggattgaggagaagaagattgaaagtctgatgaggaaatttgaagctaaatctcagtttgctgtggcggtttctagtggcttttttctgcttaactatgtttcatccttgtactataagtcacgtttgaacctcatgctggaaatctagtttaggcatgatgttactttcatttgcttctctaatcaccagagggcatgttgctttaagtttcgagttctacaagctttggttttatactcttttgggttagtttttaagtacagtttcttgtaagttaatggaaacggtgtcgtagtaagaaaaaacaaatcatcgtagtaattaagcctaatccgatgcattaattaatctctgaaatttgttggtttgcacaaaaaaaaaaattccattgttgttgtccacggaactctaaaatggagagtggcgatgagagtccggtggttctaattacgggatgtctcagggaggaattggcacgcgctggccgtgagttcctgagaagggatgcgagtggtg

SEQ ID NO: 30983 - DNA, 362 bp, Arabidopsis thaliana columbia
ttgtttttagacctagtagagagacacacagagttttagtccctggacccaagcgatttggagccaactttatctcttaaatcttttaattttcttttcttaaatcattgtagttgtctatctcttgtaatttaaaactcctggataccggggggaaaagtcattcactgagactggccccagtacaggggcctctgcccccggaccctgcctgcatctagtgatctttcctgccctgccatcggccttagcgactgatcccagtcgggacacttgagcggacgcgggcgcagagagacaccccgccccgagccaggaagagacgcttctcccaggcgcctgccgagagagcctgcggcgcc

SEQ ID NO: 30984 - DNA, 593 bp, Arabidopsis thaliana columbia
agccaatgaatctggaacgaaattgcaaacaacaatttcccatacaagagagaaaaacaagattaaaggactgctcctcccttgttttttagttatgatatctcaaaacaaaaagtttaaggacttatttgaccaaagaatcataccacaagccaagaaacacttcaaacatacgaggcttctttgcaaaagctacctagcacgagggacaacttctgtatcaaagctcttggttagttcaagggaactatcagattccatgtcatgattcttatttctcatcaagtttttagaagtaagagcatctctaacgctgggctttaaagctatttttcaaaggctctcttgatttttttgattaaaaataaatcaaaacgaaaagaaaacgagagaggcgtttctctgaagagagtttatgagggaagcagagaggcggacacgtgtcctatatttattggttgtcttgttttaacaaaagagaaaaattaaaacgcgtagtcttcattgttttgccgaaatcgattttcttcacactcgcgcgaccggtgactcttgataagcgatgaattgcgatggtgattgtttgttgcgtg

SEQ ID NO: 30985 - DNA, 322 bp, Arabidopsis thaliana columbia
cggattcaaaggatggcccttccttttcaaaggtgctttcaccttgttgcataagctctagagctgtaattcaccttccatggccttgcttaaaacatttgggaactctctgtgatgtttttggctaaggtagttattttctgttgcttaggaagccgttggatccattatgtcgtttggtgcaattggctctcttgtgggaatacttctctatcagaactttctgaagaacttccctttcaggaatgtcgtcttctgggcactttccctatctgtcctgtcaggatttctggatttaatcctggtgctgcgcataaatctg

SEQ ID NO: 30986 - DNA, 451 bp, Arabidopsis thaliana columbia
ttgtttgtaattaatatagaataataaataataaaatttacagcttttacaactttctgttgccaatcagactaatagttaacgtaatcaaagccaaagtctctacaaccaaattatccgcaactcaaatttttagagttgaagccaaaattaacagtcaaaaccaatgggccctttagctttactttatttggtgagtagtccaatttgctatttaatcaacctaccaaatctatatgttaatttagagcttcgaccaaaattttcacggaatccctttttaggcataggaccctctttctcgtctaatgtctttcattagggttgagaagagagcatttgaggaaataagtcgtgtattattctaagttagtccaaagtttagcagtcgcctctctttttagctctaatcttcaagttatcaagtgtttgttcgtaagtctcttagaaa

SEQ ID NO: 30987 - DNA, 588 bp, Arabidopsis thaliana columbia
tgatcaagggcaatactcaaatctgttattgtaaaacaatcttccatgaacacaacatcatggccatcaaagggagtgctatgatcaagatgtctctccattccgaattatttttcccatttagtatcgaaattgaattaaggttgggagagacactagatatgttcaacacaactaaaattaataaaacaattgtgctaaactttcacggtaaccaaatcgaatggagatatttaaaatttcccaaaaagaaatcaacgatacatcaattatttagttaatctctagacattatttattatttacaatcaaaatgtcataatctaggttattctttgggcttaccactgtacacatgacacctagtaatcgtcatctatttgtgactgtatccatacatttaaccttgccatataaaaatattcatatgggtttattgcgatctacatgcactaaatttatgacctttaatcgattcaatattaatttaatatttttgtctttctaaagtccattttgaagggatgttgagatagtcataccttgatctaatattaaacattcgattttctaattttcttttgttac

SEQ ID NO: 30988 - DNA, 935 bp, Arabidopsis thaliana columbia
  unsure (1)..(935): unsure at all n locations
ttttttactttcttaaattcaatatagaatttctctttgatttttttttcaacagtttgatttcgtaaaaaattccaattaattatcccaaaaaagaagaagagagaaatgaaattccactaactatgtaaatttcgagacaaaatcagagaatctgtaaagaaaaatcttaacttaatctacattggactataaaaactaacgtaacgaatgcaaaagcatcttaaaatataatcgcatttctcaatggaagaaagaatagggtatatgcactagatgaccatgaaatcaataataatatagaaactaactatgagtctatagtgtctgtcggagacgtatctgaaattacccgcaaccccctataactgtgttcttggttaggggacatataggtgtataggcgtatgattgcagaaatttgaattttgaaaaccttggtaagagcaatgctgtatgtggacgcaaacgatatagattttaatttcgagaaatcgatttattatcgaattttttgaaatatcaggagctccaaaaaaaaacctagcgccgcttcatttgctggttttccgagaggaaacgtcttccgttctctacccatagattctgcaaactctccgaatatctatttcaaatctatattgtttctcatacatatcgtttctttagattcaatctcgcagttaggcaatcaattccatcgggctacaggtaatttcacaaatatatgcggtttaagctattcaacgttctcgatcgccatcaacttctttatttctccaatctatattccgattaactgaaatcttaggtacatactgtttctgatttataaacttctattttgtgcagaaaagggttcgacttgtagatgatgacaactctttaccccgtcgattgtttaggtctggatctgagccnacaggtgagagagt

SEQ ID NO: 30989 - DNA, 1664 bp, Arabidopsis thaliana columbia
gtgagttatatgaatcatgtgaatagttacattggattgcatatgtgatctttagattcttctgctattgtttattgttgagaggttgtgttgaggtattgatgattctatgagtgatttaacaatatgttttataatatcttaaactttggggtcttggtacgtggtgcttgtggtaggaggcaaagaccataagcgtgccaagatcgtgataggtctgaccttcttagtgaactgtgctatcgtggggtcttgtaacgatgtcacttgatcgccatgaagtgcgaaaaactcggagacacggggctagctaccctggccgagtgtctacacgacggtgtagcattttgttgtgatgctccggttgcatacctttggagtgtgtgtgtttggtgttgggtttgaaggcagcatatcgggccctttaaaacttaataaaactagagtcttaatgcatttgcatgttttgtagtttcttcggcaagctacctttcgttgccattctctgttgcgtgtttcatgttgtgtatttgggttggggtaaattaatgtctcttgcagggaatcctgagctcacttagtaatcttagattactcatgattatacttgttttgcaggaaacccgtagtgtgaaatagagggtgtggtggacaataggaaacccgaagtatgtttctattatgtaccatgattttgtaaagcaagtatgtttctattatgtaccatgcttttggcactaggccctggccataaaacttataaatgttaggtaacatgttgtgtaatatttatacttatgaaataaattgggttttcttgtacaaattgcgaataatgactgataatgacttagtccgagtcggcacaacacttaaatatcgcgagggttggcaagcctaaacgatgtttaagtgggagggaggtcgtcaatacaccgggccaagggttgggattggttcccgaacctcggctggatattgatgatcaatctcaatgtggcgttttcggggagcccgtgacttatccggtcatagagcgtttcgggggcgttacagtcctgccattgttttgcctctcgctccttatcgctttgtttcagccagcggttcccttttggttctctccctaattccttagcagaggctctgatttgttgttgaagatgtgctagttctctaagtttttggtctcttctccttggtgttaatgttgttcgcagtggtagatagctgacttgagctattgtctttctcttttctgagagcggtgatattcgagtgcttagggttcgctccttgtactttgctttccagttctgtttgaatggatcgtattttgaagacttctagctagacactactgtcagacgtcgtcgtcgcatccataagcatttcgaggccttttcatggtttgcttgctgggttatgaagttcttggttctaggtttcgagagattggctctcttcttgatgggaggtggtagatgttatatttgggttggcctaggcacctttaataaatctcttctacatgagcttcaagagaagaggtgtttgctttcttaggtctagtgtgtttcttatggttcaagcatttttgtttatgttcttaaggttaagggattgtgctctttcgattaggtttgaagttcttgctttgtggt

SEQ ID NO: 30990 - DNA, 612 bp, Arabidopsis thaliana columbia
acctgtctattagtctaaaattcgatgtggaatatatggttaaaaaaaaaaaattagaccttgcttggtcaaagatatgtaagtaagtttaacacactgtccattatattggtgttaacattaaaaaagataaaataaaaaatggtatcaacatgaaataactctgcatggccatgtcatattgtggagttaagtgggctttaaataattttatagagcccatataatatggacaacgacggcccataaaaagggtactgaatcatagtgaattacgcacgatgaacgaatcatgagctttactgcttctccaagtaaaaaaaaaaaacataagccctctttaaatccctagctagcttccaccgagaagttgttcaatctgggaaaaatcaaaatctgctattacggatctttaatcggaaaatgggtttgacgaatttcatattgacggtggccggagtaggcgccgtggtgatgctactgaggagcgacgtgaagcaatctgtgaccgtcctcaggcgtaacgtcaagcacatccgccactggctcgaagaagaatcctccgccgcctcttccaagtaaatcatctctctcttgattccttctaatttc

SEQ ID NO: 30991 - DNA, 442 bp, Arabidopsis thaliana columbia
agtgataattcggttgaaaaataaagtaaatttaaatttgaaagtacaatgtaacaacatagaaattaatttcaattaacagaatttcccaccaatgatctcaatgaagattatatatataaaatagtttcatcattcatcaaatctcctaggctctatattaaattcatccatgtaatatctttatagattacctcatttgccaacaaatgcatcaaaagaggaattattatggtcactataaaacttaagaaataaaatatagtgtaaatttagcatgataagtaaaagataagcattctttcaactactatggttagtaaaatgagttataagttactatttagtacataagattttatctaaatttgcaaagatcaaactttttatgacatgaccaataatagattaaatgtgtacaaataggaaccatgtttgtata

SEQ ID NO: 30992 - DNA, 545 bp, Arabidopsis thaliana columbia
tgatttcacttatgatctgaaaaactatagtcttaatttcgatgacggcggcgacggcaaagattcttcaccggagaggtttgtagctccggttgtcatcaaagtttaattttttattttttacttaaatctttttttttgtataatttttttttatcattattggtcttttatgttaatacaaacatcctactatattatttgggaagtacattttaaatgtaaccttaatttttgtaagtaattacataggtatgccattagaaataaaattttaaagaataaattaatttatctctttaaggattaaaaagtcaaatactaatttaattaatttaatttaatttaaaaacggaatacattattaatttccaaaaaataataaccaatcaaaatcagacatataagatttgatatctaaattttaattaatttaatttaattagaaaaatgaaatgcattattaagttccaaaaaagtaaccaattaaaatcaacaaattagatttgatatctaaattatcatattaatttttttattaatta

SEQ ID NO: 30993 - DNA, 600 bp, Arabidopsis thaliana columbia
gttcttaaaaaaactattttattttcctttccaaaaaaaaattaaccactaccaaaactacaataatattttatataataatttttaaaatgaaaaaatatacagaagtagtttcgatgatgcagtctcctgcatgagttcaagatgatggttcaagttcaacatatacagaactagtttggaatgctctgtattttattttcttatttttctattttttctatctattatttatgtaactctataagcggattatttatcttgttactttagattattattttttgaaattacttttttaatcttttgaagtcatttttgtgaacattttttctttaaattattagttattaattaatgtgtggttgattaaaaaaatagaaaaataccaaaaaaatgtgtaattgacttttttttatctacagctaacattaatttttattttccaagaaagttttgttcaccaaaattgaaaattattcaaacatttagacatacctttgatgcttcaattccaaaaacgcaaacagatgacaattataattattttgttgaccatctattagaacccaaacattcattacataaattatgatactg

SEQ ID NO: 30994 - DNA, 562 bp, Arabidopsis thaliana columbia
cttttatataaccagtcttttcaaatgcataaatataattctatatgttaggtttaaaattatatataaatggtatataaaacatacagcatatattatttcaatagtctgatatgcatacctggttcatatgacggttagatgttattaattgttcatcataattgccaacgtggatcacttgatcaccaacgctattattgtggttggagttacttgcagcaaaagtaaagtcatcgaaaacgccatggtcgttgttgtgagtcatactcgtgaagaaatcggaatcactaaacgcagagttctctacacgcaacggtggtagatatatattgtgttgtaacattgaacattcgatctctgtgttaacctgaatgaaaatatagaaaacccattattaaaaatatgttatatgtcgatggtcatgtatcaaactttatagggtaatcaatgatggattttaaaactttgaaatattagctataccttatatggagtagggaacggtctataagaagaaccgtagtattgtgaccaatcctcgttgctgattgcgttggag

SEQ ID NO: 30995 - DNA, 149 bp, Arabidopsis thaliana columbia
ggacactaaggcaggagagtcaatgaaagcgacactggaggttacagtgagccaagattgtgccactgactccacctgggtgacagactgacactccatctcaaaaacaaaaaataaatcaataaaggtaagatcagaaagaaggaaga

SEQ ID NO: 30996 - DNA, 644 bp, Arabidopsis thaliana columbia
tagataaattgctacctctttttgtctctctctctttctctccatctgcttcctgccttggtgtctacctctttctgtctctcgcctccctgactctcttcctctctctccggctctgtctctgtcacagacatcccccccgcccccacccccagcacatggcctccgtaactggaagtcccatcctctggcatcagcgtcatcggatctattttctccctcagccacactgctcagaatttctgagaggagctactggcttcagcctggccctcactgtgggcctggtgggtggaccgggcagctccctggggccatgaaggacccacacccggggacacaggctggaccggctcagagactttctggcatgagcagagccggctgccaacctcttggctctccttggcactggggccagtgaggcacgcatttgagatctgggtgacctggttcccagtgggccacagcagtgggaccagggccgcaggaggaggcatcaccaaagtttcttcatcggccacttccttggccactatcattcactctccaggaggacgcgaacctctcaaaacctgcttaaaacgctgggttctggctacctggtcaaggggaagggaagtaacctgataagaccttagaag

SEQ ID NO: 30997 - DNA, 469 bp, Arabidopsis thaliana columbia
gtcgactctatcgactctactgtacttttcgtttatatttcgtgccttaagaaatgagaaggagctttgattgacaaagaaaaaagagcaaactacagtttttgcagaacttctagttatttaaagaaaaaacgattttatgttcgtagccgtaatttgtcattacctatttggccgacagcatacattctagtaccgagtttaaattcggtgatataacaacgatactagtagttcgcgttacccatttagcttatcacctaaacacacaaaacttagaataacttattctaatatagcaatgtgtcattaacttacaaaaatagatcgtttgatcatattctacttggcagtactatcattacattttacggaaactaaaccagacatctaacgagccatatccgattttttaattagctttgagtttctcgtcaatctacagtttcagaaatttcccatgctataa

SEQ ID NO: 30998 - DNA, 402 bp, Arabidopsis thaliana columbia
ttccaaaccagcctattgacgttgttaattgttaacgtaaagactaaacgcataaccttctgtgtactttatgcgattgtgtttgtaacttacaacttcacaaatagattattctgttttcttccagtttttgttttttttaatagaccgaaaaaggatgggtgcactaaaagatagtaaattgctcacaaaaagattttgttctgtaatttaagtttctaatagcattttgcgtattcaggatcgctcacaagaaaagacagagacgctggtagagttgataaaaataaacgatgaagcagcgaagagtaacaacatcatagaatcacctggtgactactagcgatggtggcagtggcggtggcggtggcagaagagggcagagtgagaataggcggtgtt

SEQ ID NO: 30999 - DNA, 562 bp, Arabidopsis thaliana columbia
gctaatttcctaacattgtggagtgattttaaacccatttcgggttctcttcactttcgatttctcactgcaaacttcgttaccggtgacggtggcgaaagatctaggggtttgggcacatcggaggagaaacccagttccagaaattgagggttttaattgggtttctagagaaagttgtgatacccatttgagaacagacgtgaatctactagggttttgccgaagtttcattgcttacttgagcaaattaaaagcttttacctttgaatcttttacgagtctcggagctcaagtcgatacgcttcttttgccatcttcaaggatcatcataagctctgcaggagacgaagaagaccggtgaagaagatttagactttggtgggttcttgtgtttgcttgtaacaaacataaaagaacaggcttcttacaagtagtcaagcctaataggcccacttttttaagagtttcttaaccagcccaataataaaatcaatttaattgggaaattgaatattcaaagtagaaatgattaagaaagcaaaagtattaaaaggtgggg

SEQ ID NO: 31000 - DNA, 532 bp, Arabidopsis thaliana columbia
gaggaggcccttctctctcattcgcatacactggtagctccagattatgttgcagggcatacgcttgcagttgacctttgtatacatgatccatctctatctaaactggcaggaattaaccatacataaagagatcaacgtgtatcagaatttctcaaacataaatggcaaacgaagagacgaatttcagatttcagaattggtcaaccaaacataaagagatcaacatgacaacatgtatcagaatttctcaaacataaatggcaaacgaagagacgaatttcagaattggtcagactcaatgatctagggtttcgtacagatcgataacatcaaaacagcgaaaggaatctacgattataaacacaaaatcgtacctctttgaaatggtgaagacacttcgagggaggaagtgaacaatcagacaaagcattcgctgattgaaactcatcgagaaaccataataagtatacacatgtaaattgtctcaaggatacgaaagattcgggttacccagcttgaacgggtatga

SEQ ID NO: 31001 - DNA, 1017 bp, Arabidopsis thaliana columbia
tgccattcggatttaaattagttactacattgaaaatcctggttttcatgtagtgtatgccgtcgagccaaaaaatcaaatagaccgaaccagttcggttcaatcggaaaccaaagtcatataaatataccgcttagacgatttctgtaggtcacacaccctcaagcttaaaccctagaaatcgtagaaaggtgaaaaaaaggcggaactttactagcttaacaatggctgaagaacaagagatcgtcgattccctgtcagcggaagtgaacccagaccagaaagtggacatggaagtcgaaaccgcgaccccgaaagccgagaccggcgatgagaaacgtgagagagaggagacagaggaagaagagaacggaggtgaatcgaagaagcagaaggttggagaggaagagaagtcaggtccggttaaacttggtcccaaggagtttgttacctctgtggcgatgttcgattactttgtcaagtttttacacttttggccaactgatctcgatgttaataaggtaatacatatttgggtttactcttcgtctttgtcttttggctttgtttattgtaaagtttcaaattttttggaaatattcattcctttgctcgagacttatataggttaatctaagagctctgattgtgattattaagttctgtgatgtgtttaggaagatgttttatcaatgaatctgatgatgatcgtgctttgtatttaaactaaaagaaattgagaattgggttcgcctttgtattggtcatatgatttgattttggattcagtgtttggtgttagaattttgtttttgtctcaaattagtggttgtttacaatgattgtggatattgtattatgtttagggagatgattgtggatattgtattatgtttatggagaggattagtgaagtggagatagcttgtaaattggactccgttgcagcttttttactagttgaaaagttcaaatgtatagtgttcttactgattatatgattgtggactgtgtgtg

SEQ ID NO: 31002 - DNA, 179 bp, Arabidopsis thaliana columbia
atttctctgactaaatgaatcaaaagactatggtcaactgcgtcaaaacacacagaaaagaccgtttgagaattgagagaagatataacaggctgatagaaataccttctgcatctgagtagcaaattcagaatcgtcaagaagttgcttccgaaatgctggtggaatattgatacttg

SEQ ID NO: 31003 - DNA, 548 bp, Arabidopsis thaliana
tctctggattcaacccatcactattcgcttccaccagaggttcattgcaattttccaaagccatgttactcaaatcaccagcttctaggcatccagtttcagtagacccaactgtgttatcgcatggagtctgatcgtctctcccaagctcgctaacttcagctgatgcatccgttttctcatcttcatgtggaagttcatcttcaactttcaagtccatctcattgaaaatggggttgatatctgtatcgccttcagcaatttcaataacgtcagtgcaacttttttcattaggatccgcacaaacatcctgcccgccttctccatcatggttttcatgggattcttcaacctgtaaatcctctacacggtcgagtttttcctcagacggtatttgactgacatcgtcaatcactacaagatttacttcatcagcagctccattgccttccttcaaaacctccaagtcagatttttcagcaagctcattatcatctttcagctcttcctgttggtttatggtttgtcctcctgcgggtgagtatgag

SEQ ID NO: 31004 - DNA, 611 bp, Arabidopsis thaliana columbia
gataccggtggatgttactatatgtgattataatatcctttggctgattcagcagagagttggtcatttaaataattattcttctaattaattacctttttctttatggacatatatcacatattaatactaattgtttttgaagcagtcatattagttctaattagtttgtaatatatgaatggtgctaattaacagacgatagacctgaaagtaaggatgtgttgcagtggatgtgagagggttgtcaagcatgccatttacaagctgagaggtaatgttataattcagagtgttttcgaaaataactaatttcttttcttccataaaatattttcgttaaattaacgaatattaaattttatattataaattatggttatagaataataactttatatttttcataaaaaattgtaatatgttttttgttttgctaaaacactcctatatagaaaagggtaatattgtgaatatatcaaactagtaactaaacgggcgttgttttggtggtgaaggggtggactcggtggaggtgacctagagatggagagagtacaggtggttgggtcgtagagaggaagaaggtcccaaggcggtgagaagagccg

SEQ ID NO: 31005 - DNA, 554 bp, Arabidopsis thaliana columbia
ccctgtgtatattttaataaataatttttttgttatgtttacattatttattaaaatattaaactatatttttttgtttatagcatcaaaattcattggcacgactctgatgacgtgacaccaaatatccatataatggtgttgcagttgcttcgttggaaagacgataatcaacctccggccaagataatcttcatatcaaactcgctcagtatctatcacttctcttggttttttgcttaaaatccgctcagtatctgatgaatattataaaatttcttcattgaattttggggtttgaacagcaaaagtaagaatctgatttgtctgaaaattaaacatttgcgttcaataaatagcatgaatttgatttgctataatttcgtagaaaaagttggacaagaagaagaagaagaatacaacgtggttaagcaatttgaatccctatattttgtaggcatgatataaacattgctgtaaaacgataatatataatcggtgtgatcaacaagaccgtgtcatgagaaaccgacatagcccagcctgatacgcgg

SEQ ID NO: 31006 - DNA, 538 bp, Arabidopsis thaliana columbia
tgtaaataacgagcaacaaaacaattaactacaacaaaactagttctagctaagagaattagttagaaatttttattataatagttagtatatgtttattcataacacaattaattaacacacaaaatacatgtaatttcctctataccctcttcacatataattagagtagtgctttaatttaagattaattatcgatttacatcattaatgatcatctagtcttacacagagagtttcagtatctgcatgagattatataaaggaatgtattcatgtttttacttctttttattcatggttaaggatgatacattataattataaatccataatctatgaactcaactattctttataaaaaaggaattaaattctgaaaataaacaactgtagttggcttccaaggctgctgcttcacctataaataccctatcctctttgaaaactcatctcacatcacaattcacatctcctcgaacaaacaaattataaacccattttccttcataaatttctaaaataaaaccccttaact

SEQ ID NO: 31007 - DNA, 566 bp, Arabidopsis thaliana columbia
  unsure (1)..(566): unsure at all n locations
gcaggtcgagtannatatattataggttgatgttgaggaggagacaacgataaagaacagtgagtggctacagattctgcgtcgaccattccaggagacatcatcttttattagtgttttttttttaatatcatgggtggtgatttgtctttttattttatatgtttgtttgaatatattagcaaaaatgaaataacctaaaataccaaacattaaatgcttatggtgaccaaggtaagttgggccacaaaacaaattataaacccaaaattagaattgcaagtcaccatcgacgcttccgatccacaccaccaacgtttccaaactagagtcatgtggtttcactacgcttccaaaacacctcatttttggaatcacgtttgcttaccggctttgagacatgctatgcgcctctccttccgcttctgtttccgcttcgacctccgcttctggttcgcgggcgagtaacgcatcacctccgttgatataatgcttcctagacaaaaacaaacatacttttattttagctttgcaaacgcaccacaacttttaacatccacaacaaa

SEQ ID NO: 31008 - DNA, 964 bp, Arabidopsis thaliana columbia
tatctacattttaagttaagctgtgtaatgaataattttcttaagatttacgtggatcataataaattaatgaaagctctgatgaaggagtttgttaggggaaaaaactgaatcaaattcttgtacgtcatacatattttagtgtggttcgtaactttttcactaaatttttaaattcagttaaataaaaaaaactgtaaatttactaaaatgtaaatgaaatttataaaaaaaatatttcaacataagaagagttcataatggaacaatcataagaagaagctatatatggcgatgtgtatgcactgcagatggtttggagtcacaggctcatagcctcatatgtttacgttaatcatcatggaaagcgatttttgatccaaaaaaaaaggaaagcgataccaaggagcttgtggagtttatggtgatgctgcttttgcgctggttaagttgaaattcagaaagaaagataacccaaaatccaaattaatgattacttcaaacccttttgcatatggagaagaagagctgttcaacattaaacgggtcaacgcagcattgaatttccgtgtcccaagcactgactgatgatcattctctaaagtctctataaatatgaccatgtgatcgtacgtggctcctcatgactgccccaacaagcgaattactaaacttgtctttatattgcggtgccgagagatctggggttgatgtgctccaaaacagctacacattttataagataaatgtaaatttcataaagcgattgggaaatatttatatagagtgatgatgaatacgtgaggactagtttatacaccacagcacaaaaacgcgttttgctcatgctctcgctctcgcacacacgtcaaccatcatatccatcgatgcgttggacttcctcgttcctccatttacatatgtagatccagttatgaaaggagtactggtgccaatttcaata

SEQ ID NO: 31009 - DNA, 429 bp, Arabidopsis thaliana columbia
  unsure (1)..(429): unsure at all n locations
tttttgattatttactaaaaaaagaattctttgggtcactatgatactaggaagtcttcatcgaatcttgtgtgaatgatcgttcgtatggttagaaaaataaagtatacacagaattaagacacgttcgctatgactgcgagaactctgacaactttcattgctagnctggtgttcgtcgttctcttgccactagcaaattattggctaattgcagttctagagtcaataattcgttataccaatttggttcagtggtcaattttagttaggtttcagtctagatacgattaggttaattcagtaaggttaaaataggtaagcattgtggttgtggataatgtttcgagacagttttatggcgttttggatatacaagaatatgcacgtgtagtaataatgtagcttataggtatccacgtgtaagta

SEQ ID NO: 31010 - DNA, 774 bp, Arabidopsis thaliana
cagtgctgctctaaagagaaagaaagacagacagacagaaagagagaaagaaaggaagaaaggaaggaaggaagaaaggaagaaaggaagaaagaaagaaagaaagaaagaaagaaagaaagaaagaaagaaagaaaggaaggaagaaagaaaggaagaaagaaagagagaaagaaaggaagaagggaaggaaggaagaaaggaagaaaggaaggaagaaagaaagaaagagagaaagaaaggaagaaaggaagaaaggaaaaaggaagaaaggaaggaagaaagaaagaaagaaagaaagaaaggaaggaaggaaggaaggaagaaaggaagaaagaaagaaagaaagaaagagagagagaaagaaaggaagaagggaaggaaggaaggaaggaaggaagaaagaaaggaaggaaggaaggaaggaaggaaggaagaaagaaagaaagaaagaaagaaagaaagaaagaaagaaagaaagaaagaaagaaagaaagaaagaaagagaaagtcctctaggctcgtgtacatttttttttggagacattttctaaattgaggttctccactcagatgacattagcttgtgtcaaggtgacataaaactatccagcagagctgcccaggatattatcataagctattttgctaatatctgtagcccctgataggcttcattaggtaatctcacactcaagtacatacagaaagcactaagtggcatcggtcttcaattttgaggagcttgggagtggctcagtaggtaagatatga

SEQ ID NO: 31011 - DNA, 538 bp, Arabidopsis thaliana columbia
ccaatatttcgtcgatcggttcagaagatgaggatgaagtgcttggtagtgtacaacaaaactcttcagtagtagctgtagagaatgcaggatacgtgagtgatgagtctgcccagaattcgagtttcagtatccaaagtgagaaaactatggaaccttcgaatggagctttgactgctcgggaggtgatcaaagaagccatgtttactgaggaagaaagtccagttttggttcctggattgattcctctgtctgacttggataatgaacaagtggaagttattaatgaaggtaaagcagaaacgttcccggaggtaataacctgatcagttttgaagttttatgttcctgtttttctataaaaaccttaagagctgttgttatgcacactgctgctgatggtaatgaaatctttgcatgtggattattgatgctttaagacatcatgtttgtgtgtagaataagactatgcttgtccactggttcaatgtatattgttacccagttcatgataaaagtttccttcactatattgact

SEQ ID NO: 31012 - DNA, 500 bp, Arabidopsis thaliana columbia
gaaaaatatgacattttaagaactggagtattaaggatttaaagatcatattttgtaacaaaattaaacggagaaaaaagaagagaacaaaaaggtgtgttttttttatttattgctcaggaatagaaaccaggactggtcgccatggttttcttaaaatccttaaccgaaatgattgaaccgaaccggatgaaccgaatcgtcgagccgttaactctctgccgtcaccgtttgaagtgacgtttaacggcgaaatctcgcttctctcttctccaattccgtctatatcttctctgcctttgtacggcggcgacggcgatgtgaccaagagctctctcaatttacgcctagtagcacggtggtttccctcttcttattcccggaatttccatctgattccggagattcctcaaggatctgacggagattccgtctgcgactatcggagctcttatcgaacaacatcagcagagttttgcgtcgtcggagattgaatacag

SEQ ID NO: 31013 - DNA, 318 bp, Arabidopsis thaliana columbia
ctattgaggtctatcaaggagtatagtgccttcatgtgactctatatttggcgatgctgagacaagactccttatgcatatcacaggtctacttccttggccttacttgcagctgacccaagagcaagtcatggtttctgcgttaccagtccagcggcaatatgggaaggcatgttctgtgggatctaacattggtgtctgttgtcgggcaaaatcactcgaggagttagcgactggatgtgtcgcatatgctcgtggcgagagtataagagttgacaatctccttgcatgtgtctctcctctgctctgcaacaaatg

SEQ ID NO: 31014 - DNA, 448 bp, Arabidopsis thaliana columbia
gaaagaacttgcagtatcaaccgcatgaacatgagtaatactccaaggaaatttaaactcttttcacagaaaaatccgtcacaaacgaatgataaaacgtacaatagatctgagagatgcaaaagttcgtgaaactaccaaacccgagaaaacaaacggaaaataatacacctaatcggaaacatataacaaaaacgatgattacgcaccggattatggcttcttcgatggagaattgaaactaaacgcgtggaacagctgcgttcgtcgaaccctaaccctaggagaagaaacgcgagaaaggaaagaacaagaaaacccaaaaagggaggaagcaagaaaagaaaacaaaaaaagggggatttttaacgaatatcccggattttcaagtgatatatgatgacccgaagtaggaggctaaatcttctccgttaaaatatttggggac

SEQ ID NO: 31015 - DNA, 499 bp, Arabidopsis thaliana columbia
catgggcagaaacagtcttctcctgtttggtttcttgcttcttcttcatttcataccagcgcctagcattaccatgcgcagaaagtgataagtcaacctccacctacaaaaccacatcgtgctccatatgtcagaacaagaaagaagatgagctttgtatattcaatcaaagtgaggagagatcaacaccttttccactggaaccgtcttctcatcatcatccatttcatcgagattgttgcacaacaacaaggtcatgcaattcttctccagataaagtctgtcaatgactccagcaacaggatttcctaattataatacttccttgaccatgcgagctagatcatcccagcccataccctttgcaagtgctacacgaacagctaatatggcagcatctacatcttctaagttgtactcgattaattccgccatattaacacaatggttgacttcttcactcagaatttgaacacggttctcctaaaacacaagtata

SEQ ID NO: 31016 - DNA, 162 bp, Arabidopsis thaliana columbia
tcaggtcgactcccctatctttttgagagtaaacaatttagttgaaacaatgtaatcagtctttttttaattagtttgtcggaggtaataattacataaacacacatcgaagctggtggtaatcgtttaatgaaacatccaatgatttatattcgaatgtaa

SEQ ID NO: 31017 - DNA, 412 bp, Arabidopsis thaliana columbia
ccaggaaagtcataaagccacataatagaagcttctttgagctactggagccagaggaaatggactcccaaaccttgtaggatgaagtcatggatataaattcatctatcaaaaaagccttgggacaaatgactgatgggaggattatatccaaggctatggcagcgtaccctcaggccccatattccgatatggtaaccgctcctatttaaattagcttcatataacaaagtttcagtgacacaaatgcaaatgcagattctcgggagtacgcctagactataggtggttatggagcttgatatatgtattgactgtagattagatcccatctttcctcggtttagctgttgtcctaactctcttatctcctttgctgttttcacggttttcactccgttgccattgtccc

SEQ ID NO: 31018 - DNA, 886 bp, Arabidopsis thaliana columbia
  unsure (1)..(886): unsure at all n locations
gtcatctttaactaaagcttgttgtacttactatatggttgtgtggttataaaggcgttttccagaaggaatggagcagttaggaccaagaagggaagaacaaggaaatgccacctgaatatgcggctgtgatgatccagaggccttcaaagcttatttgattcgtcgctcaaaatcattgcgtgctcttcgtgatcttgctattgcaaagactaaacttaaggagctaagagcttctttccacaacttcagctaccgtcgcctgattgctcgtgatggagaggagcgtcagaaattctcagagaagatcattgtactcctcctcactgttgacgccatagaggtatttctcttggtttttttaattcagtggatttatggttctatagtctctatttgctcttcaaatgggaatgcctttgcttttgcaaatcatcatatcacatttagaataagattaagctaaaaggtttttaaggtattaagtgataagaattatggagattgtgtttgtttggtatcagggagttgatgtgatggttcgaggagcgaagagatcaatggtggatgagctggaagcaatgttagatgtggtagacccgcaaccgcaggggaaatcattgtcgatgagaagaagaacatttgatatgccagacagtttgatccgcaaagaaatcgcagagggagtgactcagattgtgcagatgcttgaaacggaagaagaatgatggaatggagcactgtgtgtttgtgactcaggggctgtttttgttgttgtttgtgactgggaagaactgatcagcctctttagtttgattagtgttctgaatgtntctaattatgcagacaaaattaataatgagagtggcttgaagaagagattggt

SEQ ID NO: 31019 - DNA, 891 bp, Arabidopsis thaliana columbia
gctccaaataaacaccactcgtccgcctctctgtctctcaccaaaataaaaaactcaatctctctctctctctctccatcgagaaacactaaactgctataatcattacctctcttcgatttctcaaaccctatctggctctctacccatatgcttcagatccgcattaaaaaagctaagttttttgttatgtccttctttcttatttgatcagtttgttcttgtttcacgattttaacctgagattttttatatattttctccagatctgctatccgcagtcatctgttcataggaaaaggcaagttttttttccatctctacttcagatctgaaaaagatggattgttcttcttgtgttgtccggtttcatcaatttaatctgttctttgttattatattttacagatctggctttacttttagagattatctcagatccagccttttacccaattgaaggcaagttcacatactctgttttttttgtcttggttttcatttctcggttttttacatgtaacagatgttttaagcatgattttctgtttaaacagtttgtttttcctacccttaaaacttctctgaattaatatcccatttatatgaccactctaatgtcttcttatacgactacgcaagtgttgcatattcttgaccttttcacacttcatttgcattttagtctaacaatataaatccgcaaatatcttgtgtttatacttattgaaattagtcttccgacatatataatctaggatctatttggattatttgggccatcagtctcattcgtttcattaacatctgagtctttgaactttgtttatctttcctagcttgatattttaatattagtttcacatgcgctctttgtttttgatcatttat

SEQ ID NO: 31020 - DNA, 467 bp, Arabidopsis thaliana columbia
gtggctatccaccgtgtatcggcaccgtatcacttcacaacacacggcgaaaaccacacggactctatgggctggagaggttggacgattatcattacgtttgtgacaatctcgtgttcagcggttgcttggtgggtaaaccgtaaacacatgatcttgcgttgaatttaagatttggtaaaaaatgtaccctagtaaataggttttggagcgttttttttttgtccttttaattctcaccgaagataacaaaagctaaattgacttatgtatgtaccatcagtcagggcaagaaaggttatcataagtcaaaagagtctccagaggtttgggacgaaagaaataataacggataattaacggatattactcattgactaattaaaaaattaaattgggggaaatacctacattcttatttatttatgaagaatacagtctttaaataaaaaattggtaggcaatac

SEQ ID NO: 31021 - DNA, 463 bp, Arabidopsis thaliana columbia
agaggatcccaggatcttagttctttaagaggttgaattttgaggggagtaaagataaaatatttacttttacttgtacggtaacataaaatatttgtgagtcgaagcgaacaaatttttttaaaaagaaatttagtattcaaaagataaatgatgtacttttattctttagtacgtatcttacactaaaacaatcggatcataatatcgctttcttcgtctgaggcttttaattaggcagacttgaatttctagaattggttcaggtgtgggtgcaattaaccctaaaaaagatatgttttcgccttttatcccaaagaattgtataaacgatgcatgcaggaatcatgaggccgaataacttttgtcatgtggaaatccgactccgttaacttttgatgccatgaagaagaggcaactttggttcaagcaaaaagtaagattctatacgcaaaaaaagttg

SEQ ID NO: 31022 - DNA, 279 bp, Arabidopsis thaliana columbia
cgccagtgggtcccatccgctatgtagggataccccatctagtcttaccgagcttcgatgcatgatacaattcgaaaacaatgcttgaacaagtaagttccggaccatagtacagcccaagtcacggcaatgcccggtacagtactgacaggtcagaatgtcgagtcgacgtcacgtcagtggtaaagtcccctggcccgcttgttgagaggcagggctcgcattgggcgttacggtaatgtatcccaaggccagtttgaccggcaagacctgaaggta

SEQ ID NO: 31023 - DNA, 317 bp, Arabidopsis thaliana columbia
taattcaaaattaattgataaaaatcctgaaagatccattatctttgcataatgaaaatgttaaaatcattttttgatttacgatgtgaaatattctgacagatgacaacttaacacaactaaaagtagtttgataattgatagcacaatcgactcgttttggaatggttattgcatatggttcaacttattacatcttgttatataatatccaaaaaggtgtatttatgttttacattaaccagaagtagattgcttgaaaaaattgtaatatagaaacgttcttttgttgcataataaaccggattccaaaggaa

SEQ ID NO: 31024 - DNA, 407 bp, Arabidopsis thaliana columbia
cattggccccataatgtcccgcttaaactctaataatggcttcgttatctcgagtaaagactcgctgatcccgcttagggacgactgcattaaccggatggattcacagtcttgtgaaacggcgattctccgtaaaccggattcgtcttcttgcatagaaaatgtacaacatcagtggccaaacgtaatcggatatgttaaaggatttggcttatggagaggagaagaagctgacaaggtacgagaaggtgctgctgatccttcttctctattggccgagaagattctttggtcgtacaacgatcttccatatattcttggatatcacgcaatagggttcaccgtaacactctgcgctttgagtctatcatcacaagatcgagtgatctgcactgatctttattcat

SEQ ID NO: 31025 - DNA, 427 bp, Arabidopsis thaliana columbia
tccgctttcacaaattcccgcatttataacagtaaacgctttatttaaataatccaaacccttaatcatttattcatggttgggcctagccacatagatttgttttgttgatatacagaatgacgtgaaaaaataaaatattatcatcggatgatgacactcagttgcattacctatgattcagtgtttggctgacgatttcaatgatgtgtcactataccaacaacagaaaaagctattgcgtcaagtctcaagaaatttttagtatctatatgagattgatttttgacaaaaagataagacagtggattcttaaataactcatcttgtgtctatatcatcggattgtactcctcgcaaatggaagatgccaagtgtgaatataccattagcacaacatttcatcgaacagttacatatataattg

SEQ ID NO: 31026 - DNA, 1341 bp, Arabidopsis thaliana columbia
ggtctgcacagatgaagtaaacgttattcttcacctgaaagttagaattatgtagcaatagaactttaaaaataattgtatcatatcacttacacgtgagaagagagagatgaatattgtagtaatcaagtgaatatgtttcctgattcagtttctaaaacacttcaaacctcagtaaagatgcctggtttgcaccatgctgtttctccttacaaaacatgtacaacatcgatcgagttaattaatgatacgtttaacagatttaatggtttgtgggtttttaagttaaacgcagcctgctttgttctgcatcacgatagatccgcatatttggcgagaaaatagaaatccatgaatctaatacaatagccactacaaaaaaagtcttcattgatagcatatgtcatgtaattttcgttattatattacagcagttgataaacgctaagatatagttttaatattacagcactttataaacgctgatataaaattttaatgagcgggaacacaaaatacttattccgccaaataacacttagtcattttcgagaaaaaacccaaacacaaaacaacttttcgaaaaccctaagaaagaaaactctctcagtcctcagccgtaagtccgacgaactcactattccggccaccgattaaaccctccgttgcctctccgtcgctgtcgtgaaagctctccgtgcaactggaacctccgtcggcactcaatccgctctatatttgtccacttcgagatcgaatcgaaggcaagtcattttctatgttgtttttttctcctttgacactcaattcgttaccctagatctgtttctatcaatctctgagactcaataaccgatgtttgtgtgattttagaattcgttaccctatatctgttttctttatcgattcttaaaattttgtctactttgcatgcctttgtttattgcgaattcatatgaatttcgtcttagtaatggtaacctgaactgctctaggtgcttgtgaacaattttgcattcgaaattgtgtatttatttgggcattagagttgcaaatattggattttggctctgtaatgtttgattttttattgagtgataaaacttgagaattgcattgtcagattgattaagcttcgtctgttgtctgaatcgtgttgttattgtcacatcgatttagttattttgttatgtcaaactatcattgattcactttcttgaatataaaacattttgctcattctatatattttgtttaatttgtaagcgttgctgagcgaatcaatggacatttggaagcttatcaattctctcttttcacaggaaaggttagtatcattgg

SEQ ID NO: 31027 - DNA, 276 bp, Arabidopsis thaliana columbia
tatcttctgtctagattctatatttgcatgaaaactccaatgccacttctgcaatctttctagagaattatctgttctaatcgctatagcattttccatctaagaggctcttgtgtgttcttttcaatcactaattatttgccgaacttacttgaagtgtccagtttggctagactgattcatacatctgacactacctctgaccattaccatcgatctacctgtgtgtcgcactgtgctacatatgaattgagccccgcgggtaacccttcaatt

SEQ ID NO: 31028 - DNA, 541 bp, Arabidopsis thaliana columbia
gtttcttcacaacaaaacgtaaatcaaaccatttaactacaaaaatgataaataactcaatttccgtaaatttgttataaattactcaattagaattgaaactaaatcaaactaaaccaaacaaaacaaaaaaaatatcaaaccaaaccagataatatttgtcttttttctttaagaactggtttaaatactcgtttctacttatctaggactagagattgcttaatggtttaaatgaacaaaagtcaaaatttataaatgatagagtgaatggagtaatataaatgattggggtgattgtatgacatttaggaaagttcagggggaagaggtaaaggtaggtttgatatgatcaagtgcggttggtctacagtacactagtagaataatgtcgtttatggtgagctgtcaagcagtaagtgggtgaaaacggttgcttcgctgtatatacgtcgtacactagcgtaatccagcaaagtatccagtcatgccagagtctctgttacatgtggcatggttcaagaaaaagtcaaattatata

SEQ ID NO: 31029 - DNA, 435 bp, Arabidopsis thaliana columbia
caagtcttatcttcctgcatcgacttttctccatgttgttcgtgtgcatagattcatctgtcaaaatgtgcgtcaaactaattgattgctgtgtctgcggcagtgtgctattattttccagccaaaatatgattttttatttattttaaaagcaagccaaattttaatttcaaagatcagtgacagatcctgagcaaacagaattaacaatcaagacactgaaattaaaatctcatcgtaatgtcctcgaaatatatctacagccacagggaagaaaaagaagaagcaacgatggccacttggcgatcctcgtcctggaacccgaattaccagattagatgaccaatctgttgtcacatctctagatagtctgattcgatctctcgctagctcaccagagctttcgatctctcctagcttccatataatgatatt

SEQ ID NO: 31030 - DNA, 483 bp, Arabidopsis thaliana columbia
taatgggccttagtcctaaatgttatgtaagcccatacaactttttcccttttttgggcttaatcaagaaattaaaaaagcattgggctggtttcccgctgtttgatttaaaacctttttgttttttaagaaaaataaaggaacatttataaatttataggccaactatatataaaaattaatgaggtccactgaaataaaagaagagaacgacaagtcatttctctaagtccacgaggaatcctatagccaacacttctggaccttttttccccatccacggccaccaagttggtttaggcctccaataatacatttaaccttgtgtttaaccttttaaagttttacttcctacatatcttaaaaaaatatataacccacggtgtgaaacggagaaccatggtttaactttaaccaaccacacttgaattataaatcgcgcataaacaaagttatcttatagtaaatcctgtctggcgttga

SEQ ID NO: 31031 - DNA, 496 bp, Arabidopsis thaliana columbia
tgattaacattgtctgtatcatatacctgaaacaccaaaaaagtccgaaaccgagtttttcctctgtccagtaaaaaacttttctgcttcgaaaacaaacattctgctcacattccactgcataaaaaacaaacggagctcgatattgagttccactggaaaatttacctcacaaaacaaaacaaacgaaaagttataaataacaaaagattaacaaaccaaacaatatcacagacatttccaccaatcctatctagcacaatctaagtatcatcgattaagagccaatgcatgaattaacaatcgcaatccgaatctacacacagtgattattttcctatagatcttcatgcattctcgatatcaacgattaacaaaattgagaaaggaagaaaaaaaaacaatcaattattggaataatatacagagaattgtgaagagaaaggaaacgttaccttgttccagatgctgtcgaaaacatcaacaccttcttgaa

SEQ ID NO: 31032 - DNA, 102 bp, Arabidopsis thaliana columbia
tccctgactgttgtgggttctatgggagactgtgcgaattcagtccggctcttcactatgttagctttctctttgtccaaccatgcccggagatcttgtctt

SEQ ID NO: 31033 - DNA, 502 bp, Arabidopsis thaliana columbia
gattagttgtccaatccaaatttttttttatgaataaatcattagctaaaaagtctatttaaaattttaaataacagataagacaacaaaaagaaattgagaagaaatctttcattcaagtcatcaagtgtcccttcagcattgtattaaaagtggaaattatctaaatcaatacttcaaatttgttggaagtatactagtataaagatatactttttttgtaagaaaactgaattcgaaatctaacgaaaatgacacaaatatatgctagattcaacttttaaaatgtggctgccacattctctaaaccaaaatagtcaaaatctggagaaaaaaaagaaccaaactaatataaacaagaccaaaattgaatacccatacacatagaaccatatttcttgaacaccccaaagcaaactggcccacacaacccctcaagactttaaaccctgcataaaaccaaacacatgctacattattaatagttttgaatatacaacac

SEQ ID NO: 31034 - DNA, 599 bp, Arabidopsis thaliana columbia
tggggggttctctgggcctgtgctcctttcgtctccttattctggttctgagaaaataaaaataaaaactctcttaggaaaaaaagaaattaggttttgccacattttggttcgattcaatataccgggacggttgaaccggtacagtaatacgggaaacaaaattattttctgttcgcttcctccggattggtttcttatgacccggcccagtcatagcattccatggcccaatatatttattaactgcaatctttgatttctaatggtccatccataagtttaagactaagctaatcaatatgacttgtattatgtattttagatgcacacttgcgttatgtatgatgaatgattttataaacttatgtactgtatgttagattggaatcagattttatgttaaatgatttttatttcgatatgtttttgtttatagtatgcaatatcacaagattaggtatatcaatatatatagctctctaaaatgtaaaccacatataatagcaataaaaaacagttcaatacttctaccgtaccaaaaaatatttgttttaaaagagtgaatatatcatatataaatgtcatactaaatatat

SEQ ID NO: 31035 - DNA, 278 bp, Arabidopsis thaliana columbia
tcatgctgctccccacccaagtcccgttctttatccgccctattctgaacatggttggaaaccaggtccgccgccttctgatcgaccgcgacttggatgccatgatcaagctgtccgctgatgcgctcacgcaagaaaagagcgatggccgcgcgtggttcgccggtggcgacaaggacggtaaccccacagcggcggactaccagatgctcttcccgatggaggccatcacgtctggtcgcttggacgcgagccgagtgcctgagcccatcaagaac

SEQ ID NO: 31036 - DNA, 521 bp, Arabidopsis thaliana columbia
atctttcacactattctcttgatggagcttagtagcaccaaagttaacaaaagtgattacaggagaaaatacgagaggaagaggagaagcaagcagcaaaggaggcgctgctagcaaaagaagcatctcatatcaaaacaactagagaattggggaatgaggttattttttttttccatatcagtgatccttttgtattattaaccttttgactaacaaactgatatattgctgtccagatttgccatgctaatgacgagctggagaagctaatgcgtaaagttgtggaaagatgcaggttggcctaatcactcttaaatttgagcgttctctggtcaatgtatcatttgcttacagttgtggtgaacgattgtatcaggaaaatcacaattgaggagaagcgtaatattggattggcattgttaaaactgtcactggatgatctacagaaagtgttgggtatagttgctcaggctaacccgagctttcaacctagagcagaggaagttagtattgagatg

SEQ ID NO: 31037 - DNA, 594 bp, Arabidopsis thaliana columbia
cgtggtacggagatcaaagagagagatcgcgtcggagtatttgacggcagaggaagccgttgagctgccgaaacgccgttgaaacatggacgcggtggtggtggtggtggttgaggaggaggaggagaaaacatcatcggatgtggtgggatattgaagaatgtgaaaactcttggctccgtcggagataatccgtacgacgacggaggtaacggaggaggaagctgtggaggaggaggagtgtacggaaagtgaaaaccggaggagatagggttgaatggtataaactcttgagcacgagggtctaagtttccgacgaacggaaaaagtctggagtcttccattaataccagagttgatattttccgacgtatgatgaagtttctcttgatcgtgtgagagagagatactgtaacgtcgtctctctctgtctttgctcttattacagacaagacagtggaagagaacaaatgtttatttttttgtgttgtaagcatttaagtttctcgaaaatgactgtttttatgttaaatcgaatttattattactatcctcttgttaagttacgttaataccctacgcactttttgttgt

SEQ ID NO: 31038 - DNA, 548 bp, Arabidopsis thaliana columbia
gatttgagtgactggaagatttggagtgaaaagatgatgacttctctgttttttggatttgattttttggcgcaaattgtgccacgtggcctaagctctatggatacaacatctatccaaatattgaatcaatatcaaccatagaatgatataaatcagaaattatataagaaaaaagattatgctactaatgaagagttaagatgtaggtaatgtaaccaaactctatatcagcatcatcatgtgagagtatactttgatagatttctatatggtattcgttttgataaaatttggtcttatcacacttcatgagccagttattcatgatcagctttgcatcatatatattcacagacgaatacggttctgaatcgggccattggtctattcactgccttgagccgcgggtaccgagatcagatgcggctttagcagctctctctaatgcaccagacagccaaagagctccgctggagaagtaactgctattgacaacactagttgcagctgcatgccgcggttcttcctgtggcaaagacagctga

SEQ ID NO: 31039 - DNA, 547 bp, Arabidopsis thaliana columbia
atctgtaattaattcataattaaacactaaccattatcattattttgacattaattatacataaatcatattgtagttttttttttttttttaaacatactatagccttggacctagctatatagaattgattctcttttctctatttgtgcgtttgttctggacaatatctaggctacaatatcaataggtcgagacgaaagaacaatagattccaaattttttgcctaaaatccgcatgaacaagtgtacccaataatcaaaggagcaagaaaagaggaaggatctctttatgtctttgtggttttctgaaaattgagatgtctaattcagtcaaatgataatgacaaattccttagttagttgtctcgccacttgccattgttgttttcagaaattgagaggtatcttttcagtcagataataatgacaaattccttcattatttgtcttgccattagcaatacattaaaaaaaaaatcaatttgcatatagtcccagtctcataacctttttgtttgtacgtggtaaatttacaacattttta

SEQ ID NO: 31040 - DNA, 584 bp, Arabidopsis thaliana columbia
ttcggatttcgaatgtgtgtgttcgactttcccattttcccaagctctttccatttagacccagaaccagagacactccacaacttgtcaccaggctttgccgaacccaattttggtttcataagaggaagcttgttgttcccttttcccattccgttagccatcaaccaccttgaaccagactgcacctgctgctgctgagtcgtgattccccatggcttcttatctgtctcgctcttcataccggtaagatgtacctctgtgattttgtactgaggtattccttgttcctccatgggtttctcttctttctttgcatcactcgcgtccgcttcctcctcttcatcggttttcttcagctctgaaactgtgctgtagattttgggctttggagggacgaacaatctctcaacttggataagagaaagcataggagctcctactggttcgtagttccttagtggatctcgaagttgcaccattagtgctacggtgaaggtattaccagtaaacgcatttcctccttttttccctttcttttctcccttttgacctttacgataaagttagtgggttgcatgatg

SEQ ID NO: 31041 - DNA, 598 bp, Arabidopsis thaliana columbia
tgtacttttggctcctttgaccaggacaacatctctgccacctgttgtaatggcattcaaggaacaactcatctattagacaaatcgctcctgtcttgattagcctcgggatcagatcgaattcggttccttcaacatccatcttcatcacaacaaagtccctctctctcacactcttcttcaaccagtcagcgaaatcaaacccttgaatcaaattcacctctccagctaagtcactcgagtcagactttttaaccggctggattctgcccatccccctgccctttgctttggcttccacttcctttcccggatcgtgattgatctcaaacgataacgtctcgttcctcacccacgctgcgtatggcaacaggttcaccttcttctttatcttatactcttcgtgaaaggctttgtcagcctcaatggcgaaaacatcaaaagttttgttctgcttagggtactctttcttgaaccaactcccaatactggatccataacttctagcaccaacatcaacgtaaacgtatctactcttgaaacgtatatcaaccatagaaggcacatatttaatattcttgatgttctcttaagtgta

SEQ ID NO: 31042 - DNA, 479 bp, Arabidopsis thaliana columbia
aaatgtttaatctaaagaaagcaatatcttattgtcaacgatagttgaaaacgaaattaaaattgattgggtggttctgcgacatgcactatatttttcaagttaatgtttttgatactacaggttattttgtatcagatgattattgaagtaactatacattaatattactaatgcaaattagtaattgattgttttaatataattttaggcttaataattattgaagtaactatacaataatactactaatgccaaaatattacaattgtttatttttttgttatttttaataaattttctttaatttataattctcctcatcatttactttatttaactctccgtcacactttgcgtcgttctctgatagccgcatcctcccagggactattcccgagatatcttgatttgcgtccgtctctgatgtcagtggtgctatggatcgccgcgttggatattctactatcgtttttgtt

SEQ ID NO: 31043 - DNA, 516 bp, Arabidopsis thaliana columbia
tggtctttatcacagtgattcattttgtattgagacccgacatttgtaattgtttctgtctaccgtcgatctcaatataaaatgaaccatcaggacaatacatcatctatataaacttagaaaaatctaacagtttggttcgacatacataaactagtaaatgcaattttatagttctaatttgtctgcctattatgatatcatgaagtgaatataatcttgaaacatcatcatgaaacttacgcatgacttaaagattgtcgtcttttaggaaaatcttccgcttattgattatggatcgatagaaaatcttagcttttgagacttttgtacaaaaagagaagaaaaaaaaagaaaagaaaaagaagatcttgtaacaaactttcagaatcaatgtgtggctgcttttgtctccaactatacctttttcttttaatgattactattgctacatagataacacacaccttaaaatcgtgaaaatgtttgaagcaatatttcattttgtgctaagag

SEQ ID NO: 31044 - DNA, 528 bp, Arabidopsis thaliana columbia
gtattaacccaattaagagcgtttacgtctacgtgtaaagcggtatcaggagaaaggagcagcgatcacatgggtggcttaaatctatatcctccggttcctcaccggccaattattctcgcgcgtgtctccgctcctctctgatgcgcgtcactcaaaaagtttgagtcaaactccagtaatatttttgatttattttgtattttcaagaatttcttaaaaattgctgttacgtaatttacaatgcaatgtctcgcggtaaaggtagagccggaactcaagtcagatcaatctccgtgtatgattgtgttcgcatccaatgttaataatttcaggatttgtattttccaagttaaaggatactattgttaactaacgtatatgctgacaaaaaaaataaaaaaataacgaatattataaatttatatcagtcgcataatgaaatgtgtaatttccccagacaaaaatatctctacagaacaaaaaaaaaacgtttgttatatatgtttattctgtatatttaaaatg

SEQ ID NO: 31045 - DNA, 450 bp, Arabidopsis thaliana columbia
accgtatgtattcaagtgtatgttggccatagccacgttaagatacaaaagcgttttgggaatctagttcagatttgtttacttaatggtgatttttcctagagaatagtttcgagtggtctgctacagtttttcttccctagtttctcgcttgctagtattcttcaatttttttatttaaaaattgtttatttagcctagttttcaagaattattctctatgaagttgcatttgtaaacatatgaaagtgagtttttagttaatgctcgggtaaaaaaaatccagtaattttttagagaaaagtacttatcccctaagttattgacatcttagaagatttttgaaaacttctcaatcttaaagttttcacaaaaacaatacttcagttttgggtcaaaatcttcgtatgtctttcaaagaaatatcttgaactcatatagaacatatag

SEQ ID NO: 31046 - DNA, 516 bp, Arabidopsis thaliana columbia
tgtagtaaattacgaaaatatatgataaacaaattcgcatactacattatgactacaatagccaccttccctatacattatgacttctaacattgaaaaaatttgcaaacatttggtgtaaattaacaaattaaaaacatttggtctaatgtatgaagaaaaaactagatattccgctaatttaaacaaacatttggccttataagaaattttaggtaagaaaaaattctgagaagtcttttttattcacatcacatagtcaatattcaattcaatgcatataaatttcatgtaaagcttcttttttcctcggatcccattcattattttacttaccattgaatactttcaccgtgtagtctttttttagaaatcgttgaatatcaaaaacaagaagaagaaaaagaaaccgtgttttcaatgtgctgtcatacgattcatgaccctttatgaatctaatacagagtttgaaacataaactaaacttggaagtttgcaaaaaaaaaaaaaaaaaaa

SEQ ID NO: 31047 - DNA, 535 bp, Arabidopsis thaliana columbia
atacatcaaactgaaattatgattgcaacacgtgttgaagagtcatcggaagtgtaccgacatcaaccaccgctgttgagctccaattcccgcgaagaagatatcgacgataaacaatcgcacgaaatcccttttgtgttaccggaaaattttgaacaaaactctagttaaaaggtacagcagaaagggaattgtaatatgcatcgagatactttcgatcctttaacctaagatgtaatctcttgaacatatgcaaattaagttttagactgaaatctcttcaattttgtgaaattgaaacgattcatgcaacccacaagttgcacaaaagagacaaattagatggatccatcatgatagataaataccaactcatatccaaacaattattgaaatataaaagcataaagagatcggaagaagaaccgatccacgacaaggaaagataaaagcgagccaacttctagaagaaatcagatgtcgctggacgagggcggccatttccactaacgaagccagaagatgtcgtttggga

SEQ ID NO: 31048 - DNA, 499 bp, Arabidopsis thaliana columbia
  unsure (1)..(499): unsure at all n locations
atggagttttgtacgtccactcacttctatttgaatagaaaaaagattaatatggttatggaagaaacgtcccataaagccggtgtgaatgtaatataatgaaatgattctccatcaaactatgattgtaaaattaaaacgcttcgattatagaataaacttgtagaaacattttaacttgtaaaaattaaccattctaaaacaaaacttgttaaaactcaacttacaaacaatgtttgattgaaattgaatatatattatttggagtacgtaaacatggatgatcttatctgaaatagtacataaaataacaaaagaaaaaattaattaaacatataaatttgagaaatatgaggaggatggaaaaaagaagtcacgccacgcctcctatataaacaagagccaagctaatgagataagtgtatcggtgaggctgagagttattcacttacaanaaaaaaaaaaaacttgagtgtaccaaaaaaaaaagttgatatac

SEQ ID NO: 31049 - DNA, 509 bp, Arabidopsis thaliana columbia
cttgacacatcagcactctaaaaatttaccaaaagatgtattttaaaatctctaaactcaataactccacaaaaattttcagaatcaatgattgtagaaacacatgatttctggttcagaatttcacacactccacccaaaaaaatacccttaaaaagttataattgtattgattagctgataaaatcaatttattggaaagaaatcctaataataacgctgtaatagaagagaagagaagagagagggagacgtgagatcgtgaattatgcgtgacgaagttgacttgagcttgaccattccctcgaagcttttggggaagcgagacagagaacaaaaaaattgtgaagaagaaaaaaacaaaaacaaaaaagctaaaaagcagcaaaaggacccaattcttcttcacactagtgctgccactcacaagtttcttcctcctcctttgaccatgccgtacagtgaaatcggcgacgatcttcgctcactcgactttgaccaccgcgatg

SEQ ID NO: 31050 - DNA, 581 bp, Arabidopsis thaliana columbia
acaagataaacattagaggcattgggggcgcaacgcctcgacctaatctcaaactagacatgtacaagaacagaggtcaacagtcaacaaaatagaccaagttggtcgagtacaacctagtactcgagtaaactgaaccgttcccgagttcttctatcacgatttgaatcaagtagaacagaacacgaggtcgagtaaagctgaggaagtcatgtaaagtgggtgaaatcaggcggtcgagtacttcgttggtgaggcagaattggcagggacagaatcacgaatcgactgtcgagtagtagagatggtgaacttggtaatggtggtgaggcgttcaagtcaagtggttgaaatcgagtagttctcggctgaaatcaagtggttcttgaggctttgacagttaatgagatggggaactcgactgcggcggcgcaagggtggtcgagtagatgattcttttcacagcggtcaagtaattcgttggacgagagagagagagagagagggcgatttgtggtgtcggtggatagatgaagagagatgggtcgagtaaactttactttttattaggatgagggcga

SEQ ID NO: 31051 - DNA, 421 bp, Arabidopsis thaliana columbia
catatatgctagtatttattctataattgttacatacataaatctctaatttttgatcgaaaaaaaaatctctagtttacaagcatgttttgctttaaccattttacaaactgtttaatttgattaccgtcgagaatgcatcctatagcgtgtgtgaagaaaaacgttaccatgtgtaaaacattatttaaattcgactacactctcttattaagctggatatgataagcttaatcatatttgagatcagaaacagtgaagattagaaaaattgaaaacctttcatacgtaatacagaggaaatgtcagacaaggaaatattcgatattgagactatgagagtctgatgaattagggaacataagaaatacatgtgtatgagcgacacgaatggtggcactaataattggtatactaagag

SEQ ID NO: 31052 - DNA, 1162 bp, Arabidopsis thaliana columbia
tagatataaaactagatctatcggtatttaaatactcaatccctactcgcgaattgtgtcgatcgtcactaagagggtgtcggtcgacacacttgccttggtaagaatccgaatttgtctttgaagcttgatttactcagtttacctctaaaatactccatgatctccaatgcatccctaaagtgtaaaaactctgaaaaagactagaaaatactataggaataataaaaagactctaaaaacaatacctaaatcatacctgatatgttgcgtttttggtgtctcaggtcccatagttttgagtcatttgtcctgtcgaagtccgtcttttgcgtctttctggtcgtgtcttgagtcttttgtaggtttcacgaacttgtgacagggttggtggttttgaacttgatacagggttggatggtttcgggtcaagaaagagagagaaaagctgaagcggagagaagacggtggataccgatcggtccaagaggggaccaatcagtccgtgctacaccaaatcggccaaagacggattgatcgatccgtgcttcaccgattcatttaaagacggtgggatcgatcgatccacctctggatcagttgatctgacttcttgaggactagttttggttttccttaaccggatttatcttctgttttctgtaattggatattaaaatcctagagaccttattttatttcaacgtttttttacccttctttttctgtaacattttggagaaccattttgtaagcacccttggtgattagagattcatcattcttgacaatttggagaagatttctaaaccttattcttatttattcaatctgaattatgttttctttaatatcactttgcttgatttctaatgcaatgtgagagtaattttccaattgggttttaggattctaagtaggaagtcaatgaattagtaaccaaactgttataaggaattctcaatttttaggttcttcaatatatgtgttattaatgctataataggattaatcaccctgttttagaacttaggtttttctatgcatttaaagtgttcgatagaatgcctgaatgaatataaattgagcattctatttctagcctgcaaaagttgacgttagaatgcattgtgaactgaataaaccgactcattaatgcgaa

SEQ ID NO: 31053 - DNA, 350 bp, Arabidopsis thaliana columbia
taaaaaacaaaaacaaaaaatgtattatgatgatagatgccctacttgtaacttacttatctatatgtcgtgatttctggttggttgccttcagagacgaggacatgagaaatgagacctctgtaaatactgctactagtttgtataaaaccaaaacactagagattgtagcatcaagttgtattgtaagcgtcactctgaatttgttattgtagagaaaacattctacgcagacaatatcagatcagataacatcattgtctaagcaaatcacttatagttatcatagcttagttggagcattaagaatcatctcttttagttttagtgtctcaaattttaaactacat

SEQ ID NO: 31054 - DNA, 512 bp, Arabidopsis thaliana columbia
taggatgccttggttatgaagtgtgtggtcgttgctatacgtagaatagcttattgctggtcagcgttattgcagaacttgcttacatcgatacacaattgactttggtaagcaagaaacagttttctttttcaatgaactcgtgtctgcaaaatatttgtatatatatttatgcgtagatttcattttcaaaccttgtcatcatgtcattatatatattcatgtgtaaaatacataatatctgaggtagtgcgtatctttgatcttgttggtcaaacaatagcttaatagttatatataatgatggtttcaatatttccaagtaaaaaaaacatttgaattgttcaacaccacataatttagtaacactctaaccgtcaatcatctacatcatatcctacttaagataaacataaatcaccggaatttcgaaattcttgctaagtcaatagactcaaagccactataactataatatattcttcgatctaatgacttgatgaaaattttga

SEQ ID NO: 31055 - DNA, 152 bp, Arabidopsis thaliana columbia
tcaaataatcagaaatttctacaaaaggaaatcttataataacatacaaaagcattctggggttcagttgtaaccatgtaaaattttacagggacaaataatagttaacacgtattgtccctaaactatgggcaagctgtcttttaagcacc

SEQ ID NO: 31056 - DNA, 513 bp, Arabidopsis thaliana columbia
tgctttcttgaaaacatatacaatggtttttgttagaatgatacttattgcaagtgtcttttggtatcagcgtgttcatggagctcgaccagttaattctaattccctcgcttttctggttacaggtaaattcaaactttcaccttctatgttatcttcaagttgtgatgttgttaatacttgtgtttggtttgtgtatttcagttcttttgctgtttatgattctcaattcgcatcagatgcctcctaatttcctggtatgattaaatacgtgagttaaagttttttcctattgagttagtcgtctatcgggtgtgagtttgacatttccattaattttgtagctgtggcttgtgcttggggtgtttttgatggcaacgacgcttaggatgtatgctacttgccaacaacttcaagctcatgctcaggctcaggctgcagcagcaagtggcctctttagccatactgagctgaggttgcatgtgctccgtccattgctcttgctacgagagg

SEQ ID NO: 31057 - DNA, 449 bp, Arabidopsis thaliana columbia
  unsure (1)..(449): unsure at all n locations
caagatagtagagcagccgttttcggtgacgccgaagctgctcaagattttgagagattctcacgcaacttagcgaataattactactagtcttgcttggtctggagataacagtggtttggtcgggactacgaaagatgtcgaaaaggaggtcgttttgagtgtttgtggagggggtggatacgttcaggggaataaagctggtgtggtggtcgatggtttgttcgggtagagagagtgtttttgtttcgccggtgaagagacggatttatttgtggacgacgttggtgcacgttagctcgacggtaagcggagaagttaagtcctggcggaaagagacactgtagtcaaaattagcgtcacccatggcttttcacttgttnggttagaacagacttaatctttttttttggagcgattttgagtcatgagacgaggcgtgtgattta

SEQ ID NO: 31058 - DNA, 372 bp, Arabidopsis thaliana columbia
gttagatttatttgaccaaaaagaggagaagaagacgaagaaatgagcagaagaaagtggcggaaggagacgaagagaggaagacgaaaagacttaggttaagagaagagaaaatggattttttaggtttaagagactaacaaattcatagaagagaattactaaatggttttacgtcacatgtcaatagtatctggagccacaatttcttataacgtttataatgtggcatgtgctatcacatgccatgttaaaaagcctttacagcccaaaacaacaaagcagaactattatatttctcgattacgtatcacatcgtttctcactttacaaacgctatgaagtccagagatcagtcaactatagcacaaa

SEQ ID NO: 31059 - DNA, 577 bp, Arabidopsis thaliana columbia
gatcttatgtttgaaattatggaagttctaatgctaccttctctttctccacaggtccccaaaccaattaactattttcttgaggttcatttggatgaaaaaggtgtaaagcagattcttcgactcatgctttcgaaatttgttcgtcgtcaacctggacgatctgataatgactgggcatgcatgtggcgtgatctgcgacagttgcaagagaaagccttttatttccttgatcttgagtttgtgctaacagaattctgtagaggacttctaaaggctgggaagttttctctggctagaaattatctcaagggtacaggttcagttgctcatgcatcagagaaggcagagagtctggttattaatgcggcaaaggaatacttcttctctgctccgagccttgcttctgaagaagtaagtggtgtttctatgtttgtgtataaagatttttgtctatcctaaatatatttatgcgactttcaatcctgttaaattctttcttctggtgatgtagatttttttggtacaacaattctctttgtgcttggatgtatttcatttcattttgaaaattttg

SEQ ID NO: 31060 - DNA, 457 bp, Arabidopsis thaliana columbia
taaaagattttgaaataaattattacaattacaaaagaaaattaatttattgaaaaaattgtatataaatgtcttcctgatttctaccataccaaaaatatatatttcttcctgattttctatgtaggagtttcaagatttaaattttaaaatatggcatatcaaatttaacactagtaatatggagtcatatctcaaaattgttttttataccaatttcacaaaaccttttttatctatatatgtaaaaatgttttaatcatttgttaaagaaataataatgatcaacctctatgatctaattcaattttgttgccttaaataacatattacacgatcagacacgtttgccttatttacataaaatccctttaaaaagatgttacaagcaattcatggtcgcgattctataccaaaatttcttgagccttaaccctaatttcgattacgacgatac

SEQ ID NO: 31061 - DNA, 434 bp, Arabidopsis thaliana columbia
tgagtcgatcataaagattgggtttttatcgaatctataactacagaacgtaccatcaacttattccaataaaacaacagtgaacagagctaaaaaaaaatcatcaccaacccacgtagagagtgaaccccacaactcaaaatctacagaacagtctcaaacgatataaaagtataggcgacgctgtttgaaatgggttttcgaaatcggacaaaactacaagaaattataccaaccttagatcaactcacgacacagtttcgttacctccaaagtcacgttccagagcagggcaagtaagaaagacttgtgtgggcgcttattgcaatagcgtgttataggatattagaataaaatcttcggtagattacaattgtgtgtctgacgtgaatttggacactcgtctgatcagatcatgtggcataaggagaaca

SEQ ID NO: 31062 - DNA, 653 bp, Arabidopsis thaliana columbia
atgaaaaagcagattaaacagaaaatacataaagagctctataactcaataggaaatatttaccactcacctatgtttttcttacactttcactctaatttattttgacaaaagaaaaattgtattatattatttaaagacttgactttctctttaatattttactgttttttatatttaaagcaatataaaaaattatcatcattttaattaaatttattatccctaccattttaccaaaccaactcagtaataaactcatttcatacacatatttgacaaatatgtcgactgtcagaatctagaatactatttgtcaaatgaaagtgattacattatgagataacgatagaaatatccacatctctcctgatcaccagtcaacatatcttttattaacgaattgactggtagtttaagacgctaattatcctttgctctataataccatttcaatcgatattttaactaattatatactattagaaatgaaatgacaaatctgccgaaagcttttttctttttaatattttgtcaaaagaagacacacgaagaaaaagtaaattgtattagaaaaaatccaagacagagaaaaaagtaaccgcgtagacagatggcgacaggagaaagagagagtggtgaaggagaaagaa

SEQ ID NO: 31063 - DNA, 365 bp, Arabidopsis thaliana columbia
cacactgatcttcattattaccagaggtattgttacttgaggaagaagaattcccaccttcaagcagcagttttccagctacctgagccaacaaatcgacatacgagatatgatgattcgcgcataacttcatgaaagcactcttctagcaaaacacaagacacaaacatatatatcagaagggaacattagaacatatataaaactgataagaaacacacacgaaagttaagaattgtatttactcttggtgatctggcagctcgaggtgtgtgaggcactcatagccattgaatccataatcgggactcttttgcaacaccatagcattgaagaacatttcaatcattcagcaaaacgaaggc

SEQ ID NO: 31064 - DNA, 556 bp, Arabidopsis thaliana columbia
agatgagaaaacaaatgtttcaaaatgaaaggaatgagaacattagaagcattaagacggatcaagaagtttaatatatagtatatacttaacaagatagttaaagagattttaaacaatcagagcatttaaatatccattagagatgatgtcttttaagtcatgtctattttgtgtctaataacaagttaaaaaacttgagaatatagttctttcattaatgggcaaaaaagcaccggaaataaatatcaaaagttttttgaagtcattattacggagaaaactatgagttaaatctccttgtcaagtcattattatggagaaaactatgagttaaatcactttttcaacttccaataaaatttaagcattatgtttattttatttttctttccaatactcattattactttatgttttctatgtaaacctaaactttttttaaataaaatatttttgaaaaggatcattcaaccttgtaatcaaataaatttgttgtttctgtaatataataaaaattaaaagtgtgatatgttgaaaaaaataagaaaatata

SEQ ID NO: 31065 - DNA, 1497 bp, Arabidopsis thaliana
ctactaaacaaaacaaaaaaaactagatttgcatatcgaaatcgccagttaccattttcaccaatgatatcgtaaggtgttcgtgtttttttaattggcaaaataagaaaaaactagtattaattttgaccattgattttgactttgaaggaaagcattcctttttccttttatgatgcataaatttgtcttgagtacttcccttgtagatttttcttatttgcctagcgcttgtttgtttgatgatgcgcacaatatcttttttccaaatttttggttttttctttaacagctttacacaagtttgaaccttcagaaaccatttttgctcaatctcatagacagagagagacaatttacttagctaggttctaatagctcactgtagagttgggttttgactagcagaggaaatttttggtgaagtgtgtggtctcgaaggaaaagctctttatacagatccgaacaagtttgcatttttgtcatctaatcagataatctcgcttatctggaatttgcattattggtgatctgggttttatctgtttagtgttgaagcctgttgtccgagtatttagggttcaaattatagtacagtgttgagtgatgtgtggtttttagttggtgcttggaggttactgtcatactcaagtctgggaatttttgtttcttttttgtttaataatttctcttagtaaagtaagtgacggtgtttgttcaatttcagtttttgatcagaagagtgttggtgaagaagatgttagaatctggtcttgggatttagatgactacacctgcacaggctcctagggaggaggtgtcactgtctccatcattggcgtcccctccactaatggcgttgcctccaccgcagccttcgtttcccggtgataatgccacttccccaactagagagcccactaatggcaatccaccagagaccacaaacaccccagctcagtcttctcctcctcctgagactccactatcatcaccaccaccagaaccttctcccccatcaccttcactaactggacctcctccgacgacgattccagtatctcctccaccagaaccttctcccccaccacctttaccaactgaagctcctcctccagcgaatccagtatcatcacctccaccagaatcttctcccccgccacctccaccaactgaagctcctcctactactcctattacatcacccagcccgccaacaaatccaccaccaccaccggaaagccctccttcactacctgcaccagaccctccaagcaatccacttccaccacctaagttagtcccaccatcacattcacctccacgtcatttaccttccccgccagcctcagaaattcctcctcctccacgtcatttaccttccccaccagcctcagaacgtccttcaactcctccatcagattcagaacatccttctcctcctcctccagggcatccaaaacgtcgtgagcaacctcctccaccgggttctaaacg

SEQ ID NO: 31066 - DNA, 563 bp, Arabidopsis thaliana columbia
  unsure (1)..(563): unsure at all n locations
aaacttacaatacaattcgtttaagaatgtttggtgggagattttcacatgcaacatatctaatgtgggcaagcaagagattgcttgaaatagaccaatcctcgagcgatatccgcgggcaaccattttaatcttggtccccttagccgctttttgaatcaaaatcttttaaagtttctttatttcatgaaatcaatcaatattaagaattttttggaaacatacaaaatatttatagttacagtagttagttcgtcattaccaatatgcaaagttcgaaacatgtattaacaaagatgattctaaagctaattttgggcgacattctaagtttttgcttctttttatagttcttttagttagtggggaaaaagaagtattaaagtgggttgttgggatttttatggtaaataacattgttgggaatttttgtatcagacaactcaaaaatatattcgctctgtttcttaagtactatatgtctttgtgatttttgcacaatttaagtaattatttgcaataccanattaagtttcaatttattaattgattactataagttt

SEQ ID NO: 31067 - DNA, 191 bp, Arabidopsis thaliana columbia
agaggatgcaagcactcatggaggccataggtcttaaaaggcctcatttattcttaaaaggcctttccttaggtgtacagtgacttccttgagcaagaatgtcatttcatatggatagagataaaacattggtctgtagtcagcacataggtatatcaatcacgttaaacttttttgatggctgaaatttg

SEQ ID NO: 31068 - DNA, 409 bp, Arabidopsis thaliana columbia
tataaaaaaaacaatgataattatttaagaacactaataagaaatataaggagcataaatatgaggttgctccatattttaattaatctatttatacaacttttccctgaaaaacgcctaattttcttctttttaaaattttgttcaccgaaataaatctttcggagaatacccaaccaccaacacgtacatctctctccaagaaatggtcaaacgacgccgtgttacatgtttctatcaatcggataagtgttattgacacgacacgacagcgtttcgttttcgggttttggcaataagtggtgggccccttttgagaacattctgaaaaagaatcaatagaagggaggcggcggaggagatgcgtatgatattccgggaatcggcggtagtggccctcgtagaatgg

SEQ ID NO: 31069 - DNA, 837 bp, Arabidopsis thaliana columbia
tctcaccatcttaacttggctctataagtaagtaacactaacctacaaaacattcactttctatattaatctgtttgcgcatttaggcgttgatctagcatttggggttatcttggtgacgacaaatatctgaatttttaccgttttattatacctgtataacttcaaactaaataccgtatgtgagagcatagacaaattaattaacgtctacaattcatgatttgtgactctatttatgaatatatatcaggcgggagcgtagtcatagaatacgtgaactacatgtgcaacaggtcgtcttcctttaccaaaaaacaaaacaaagcaaaacaaagcaagaaaaaaaaaactgattatgtctttggagaaataatttggaccaaataaagcattcatataacatttatcagtgttccgtttgaacaatttacttggtagtttaatggttcatcagtaaaaactcatgatcgttagttcgaccataattaaaaaggatcgtttaccttttaaacgtagtataatcaatatcagacactatgaaacagtatcgaccaaactttcaagattaattcatccattctttctataactacatgtattcaattgtctgtagttttactaaagggaaagacttttcgaaaattcctggactgataccggatgaatatgcatcggatgaagttttaccaaggggggatacatcgagtagagctacaatgggtggagatatatcaaatggatctttaccagatggtaatgtaactagtgcagctacatcgggtgagaatgcatccggtgaagatttatcggatggaaatacatttgaaagaaatg

SEQ ID NO: 31070 - DNA, 608 bp, Arabidopsis thaliana columbia
  unsure (1)..(608): unsure at all n locations
ttgattatttatagttttacttttacggttttactatcttcgtcaccatcattgaggcttgctcacaagtcacacaccctctcgcacatattattattcttttattaatcagttacacatttcatcaaaataaacaaactagtagtcagaaaataaacgaaatctatacctggaaaaaaattaattataagataaatactaataaaataataagaagaagaatatgcataaaggtgtacgtatagttgtgccttgtgatgattgagcgcacgtgtgggtatggccattggtgtccgtgtctacattcactgaagttgacttctttgtctcccccactcttttgctcttttgctctaggcataaccatgattacggttataattatacttactatttactaacagttaagatacatgtaatctaaatcctctttctccttaaacctaatagtcgctcttcaactttattgtcttggccacgatctgaccagcgcgtgatggncccagagtgtcggcttcgatccctccttcttttattgtctttgttttcttcgggcttgaaagtatggtggttttagcaagttggtttgagttgtgggtgatggagtt

SEQ ID NO: 31071 - DNA, 563 bp, Arabidopsis thaliana columbia
  unsure (1)..(563): unsure at all n locations
cgttgcaaaaactgagagagtgtttgcaacagtatttgcactgagatttcagatttttgtgttttgtagattaagaaatggttgtgttgtatataaattgtgtaggaaaaaagttttggagagctactaagtagcttcctctttttagagatgtatagttcaataaataaataaaagcttctcttctttatttatttgtgggaaatttctggcgagagaaacaagtaaacatttttgttcccaccattcgaatccagcagagtactaaaagcagccaagctctacaaaacgacattgagcatacttaagcttttcaaaacggacttatctcgatttctgttggctgtaacgttgtattccatggacatccacaatcccgggaggatacactggatctgtggctgctctaactgcgacttttgcaaccgattcaacattcaccggaggntgaacaaaggtccgactaatggaagctggttcagaggttttgcttgttgaagaactacataaagcccaaacattatgagtacgaggtaacttgagggatattgctataaagagag

SEQ ID NO: 31072 - DNA, 130 bp, Arabidopsis thaliana columbia
gtgaaagaattggattccgactacaaaaacacaataaacaaaaagacgtaacaacgaaaggaactaaaagaaacattaagaaacgaaaaccggagtagggaccaacaaaaaaacgtgatcatggatggat

SEQ ID NO: 31073 - DNA, 525 bp, Arabidopsis thaliana columbia
acatcttacatctctcagtttttggccttgatggagttgttctccttgattttacccagtgtgtcgagcttgacaaaacgtttgagatcatcgtagggaagagtctcgacgttcttcctcctaagctcactgagagctggtcgcttatcgaggagatgccagagccaatcagggtaatcagaatcaggcaagatcttgggatcagatccgtctttgagagtattggcaccaacaacagtggtggatttgatctctttggtcaagctggaacctttaggagcatcgctggctccacctcctttgccacctttcttggctttactagctgctgctgcaaacgttctccggactacatccttggatgatgatcccttatcaatccaatacggttcgatctcctacacaaattttagataccaaaaacagagcaactttttaaatcacaaatcgccatttcgttgaatatcattgttccagacgatattagggttagcaaatccagaacataaattaaaattgcacaag

SEQ ID NO: 31074 - DNA, 365 bp, Arabidopsis thaliana columbia
taaagcatgctagagattaattatcttgagatgaatatcgtcgcttataaaaactttttaattcttccttaataacatggatacattggggatagtggaccgttaaatgggccatgtatcaccaactcaccccaacaatagtttctgcggtttcgtcgcccggagtcttgcaaagtggagatatgtgaaaatccattgaaataatcaaatatataaatgagtcattaaccaaaagagagactcattatctgttgacgacgttgtattttcctaagtaattaagtgtttttgaattttccaataaaaaaggcttttcatatgtctctaagaaagatgaaactcgctttataaatctcaaagagaga

SEQ ID NO: 31075 - DNA, 494 bp, Arabidopsis thaliana columbia
tatgggttttctataccttagatgatgcaaaaatttgaattagaaaacagaaaacaatgtcaaatacttcctgaactctcccgcaaagttaaattacacggtcctttatgtaataaaaatttgatggaaagttcaagagaaataacaagaaaatctaatatgcaatggtatttacaaaggttttggagttgatacctcatgttttaagtgattctagataactagtggaacagaggcggctatctcgagtgttgcactaagacattaatgtcttactcgacccttggtcgagttcgtgctctgactctttttaaaacctataaactgacacacttaaacagaaatatcaaaaataaccagaaaataagttatatgtacaaagatagacatgggacttcctcccaagtgagcttgttttaagtctctaagcttgactctcatactcattaggctcatgtggtatgttaaatggaaatgaggcccctttggaatga

SEQ ID NO: 31076 - DNA, 1290 bp, Arabidopsis thaliana columbia
tcgtatgccataacggaacgtggttacacgcgacgcacaacatacggacgggatcctcatggttcggttaatgttagtcatctaattaaagactactaacatgacaacagactcatatactattatgcaactatcctatatacaaaactatactaatcaaacaattaatcgtacttaattaccactaatcacggttagttcccctaatctaggtttaactagtcctaatcatgcttagagaatactaatcctaattaggcatcactaatcctaattaactactactaaacctaattaactatcctaatcagggattaagcgaataattaagctaactaatcctaattaacctcctaaactatattaaggaaataaatgaataaactatcctattcacgtgctacttcacgtgactcaagtactcacatggattttcgagcggtttggcttctaaggtcttctcccgcgagctaggcattttctagtggatttttgggtctgaggaacaaatgggacgaagtggagtatttatagggtcttaagtcggtcacaagatcggccaaaacaagcacgaggtggcccggaccaatcaaaactcgataaatgtcactccacgggcgctccgggacactaatcactctccgattggtttcctccattttttctggataaacatcatccaaaatggataagctcgaccctaaaggataaggatgaccggaattatagataagcttgagccttaacggataaacatgaaccacagttcaatcctggccgtccgtttcttcattccggcgaaacccatgatctgtcactggaccgcaagaacattgatagggcacactccatctctaatgtctcatgagggtcaatgacacaaatcaaggcttctttaggactataacacgtttcatgccagaattaaccgactaagctcgctaacgtcacttatccgcattttccgttcaatccctcgactattcacgacccatactcatatcccactgcccaaatggattcccctatggtctcctagtccttctaaggtttccaagtccttctaaggtttcctaaaactaaggttttcttaagctatcataggtctaagggttagcctaatggtttcgaggtttaccgatagtcgcatcgtagctatgcttagtccgtctgatggagagtcattcctttacctgtggacttgatccattgcaatgctccttacccatgacttgccacatcaaatggccgaactggtcttgccttttcttagcggggatgatctgacct

SEQ ID NO: 31077 - DNA, 385 bp, Arabidopsis thaliana columbia
cagagatttataaaactccacgtgtacagaagtgaaacagtctgacatgatgcctgatgctaactaactatgtaagataagacatatcttacatagttagttaccatgtaatagtaagtgataacccaaaaatgcaaaaaaaaacatccaactagaacatgtgatatgtcagtatgtgtatgagatcatgtgcacaataatattatcggtatttgtatgtctagttgtctacactctacagctcttactggaaatagattttgaggaacaagaaatagttgaatgagtcattgctatcttctagatttttgtattttctgtcataatatcttctagaattttattacttgggaaagcgatatatgatatattctttttccaaaat

SEQ ID NO: 31078 - DNA, 449 bp, Arabidopsis thaliana columbia
aaattcattgattaagaagggttatatatataaactgtcatatacattaaacagaatgagaaataatgatggtgatgccaatattttaccaaagtttttgacactaaattattgacgtccatattttggtgccctcgtgtaatctttttaggttacatgttgagacaattaattatgatttcttttggaaaaaatgatcgatgaactgcaatataagtacgcaaagatgatcattggagaccgagactttgctttatagggattgcgaatttaaccatatccactttttgacgatcatgagtaacgcataatacattcagatgaccggaaattttctttgttgagttttatagtctacgaaacgaaacaactatcttctcttaataattagaatgtgatgttttaaaaatacagagtaacaagagatatcctcatggtcatgggtatcg

SEQ ID NO: 31079 - DNA, 525 bp, Arabidopsis thaliana columbia
gtccgtcacgacggagaagaaaagattagacggaggctggtggatcttccggcgctcaggcaacggcgttcaaattcaacgctcaagcgccggaatttgtaccgcgatcacataccaccgcaccagcaccgcaggtttctcctgtctccggttacttttatccttgttttcattacaacggtggttgcataggaggatgtggcggcggagtctgcggtggtggagggaccggcgttggtactcagtcgtcggattggatctacgtgggaggaggagatcctactgctcagcatcaacatgttcatgatccagcggctgcgttttacatttcgaatccggcggttcagtttccggctagtcagaactcgtcttcttcgtcgaagaatctgctttccgatgatctccgccttaagatcgtcaaacaggttttcactttttttttttgttttttttactttaatgataggtaaaatattgaaaatcattatgtcatgagatcttaagatcatatatgatttacattag

SEQ ID NO: 31080 - DNA, 530 bp, Arabidopsis thaliana columbia
ccaaagaacaatcctgaagaagacaagtcctcttcatcaagatcctcttctttctctgcgttcttatactcctttaatctttcgcttacagcaccatccacccattgcggacaacggtgtgtcaccccaagatttgtggcatttgaaaccggatgggttcgcgtaatgcaagaacattcgggtacaggatgggaaagaaaactaaatgcttttgatcttttggaagattccattagaccctcgagtatgcttctctttagtagcttcctaactgatgttatccaagtgtgattcgcctcgtacatatggtctcgaatctcttccaaaagcattgcaatttgtttcctacaagtatgagaaatttcaagattacataatctgttaatatcttctaaatagaatgatgcattcattatattacctgtctggtctaaatgttttagcagaagcagactgataaagccggtgtccatgaccaaactagcgaaactcggatgtcctttccatcgcgatcaaaaccgagataacac

SEQ ID NO: 31081 - DNA, 162 bp, Arabidopsis thaliana columbia
ctcaaagctggttgtttgatggtaaatttcctcatcatgttgcgttgattattaatgtcattccttttgttatatagttgtgctttgttaatttgtagagtgccatatcagctttgtcatccttgttggctcttgttcctgacaattacgattgccttgcaa

SEQ ID NO: 31082 - DNA, 523 bp, Arabidopsis thaliana columbia
tgtaaatgcatatatttgagtacaatgacgtgtcgactgacagggaataaacacgaactattgtcttcttgtcaaaatttcttaattggtaaaagggattgaaacggcaagagttaacgcacgtgggacccgtggcttaagtacacaatcgaagtctttgaccgttgaactatctatctatcacacgtgcggcctgctaaagtcgtttgtttataaagatggcccacctctctatttctttccccaggccgtgtataattagtttatttgcatttcttgaatcagtgcctttggaggtgtcatgtgccatactgccatgtggcacatttcagtgactagcgagagttctaggcccatttctataaaactcagaccaatacactttgtaaatgggccttatagtttttaggttcattaaagaattatcataatgtcaatgatgcttttagttagacacagattttgggattactgtgaatagtctaactaatttatatactgaatatatgtcaagtcgtgattg

SEQ ID NO: 31083 - DNA, 516 bp, Arabidopsis thaliana columbia
tcttagaataattatcatcttagtgattttaactgctaggaggttttaggcgataccagaatatgagaaagctgaagagatcttactgggttgtgagccagaaattgctcggccagaacttctcttattagttcaaattcaccatggacaggtgatgatctttgtgtctgaaccaaatttcatatttgaagttcttgtattcgagagctccttagtttattgacaattcactcgaaggttttaacattgtacacttgaaaacattttagtgtcttcttttggatggttttggggatactgactctgttaaagagcttgagggagaagagcttgaagaaattctttcaaaattaaaggattctataaagttagatgttagacaggcagccgtgtggaatacccttggtttaatgcttctcaaagctggttgtctgatggtaaatttcctcaccatgttggttgattatcaatgtcattccttttgttatatagttttgctttgctaatttgtagagt

SEQ ID NO: 31084 - DNA, 481 bp, Arabidopsis thaliana columbia
ttagattgacgataatttttgttgttgttatattacacacacaaaacattaagaaaagaaaaataagtttgtatcctcgagacctcataaaaatcaagtttgtatatcctcagacctcataatttaattaaatcatcgttacgttttaaaaacaaatcactaaataatgggcttttaaacactaatgtatataagagatatgagccgtccaaaaaaacaaaaatcaacggtctagaaataatagctgcaaaacaaaacaaataaataaagaagaaaaaaacaaaaaccctagctagagaattgtctcagaacatgaggtcttcgttgctcggcaatcttcggaagaagttgaggctcccatcgggtaaattattgcggaaccacggtagttgcacccagtagcaaataaatacgaaaatcaaacacttacgaacatgtagatcccaccaaggcaaacgacgagcatggagcaataacagag

SEQ ID NO: 31085 - DNA, 470 bp, Arabidopsis thaliana columbia
attggaatatgcgtggaacttacagaaaaacgtgttaatttcttggaatgtgaatcttttaattatagtttcagagaaaagataaatcattttggcttcgttgaagaatcaagatccgattttatggaaatgagtgaatggaagtaagtttttgctagatagtaaaaatcatgcctctcttctcaccatttagtcatatccaagtggcatggcctctgatgtatgttgggctcctgatcggtatcatagataacgtatgaaagcatatgtcacgacttgtagatgatctttaccctatgcaggtatgcccgtatctaaataaatgagcctaatctttttaaaatggtctttacttctctaaaaagaaccgtcaaatacgaatacgattctaagttctttagtcataatagtcagtctctcacagattttgtgcattcgaatcacaaagctagtcgcgtacaatgggttct

SEQ ID NO: 31086 - DNA, 389 bp, Arabidopsis thaliana columbia
aaaagagagcagcacaagatcgaaccgggaagaaaccataaagaccaccactagaaccagggagcacgagtaaacaagtcgaacaaccaaatagagatcaagctagtcaccagaaccgttcaaataaccaaaacacatgaacacaaagaggaagcatgagagacgagggagggaccgaggtaccgagaacggagccgttgttgctcagatccagtgaaggaagaaggccagagcctcctccggtgctcccaatgcaatgaaacacgtgaccagagacaaaacgaagatccacaccatgaggcagaggcgagaacgacgactccatcttcaccatctaccttaaggcatgtcaatttcggtctcatagaactaacctcgatagatttgag

SEQ ID NO: 31087 - DNA, 981 bp, Arabidopsis thaliana columbia
attttgctaattggtatggcaggtaagtaagcaacacaaagaacgtggaaaatgctttaattggggaatttggacttaaagaggaagattaggaaatgcattagtgaaagtggggcgactccttttttctcgccttttggagttttcacctttttccctgacggaccgtttccctatggctgcgtccggctcatattcatatacccgtttgaaataagaggtttatttctttttatttttggatttgtcaatgctcataaagcgtatcaatgatttaatatatgattgtagagagtttttgtgttttgtcctttagatatcgatccttttcttcctgtgactatgctccattcgcatctcatcccacctcgttaagggctcgttatgtttctccaccattcatatcttttttttattttctctaactcctatctttaaatttttctctttcacatatttttgctagcgttttgcgaaattaaaagccaccatgttatatacatgaacatgtaaatacattacaaatgtacatggataaatatgaactatacattatgcttagttactaatgtagacatgtagttaagaattcttagttactactagaactagtagtacaaaacaaaaagacaaggcctataatttccggagctaaacacagtttacaaagggattatagactctaaaacaaaccagaaactgccaaaagtcaggaatctcttgtttttcttccctcacatctctcttctctctctcttcacaatagtcctttggacagagtaaaagagagagaagatagtgaataatggaaggctgcttttcttcgtgaatctcagaatcttaaaagactcagatttgagaaaacgtttcaatatctaaatccatttctctccctctctctttagccatttagaatgaagaaaagtctcactctactcatcctcctcctctgttctctcctcttctccaccgtcttgagca

SEQ ID NO: 31088 - DNA, 445 bp, Arabidopsis thaliana columbia
taaaaagagccgaactttattagacagtatactaattgttgtctaaaccaatcagaaggctaaccaatcttattaataaaatataatttgactaaaaccaaaatgttcacatagttttgatatacattattatggctaatgggttaatctttaggacaaaatggattatttttgcattatacaaaatttaaaataatataaatgacattttctttaattaattgtatttaatgccgtatatattaagtataaactcatttctcttcctcttgaaaaactcactttatcaccaccaaaaaccaaaattcactgccaaaaaaaacacatcaaaacgatgccgtcggaagcggagagctcagcgaattcagctccggcaactccgccaccaccaccgaatttctggggaaccatgccggaggaagagtactacagctgtcacaaggag

SEQ ID NO: 31089 - DNA, 726 bp, Arabidopsis thaliana columbia
tgtttcaattttcgtacatcaattctcatcaaaagccgactcaaacataaaccgagagtttataaaaaacagatgtcagaaagactagaagatgactttgcaatcgatgaagagagatcctcctactatggcggagcctccataccattcatatgggagtcaaggccaggaacacccaaaaaccacctctgctccgattcctctcttcctctgcctctcacaccgccgccctcatactactcctccgggattttgtcgacaccaaggacgcaaagcaaggtgagatcaaaactaagtaagtttctgtccttctccatgttcagtgatctcaggaggagcaatcacggtagcaagaagacggcaagctcatcgttttcttggtcttctacgtcatcttcatcttccttttcctcctcgccaccacattctttgaaaaaacgtatgagtcacgacaaaaaatcgccacttctgtacgctaactacgaagaggatgagcttaggtcttcaccaacctcgactctgtgttgctccaacgggggaagacttggctgtagttcttcaatggggagtgtgacaagagctctgttctctgggtcaatggagggtatgaagagacattgagaccacaggtaaagctctaatcatcagcgacatgaataaagcttgattatgtgaataaagcttggttttttctatgagctgcttcgcatcattggacagagagtg

SEQ ID NO: 31090 - DNA, 352 bp, Arabidopsis thaliana columbia
tgactaaggttaacttggacctaaaccacgtttaaaaaaaaatcaaagcctcgaaaaaagtaaagaacggaaaaacattggagtcggctttacgcttgcaaatagacattttctcgcatctatatatttatatatactttcacatcatagacttttagtagtatatttatatggtaaaactattgccgactttgtgtgtgtgtgtgtgatgcttttatgtaactgaagaaaccatctcatgctatcctcctgtggatgatggagtcagttcatgacaaccgatgccctttgcccctgactcgccccccttcctgtcgtgacacaccctcagacccgtgaatcccgtttgtcg

SEQ ID NO: 31091 - DNA, 440 bp, Arabidopsis thaliana columbia
cataactgtttcaaaagagaatataactttcaatgtttgtttcttccaaaaaataccaattcatgagcattctatatagttcagttcatttttgatcatacttatttccataattcataattattggaaatatgaatggtttaagtagtcaaaatgttgtcacaaatattgaaatatcaaatttatacgtgattagtgtattcataggtgtgataatgtaaatatatacttatattgttcggtaattgtcagcaaaaacatcaccaatgcgatttgtcggactggtccatcagaattgtttactaggatcagaataatccgatatcatttgggtccgtcatcataagcataccctaactgaatagtacaagtaccagttagtaatatcgagagcagccagagtaggcagttcgtgattgggtcgaatcgggtcgggttgg

SEQ ID NO: 31092 - DNA, 578 bp, Arabidopsis thaliana columbia
tctcaaaccctgtaccaaacaatgcgactttaaaatcatgagtgccaaattgagagaaccagtagagcaaaaggagtcaccttaaaagcatcactctttccctttgtaacttgatttttagcaatgcagttcttattaagaacatcttttgtaaactcatctgggttcttcccatcatcaatcaagctacaacaaacaaagatatataaacataagagagcaacaaaaattctctaaagagtctaaaaagggacttgttctcacttaagaacctcaatggggacttgaatgttgcatttatcagacaacttagccatattatcaagctccatcacaagagaattgctgcagatagagacaaaatttcaatcacacaatactcaaaacaatggatcaatagagaagaagaaaagttacaggcgttggaggaggtgaagctgagaagcaggtgtgaaagaagagacggtgagttttaattgatgaaggagttctaaaattttctgattcgagtttataatttggttcagcttctcatttgaatcgtcgacggttgcaattgcattgatttcggtttttag

SEQ ID NO: 31093 - DNA, 529 bp, Arabidopsis thaliana columbia
ggtatcgaccattagtcgataatcagtctataatgtgagacagattaaattagtcgctaataggtctccagttacaactacaatttagcgactcatatattctatttgggcattaaattgggcttttatcggctagatccaataacgagagcccatcagcctagactatataaggtcttttatcgactaaatcaacaaaccctaaccctaaactcctttcatcctctctcgacaaaccctaaccctaatcctaatccccttttgcgatcgatctcaattcttcttcaatcctctcaatctctcatcttttagcttccaacgatggctcctcatggtagaaaaggcaaaagaggaagaggaaggggatcgaagacatatacaaatcgcccacttcttcctggaggccgaatcaaaatagtcttcctagcaagtaagacttcacgccgacgaaccatcaagccccacttccagatttagagcagaaccaacgggacctagtctttgagactatcctcctccgacacagctt

SEQ ID NO: 31094 - DNA, 281 bp, Arabidopsis thaliana columbia
  unsure (1)..(281): unsure at all n locations
tgacaacataaaaaactacaacgacaggatagtattttaggattaaatgactaaaaacctataatcaatttgacgccgttgtcaattgggtgtttgtatgtaatatttaaaaattcaaacttgcttacatcaagttctttttcaattttaacttcaagtactaactgtatgtatttattgtagtcttcttgatcctggtacacctctcctgtatgcgnactcgatcaaccggcaaccatgacctgcttttcaacgatgacattgatcgcatagctcgcgaa

SEQ ID NO: 31095 - DNA, 546 bp, Arabidopsis thaliana columbia
tacaaccaaaaaaaaaaaaaaaaggtaagagtcagaagaaaacttaaccggattttgagcaagaaactggtcgtctggaacaagacctaacttttgttttgttggctcttcattttcttctttctcacatgttctgcatcagtaaaataccaagtaagcttggagactagatcaaaaatagaacagaactgaagtgaaagtgaaagtcaaacaactcaaactcataaactgaaactgaaagtgccaaagtgaaacaactcaaactcataaactgaaacaactcattgattaacatagtcatacacttaaacataaaacatagacaaaaaacagacactaaatataaaaacacacttgaaacagacactaaacttaaaaacagagttaaaacagacacttagagaaccataatctagaaacagacacttaacctacaactgaaactcaagccaacaactcattgattaacttgttcttcagttcaatctctatgtcagatagaggttctgtttccctaacagacgctcaagcaacttagtcctattt

SEQ ID NO: 31096 - DNA, 518 bp, Arabidopsis thaliana columbia
atgtataatatatgctattataagctacacctttttttatgatcttaaaaaacactaaaataaataacactaagatttgttgtctaatcaatactactagaattaataacatcattaacctagacggtattattataactatcaattagtataaaactggaataaaattctttggaaaattggcaatattgttgttgaagctaagaacaaagggcataaacgtaatagcaaaaaccactgcaaagaaaatcttcgaaacggttccataaaacatgggtcccatccgcacttggacgttaaagaaagtcattggatcgtggggtccacgagcgcgtgagattgcgcgttacgtaatatctacacagaccaccaccacttgtgtcttttctttattggcaaggacaacactttaaattattaatagaacatatacgacgtcgttttctcccttttttaggttctttatttcttgtgatgaatgacgtttttgcaaagactttggaaaaaagctctgtgac

SEQ ID NO: 31097 - DNA, 542 bp, Arabidopsis thaliana columbia
ggtaaaagaaaagagacccaaaagattaacacaaggtaaaatatatatatatcgttgacaaccccacagctctgtaaatccttgggggtgtggtaaattacctgagaaaactcattttgcagaggagaaagtttttgaagtcttggtccctttaaactccttcaggttacttcacaagttttgttgtatcactaaacctcccagagaaaaccttgcttgatttttttttctttttgctttctaagtttttatttttctgttttacttaaaaaattgttgggttgtgtctacaaggatctttttctttgtactttgcatacaaatgtaacaacctagtacgatgtgttcagtttcttcgcccgtggcttgggaccatataatatcatttatgtaaacccttttgagggcgaagtttttggcattgctttcttctcttttggtttttagtgtttctttgaatctttagtcgggcactttataagcttctgacacagtcagttgtttaaggcttcctcttggaataaataatactactaagacac

SEQ ID NO: 31098 - DNA, 504 bp, Arabidopsis thaliana columbia
tgattgcattcagatcctcctacttttttttgttttagtccgcttcaccttttaaaccttaatgttctttaagtactaggctcttgagccgaagaaatattttttttggtgtattcggttctttttttttaatgatggaattagaactgattatttgtttgtttgacaaaatacatatttctaaaaaggctatgtacgttcatatcccagccacaaatttgtattcctcgttaattttttaaaaatattccattttttggcttataaccaaaaattgcatgttaaacttacttaaccccaaacctatcgtcattattattattattgttatagtttttacttactttattggattaaaaaaaccaaggttaaactttctttattaggacaaactaatataaccatcggacccgactaatccaagggttcgacttagcgagaggcagcccactatgctctaggttaatcattcctggactataggaacaaactcggggcagaaat

SEQ ID NO: 31099 - DNA, 282 bp, Arabidopsis thaliana columbia
ccgacgcggattacggtggcggcctaagcacggagaacctcataggcatcagacagatagggatagagaaaggtagttttgtccgcaatgtacagagatgcaatctgacagtaaagatcatctgatccactagtcgagatcgtgtgtgtacaacgatgggtctatcgcgtgttgcgtacaagacaggagccattcaggaagcaagtaacagcacaatgagtcaggttgcaaactcactggttagccagcacgcgctcgggaaggcaacgtagatgacgagaa

SEQ ID NO: 31100 - DNA, 487 bp, Arabidopsis thaliana columbia
aagtacatttcacaaggctctgtgcgtccataggatcatgctcgccagaaaaatctggccacagttcttaaacttcaacgggagagaaatctggtattatatcatattgcgtctcacttccatcgcaagaagcaatttccaaaagtaatgccatgttgatctgaatcaatcaagcatttggagatattactaatgcagtcaaacttgatagaaccagagttagaaaccacgtcagtagtacagacatgagcaggtgctagactctgagtaacaatcgggattagaccgtagcgatactctcaccgtcatggaaaagtgtagaacgaaaacatgctggttagcatatgtgacaaaattctatggcgcaacaatgaaaacctgaccactagtgtcaaaaacctgatgaagtcttataaaacgagttcaaacgtctaatcgtcgaaaaactgacacaagtaccaacaaattctctagaagatatgtctat

SEQ ID NO: 31101 - DNA, 556 bp, Arabidopsis thaliana columbia
tgcatatcgagaaagatgtgaacaagtgttttaatttatagagaaagaggaatcaagaccaacatgttcgagagtataaaatgacctgtgactcctttatatattaaaccatgatgggatatgatgttgaatgatctgtgggcatgtgtgggatttattatatgttttaatgaccttttttgccagatcgaataattttgttggttgattctttttttatgttatttatcattatgtatgcgtatatgactattacaacctcattttaattacctttaatggaataaatgatacataactgaattattcagccatgaaccaaacacgaggaataaagaagaagaaaaaaaagacaaagcattcaagttttttaaaaggaaggtaagttttctgtttgtttttatgctggagattaaaagtgaattactgtacatagatggtttggttgaattatgaaaataatgctatgtttgtgttatttatttaagaaaactgtcacaagtgtaatatattatacattgccaaagttcttcatttatatattgcacaagtgtag

SEQ ID NO: 31102 - DNA, 986 bp, Arabidopsis thaliana columbia
actctagacgagacagtgctagtgataattatatataaataaataaatatgctttaatctataataagcttacaattttaatttcaaataatttaatgatttatattatacaaataaagttgcaattagtcatttacaaaattaagcatatatatttgcagtttcaatttaaaaacttataatatatgagaattggttagtgatgaaatgtgataacacgtcatttcacccgttttacctattgtttttttttatgttttagggagaatttggtgccattttagagctaaggagatgataaacaagtattttgggagtcaagaaagttttaagagttttagagtaaaaaagacgaaaagacgaacaattcttgtttcaagacaatttatgtacttcagaattttgtcatttgttggagacctccacgtgcatcaaatttacatatcagtgtttatggaaatttagtagagtcaagatttacttctatttggaacgaataaatctataaaggtgttcggaataatacgacccggagaatgaagacatatgcgagactggctgtagtgcgaagcaaccgttctggagcctcaaggtcagctcggttatgaaggcccgtacccgggcagtccctcacacttcccacatgtcacttgaccttgccacaagtccagaactcggccaatcacttacccaatcaacgaaattgacgtttttacccctaaactgactccttggtgtgctttcttcttgtcttcatcacaagcgaacctagctgctgccgtgagcctcccagctgccgccacacctctccaagcctggaaagacaccaaatctctatttttctcttgttttgtctaaaatctactaaggtgaagtcttaccttttatattttacattcaaagaagtaatctctaaactctatttaagtcttattcatctctttcttatggtattatcaaagcaacctttgatgagttacttaacc

SEQ ID NO: 31103 - DNA, 1431 bp, Arabidopsis thaliana columbia
tatagcagccacgcaagtgaaaagaacatcgttactcgaaaaatattttacttagctattttggactggatctaattaatatgtgaggtgtaagccaaattaacgtcaccgcattaaacgcctatgcacaagttaacgtcaatatgtctttagaagaccgcaacaccggatgcatggttatgaaactcctttatgtttttgttcatcattacgcaaattagtttgttctccagcgttaggatcgatcggctgaaacatattttcctgcaacatttattttactatatttaaggaggagaaaagtttttattaatcaacttttagtttttctaatatcacatggataaaataataaattaaattagacatacagttgttagtaattctttgggagatttgcaaaactgccattattctaataaccttttgtaaaagtgccctttcctgaagtccatttttaaaactaccccttctaatatgccaaatgactgtcttaccctctgaatgattaggtttcacgttggtttcacaaacttcttcggcacaaacttcttcgttttcctctccgattttcatctccgatttcactcaatctcgccggcgaatttcctctccgatttcactcaaaatcgccgacgaattccctctccgatttcactcaaaatcgccaacgaatttcctctccgatttcactcaaaatcgccgacgaattttctttctgagaaaccccaaaatcgccgacgaatttcctctccgataaacctgttcttcgctgaaggattcagatcatttctctacgacgcaaacaatccccagagatatcgatagatccgacggtaaacactaaatcagaaccaaaatctattacgaaatagtataacgaattcacataagcaaatctatcacgaaacagtataacgaattcaaaaggattttagaacaatataacgaatgtacaaggattttagaaacaaattcaatcatcaaatctcaaacaaaattcaaattcgaagctgaagcaaatgtcaaactgtcgattgaatcaggattcaaataacgagttcacagaatcaacaacaaaaatcgaataaaccaattcgaaaacgaagatttaagctaacattataaaatcaaacctgggaaacgcaagagattcgacggcgacacatagctctacttacgacggcgaagatgggttttcacggcgagtaaactcattatttccgacggcatgggattcaacggcattcacaatttccgatggaggaagaagagagagagtgaagaaatgaattaggtctgtgggtagctcattaagggtaatttggagagaaaagtattagaaaggatagaaatgaaaatgggaaaaaaaatggtagagttgcaaaagggcattgagaaaaaggcattagagtggtgactcaggtggga

SEQ ID NO: 31104 - DNA, 596 bp, Arabidopsis thaliana columbia
acaatttagagtttgcaataaaaaaagagaagaacctcgaatcagcctgctcaagtcatcatctgccatgtaagtgaagactaattgacatgtccttaggctcactattctctagttctaaggtcttgttcttactatctctactcttttgcgtttcttgtttatctgcgaagaccctattgttagtggccaattgtgttgatatcaatgtatttcagaatgtatatagcagctggggataagaacatatgccctgaacctaaatgcaccacaagaccctattgtcacattgcttggtcgtgatgttgtggtctcgacaaatcatttattctaaaaatacgagtttatttcagcaaaaactaaagccaatgagtctagcagctagagacagtgctataagagaaagaactaagctatgatatagcagcaaagagacagtgctataagtgatgtgaatatgttagatatgtttgctaaaatataatttccttcacttacaagatatataacagtagatttgatatttgacaggtttaagagaaaagacagacctcaattccaaacttaatactagtttatattttgaggtggaatat

SEQ ID NO: 31105 - DNA, 488 bp, Arabidopsis thaliana columbia
tcccccgaatcaatgtatggaaaggataaacttgaggagcagttttattcgtttttgtgtgtgtatattatcgaaaatctgctaggatttttgtggttgtaataatatatgtgggacatttgttgccgttaacacttctactattgtgttggaagttgtttcatagctccagagaaatacgagctgggaaagtatgtaaataattatacaagttctaggtatcacggtagggaaccaattgaatcatagtaggatatttctctaaatataattaggtatctttgattatattgtggattcacggtagggtgatatgaatctatgttaattaggcttaaaataggttttagtcgggttcgattttaaagtttgctaaatcgagtaactctgaataagtgtaattcttgatgtaaagactaattgataataaactccgggtatataagcgattgcttggtgcatccgaacaaaaagagagtatgttgtta

SEQ ID NO: 31106 - DNA, 602 bp, Arabidopsis thaliana columbia
caagtttcttgtccataaaccaaaaacgtgtaatgttgaaaaataataataattaattacgtaagacagcttagtaaagtctattttaagtgatttaatttgaacatttaaacattttcgtacgagttaccaattatatatttctaactgaatatttcactctgttaatttttctgtcaattgacttaacgacgtgcttaaaacgacaaaatcaacaaaagttatatattaattctaaaatcaataacaagtttggtattttagtggtattttggaagttggggatttaaacgtaccaaatttaaaagtttatgatttttttgacattttttcaattatatattgaagtgttctaagataaaatcatgagcctggtaaaaagtttttgtatcttagcttttttaggtagctgtttttctctattatgctcatcatttcttaagatttacaggttgtaaaaggccaagacttagtgagaataaaagtgttggaagtaattatatttatcttcccgtctatcacaaatatcataatcttaatacaatttgtaagacacatttctcttttgggcacacaattagtaagaacttgtatcaaaatga

SEQ ID NO: 31107 - DNA, 304 bp, Arabidopsis thaliana columbia
gccgggtgttcttgcggtcgggctgcacgctgaaggcgagcggcgcctggatgccgctgcggttcagcagtgcgagcaggctgggcaggtcttcgcgtcgctgcagcgcgtcgatgcggttgagcagcggcgcgatcgagctcaggccgcgggcttcgatggccgcctcatccatgccgctggcgtaataggcggcgatcagcttcaggcctggcgtggtctgcagcgcgggctgctcggccagctcctgcagtgccttgttcagcagttcgtcattggcctggcgcagtggttcaaaactgcc

SEQ ID NO: 31108 - DNA, 777 bp, Arabidopsis thaliana columbia
tcacccaaattaagaattctcccatgaacatgaatgaaggatattttcgtaactgtagggtgttgttaactttttttctcaactctgacccaatccgacgtcgttcggaataaccggttcacatggaccggaacgagataaggctttcgtcagtgagggcccacattcttcagtgttttacgcgggagacaaagttaggtgtcaaaagagccgccacatccgacaaaaggccagcgcaagtgtgactgtgattccacataacgaaagatgacacgtggacggtgatcctttgttttgatccaaagctccttcgtatatcattgatgtatctaccggtgaccacgtcgtactactatctccggcaggagttgtcgacgacgtcccggttggtgtcgtcggtttgggatctgggctctgatcttgagatgatttttgactgcaacaaacaaaaaaaaacatagccgcttagtaaatgtgtacgtgattctgccacgcgtcccctcgagattagagatcatataaaaaaatatctcgatgagccgttaacgatccacatcccaataaatctatcttcatattcgcgggtaaattgggactatcatacaaattgatcagccaattagacaaaaaatcgtgaataaccaaatttctctgcttgcagtataaagcgaaattctatagattcggagtaatttagttctagctataattaagcgttacgtcaattgcacggtaagcaaaagcgtattaatggttagtatgtatggtgtctgcagt

SEQ ID NO: 31109 - DNA, 465 bp, Arabidopsis thaliana columbia
accttgcctaaatttatttataaactaaaaattgtgttattttatggaattatatagttcgatatttaatttaaaatatttagcacatttattaaatttgattttgacatctccagattgaacgatgaaaactttgattatatagtaaaacaataggaagtagagaaaatattatatagtaaaacacagtaacatattataatataacaccccccctccccccttggactgggcctttggacccgaaagagggttttaggctgaatctgggcaagtgggtaagtaaacctacagagagttagcgaccacctcacaagcttcttcgtctccttcacagagctttattcttgccctagagataccgagcgggagattccagattgagagcagcttcgagtctctctctcctcgccgttccttttcgcttcttcaagtttcgttgccagagaggtaagtaccgagttg

SEQ ID NO: 31110 - DNA, 562 bp, Arabidopsis thaliana columbia
taacagatctattgatcagaaacctcgtccaagctactcatattgcagaacctcataagagcgtaattgtttgtgttgactatatgttgatgaagcacaaacaatattgaaagatttatggaaaatgtacaaacaatattgaaagatttacaaaccttctatttttttcttcacatgtttaccaaaaaaataaaagatttgcaaacccgaccaattattaagtcagaatacataattaatgtatagctgattttctgaagaaaaaaaaaaattaaatctactccctcgggtgtggatcatattttttttttcactagtaaactatttttatcaaacatatccaaaacatacatggtgtcaattaatgtgatttatcatttgttaaatagttttaaagtcttgacaatgcgatgtcaatcaccccattatcttttttataatatcaattaatttgatttacggaaaaaaaaaagatgcttatatatcatctaatcttttttatgatattaattaatttgatttactagaaaaaaaaaagaaaaaaaaagggggaaaatttggt

SEQ ID NO: 31111 - DNA, 408 bp, Arabidopsis thaliana columbia
ccatatattagtatacatttttatcccctgggaggatgtgtgtgagctgtgaaagactgaaaagagttggtaaagtagtgggtttagtttctttttccagtaaaagtggttagctttttccctctcgtgctggacctatctctttggttttatcatcatacacttcgttaaagaatagcgtaaatagtaaactcgagagtctaaacaaattattggcaaaatgtgtaattaaatatgatggaacggccgacgcggctaaaacgtgtatcagtgcatgcgtagtaaagccatccctcattcatttgtttaaatacaatatagagcccaaaaacaataaaggaagtgctttgaggcccataccccacgtagtcgtacgtgcgtgtggtggtggtgtttgagtgtggtggg

SEQ ID NO: 31112 - DNA, 556 bp, Arabidopsis thaliana columbia
gtggtttgtccaatttcggacagagtttcgttgaaatctccatagtcagtgggtccaaatcgagcacatagttagtcttcaaagatatcccacgtgatgactgtattctcctcaaccaaattagtgctgcaaaatataaggcagcaaagacgtagtggcaaaaccaaaacagtgactgtaccacacacccaaagcttagtacatagtaataagagagtgcatctaacaatatatcatattacaacacaccatcgacgacgagaacccaaaaataaaataaaaacaatacttatacattatatatatctttggactgctacgactagagatgtttgtttcacaattcttacccttcctcttgatcaacgagcaactatgagctcttcaatgaaatcgccttcacctgattcagatgggattaagatatcatcatcggcggtgaagttgtagctctctccaatggctcttagaagctgataaacttcaaacatggttggcctctgctttgctatttccggtagaacgcagttgcatgctactttgagtactttgaaga

SEQ ID NO: 31113 - DNA, 500 bp, Arabidopsis thaliana columbia
atttttgaaactatcctttttcttgaacaaaatgatcaaattacccttatctaatgagaacatataataagaaactgtaaattttccgccaacaattattggcggtaaaatttactggcaaaaaatttattttttggaatattttaggttggaaaactcaatatttcattttgttaacttaaaacattttccaaataggggtaaaatagtcattaaaaattaaaagagggcatcacatgaaaatgacaaacaaaaaatggcataatggaaaaggggtagtgttgaaagggcatttttagcaattatttttattttttcctttagtgtcattttatcgcaactttttatttgtggttttttcatcgtaactttctgttaatatcgatggttattttttagtttgtgtctttttatcgtaatttcgtaaaaatattgacggttattttgtggttgtgtcctttatcgcaagtttcggttaaaatattgacaagtttttttta

SEQ ID NO: 31114 - DNA, 656 bp, Arabidopsis thaliana columbia
gaaactcataggcatgaggattagtgttgagagccaaagaacataaacatgtatatgtataaccttttctgattaaagtttgataatcaatctacctaaattcccattgaagctaaatgaatgaagggtctccgagcacatgtagtgtttattgattccaccttcatttaagttaatcactaatcattaagtgtttaaacaaacctctgtttcttattttgatcgaaagtttgagaaaccatttttgggcaactaaaaaaagaagaaacgcattgaaaattccacaggaggcttgagaggggggcattgccacagtatcgagtgtcactttctcaatcaaaaggttttctctctcttctcttttttcctctcctgcgcgaaaacaaaacgaagagagagagagagactcagacacacacagacacagagtttaggtttgctttgtaaatctgtctctgcacttatcatagtttcgtttctcttttgagaaagaaaaacccaaacttgccatgttttagatctggtcctttttaagctccaaaagattgttgctacttctcttgcttaagtttttgagttattcttcttcttcgaaaagtctgtaccgcgcaagagtttgaatgtccttgtgttgcgagcccatgtttagtactgca

SEQ ID NO: 31115 - DNA, 333 bp, Arabidopsis thaliana columbia
tttttgatgttattgcgtctctagaaaatgaaatcatttgtagtttaatttggttccaacaattagataaacaataaaaaaataataattaatactatatttatgaatatggttccatcttttaaaaaaacatctaatatggttgtatctaatatttaatatgtataagtcaactataaaatttcagtagattttggtttgtttaatttggctttttcaataataatctttttattcacccttaatcgtggcaacgattacttatatagtcacatcaacattgagacgagtcttgcgagaagggacaatgacggaagaaaacgcaacgccact

SEQ ID NO: 31116 - DNA, 606 bp, Arabidopsis thaliana columbia
ttcttagtctaggaatcgaacgcatacgtttagatttgacctatccatcgattttaaaatttcaatctcacaaaatcaggaggaagaagaataaacctaattgcccagcggcatcatcgagcccaatgagatccacatcgtctcggttatacagtctcaggaaactgaatcgtacataagacatcaattacacataaatccaacaaagcaaaatctggtgaaagagagagagagaggtgttacttggagacgagaaccccaagagatttctccttgcggctataaatttgcagaccaagcgattccgcatcttgagaaacaacaatcgcagaagacattttccccagaaacaaaaaacagagaaagaggacgagaaatttctgagattcggatatttgtcttagcaattaaaaaaaaaaaaaaaaaactttttggggccaaagcggggggagagagatttcgaattgtgaaaataggcgcttcattcatcgctttagcacttgttatcactgttaatgacgcaaataccctcgatcctcttaactacacggagtattgaaagggtaaatattataaatcgatgcagacgcggattagcattttttg

SEQ ID NO: 31117 - DNA, 522 bp, Arabidopsis thaliana columbia
gggtacgtccatgaccatagaacagaggagatcgacacaaagaaagtaatgggctaagcataagaataatgagttcagacctaagattaaaagccttagaatgattaaaccagcaggtgggcttggaccttattataggtaatgggccaacagaagagtctaggtccactggggaaaaccctaggttcacttcaggatgccaaaatggggcagactctgaccgtggttgtgttgaggttccaggggttcgtagcctttcctacaaagggaagcagatctgaagggagtgtccaaggagatgcagggaaagagtgggagaagggaagagcacaatgtctcatccttccttcttcgattggatctgaagagcaacctgaaaccgatgcaaggtgaggtaaaaagtttggaagggttcgtggtgtgttttttgttttttaatctatccttttagttaaaaactattttttttttagttttatagaaaaaaatttgtaactcaatccattaaattatagttttttt

SEQ ID NO: 31118 - DNA, 525 bp, Arabidopsis thaliana columbia
gagtttagggctaatgagataaactcactacggtctacaaattctgagctaatttggccacttaggttttggaaaaaaaaaaaaaagtaaggttccacgtggcttaaggctagattgaagcgatcgtcaaaccttatttgatcgtaaacaggattagtgattgaattaaacttaggaattatattgaattttgtaagaagtttttgattcaatgcctcttaacgatttacttttaatgttatgtcaacttgaaacatggtttagtttatttaaagaccacttcattggaaaaaaaacatacatagattaatatttctattgaagataaaaacatgaatatacttgattcacaatacataagccagacaggataaaaggaaagccaaaatgtaatgaaaaaccaaactgattaaactatatatatgagggcaaacctacaaattttgatcttatatattaatgcatttgttcacgaatgatgaagagttggtacgagctcaagaggtactttcttagctatgttta

SEQ ID NO: 31119 - DNA, 526 bp, Arabidopsis thaliana columbia
tttgagatctcagtttcttcctaaagaaagaaacagactacagaacttcatgtaattgtcaaaaatgatttttcttctaaccgtaaactcataattctgtgaacaagggcaatagaccctaaatctttttaattacatgttagtaaagaaagcgcaatagaccctaaatccttttgcctaaaaattatgtgatactttctcaatttttggtgatcttttgttatgcccttttaccattttgccaactgttcataaaacacctaagatcaaaccaaacaaacaaacttacacttcaccacatattttggttatcatactccataaaaaaattcattgcaaatacaaaacttcatatagttatatattacataaccctgatcaaacatcaggtgatgtgtttcaaacttccgttttgtgaaatatttccccttgtgtggcagatttgatgatctcaagtgcttccaccatatcatcacatagtcgattaggatcttgaatcgttgttgtgtcacagctagattgatgc

SEQ ID NO: 31120 - DNA, 689 bp, Arabidopsis thaliana columbia
ttctcattctgttgtaaatctcattaaaccggaaaaccaaatcggacatatatgggcctaaaatgttgttgggtcaggccgaattctagacagttctgttctagtttcccctcctttgtcgtactcaggtggacgacacgcaaaccctcgggattcctctgcttctgtctcgtccgtcgtcgtcaatttctctgcatcagagattccggtgtccttcttcctttcactcgcgtataacctcttttccttgacgttgtctccgtgagctctctgtgctttgactgcaaccatgtcgactattatgcagaagatcaaagaaattgaagatgaggtaattattcaatcctctctgattcttcacctcttctcttcaattttggatgcatagaactgtgaatccgaaatatctattctgaatcaaagaaatgattttccaatctgggtgactcacaagtacgaggctctccccgtttatctggcagatggctaacacacagaagactacagctacttctcatcatctgggtttgtcaaaggtacatttctcctccactttaggtcgttttttgtagctttgagagtgaggttgattggttgaggtgtttttgcttatcaaatgcaaatctggttgattggtttatatatgtattgatacctgatccaagttatcatgaaatccaaccagtaag

SEQ ID NO: 31121 - DNA, 570 bp, Arabidopsis thaliana columbia
aagctctcctttggctgcttggcaaaatcctttcacaagaaacttgactctctcttctgatatattctggtgcaaaacccttttacaagcctgtcgttttttaacctaaatgatcattcttttaggggttttccttgggcttgcttcatgggttaatttgcatcagacaagacagagagagagagacacaagagatttatccgccaagcgcgccggagttctcactgtgtctgagacagagacagtggagatgctaattctttaagacaaatgaagatctttgaagggttccttatgattggtttcactttggaccggagaagactgttttggtttcatcagtgacatttcctctttaaaatttcagtcttggttcatcttatactggctaataatgtaatacgaccaaataaataagtctatggtttatgttgaaccatatagactaaacatgtctttcttcattctcatattctaataatacaacagttttcacttttcaccacacatcctacagatgatagtttgcgtaatcaaaacttcatgtcaataagatttatctttagttga

SEQ ID NO: 31122 - DNA, 188 bp, Arabidopsis thaliana columbia
cgtatcgtgcccggattcgtgagctaggtcatctgagcaacctgagatgtttctgtccatcgctcagtattcgatactccatgcgtgccggtagctcgagtggttgtccctggggtccctaaagtgtgtgcgtaggctggtcaagtccgttgcgctcggagtctctgttcacatcgggtaacccggcg

SEQ ID NO: 31123 - DNA, 523 bp, Arabidopsis thaliana columbia
ccaatataacattctttcagcatcttgatccttcctgtatgataaaattaaaaatcgccatgaatctttggaaatcaacaaagggccagaacttataagaatatttgttttgattattaaggtctataaatgtctgtcaaacaaaaatgcatgtattgtctatatcatcaaagtatgaatatccaatactgttaaaatatttatttatccgcataaatacaaatacctctgaatatagtttttatttggattaaatactagaatttaattaagaattaattgtctaaataaccctaaaaaataaaataaaattacaaacaggcatttacgtaacgtaatgacttacagaaacaagcacttttatctttgcaaaataacggatttaccttcattcatccacaatattacaataatagctgagacttttgacgacgactatggtgaactccggccatagatactcaaatgacggtgtgataacgaaaaatcgtgaaagacatgactcgaatctgaaacagttgtg

SEQ ID NO: 31124 - DNA, 547 bp, Arabidopsis thaliana columbia
cttgttacatgtcgaagtgtatagctttatcccttgatcatcttgactacttctcttccttttcggcattgctaatctcagcttctttgtgttcttatactgattgcagttaaccaggctttgtataattaagggttagtttccaatcttgcaatggtgtctagtagtgaagttcttagcctatgtcgtgccttgcttcgagcgggacgtcaattccctgattacaacattagggagtacagtaagcgaaggaccttggatggcttccgcatgaacaagaatctcactgacccatcgaaggtgactgaggcttatgctgaagctaaaaaacagctttttgttgctgagagagtgctcaaggtttacttggcatatcctcccaagaccaagaacatcatggaagtcaagcttcagtagatgtatgtttgtcattacaatatcctccaaagctatttgtttttaatggtcatgttggagccctttatatcattgattgtcgagtttgtgcttgagaatatgattcgggacaagtggtgtttgatgagat

SEQ ID NO: 31125 - DNA, 605 bp, Arabidopsis thaliana columbia
gactctgaaacatcactcaagattagtgaggagattgatatcattatcagttctgctgctaccacaacctttgacgacaggttcctatgtttcttttgctctgttgttttgttctgttttttttttatttttgtgcgagttgatggacaacgataataaagcctatggaatttcaccggtccttggaggatttattcagatgcatgtcaaagagggaacaacttgcgagaaagggagtcagatattacattgagtatcaaaggaaagaagaagctaaagtattttgtggccatggcaacattgtatgagccttacgcgttctttcaagctccgtaaaacatacagatagctatcagattactgactccttattatcaggtttgatgacactaatacaaggagaatgataaaggagatgtctatggaataaagagacatgacttctcatcagtggaaaataaggtttaagtgtttttcagtaattctagtacatgtgaatatgtgattgtgttccaatgtgataatctgtgtcctaccagcaaatatacttcagtatgtgttacattgtcaaaaatatgaatattttgtgtatatacaaatggtaa

SEQ ID NO: 31126 - DNA, 225 bp, Arabidopsis thaliana columbia
gattgtttcaagccagatacggttctgttctttccatcttattcaccgcaaatccctaattcaatgaagcaatcgttcgaaggattcatagaaaactgcgatggagaagaatacgctcggtttcgacgatcttacgaagcccgtattcctcaccaaagctcactcaaaagaattagccctataacgctgtcaggatggcatctctgatcgtgatagccgcagcat

SEQ ID NO: 31127 - DNA, 1331 bp, Arabidopsis thaliana columbia
aatgactaatcacgtttacttactacgagcctattgaatctctataacactcgtaacaagatctacctcacaacctaacctctcaattactacctagcatgcaaagctaattacaaacaagttaaccaagcaaatgcgagattaacaaacaactatcaaacaatcaaacaacaatcaatcaatgataactaacaagcaatcaatcaatactactctatcatgtcaataactaaccacttattgactacccgactaactaacaagcaatcaatcgttgcgaggtcatctagagcataacgttgcgaggtcatctagagcataacgttaacactaacgtctagccaacctcacatctaacgcctagaaatgaaacgattataactttccggcatcccctggataaccttgcaatcataacctttaccaaaatagtttagcatttgctccacacggacaaaatgcaacctcctaggcgtctctcacaacattgtataactacttaatcaagtagttaaaactaaaagcaatccttcatagatctattcctatattctacacttagctaatagaaccaatctaaatgctaaactatgcaacctaatcaatcaacaattctagatctatgaacggaaagtaaacaaacaacaatcaatctggttcacacgagttctatgaactacatataacacatgcaacacacataacctagactcaccttggcttggatgaacaggaaaattctacccttgaccgcctatatctcgatccgacttaagctttttccaatgcgtactaacgatggatctaagccgcagaccgaaaataaaacttagaaaaatattctaaaaagaataaaagagtaagggcggaactacttacctattacccgagtaactcgactctcgactacctgaccaatgctcccgacgaccacgacttctccgagaagcttcacgacctaactagtctaaatgtgattttttcgtggtttagagagcaaatggcgagatgggctatttatacgggtgggaaaacatggggagcaagcaacggaagcacgaggtggtggattaacattattcaaaaccttatccttatctgatttcaagcttatccttctctaaactcatctctatccactcgtgatcctatccttatccgaagcgtgtgccaacacacgcacaacacacgccaagcttgtgacagagctacttccaccacaagcacctccatgacatggccgcaaaatcccgcaaacacctatacagccaaatcggaaccatacaagtttatgattaattttacgaccaaaattcaagtaaggtgacatg

SEQ ID NO: 31128 - DNA, 1670 bp, Arabidopsis thaliana columbia
  unsure (1)..(1670): unsure at all n locations
tctgctacaacaacagccggcaaagctagaactccaccatcaaactccatctccggtttcagctactcgtcgtggtggaacaggagcaatgtcgacttcgccttctattgctaaggcaatcacaacaagattaatcgaagaacaaacacgattttaccaatgagagaattagggatttggtttgagagaattagggattgagttttcgatttgggcattttgatttgtttcgttaggtttgaaacgacggcgttttggtcttaacagaattcattaacgttctcttaacggggttaatcagcgagttaacgtctcgggattttggcgaggtcaacattttgtttctgttaaaatggctggtcaacgtatttttcatatttattttggccgacgtcagagttcacgtataaaatggccactttttgaaagttcgtatataaaacaacatttttcccaattatatttttccattttatttttttctttcccttgaaggcagatattatcttgtttgttaatactattaatgtcattaattagaacatcaaagtcgttgtagtatagtggtaagtattcccgcctgtcacgcgggtgacccgggttcgatccccggcaacgacgccaaattgagacaagggttttgtgtgtcaattccctaaatgcatcttatgtcattgcagcatttaaggtgtcaatccaaatgggtgtaattgctaacaatcaggatatgatcagagaatactaagtcaagccaagtttagatgacttggattatctaacaacctaagtgatcatgcaagaatgaaactagactaagcagaagataaagaactcaaataacaagagcagaaatgaaactaaagaccaggaactgtcaaatgcaagaacaagaaagtaaaccaagcacaaaggtaagcactcggtcgagcatgaaactaaacaggtcgagtacaatactaaaaacaccaattttgcacgagacgaacagagtactaaaaacacgagttttgcacgataaaacgaaacagagctcttaagaatggggtaattggtcttagtggactcctcaatccagtagctaactaacaaactcaatcaagttatccctagacaatagattcaaaaccaaatcaatccactttcgtgacaatgattctcataattttagaacttcctaatctcaatttccattgatgaaacataataaagcaggctttaaacaccaatctattaaagtcaataagcagtctaaacatccaatgtcttgggctagaatctacaaatctctgaaattagttggtttagacatttcatcaaacaccttttgggtggagaaagtctgaaatcaattttcaattgatctgaaagaaaatagcattaagaactcctaaaacagaagggaatcatgcatttataaacttagctagctaaagagaagaggaatccacctaaacctaacccatcctcaagaactctgaagaacactactcatgaactatgaagaacatcatacaaaacccagaaaaatcataaaacccagaaatcattataaacttagtatgcaatagatctaaacaagataaacaactttgtagaagaaaataattgcaaaaacttaaagattcaacaggaaattaaaggaacatatttagggtttttcaccnaaagag

SEQ ID NO: 31129 - DNA, 454 bp, Arabidopsis thaliana columbia
ctctccaatgtgtatgcttgaaaaatataccgaggaacccatagaattgtaaagaatgttcgctttctatggacctactacggatgtagacgactttgacatatacataatacataaaaccattttttgtctttaaaccaaattacaatataatcaagttgattaatcaaaataattacaacgttatcatgaatcttcacatgcaagatcctacacacacacttagacgacaagaagtcaccgtggaacaagcgcgtcacgttcatcattcacatttacttaatcccacttaaaaaggcaaacaacaacatgtcttctctaacataaacaacagaacataacaaagcccaaacaatcttagtaataatcccaaaaaccagaaaaaaaggagctttgcttttgtaggaattaatggattcagtgaactccttcaaaggatatggaaaagtagacg

SEQ ID NO: 31130 - DNA, 513 bp, Arabidopsis thaliana columbia
agacttcttgaagaaggtaggtattaacaaatccgatgtaccaaatggtccacatttggagaattgtgaggagaaggctcgagttagggagcgtttggatacacgtttggcgaactggacacttcctccttgggtatgcttcatctttctcatgttctttgtcatcaagcaattagtatggtgaatgaacaatcaaaagcttgtgttttagatcagtggaggagatgaagagaattatccgttaacgaggagagtgcaaagagatatatggattcatcagcatcctttggattgcggaaacaagagtctcaagttccttgtagctgattgggaaacacttcctggttttggaataggagctcagatagctggaatgactggtctactcgcgagtactttaaatgaaaaccgagtgcttgttgcaaattactacgaccgagcagatcatgatggttgccaaggtgcatgaaggctttagtcccttgagtcttcactctaacatatagcggcaac

SEQ ID NO: 31131 - DNA, 474 bp, Arabidopsis thaliana columbia
cttcttaatggttgtaaagtgaagctaaaacgaggcgaaactaactacgaatgttagcctttgatatgtttgtgctgtcactttctttcctcttcaagatatcatgtggtagtgtttgaaaaacttgtttgttattcaggtggtggcatgtagttttgtatacggagcaagggcaaagactcataataacaataacaagaccatcagacaagaaaaggaaccaaatgaagaggacaacaatagtgaaatggagaccacaccgggtagtgcagctgaaccagcagcatctgcgggtcagcagacgccacagaacttctcttctcagggaataagggggtggccggttcaggctcaggctctggcagatcacttgacatttgcagaaacccactcactgattttgatttgactcgtggatgatatcactattagtctttgaagcagcagcatacaaaatgtgattgctgtacatat

SEQ ID NO: 31132 - DNA, 531 bp, Arabidopsis thaliana columbia
acttcttactattaagtgtttttttttgtttgtttcctcttcaattatcttttgaggtgatttcatttcacattctaattgttgctttcctttggatttaacagaataggagaattacacggagcgaactaatccaacgagtcagaagcataaccgggagacaagttactagttcacatcatcaaagcttgtggacataaagtacaacactaaatctccattgcagatcactttggcgtttttgtttcaaggacacaatcaccatggttgtatttgtctgtttaccaactccaaaatgatcaggactggtagagtccctttctattgtttcccatgatagtgatgaaaaaaaactgttcattagattatttaagatcgattagattagggtcttagcaacattattaatgaagagaacattaacaagttatcatcttgtttttcttttcactcttcttctttcaaaaacatttgtattattgtctggctttgagctgaagaaaatttctggtggaactgagtttacaatag

SEQ ID NO: 31133 - DNA, 533 bp, Arabidopsis thaliana columbia
aataacgtaagcaaaatgcgaaagaacactaaatttcggcgccacactaatgacaagaagtgagaataaaaggtcggtaagagataagagtctttccaaagggtggttaaggaatttagacatttaaatttcatgattaattacgaaacatgaagtttggcaattgtcacaacaaactcttctttgctccacgattgagtcaagtattaagtattcgtgcgaaagaagttcttttagaggtgttttcggtaatctacaaaatcctctagttgtttagcacttttccttttggaacgaattagtacattagcataagtcaaatacttcactagaacacgtaatacctatactagtaagacattttattgactttattgtttagttagattatggttataggaaaattcaagattttagacctctagataagaaaatggtccctaaacagaatcaaaattgcaaagattaaaacgctttagtatcaaaatgcaggggtgatacagtgaaattaccagaagtatggggtggtacgt

SEQ ID NO: 31134 - DNA, 538 bp, Arabidopsis thaliana columbia
caaaagggtaacacaaaagtcaatagaactgatcaataaagatgtataaatgcatgggtaaaatagtaaacttaccgactaatttctgtaaataacgcttacccgttaccaccaatcgtggtcctcttctgctcgtacacactctttttatataatctctttctttcacataaagagaaagcggaataaaaagtgttcaagagctcataacatcaagaaaaagtatatacattcttctgtatatctctgagaaatattatgattgttgtctgacattgaactttttaaaaagaaaaaaatcataaacttctctctgttttgccagaatcttatattataaagtatattctattcattacagatctgctcttggatttcggattctcctgcaaacgtaaagacgaaggtgttttatctcttcactgcaaaaaaaactcttgaattttatggttttctatagagctgaaatagtaaacgagtcttgacaaaaaaaaaagttcgttttcttttctaatgtttttgtggtagcggaatttta

SEQ ID NO: 31135 - DNA, 399 bp, Arabidopsis thaliana columbia
aggctacggccctagcaaccgcaaaggtgacgtgctgagttatcaaatcttcattgcgctgacggtcaagctccatgagctggtacgagcgtcgcttgaggtgaactgtgccgtgttgtcggtcaccttgaggtcgccgccagtttcaaaggcttcgtagaccggaagcccacgatcatcatcgggtgccttttgagtggaagacacggtgaagctgagaaagtaagtgccatcagcggatttgtaaggtgttgccgtgaacgtgaaccctgtgtccatttcgcccgtctggctcacatcctcggtctcagggtgctttaacgttttcgagtaatatccggttgcaccatcgggtatatcgtctctgtagacggccacatcattgccgttaaaagcaag

SEQ ID NO: 31136 - DNA, 490 bp, Arabidopsis thaliana columbia
agtaacgtccgcagcaataatgttttgcaaaaaggacaaaataatcaactcattctaaaatgtggtcgaatgtcttaaattgttatttttttattttatttttagaaaagttttagtaacttgtccaatgttctcattaaaggggccgattctgagagaaacaaattttcatatggcccaaaagaagatatgctactttagaaaccttccaattgatccaatgtggcaaataccatataccataggattggaccttgagctgaaccatccaaattgccaaaaccttcccaaggaccacaacaatcctcctgcaattaaaggggctaatggactcttctccggttagatcattccaataaacattttttttttttaaaccacttttggtcaatcaagcttcttattatcacgtgtacctagtattactacctaattcagaattagttcctcgaatgtattattgcactatatgtttgagtttattttatag

SEQ ID NO: 31137 - DNA, 599 bp, Arabidopsis thaliana columbia
cgtacacgtggaaaattccaacggtgctgatttctggtcacctgctactatgggtcacactacgtcaccgtcgttacctcaaggattttaattaaacggtcgtaggctgatatatattagtagtattttagtagccttttttcttgggttttgtttttggctgaagaactattactagtaaatgttacacccagacatttttttgggattatctgggtggtataaaaaggttggaatcttttgtgtttgtaaaattagattgtctaagttttcttaaagtttctttgatgtcactgtcacagttgcgacgagtagtgatggtacttactgaaaggctaagcttattcacgctcttaaagtgttgtaatgccaccaagtcaccaacccacataactcactcactcacttgagctaaagacgtgcaaaacgttttttctttgttttccacatttcacaagcgcggtacaaagaaagcaagaatactataatattattagccagattattacatttaaaatagattgaacttttgtgtttgaaatttttctggtcaattttctgaatgttctcagatgcagcacgtcgacagtggactgaga

SEQ ID NO: 31138 - DNA, 509 bp, Arabidopsis thaliana columbia
  unsure (1)..(509): unsure at all n locations
tggataggattgaatgagnattttgatttttgtttatagtaaaactacagagttctagtaaaagttatatgctgctccatttgattggttcttaaattttactaaggcttcattttttccaatctgcagctcagaggatgcttctggcttcttcgtttcactcctctttggtctgggtccattgcttgggggagtatttctggttgcatcggcagtcaccttccgtctccagcacgcccttctcatgggagttgcctcaggcattgcttttgtccttggtctctggcgcccacttcaactgctgctatccgcaaaaatgggattaatccctctggttagtctacttgcaattggagctggactgagccatttcactagctcaaccatcctgaatgtaactggtcggaaaaagtcccgggctggcagtttaataaacccagtaaccaattttccaaccagtgtgataaactccaatcattattagcgtgtggagcggttgggttcatgca

SEQ ID NO: 31139 - DNA, 469 bp, Arabidopsis thaliana columbia
ttttttttttgttgctcttttgactcttttttttttttagtaacttagtggaaattagtatttatcttttgtttggggaaaaagaatcttcttacaaaacgacaccgttggaaaagcaagtctgagagaagcagaggatatatacaagtcagtctagtctactactacatgttacaattgaaagggaaagctaatttttcaaaaaggataacacttttgggtgaagatttttttttcatttcttgtattgataggtttgcctaaaatcagacatggaattttagaaccatgattctttaactctaacgtatcaatttaatcaaaattaaattcttcctctattgatattgatataatgtgacttaaatgggattctttttgtatgaaaggttggttggctggtaataaactaataataataagtcacaagagttttgaacttgttataaagaaaaagacaaaaatattt

SEQ ID NO: 31140 - DNA, 364 bp, Arabidopsis thaliana columbia
aggatcccctctatgttttcgagataccatttaagacgaaaatatcagtaatatatggtaatactagtattattagtcaaatgatatgattcatatcctaccatacgaatatgataccatttgatacagataatcattaatatatggtaatactagtttttattacaatccaaaggttacagaaacaaaatcagaggtatttaattaggatctttaatcatgacacgggttaggaatgattctatcacttatacatcctgtggatctccatatcatttgaaagcttattcattcataagaaaaggatggtgaaacgagcttccttttgtctcctctcatgtctcattatattgattttgagttc

SEQ ID NO: 31141 - DNA, 243 bp, Arabidopsis thaliana
tggatatcatatcataataattaataaatcatcatcatcatcagtatcattatgaacatcatcatcatatcatgccttattgttatcatcataactttacttctccctctgaccattggggtcctacgtatctcaaaaataatgcagcttcgctttaatattagtactcttaaagcataatttgtagtactgtatatcaaaccatataattgtacttcccattttaacatggaattatatcct

SEQ ID NO: 31142 - DNA, 516 bp, Arabidopsis thaliana columbia
ttcttttgccgattgacatgttttaagatatcatgcttacgcttgttccttttcaggttttgtttcacatctttgcgcttttaattaatataactatgtcacttaaatttggtgtgatttggcaaggtcgccatgctttcgatttctctttacttgcttgtctttctcacatttcttcttcctcttttcataattttttcttgtgggtgttatcagttatgtatatattatagttaacttagtaaatttttatgaaatgtatatttgataattttcttataggattataggatatagatctaatatagatcttagctaatacatctaatttataaaaaaaacaggagtcctatttgaatccaccgattacacatggtaaaaaggctccggttttaaagcactacatataataaataatatatgaactgatatgtacatttatgtgtcggatttcttacgttatatagaatcgatatattctaatattttatgtatgatatgatcgacaggcagaca

SEQ ID NO: 31143 - DNA, 749 bp, Arabidopsis thaliana columbia
atgattctcctcagttttgttaaatttggtttgacttggatcatcaaagtgtgtcttttactcaattggttgaatttttggatttttggattgaagatgaaactgactcaagaacgagattcactggcaatcactgcgaagaaactcggtcgtgattatgcaaaggttctttcttttcaaatgttatggtattgatttttgttgaaatttaatcatttgatttcaagctcaagctctagtgttttgcttgtagttggaagcattcaagagacaattgatgcagtcattgaatgatgataatccatctgtatgttactcaacactatacttcttttgacatccttttatatatgaaacaaaacaaaatcagatgttacatactctcctcttgtttttacagcaaactgagactgctgatgtcagaatggttcctcgaggcaaaggtattgtaacatcatctcaagtattctgagcttattggtcttcattgtctttcctttttctttatgtgttagtctcttcaagagttgcttgttctgatgttatttactctgtatgcattgtagatgagaattcaaatggatcctactcaaacaatgaaggtattgattgctgagttatccaataatttagtttgtagcaacaaaagaacatacgttagtccagaagacttgttgatgttttcaatataatgaagaacaaaaaaaaacattttcaatgtgtaatggttcatgaaacatggttaagtg

SEQ ID NO: 31144 - DNA, 484 bp, Arabidopsis thaliana columbia
gatcaaaattacttctaccatcatttagttagcttttaatattttagaaacaattgaatttttgacccaaaaaaagaaacaatggaaataactgataaagtcttcttaaaagtataggaaattttgccaagtatatagtattaattttggaaacaaacacgaaaatggaatagttttgagagttgatacttgtcatttgtggaattattactattactttttaatgtaaaatatttcgaaaataaacttttaacaaaagtaaaatccgaaaatacttagtttccaagtttatagaaatcaagcccagcccatttggggtttttaattttgtgttttttttttttttaaaaaaaaaaaaaaaaaaaaaatcaaacccaaaacgattccgtttagtaggctaaaattcaagtaagtcccggcccaataaggcaactaacgcccaaaaaagaaaaggttttgtcgatgtgacggtagcaaacggcca

SEQ ID NO: 31145 - DNA, 408 bp, Arabidopsis thaliana columbia
tggaatcatcgaatggactcgaatggaataaccattgaacggaatagaatggaatcatcatcggatggaaacgaatggaatcatcatcgaatggaaatgaaaggagtcatcatctaatggaattgcatggaatcatcataaaatggaatcgaatggaatcatcatcaaatggaatcaaatggaagcattgaacggaattgaatggaatcgtcatcgaatgaattgaatgcaatcatccaatggtctcgaatggaatcatcttcaaatggaatggaatggaatcatcgcagagaatcgaatggaattatcatcgaatggaatcgaatggtatcaacaccaaacggaaagaaacggaattatcgaatggaatcgaagagaatcatcgaatggacccgaatggaatcatcc

SEQ ID NO: 31146 - DNA, 565 bp, Arabidopsis thaliana columbia
atttttaaatatttcgatccctaaaacgacaaaagtagattttggatagaaggaaaaataattatcaaaaatattactccaagactagtgaataaaatggtacggtgttactgctatgattgtgaggtgtgaagatactatcttttgtcaactacgattaataattttaagaaacgtgaaatatgtaaacatgggtgccgatctattaacatatatatcgcccctgtgcatatatatatcgcttagttagtggagaaatttgattgtaaggcaaccaaaacacataaattgttataaactatcactaaggtcattcatactttacaaaaataagaatccatagcgaaaagaaaagctaataagagactttgtaaccatcactcaatggatgagtggagtgggacgagagtcgcaagcaaaaaacaagatattcattatgtttactgaatttgtaacaagtaaagagcccacaatcatcaaattcacaactactaataacgcgtaataatcaggtaacgatctatttatctgggacttgtgacactcttttgtttcctgcgggaga

SEQ ID NO: 31147 - DNA, 561 bp, Arabidopsis thaliana columbia
tattttcttggttttcaaaatgaaatttgatttatgatgataatttaaacttaaaagatttaaaaaatcctagtttgtcaatgatgtaattttgagcaagtaattctctgatgcaatatgcagttggaaatggtatatttagataagtttgtttaactatcaaccataaaccttttctaatagaaatgtatatttcttacctgcaaataaaacacaaagtccaatcatgacccaactatgaaatgggtttgatcctttatttccttgtcaatcaaataaaaagctagataacaagttattatcagcatatagaaacaccaacaaaatagaaatcatccactttttttctatttatcttaagaagatgacaaaatagtttggtgccgtagctaaatggtcagacccatacagaataggacatgccattttcaggctcaaaagaacagaaaggacaactaaacagagtctaaaaccatggcgacgatcgagttgccaaagaagaaagagagaatgttaagttatgataaatctaattaattagcactgaagctgatattttta

SEQ ID NO: 31148 - DNA, 510 bp, Arabidopsis thaliana columbia
gcatcttgatagatttgtctcagaggaagatggttataagtatagaatccaagatggttggtcctcaccgtctttatctttgagagattcttggtataccaaagaagcaaaaggtgatttccggagagatgataccagagacttcagaacacctgaagcatatgacagccagaataaccattttcataaggctgcaccgagagatggctggacgcagaatcttggtcgtagccataatgtgagcgtaaaagatagactacagtatgatgctgattgggttggtcctgatagaggaagatataatatggcagatgacatgcaatgttcaatgagagaagtttctaattctgagcatccatcatatactgatgagatatttgtccgcgacataagagtaccgacacataatcggatggcgaccaaacaaaggtttggatatttacagagccatattcatgaaaatgatgaaagacatcacagatccaagaagctgagaggagatgggcatgc

SEQ ID NO: 31149 - DNA, 523 bp, Arabidopsis thaliana columbia
gtacttttcatgtctacttcttatctttgtagatagaaaattacgaatatcgaaataaccatcttgaatatacacgtatgagtaacgagcccatatatttatgttcgtatgtttatgggcctaatgagattaagagaatggattggcctacgacgactctcatctcccgaagaatctgtaatcttttgattttcttcgtcaaattaaaccacaaaaacctctccatcgattcggataatccacaacactctgcgatgaaacccgacccgaccagacgcagaaacagagccttatcttcttcttctccatcaaagacccgacccgaactatcttccgggtctcccaaccggaataccggtgaagcccgtggtggaaaggtgaaaacttcggccactttactcgaccgggaggagatgggtctttttcccgggtcgggttacggtgacccgaatccagaacctaggagctttccttatagtgtgaagcagcaatgttgggataagcagagaagattaaggaagag

SEQ ID NO: 31150 - DNA, 550 bp, Arabidopsis thaliana columbia
taatatacctttgatttaagcaatcttgttgaataggtttctctggttcttatggagaaaaacttaagatttttgtaatccatcatacattttggtatagttttgatcttatatgtattgtgctttgacacaagctaactattttcttgtttcacagagcgggatcaattctaaagcagccatgagtctggctcgctaaagaagcctatcgatgtggatcgtccaatggagagagagcatgtgacatgaaaccttcgttgtattgggccaatatcttttgtaattgggctgactaaaaatcatgataaagtccgagggagactataaataatttactcattgttcctgccgacattacacgtggcgaaagagtagttatatgccagagagactcctctaaaatggggtcacgtgtagcctgtatcgactattcaataatgccactctcgctcggtgacaccgtgtctcttactttatcattagtctttcaaattaactatatagtccttcaacatgtagtaattcatctacttataaattgctgttacca

SEQ ID NO: 31151 - DNA, 484 bp, Arabidopsis thaliana columbia
cggacggtcctggtcgggcgtgaaaacattggtcgtaatccaaccaagttcccggctcacatagtctctaaactaaataatctccaatcatatcttcaaattatggcaactaaacattttagatttaacccgcagagatatactaaatattttagattttcagcacaataggtttcctaatttacattaaagagtttattgcaaattacattttttcataaataaaataaaatacataaattcaacattcactccaactaaaatatatggaaatgtctcataactataagatgttatccttatttgattaagtatatttgtatcatattctttgtttgtgagaatataaaaatttctgaagatatcaagtatttgctctacaccaaaaccctacgactttctcaaaacactacaaatacaacattatttgcaacatctaatcttaccaagcacgataaaaggtcaatacttgctccattgtgtt

SEQ ID NO: 31152 - DNA, 553 bp, Arabidopsis thaliana columbia
tgcattttatggtatgggccgaatagacatcaaataaattcagagtaaacaatgtgggaaaacaaaatctctactgtatcaatgttcactgtgaggaatgttttggtagccactgttcattctcctctaaagttgttcgaaggacaaggtggagataaaggtttcggttcttccaaactttatcttcgcttagctcttacaataaaaagctagaccaaattctcagaatatcgaatgcagatctcgcatccacaaaaaccatagttgttgttgctaacatagtacaaattataccaaaccaaccatatgaaaaacgttacgaaattagtaagaatacaccaaacattcattcaaaagtaaagaaccaaccctaagggtttagattacttagcttcgatatacaaaatgagaaacacgaatgacaagagagctttcattacttacggtgtttcagattctttttccgtttaagagttttgatctcatgtgtcatgtgagcaatcacttctctcaatgtagctactcttccttgttcggaatccacagtgttggg

SEQ ID NO: 31153 - DNA, 612 bp, Arabidopsis thaliana columbia
tccaggtgtagttattttgtaggatttgcgttggaaccgttcctcgaatacctgactagtttgcttgtcgtaggacacaccatgtcgaaccaccatcgttacttccttcaagaatcctggtggaggcaacaaacagtgttaaagcattgattgtgtatgtctagacttgaataataggaatcagacattaccaatctttggggtctctctctggggcatcattagcagacatgagttcgtatgctatgagttggtgcatctggttgtagagtgttttgtacacgatccaacagcctgtgcgaggagagattcgcattataacatgtaacaaatatcatagttttggatcaggctatatttcataccttttgcaccatttggttcttcccatttggactcttggattccatcaaaagctgcggttgcctgaggcagtgagtgaggcatgatatttaggaataaccaaaacaagtttgattaaatggtaagatgagacttgtaataggatactacttacaatgccagaaggaagctcttcaccacttgcgaggacagaaccagagcataccctgttctgtttacaagtggaaagacagtgaactttgtttaagt

SEQ ID NO: 31154 - DNA, 498 bp, Arabidopsis thaliana columbia
tttctgtatattatttgaaggtcatattcactaccttaagacatcagaaaccttagtatatattatcttggtactgacttctgacttctaagttctgatgagttttggaaattaaggcaacaaaaatgattttccaacatttgaggttttgggcttaataggccacaaactaattttgggtaaccccatctttagaacctaatgttaaatggaactacatgcattttttttattaaagaggaaaatatgttactaaattcaatcgatcatgagatcaaagctttttttgtgtgtggggaaaaacagagtatattattgcacaatcagacaaattttatctgatggcaaataattgtatcacatatcagacaccttaaatctcttctccaaactcaaaagaactagacaatagaattaatcatacagttattagatcttcttctaagacttaaatcgaagttctcgtaccactcttgtgggagtctaaggaatgagatt

SEQ ID NO: 31155 - DNA, 311 bp, Arabidopsis thaliana columbia
tgtatatgtatatatatacatataatgatttgcagcttgattagttggtacggggagcgagcaataattatgtttggatgggaatgggatactaaaacaaaagttgttaattaaattaatttaaaaaatagacatctacttatctcgatgaaactggtggagaagagcggtaatgagagagaccatacttttgattagaccaaattggcatccttcttgtcattaagaggggtacatagtatcatcatcgaccgtaagtaattagagtctacgcaataacgatagaagactctgtcctccccatttgtggt

SEQ ID NO: 31156 - DNA, 300 bp, Arabidopsis thaliana columbia
tgcacgtttataaatttattcatgttcaaaacaaactacttcaacaatcaattcagcatgcagaaacaagtaggattactatggacagtagttcttatagccaagcaaaaacaagcatagaaaagactgatggagatacaatcattggacgaaaatgttgcatcaatatatattagttctaatacgaggataatattttccaaatgggacatcaaagcattatccatctctagcttaatacaacaagcaaggagatagcaacccaacccagttcatcagtcttaatacacaggcactact

SEQ ID NO: 31157 - DNA, 472 bp, Arabidopsis thaliana columbia
cacagattctatcatcttcttagtgttttgatcaatctctcccaatggatttcttctatagggagattgttccgcctttcttgaattactccggcttagcgagggaacattattccccgctctagccggagattttgacctcggagacgccgctattctgcaagcgtctccgatgtttctcttaaccgtaatccgttttactaacggctctacattgttactcttatccgttgcaggaatcgtaacaaactttcccggtctattattactcgaatttaccgaactgccacacgaatcagcgttacgaatctcagaacgtttcgccggagatctactcactctcctactaccaccgccgccaccgccgacatttcctctttctctgcttcccgatctttctctttctctactcggagttcgtcttctccgttcacgaggcgaaccatgcactctctctactccacggtgacga

SEQ ID NO: 31158 - DNA, 114 bp, Arabidopsis thaliana columbia
cctgtggcttggcggcggtcacctcgccgtcgccgcggtgacaactcgaaccaagcttcatcctctgatcgccctcgtcggaggcgcgctgctggggctctgcggcttgggagc

SEQ ID NO: 31159 - DNA, 400 bp, Arabidopsis thaliana columbia
atgaaattgaccaaacatgttacatcttcgactttatcctaatttaaaaaaaaaaaaaaaacagaaaccaaaatgaaatgggttaaaatttataataacaaagataatgtcatttttttatttggccgcaaaaagtgtcattttcttatgtgaaagcatatatatatataatttttttttctagatcattaaaatgggcatgttcattgcactctatttattttcgatacgtcctcattcttttcatttaaaaaataaatatattaatgcttttgaaccgacagttttttacatgacattactaaaactgcaaaagtaagttacagtcaaatatttgtttagccatactatactattagaccatgtttatttgatttaaaccattgagaatttttggatg

SEQ ID NO: 31160 - DNA, 568 bp, Arabidopsis thaliana columbia
taattttgtttcctcttaccaaaaaaataagttcttgttgatctaataagaacttacacaatttcaaccgttggcttggagtagaatgcaacgatggctatagagaagacagagagagaaagagttttttggtgtatttttgttgagcaatgtttatatttggagcatgaagaaatggtcatgtggtgatcctacaatcttgtaagtctcactttcaaatcaaaattgtctaaatatatacgtattctacaatgcacatacatttgtaggctcaacacctaaatacatggcaactaatttgacttataggagactaaaaagaggattttaacaaaaactataaaaggagatatacctagtactcggaggaatcaactcgtgtagttgggctattattatcagtttccttagcccaatgtggcctcgtgaggtttgcagttcccaatagtgtgattgaaaatattcatttctagagatgaccttaaatatctcttggtttactctaattacgttagaaggtttactttttgtttgatggtcggttggttatttttgaaggcttagaaaa

SEQ ID NO: 31161 - DNA, 655 bp, Arabidopsis thaliana columbia
tagcacatggttgggaacgcacgtggggccatagattaacatcatgacataatttttgattagtttaatactctactatctatggtacgtaagtgataaaatgataagctaattattttaaaacgttgcattttatattaatcaaacgacctcattattgggtaaacatgataggtttgttggtcggttgacattggatccccgtatcctattcgtttcttaccaatatcatgatgatgatatgacttaactttatttggcacctacctctgtaaagtccctcttatcaaatctaaaaaccgaggttgatcacattacctttttaaaatgtcaaaaaatgtgatatatggtatggttgaaaagaaatctatagacataagtcacagaagtaacatgttatatttgaaagagactaaggcgttggtttaactatatcccacttataaagttataacaaatcaggtcacatatattataaggatgtaaattacattcttcaatggtttaggacttaggagcttagaaagtctacactaaattagttaaaataatatgcagctggcatacaaaatttacaaaataatgatgaacgaataaagcattgattatggacttaccaacatataatgtttacacaaatgacaaaactatatat

SEQ ID NO: 31162 - DNA, 802 bp, Arabidopsis thaliana columbia
caactctgaactaaaccgattttttttttagttcggttagtttataccgaataagtccaaaatcaagataatgggtcaaaacaaaaattatagaatgggcgaagataaacaaaattttataattacaaaccaataattgggccaaaacgaaaaacaaacttaaacgcaaaataactaaaaatccaaacctattaaaaattagggttgatggtatcttggtgccgctaccctcttcataatcagcagatctacgtctgtgacggtgacggtgatagcgagggatgacgatatctccgtaacgaaatatgccccgacgtgctaccatagtgaaaaccacatgcagatagagagaattgactaaatagccatggatgaggatcaaaaggaaacggagaagaagctaaaaagattagatctaatgtttttatctttatatttatagtatctattaaccgagaaaactgatcggttatgtctgccgaaccgagaaccgaacttcaattataatttcgccgatcggtttagccttcccttcatagtcggttatcagaaccaaaaaaacggtttgttcagttcggtcattgggttaatccgaaatcccaggcctagtttttgctggattgtacagtaataatctgtaacagatgataatctattctagagtgtgcacaaatttacctaaatcaagttgcttttgaaatctaaatatttatagctaaagttatctctgttttgtgtccttagaagcagagattggaagagcttagagatttgacggtcgagctaactttgagaagataga

SEQ ID NO: 31163 - DNA, 379 bp, Arabidopsis thaliana columbia
cccccaaattttaaatgcaaagaaactcgtgaaacagaattcgttagaaagtagtagtatatagatgtacattacatcatatatatcaattaggtcgactacgatacatagttttgcagcaatatctagcatatgattttagatcttatcaacaaaacattgctttcatatatatccaaaattatactcctgattttgtcatatacgtatagtgacgttttttgatagcatagtgctgtcatattacatcaatagttgatatgacacaagtctatggtccaaccatagttatttacgtatgccaaaaatgtttaccattttaatttgataaaaggttcatttgccaaaaatgtttgggttatagaggtttgccgaaatg

SEQ ID NO: 31164 - DNA, 993 bp, Arabidopsis thaliana columbia
aatcgaaaaaaaaaacaatgtgagaaaccattatcatttagaaacgtcatcgtaatcggtggtgacttttctccgttcatggctgtggatattattagagaaacgtagagatcgagtaaacgcaaatcctaaatctagttgaactcaaatcacattaaatctcaaagcccaataacggcccacttacaaaacggtagcgtaatcactcggactcttaagttgaggaagatatgagtttgatagagctcattaggcctgggatttcggattaaaccgaacaaaccgaaccgaacaaacccgattttttcggttccgattaccgactatgaagggaaggctaaaccgatcggcaaaattataattggagttcggttctcggtttggttcggttcggcagacataaccgatcggttttctcggttaatagatactacctataaaaagataaaaaaaacctagatctaatcttcatagcttcttgttctccatctcgtttcttcttttctctttcaaccttcttcttgcaccttcgttattttcataactcttccttctccatcccttttcttttgttctcttcttcttactccgcctcgacatcgatccatgccagtgttattctagagagaattaaaacgtagtagcctaatcatcctcatccatggctattttaagtcaattctctccattgcatgtggtgttgactatggtagcacgttaggggcagattttgttacggagatattctcatccctcgccattgtcgtcaccgtctccttcgcagatccgctggagggatagaagagggtatcggcggcaagataccatgaatcctaattgttaatgggcttaaatttatgtattttgggctgaagtttactttcgtcatggcccctttactaattctgtaactgtaatacatttgtttatcttggcccattctacaattttattgacccaatatcgtgtttttgggattactcggtttgaatt

SEQ ID NO: 31165 - DNA, 576 bp, Arabidopsis thaliana columbia
atcgacgttttcagccgtacgctctgtttgcggaagatccgaagatctatttataaaaattacgagagaataatgataaatacaaagaaatgtgggggttatttcataattatacgaacgtacaaggctaatttagtgaaataaatgtggataagagtgagtgaaactgaagaagagcctgtccgtgtaatgaaaatccacttgacgacctaaacaacaacaacgactccggcgagtgtatgtatctttcactttctcactaaccaaccagacgacaaaagaaaattattcatcttagctaagctcgattagtttctggcggaaacggttttgtggataattgttagcatattccgatcttgccctcccccgagagagagagtccaatcaatcaatcaatcaatcatctcttacgaagctacgtgtgacctaacattctccagattgttgtttatagcctcttcttagatttacgatttgtgagcttgtgaagatttcttggtagaattagagttctctgtttcgagatcgagatgaataataataataataatagaggaagatttcaccggggat

SEQ ID NO: 31166 - DNA, 493 bp, Arabidopsis thaliana columbia
caaactcttagaggccctacatggtatcacttgtctatgtctcaatgatatgaaatgaaagcaaactctaaggtcctacatggtaactctcactagtctatgatatgattagacttcttctttttaaaaccttttacaacataacatgactttttctctatggtaggtaaacatactttcgggggacacaaaaagctcttcatcaccgcagattgtgttttgacacaaagcccattttatatgcgaggccggtttcttccttcttcttcttctctttctcaggtcccccacttatcaactttcttagacgttttggtcggttttatgataaaatactttaatataggcccaactactgtataaattggtctccctatcaaatcattttgtaatcaacaagtctatattctacaagtttaaatatgtgtgttgaaactattttataaattaccacgagttgtactattttgtgtgttttaactcaattgtattt

SEQ ID NO: 31167 - DNA, 599 bp, Arabidopsis thaliana columbia
cttttttttgccattgatatttctctatcaactttcttaattatttttttaattattagttccaaattgtggttgaaacttagtggtttgttttaaaagtgttgttgtcatattagaatcctaatttatagtttaaaatgtatgtgtataaactaaatgatagaataaacatgcaagttttttttttgaaccctatatctaattttaagaagacaagtacaaaacagaaataaaacttctcaaattctaacacatttatctaagaacgtgaactaaatcaagtttaacaaataaaaacatttgctcctgtttatcgtattaagaaagtttgcattcttatttttgttttctttgttttaacagtagttttgtgtgtgctctagaaagtcaatcaagtgtttcaaatatagaattttataatccttctaacgttatagcaaatacctatgtgtacagaatatatatatatgacttatcgtcttcgacttctttgtatacagacatttataatcttttagtgggttcaatatagataattgctgatcggagaattagtatattctcgtagttatcacgatccatgatgatgatgatgatga

SEQ ID NO: 31168 - DNA, 1213 bp, Arabidopsis thaliana columbia
gctgaaaacgccacttctctgatcatgttcaagatagtccttcctttgtgaataagcaccttgatgaagctggcaatcctcttttgaaaataatgattctgttctatgctgaggcgcgtgatgcatatcactttcctcgatagatctacttatttcggaaggtataacccagtttgctgacccaccaactaaaccaagaccgttttggcctagaggactcttccacatttgccagcttccatcattagcttgtttttcatccgcagcccgtgatctagacaagggagactcaattggagatggcttgttggcttcacaagaaggtgtattcttcatcgcatggtattttacctgtcctatgccagtttcatacccagcagctcttaaatcaagtgattctgaaacaggtcccagtagagatatcggatccggaacataacatggatcttcaaaacgctcatcttcaccgggttgaggaaaaacaaattctgttggaggtgagaaacctaaactactggtagtggatccactagagtacaccggtatggtaaatggcgatgggagcccaaaactgatggaattgtcgaaggttcgtattgaggaaacttgactgggaacctgtgagatctgaacatttggctggggattcgtgctaggtctacttatagtattaacatttgaggaaacaggagcaggagttgaacgagcaaacagttggtgccatgattttctaggttctctactcggttttggctcagaaacaacctgaggaaacagtatcaaatattcagttttaattgacaaaaaaaagtttcaagacgaaaatgaacttttgaaaccatttataacagaaaacatatgagtgaaggtgagatttatatctttaagcacgctagtttactcaaaaccatagaacaaacagatgagaaattttggaaagggtacttactggattattagtgttcctctcctcttcattagggacagatttcatagccacgaagtcaggaggattaatatgactagaatgcgcataggtatgagaattatctgcagaaccagttggcttgttttctcttgcaaatgtagcataagtattaacacctctcccaaatatacgactagcagtacaagcctttgaagaagatacagttgtactcttcattcgatcaaagtagctacctacagattttgtaccgttactagtgacatt

SEQ ID NO: 31169 - DNA, 579 bp, Arabidopsis thaliana columbia
tctaatgctttttttgcattccgagatatatgagtttttattttgtttaccttcttggcgtttagaatccggcgttcccgttgcgcttcagcttcgagatcttcctcatagccacggtttgagcggtaatcctcgtcatcctggttccaagaaacaatcagtcgttactagtgcaatctttgctttagaaaatggaagaacccaatatacacaaactaatcaaacagacctcatcaagagcatcttccaagtagccagtggaaagttgtctcctttcaacaggaagtggatacttgcgcttgattttctccctcgcctgactcagctttgtactagccttgaggttttggctttccgccttcagaatttgagatattaaatgagaaaagtctacaaacactgcaataaaactattgttggattgtctgagctcaattaagaggtaacttttctctcttctccttctccctctcagggtcaatgtcagtgacacagttcttaactttgaaggccttcttctgcctcgattcaacaatggcagtcaagagcgtatgggaatttgacgtcagcgatgatggg

SEQ ID NO: 31170 - DNA, 959 bp, Arabidopsis thaliana columbia
gatgaaacatcaatcctagctcaggtgcttggtgtggaatcatccataagctcaaagctagacatgtctatccgtacactgcccggagatcacggtctccctctgcaacaggtaccgagttctgtttaagacaaactattttgcaactgtgatttgagccatcaccatggagatagtcataaacaaaagcagattgaacatgcatccttagttagaatcaatatggagacttttttgttgctttcgataaggtggtaatgttgaaagtgggttatattactgtctggacaggctcttccggatgttccaccaggaatggcagaagcggtgaatcgaggaagtgagtttttagcgaatattgctgtcgggactccgtgggaatctatggctaaagaggttggaggttcgctgggaatggactcgaagatccttcgtgctgacatgtccaaagatcttgcgcacgtcgttgatgcaatcacttcttggatgatttcaaatatgggtccaaagcttctgagaccataatgttttctcatgtacacaaaacatacaaaaatctattaacacagggcgattgcatactatttaatgtaatgtaactgtatatattataacatgaagagtttggttatacataaaaactcctgttaattgcatgttttggtactctagataacacaaggatgtcaaaaagaaggaagaaaaaacaaacagatcacggaattgagggtcttgaaaaacagtaaggaaacttgatatgatcggtgaactattcgtggtatagatacaagccgagaccaaatcgagcacatgctctgcagaatgctatttcctcagctgcagtaactggatcctcgatgtgatcatcagtcgtcgttactgtcccagttgattcacgatgtgcctgcattacataaaacttcaaaacttagtcctgtcatcaatggtacatatgttgg

SEQ ID NO: 31171 - DNA, 558 bp, Arabidopsis thaliana columbia
cacaaatatatatagtatttgtatcaacttctatgtattaaatataaagagataaaaataccctttagatgcaagtaataaatggagtaacgagatggaaagagtcgttgagattcacacttcagttggcggtcctatttttgactttctaattatcaccggtcaacatattttgtagagattccatcgccgatgctcaagttttttgcaccctgtgaaaacatatatagaggtttttggtcggtgtttgccggcaacgacaaatatgtgatttcttagtttcttcaacaataaactcgtgtttgcctcttatctagctagaatgacctttgtttagtagttttctgaattgcagtttccctaaaccattatcttagtgcacatacataaattatggtgcaatatcattttggtaacgttactatttgttagatatttatttaacagaaaatgtcataatccttaaacacaaattcttatttaaatatgtaaacgttttctaaaccttatggcttcttctgatttattggatctaatatattggagcagccttttgtt

SEQ ID NO: 31172 - DNA, 1085 bp, Arabidopsis thaliana columbia
ctgatataaagaaatagataattttttactggatgcagcaacggttgataaaatatattactttatgcaaatcaaagtcccacttacttaatcatataaacgagaaacaaataagggtacaactaaagcaacaaaatcctatcgtactcttttaagccatactcatatcagtcacactattccacttgaatatagaacaatgtttttgtcaacctgcactgttactcctccccaacatttaccattttaccacggtcctttacttattctccggtagaaaaatcactcgaatcaagcccatttaggttcggcccattagcgtgaatcagcggcatttttgtacttttacattaaatatatattttggattgattccataaataaagtcaaaaagtcttttttgacgcaaatttaaaaaaacaaatagaaaattgttcctctcaaataaaaaagagaaagagatccaccggaaaatatggcggagatgtcttaccttcagatcgacgatgctaacgatgccgttttcaaccattaccgccaccaacggcggctacatgatcacctgagagatcaatcgttttctcagatcctatatccgcttcctcactggatccaatcagacgacggcgatctctacatctctgaaaccgatttttcttccggcgacgtttcggtgtccgatctagtattcacgaccgacgacggtctcgatcttctcgatcggcgtactttgttatggatctgttccaccaacgcgttgagcaatctcaggtaactccgcttgataatgacggaatcgatgatttcgaaaattacgagatgcgtgaggataatgtggaacttgattttggattggagatggaatctggtaacggtttcgttgatagtgatcttgttgttaccttaatgaacacgttgatgggatgaggttattagggattgagtcaggcgatgttatagttacagtggaatcgtgttttgatctgatgatgaagatgatcaagagaaggaagagagtgagatttggggaatagatttgaatgaagaagatgagtatgtgaatgatgatgatgataatgatgatg

SEQ ID NO: 31173 - DNA, 845 bp, Arabidopsis thaliana columbia
taagaagattcctgataacattgttaagagtcatgatcctccttctacttctgctgctacttctggttttatcccttggtattaattatctttttttttttattatctttttgttgttaagaagattcttgttggttcttgatctgaggttttaatttataggtaccatgcaaatcggatgcttagcttctatgctcctggttggtgtggtgaagttagagatgttattttctctgagaatggaaatgttactgttgtttatcgtctcactattcgtggctctgatggtgaggtaaaagttcttcaacattcctcaatttctttctttctttctttccttgggtgtagttgtgtgtgattgagtaggtaagcaaagaaacttatgtctgatttgactaattttgtgaaaaattaaacctttgcattgcatacattgtgtctctcttattgtatctttgtagaggaaaaaactttgatggtagttttcaagagtttattaatgattaaggaaaagattctagttcatgtattgatgcttgtttgtcttgtttttgtgcaaaatcaaacctttctagaggttcattttgctaatggtatatttcacgagtataacaacgattataagcatatgctttggtagattgaaaccaaaggtaatgtgatcgtggaagtcctcgagccttatgactttggtcatctatggcaatgcctaaaccagcaaaatcccatttttatgactttgatatgatagaaggttgttttgtggagagcgagttggattggttgttgaagttgtagattagtgaaccaacatatgtaccattgatgacaggactaagttttga

SEQ ID NO: 31174 - DNA, 564 bp, Arabidopsis thaliana columbia
tgttttgttttgttatccttcgttgattgattcacttatttatacaagtccagctccgataacttccatgtcaagcctatcctgattttgtaaaacaacaataacaaaattcaagttttagattacactctgtcgaaacaaaaacgccaagtataaatattagattcttccaataattattcacccttattatttcagaattcagagtaacaattatgcccctatatttttcgaatatatgacttttggaattgtttactacacaagcaaaaacttttctttccttattacatacaaaggaaaaagttacatgctaatcacatgtattgctctagtttttttgtcttttgatgatcctttgttctacttatgtttggtgatatgtgatacaggttttacaaaagtgagggtacagatgtttaacttaacatatttctagggagaatctgccacttctcttaagctgaaaggaaattaatattctaatactgtttcattacttctttcaaaattgaagtactttgaaagatcagtattctttaagaggaatttcacacgtgatag

SEQ ID NO: 31175 - DNA, 506 bp, Arabidopsis thaliana columbia
agctagacaatagtattactattacagtgcaagtttcaacatactgctgcgttttggcatatgtaatggtgttggtttcctgtctaaatctaattctttatctaggactaaaactctgcatgccactcttttcatcgctcaagccttttctttagtttcaaaataattatgtaaatatctttttgtcaaaagcataaatatctatatttgctgaaatgaaagccaacaataatttattttttaatcgtctcacaatatgtctttgctctgtcctataaaaacactcgacctcctctgcttcaaaaattcaaaaccattccttggactccactgttttattatccaccatgaaaacttgtttgatcttcttcctctacacaacaattctccaatactatttccacttctctgtgtcatcattatcaacacctcttctcctccatctctcccactctctctcaacctcaaaacactcttcatctcctctccaccttctcaaatcatcc

SEQ ID NO: 31176 - DNA, 343 bp, Arabidopsis thaliana columbia
gtatagtcgtcctgcttaaatcttcaaacataagttaatgtgttatactatattttcaaccagtagaccaatcatataaatcgtttaataatttctgaaccactaaacccgcaagtaaaccgatagattgatcgtataatttcaaccggttcggatagtaaatagtagatcttccgtaaaccggatatgatctgatctgatctcccaaaaagtcccaaatccaaatctacgaatctccgtctcctccgtcgcattttccgaggtagagagagagatcaaaccaaagagacacagagagagtatccaccgatggaatccgcagcaacggctgttgtacctccgg

SEQ ID NO: 31177 - DNA, 248 bp, Arabidopsis thaliana columbia
ccctcatatataaacccatgtagagtcgtctctctcttaccaaataagaacaaaacaagacataattttctctgttttcctagctctctcctctcaaattcttccattgctctctgttttggcaaatcgtgaactgccacgtctttaaggcatcagtgaagcaaagatggacttagacgaggagctatatcagtgtatgacgtaaggtaaaaatgttgatcattcgtttggaggtgaagcatcttcca

SEQ ID NO: 31178 - DNA, 599 bp, Arabidopsis thaliana columbia
caccctaaaagattcaaagatgacaacatcacaattcacacacaaatcacataatttcaattcaaagtttgaaactttatgttcttgatagtctaaaaatcaaaattttggtcatttgagaatttacctgacctaataaactaacagcataagaatcaaacccagaagaagagaagaaaggtaaccaattttcagcccaacaccaagctgcgtgatagcttccatgtacaaacaccaatggtggattctctctttcggatttggattttctctgctcgattacctccatttttagaccagagggaagcttgtgcaaaaggcgggtttgcccctttttcaggttgtatggaatcgttgttctaggggaattggtgagagctgctatgggcattttgaagtaggataggcatgggaacgagggaagtgaagaagacgccatcatcgttattcgttaagctcagagctattctgatttctgaaaaggaaaagctctcaagaacttttttaatctgaagttttactgttttacgttaaataaatattgtaaggaaaaactatagaatataacactgttaatatgcttgaaaattattttgaaa

SEQ ID NO: 31179 - DNA, 392 bp, Arabidopsis thaliana columbia
ctaacatggatctagagagtgtagcttccaaacgagtcaagttatcaaatttgggaaatttccgtcccaatttggaatatcgaaagaggacctacacggaagaaagaaacaaatttacatcaaggaagatcattagactatatttgaatgctagcagtatcgcatgaaagtgcccctggtcgactataccgcgaacccagagatgatcatatgtctcacactagagatacccgtggagtcctcggacgcggccgatcaagtcccggagcccgaagttttcccagacttcagatgaaagacaccattgataccgaccacgattcgagaattcagattcttcaacaccatcttatcagattgactatcactggaagtcatacacttgagtgctg

SEQ ID NO: 31180 - DNA, 585 bp, Arabidopsis thaliana columbia
gctaaatgttttgaagtttttgattcagtcgggacgtgggcgttggcctggacgggagcatgggcctatgctggaaagagtggagctttacatggatagtagtatggcagaaagtcaaaaagagttggcagatgatggagccatgatgttacagagtatttcaggggatgtacaggttcttgtatatgatccttgagaagttgagattttcaagacttgtcactagttggttttgtttgtgctatttaatgaagttctcggtttgtttgattttatgaataatttgagcctcggaaagaatcaggacttggtcatctatgtttaaccatttattataattataaatttctatcatcgattttgctttaacgaatcctatgtttctgtataaatttacagttatttttcactgtcaaagactaatatatagattatctttctttttcgagtaactttctatgttcacgctgatttagaggtcgacacatgtggaagttttatcaacacgtctcttgaagcatgtacatgttttttgtgccaatggttgagaactgacctgtcaagatttgttcatagtggattttg

SEQ ID NO: 31181 - DNA, 615 bp, Arabidopsis thaliana columbia
ggtaattaacatgcaaagaaggctggctatccaatgcacagttaatacgagcaatatctgaagaaagcatgaaaatgtatctttccactagcaggtcttccacttttcctgcctttttccccttccacagccccaaaacccgacacaaactcgcagataaatctccataatccaagtttaaaggttttggcagtagacacatcattctgaaatgtaggaggatgaggggaaaagtcaatcatttgactcattagatggctgactgactcatcctcagcccatgaatcagttataccccttgctacaagagacgcccacgaagataaatgatcaccaacagttacatgtaaattactaccacagctacgaacttccctcagtttagaccttagatctagcattaatgatgttgggcatgtgtttggatgtaacaacatatggtgcaacagcactaacaacctagatatcagcattgctcaagaggacagctgaggaccatcacatattcctgccggggtatcaactttatgcagacatgaagcaatgagatttgagaattttgccttctcagcttcatttgataaatggacagccataagaagaacgcaatatgga

SEQ ID NO: 31182 - DNA, 523 bp, Arabidopsis thaliana columbia
cggtaacttaaaccggcgagacaaatcccacatatacatgaaatcgtgtggacatagtcttaaactacatgccaaacacaatcaactttgcaatttaaattaccagaaataattgtaaggcatgttgttatgtctattgcaatcctctttatgtatacttttgaaaaagaaaagaatatatagaaaattttgtgcttatctatttgagatctctgattaaagatctactttgataaagttttactaatatatatacaactcgcggtatgcatggcgttgaccttagtaaatatatatataaatatgttcagattttgattaaaaacacatgtttgtgaaacgaaaactaaataaaaaatgatttcttctgcaagaacatttccaggagacacttaattatgtccattgtcttgccttttgtaatcaatgtcgaagtgttttatcttccatgaaatctcttaaactttagtagcttcttttctcgaccaattctgtttttcttagggtttggtttggcatgttg

SEQ ID NO: 31183 - DNA, 501 bp, Arabidopsis thaliana columbia
tttttctcctttccgtttttagttttaccctcttcagatcaaaaatccactctaattaattactaactttaatgcaatgttattaaatactaatattataagattgagaggtatactaaatatctataattttaaaattaatttatgtttaaaatgtggaaattgaaattttgtatgcatcattgagaaacaaattcaaagaacaccatcaatggatcgactaattaactgagaagttaatcgcaaattcaatctgattctttgattaaaatgcaacttaaaactcacttttattctaatcacggtctaaatctaaatttaaaaaatcagtctagtttaattacgaaaacaaaaattcaagctactaaactagtaacagagaaatgatattaaatttaaaaacgatattagattttttaaacctatattaattttattttaaacgagacaattgtattttcgtaaccataaattacttagctgacactttgttacgtgagt

SEQ ID NO: 31184 - DNA, 459 bp, Arabidopsis thaliana columbia
ccaaggtattgtgttgtaaacacaaatgaaattagaaatataataattaaaataattaaaataaacaacaattggatatcaaattattctttatcaatttgggtggttgtacatattttcaaatatatacagtcaaagattattcaagtaatatttcatcttttatagttattttattattcaatgattctcaaatatatatcacctttgaagcattttctttagtgtattcaaagatttatatagtatactcattcaatttgttgccaaaatacaatcacattctaatatattttccaacaaatttggtagatttgaatatgaatttttgtaaatatacatgacttttatattttagtatttgcttatataaggagtttaaatctcttgaactactccaaaaacattcaaactaaaaagattcacaagatattagtaatccactcaaataatattttt

SEQ ID NO: 31185 - DNA, 1570 bp, Arabidopsis thaliana columbia
tttttgagttccatacatagatttgtgttcttgtactgatgtaatctctagctaaactatgcacaatcttgtcccagactattcattttctgttgttatataaaatggtttcctaagtggctgtgactaaaccatgattctctatctcttttactgctctcttttaactattttatgcaatcagatacataaaacggatcaaagagcaagaaaataaagcagggaaaggaatcagaactgaatcattctcatctcactttgtatgtacattttcttctctagctgcattttttgcatataaagctaaatgatctacaatctatagagtctataagcttgaaaaagcctcagtgttgtgaaaaaacgaaaagaaacgaaagtatttttctcaactaagtggataccatccgtatgtgagctctctacacgtgtgttggaacgtcatcatcttcctgcactctattatcctcgacttctctttttgccttttcgattttttgtcgctcgatacgttgtggaatcgtgtcatcaaacctatcgttctgtggatcttcagaataagctacatagtaacccatcacacaagcttgtagccacgcagaagaaactctcccctgaaaacataccaacaaaaacaggtacataaggttacacagtacaaccatttttgattctcttcctgcattttgataagaagatcttaccacaaagtatccgatgatgaaagcatagatagtcagctcaaagtagtgatccttatcgatcagaagctcccatactcctgcagttaatgcagcgattgcaccaattcccatggcgctaaagaaacagatggagctggtgatgtcaaaatcaatcaactgctcaaattcagggattgttctaaacctcctccaggtatcactagacgcttgccttaaccctttgttgtgagctcccacgtgaacaaatccatatctatttccacccaaaatgatatgattggcaatccagttgcagcctggggtacttgcataaatgtcccgattacaacaccgaatcgttcccctaaagagtacaataagtggaacaagtgttgaaccaatacaaacactcccgagctgctttttcagagtgacgccaagagcatcacatgcattcatgagatcatcacggctaaagtatacatatatggctttcgaaatcgcgacttcttgtacgtttttgataacctgcattgtccaggcaaggtttacacgatgatggagatgaaaagaatatcaagacgtgttcctgtagcagtagctccaccgattccagcaaccaagaaatcagagtaaaagacgcttatgatcactgatacaactgctattgctctcgttctcgcgggtaatatccctgtggcggttgacatcgtctggaaggtgaattcatgcctgttcgtgacgtgaagcgaaccgatacactgcggtgacgatgctatagaagacaagaagtgcacctatccatagaacgacgggattggatttgtcgaggagaattaggaagagccctccgtaatccgagtagtagttaccaggcatcctctaga

SEQ ID NO: 31186 - DNA, 591 bp, Arabidopsis thaliana columbia
ttgttgtagttacatagcctatatagttttaatgaaaacagagaaataaaatatcgtttagtttctgtaacaatatcgtcgactgtaaaaaaaccttaaaaaaaagcctctgagcgttcgaatacaaaactacatactaatccaaacacagtgagtagtgtccatgttgacattgagattacccacgccctaaatcaactttatatctacgcaagtgattatatagatctcactattaaaccataggtttgaccaaagtttaaaaaaaaaaacctagtgcttataacaaaggcatatagcaacaaggtattgctattcgcgtttgagggattaaaagagagagacacaaaaaactaggatagatagatatatagatggattcatcaccttagattggataatcaattgtgaccaatctgatcgaaaatgttgaatcctgcaggtgggaaacactcgtcgataccgaaaggtagatttgaattatagatcatgagcggctcggaatttccatggctgatgatggcacgtgtctagattcttgcttggttagcatggcagatatactatttagagtagactggtactgttgat

SEQ ID NO: 31187 - DNA, 577 bp, Arabidopsis thaliana columbia
tgggatccgtttaattaaaaatcctaacaattgtttttgagaattatatggtgatatatcttatctaaaacttcaaaatcttttctaaatgagttaatataagctaatgttttgactcctaacatcttatacattaaagtttctgagataaatctctattcttagtaaactaaactaataactgatccgcctaatcaagtatcataataaattgcaaaattttctaatgcagaatcatcacaagttaaatttttgggtttttatgtttagtcttcttttactttttatattacaggagatacaatagtttacacgaagcctgaaagtgattccaacaataatgaaaattagaaatttcagctgtgttattactcatagttacttgatgatcaataaccaagacatctaatatagaataggcatccaaaattaacattggacaattcgtatatatgatataacgtatataaaacttaatctcgaaccataaaacgagtattatctctaaccatttataaatctaataattttatggtggtaggaatctaataatattcagttatctagacaaagcaag

SEQ ID NO: 31188 - DNA, 570 bp, Arabidopsis thaliana columbia
cctctattgcgcttggattcacattcttgctatataaattgtctagagttttgcaggtttaacatgatcaaaattgaatatgcttcaggtaaacttctacatccgtgggcctcaaggagcagggaaagtgtacacggagatgtttaaagacaaggcagagaaggaatggaaatacacgtacctgatcgtagagattttaacaccttccccagccaaattgatgctggagtcttatttgcctgcctaaagcactcgtatttatgactcagcagatccggaaaacattcagaaacggcttagattgttttagttggggtgttggagaaaagagagagaattgtgttacacatgagctgtaggaatgacttcttatcaagcaactgtttgctaattgaaaaacaagtctaaactgtgtttatgatcctcttggggatgtctaggattttgaaccgaattcaagtttgaggcttgataatatttttatgcgtaaacatgaaacagagacatggagaatgcatatatcatgaagcatcaagtatacaatagaggcaatcatggatcaaacggtgt

SEQ ID NO: 31189 - DNA, 610 bp, Arabidopsis thaliana columbia
ggaacaaattaaaaattatgcttaaacatattgtttctataaaacaaatataaacaatctccttaatattcaaaaatcgcatattccctaatccctaccattatgcaacaagttaaaagttctacagagggaaacaatttgaatttattttcgcctttttttttccaaacaacttgaatttgtttccctctaattatatccaacaaaaattggaacttgtgatccggaccggaactagatttcagcatcttgcaatctttttaaaacatgaaagaccgatttttttttttgataattaaagacgataattccaaacgtgttgtatcatcgtatttaactcttcaacagataatatcaacatttattattttataagcatgtaaacttataacaataatggcggtaattttattttatgtttggtaaatccccatgaatcatgaataatatatagctctcatagaaaagtcaagaaaaaaaaataccagtgttacatcgtggaaggcaagaataaagaggcggccacgtaaagataccgatgaatccttagcgggccataataaagaaaagacacaaccacagtgataatcccacggttatatatgaaaag

SEQ ID NO: 31190 - DNA, 545 bp, Arabidopsis thaliana columbia
ctagaaccgttagattgttagatgtgttcagagaccgttggattccatttctttgtcaaaagactcaaaactacccaaaactcttccatcttcaccaaattctctcaatcactcatcaatggcgatttctcaagctcagcctctgcttcttctcctcttatcagtcttcttcttacctgctttgcacgccacttctttcacctactgcggtttgttccttactactactctcttcttcttcctctctcagattaggggtgttttggatcgtacctagaaaatatccagtattttctatgtttaaaacacttcactttccataaagattgaatctttattgtgattttggttcagattaatatttagagcatggtttgatttaagggtgaaatttctcaaaaagtcaattcttgactatgttattacagatttagcaataacttcagaagaagagagaaactttcagtttaatagtgttgttctatgtttaaactgcattaagtttttagtttgcagaagaaatttcgattatccatgcttgttta

SEQ ID NO: 31191 - DNA, 599 bp, Arabidopsis thaliana columbia
tttttactttacgcagttactgccagatttactgcaatttttgtaataaaagtcaacgcgtgtaactttttttttaatcggatgttcccgaagacatgaccgtctaacgaaagagacaagaccgtttcttcttgttcaaatctagaaaacacacatacatgacgtttttcgaatagcattattgatagagaaaaactatgaaaaatcaactaataccttatgaatttcaaacgtggtgttttatagttgaccacatatatcaacaagttcttaactttgaatattatgttagtaaattatattcagatcatttataaaagtttacaagttttcatcttaattttggttttcttccaattatgttattaagatgagattttaaatagtccaaaatagttgagccaatatcataaaagctaattttggttatgaatatacccatatattcaattgatgggttcaatttatgcataacagattctgtgtataataaatatacctttagtcgtattcacaatcttcattgaatattggtttaggagatttttaagatacctgtaacatttttaggtcatagatatgtttagaatgcttgtgaa

SEQ ID NO: 31192 - DNA, 513 bp, Arabidopsis thaliana columbia
gaggaagttaactttgacctaagaagaaatgtttaggatttttttcgtttcttttcttacttttttgttgttgttgttgtgtgtaactgttttacgtttaatggagcttaagttgtgattaggatgaatatacggattatttgtggtcatgattttacgcagtttagctatattgattattgaccaaattaagaaatgtttttatattttgtctaaatgaggaatcatgttctacaaactaaactagatggaattattagcattttattgttgtatatatacaaaaagaatctaacaatgttcttaatgaattattcaaaacaattctgtaaatagctaatcataatatgataatgatagtatgttcacctattaaaatctatctttttttgttggtggaattcataatttaaaatgttaataaaacgtagctcacagaacatccaattctctttggacatcgttaaaattagtattagtaaatagattaaattgcatccactatatttattg

SEQ ID NO: 31193 - DNA, 589 bp, Arabidopsis thaliana columbia
atattgtcccccaacaactctacattatccacatgctcttgccctttccaccacccacattaccttgatctatttaaagttttttcatttgtgtttcaccgaaaaaacaccaaaaattgataaatgtaatattagaaataaaaaaaaacaataattgaggccaggccaaccttattaaaaaagaaagaaatagacactaaacaccaattggatcctgttgaggccaaccttatatatacgcacgacaataattggtcttcgagttacattgatacaaaaagatccgcactactaatcttccgtttgttggttttacgattgttaaccatctcatgtcatttagctccacttattgaaaagttactaaaataaagaataaacaaacaaaaaggtataatttaaggtggttgaaaatgttggataaaaaaagattgttgagaaatgaaataatgtaagtaataatttggtacgtcaaagtaacacattaagatgccttacggacacagaccatatagacaccacgataatgcgtaacaacaaaagttggttttaacggaatagatgcacctaattaaatatcatattaata

SEQ ID NO: 31194 - DNA, 532 bp, Arabidopsis thaliana columbia
gttataaattgtgcagaaaagcgagggaatagtgttgttgagaggtttgtgatttccttgttgaaaaaatgatggcttgtggcttaagcaagagccttggcttgtcttcctccttgaagaagcaacaaggcatagtgagtatccttggtggcatttcgtcgaacacttcatctgcaccttcacttaggcgaactttctccgccgatttgtcctccaagacttgggtttcccaaaatgggttttctcctatgaagagaatctcttcctctgagaagcttcgtcctgacgaagaagaagcagaggaagaatcaagatccggagtcgatatctgggcacagattcaacaagacaagaacgataagaagaaagaggaagagatcgagccgggtcaatccgatgtatggagctcgattttgtctgagaagaagaagactgaatcgagcaaggacactgttcctcgcaccgtatgttcatccattgatgaaacgtgcgagttccttgagtgagaaaagcctcgagatttgtactgaga

SEQ ID NO: 31195 - DNA, 535 bp, Arabidopsis thaliana columbia
  unsure (1)..(535): unsure at all n locations
caacaccaacatatatatatatatatatataaatagttccaaataatttactaaaagaacacatgattttgttttcatattaagacacagtcaattacttgtaatgtgagcaaagatcaaccaacacaatattaatagataataataaaatctattaatataaaattgcatggaataattcacttcttcttttggtcgacaaaataattcaaaagcctcttttaaaattgattggtggaaaagttttgatttcgtcgtttcttgattcattcattttcatttaaaataagaaattaggaaattgtgtgaaatttacgacttaaaaacaagagaggaaaatgtgtgcaatggaagggtgaaaaagggatttcaataatatagccggatgacgtgagaacgagaaattgtaccagctagacactgcatcaactaacggcagacganaaataaatcgcctagatggatgccacgtgtacttgcgcatctgtacacacagatggatttggataaggtagtagtagaattattagaacat

SEQ ID NO: 31196 - DNA, 606 bp, Arabidopsis thaliana columbia
cgtgtttcacgtgtctcagcttaaggtcttagtgggaaatgtctacaccacacatcacttaccttctgttctaccggacgtgtttgagaaggcacctgaagcaatcctggaatgaaagatggttaacagacagggtcgtgcagcaactaaggttttggtcaagtgggttaaatgagccagcagaggaggccacctgagagtttctttttgacattcagaagaaatttccagcttttgtctcagcttaaggtcttagtgggagcttttgttgcttaaaaccttgaggacaaggttctgcaaaaggagggagatttgatgcaaaatccgcacatgtgagtgtacacgtgtgaagtcaagtggagaataagaagtatgttttgtcgacagaaacatagaacttagttttgcaattaaaaatgtttttggaggcctaattttgttactaaaaggcttaaactttttggaggtccaatacccatgtatggtggatttgtgccaagggtcgggcctgcttgtccggctcatcattaactgagtcttatttgtataaaattcaaagttttttagcaatcgttagcttcaaaatgtacgacgcatgctttttat

SEQ ID NO: 31197 - DNA, 581 bp, Arabidopsis thaliana columbia
aggatccccttagttttacaaatagaaaagaaaaatcaactaaaaattaatgactttgccgctcatgtgtttgcacattgtgtttctgtgaaaatcaaaccgattccttcgtgaaaatagccgtgtcttcctccagatcgtgaatttggtacttcatacttaccggtcaaaagctcagaagcaatatttcagtcatggcgaaccgtatagtatatatcaaggaaaacctcataacataaacaaaggttcagaacttcagacaaaacctgttttagatgacagagtcatggatcaatctcagcccaacaacattaaaacttttcagcccatcaaacccaccaagtttaaatttcttttctctcttgaatcttgatccagtagctgatccgacaacgttttgatgtttggtcgaaacagttgaagtctcttcctcttaaatgtgattatcaattaaaaaatattatttgacccaagatacatgggtattgggccccaaaagtttaagctttttagtaacaaaattaggcctccaaaaaaatttgttattgcaaaactatatcctatattctaaaattttaata

SEQ ID NO: 31198 - DNA, 497 bp, Arabidopsis thaliana columbia
tgactacggtcgatctattctgccgtatatattttattattgtcaaaattatctttagtttaatattgaattctgtttttaacgtagaaaaacaaaattccgtacttttattaaaaaattatattatgaaacatagagaataactaaaaaaatagatgattattatttaatgtcaaagccaaaaaaactgttaccataaacaaaaattcatattctactgataattattaattatactctggaagaaactaaaatataagatgatggttgaggtaatccaaacaaatttatagcaaactactggatttagtcatcagttcttcaatgcttaacactaataaaacttgaaaaaaaaagaaggaaataaagtaaaagaaactaaacatcattagctgccgatgttaaacaaacgattaaaagcacaaactgattaagcaaaagaaacattaaaacacaaacaagtaaactcctctactccacgggttccttcaagtttg

SEQ ID NO: 31199 - DNA, 633 bp, Arabidopsis thaliana columbia
ttctcagtcaagcctctgctataacaggaacccacgtctctgttcgttcacgcgccgccgctctccgccgtttacgtggtttcgctcgtgattctgataaaaatcgcgttttgatcgcagctcataacgctacagagattttgattaagattctgttctctgaaacgacgtcgtcggagttagtctctgagtctttagctctacttgttatgttaccgataacggagccgaaccagtttgtttcgatatcgtcggatccgggtcgggtcgagtttttgacccggttgttattcgattcgtcgattgaaacacgcgttaacgccgccgcgttgatcgagattgtttcgacgggaaccaaatcggcggacctgaaaggttcgatttcgaattcagaatctgtattcgaaggagttctcgatcttctgagaaatccgatttcgtcacgacgagctctcaaaatcggaatcaaaactctgttcgcgctctgttcagtgaaatcgacgcgacacatcgcgatcacagccggtgcgccggagattctaatagacagactcgcggcggatttcgatagatgcgatacggagcgagccttagcgacggtggagctactctgccgaacgccggaaagatgcg

SEQ ID NO: 31200 - DNA, 550 bp, Arabidopsis thaliana columbia
gtaacggccgccagtgtttctctccgcaggcttgttgttatttttaaagattcattaaaatgtcaccaaacaaaaagaaaaaattataaagaaaaacaaataaaataaggtaaaaataataagaaaataaccaaagagttgattcatcatgtctgaaaaaaaaaacagtaatcaatctttgtggttcaagcaagccagtcgtctccatccatgccttcaatttctccaatctccatactgtaaaaagaatatcacacatcaaaaatgtttcattagaacacacaaaagagatatataatttacctaacaagtaacaaccaaatttgaataatgcaagtgcaatgataacataacaaaaatataatttatatcgggtgacgtcaagacggttttgggacagttcagaaaaatggggtaaggatagtgttttatagatgtcggcgatattatttatcattggaccatatactaaaagaaaaaaatggacagcttcagatcgtgcaataaacctatgtggatcgtctcatacacaagctttcacatattttta

SEQ ID NO: 31201 - DNA, 228 bp, Arabidopsis thaliana columbia
tgcgatgaaaaagtaacttctctcccaaaaaagcttcctttttttctttaactctcctctctatctattggttgtgctctgatgggttcgtcaaagatcaagtctttgttatctctgtctgggaattctcagttgatttggacctgagttgatctggcttttcgataactttgagctaaagaaataagatttttgagatttggtttctagattcttaggctcttcaca

SEQ ID NO: 31202 - DNA, 567 bp, Arabidopsis thaliana columbia
ctcttaacacagatatgtttccaaaaacatacaaacataactaaagactagactgtaaaggatgacgggaaattgcaatgtttcttttgcaacacgttttcaccacgtgtcgatgttgttgacacattaactaacgcaagagttatccttcttttgatcttttccttgatgtaatactttgggcttcaattttgggcttcaactttggccttgtaaacttgtttggatcagtcaataaagaacaatagtgacaaaaaaaaaaactaataatttgaaaaatgataaacaaagtaaaattcattaagcaaatggcctatcaacgcatggacacaacaaatatttagttcacatatatatattttttcctacccaatatacccctattaatagtagaacagtaccagaaagccactggcaaagataggcatatgtactaatgtacaggctttgtttttgaaagcacaatactgatctcctaatctgaaaatgtcctagcgatcgatcgggtatagggacatttgactacttcaatctgacctttccacaagaacatgaagttggagtttt

SEQ ID NO: 31203 - DNA, 521 bp, Arabidopsis thaliana columbia
agttaccattcaaaatcactaaaacaaactctttaaatgcatataaatctaatcattaatgcaaaacgttaaaagtaacgcttttataacgcctttgtaatttgtaattatcacgatacaggctgtaacaaactttgataattgagttaccattcaaaatcactaaaacaaactctttaaatgtatataaatctaatcattattgcgtagatttatctcaatatacacaagccactatagccaggttccgggtaagtaggacagatagcagtcccatgcatttaacctcgtgcaagataaacataaacggtagacacactagttgccatttttagatacaactcaacaaataataattaagataaagaacaaaaaagagtgattaacatttaatggaaagatttattagcttcccaggctcctcacttaaatcccactcaagtctccatataaaaactgcaacttccatcactcttcgatcaccatcatcactctctctctctctcttctatttccatggc

SEQ ID NO: 31204 - DNA, 597 bp, Arabidopsis thaliana columbia
agtaacgcccgccagtgtgagcgatgaaacctcaacgatgaatcctccacctcccagaaaccctaacccacctgatctgaagacaacggaagtagttgtagagcccgagccaatagaggaatccaaggacgattccgtcactgtagacgcggataaaccagttcgtccccgaaccgtgaagcagaatcctgtcccctacactattccagagtggagtggccctccgtgtcaccaatttcagcttgaagttctcaaagaaggcgccattgttgagaaattagacgtgtaagtaaactcttatgaatctattaccctctaaagctttaaggcttctgattgaattaggaaggaaagtgtatgtaattcgtatttgttccctttgcagctataagaaaggagcttacttgtttggacgtgatggtatctgtgattttgctcttgagacccttcgatttctcggtttcatgcaggtgattgattatcttattgttcatacttcatatcatagtgttattactttcaatttggattacattgttttgtaatgaatcttgccagttattcagtacaagaggagtggagctgcgtatatatttg

SEQ ID NO: 31205 - DNA, 800 bp, Arabidopsis thaliana columbia
tattaattaacaacataaccaaaataataaacaattgaaaacccaataaacaaatcccaaacccaataattcattgagattgaaacccaacttaagtagtcatgtgatggtttttgtaatcaaaagaaaaaaaaagaaacggtgaataattggtatctagaaaaaaaacaaagacccggaaaaaaaaagttatcctagataaacgaactggattcatgttcaatttctctccgatccaagttggaaactaattctcctttagtgtgaagaacttgatcagattaaaatcgggtcaatcgatatgtaagtgattttgactctttactgattatttacttatcaaattctttggctcctctccaatggaggaatccaaagacgatttcgtatctgtagacgcgaataatctagttcggccccgaaccgtgaagtagaatactgtcccctacactattccagagtggagtggccctccgtgtcaccaatttcagcttgaagttctcaaagaaggcgccattgttgagaaattagacgtgtaagtaaactcaaactcttatgaatctattaccctctaaagctttaaggcttctgattgaattaggaaggaaatggtatgtaattcgtatttgttcactttgcagctataagagaggagcttacttgtgcttgctgcttgtgtcaaattggtgtatctaatttgactttttaatgttatggttctgatactagataatattgttatcatgtatctctctaggaagtaaaagaggccaaagatggatttattatgattcatttga

SEQ ID NO: 31206 - DNA, 1404 bp, Arabidopsis thaliana columbia
tcaccaacagtctatccacatgagaaccatcaccaacaactctatcaacatgagaaccatctccaacatcaccattttcttctttctccaaaaaaatatcgacagcttttgtccaaactgcggcaagacacattctttgaaagttttgatctccattgcacaattgcttaagctctgaatattcctcatatggaagcttataccaaattcgtttatgccaaatagattcgttcaatgactccatcaaattagtcaatactgcttgtggtttgctttcaaggctgagaatacctcctccaacataactaactttaatcccattctctacaacaaagttcccaccgtagtagcattgaaaaactgcatcttcagtgctgaataagaaagaaataaagtgagtttttggttgtgacattttatcgaacacttggtgttcataaaattacatatcgcttatcaactaaaaaaactccacaatctcatctaaactatagaaataccaaaggaattcattacattttataacaatacactcgcaatttgatgatttgataaaaaaaaaacctaaattttataaaccataaatttgaatgaaaattacctcattttccttcctcacaatagagattatgagctggaactcctattccactaatataagctcttcacgatagatgcttatggaacattgtcgtcgtgaaagaaaaagaaagaaaaaagaagaaggtgatttaagacgtcaaaaacgacgtcgttttacaaaaatttgtttgtctcttctttcatctaaaacgacgtcgtgtcatacgtggcctccacgtgagcaaccgttaacggtcttataacaccgtcacggcttaggcatgtattgacatgaatggtgtgagtttgggatttgaatttgaaaatttggtttgttaatgtatggatttgcacaacaataaacgttgggtatgaattgaacatactactttagctcgggtatgaaatgaccgtttttccaattatgctaacaacttttgtttgtctccccgaaaaatttcaatgctatagtcaaaattggttaacgtgattggacgaagagtcaaatttctgaggaaatatgggagttattgttttgagttttggtgtaaaactctgatttgttgtttagtagaacgattctaaagactaaacagtcatctcttggagtaggggtataactttccaaaatgtaatttttaccgtgaaaaattcaagtagaagaagaaatagaagaaataggcaacaaggccaagatgatgatctctttgacccacttatctatgattttccggattgatctttcgatgagttgctttgagaatttcagcatgattgtttgttccgaatatataaaatttatgttatcttgaatgggatcga

SEQ ID NO: 31207 - DNA, 488 bp, Arabidopsis thaliana columbia
  unsure (1)..(488): unsure at all n locations
aagttgctcattaagcttcaagaagcagaatgtcaaaaacagttgcttatgtatgttaagtcttttgatatttgacatatacgactaaggcatatgcattatatatctatttgtataataatcaatttgaacccgaattcgaaatgtaaaacaatcccaacttattactttcatttgtcaacctttggtttcggtggcttgactccaccgttaagcccttcaccgtgccatggtgcgtcgggttaatcctatcactcacttgttctcctccctttggtataatccttttccgtggtgccgccggtaattgagcattttgcttcttggagctaacgcccttgagcatatatcacagtagtcttataaacttttcgttaataaaaatctaaagagttaccaaaaagtaaaaaaaaacttgaccaaaataaaataaaaaactagtcaacaaattgtatagactgtactaagatganaaataaggaaagaat

SEQ ID NO: 31208 - DNA, 611 bp, Arabidopsis thaliana columbia
agtgtgctctaaaggcagccaacccagctgctagccgagataagatgctagtgtgggatttgggtttcaagaggcccacccatcaagacactaaaggtggaaatatgacggtaccaaagacgtgcgggatggggggggaatgaaaattttacaaaccatgtgcgatatcggatcttcgggtttcctggtaactgtacctgcttctctgcggctggtggattggaggtcagaaacaatacaggcgtattttttatctactgagtctcgcagcacagtcacgatttagtactttaaaacgggtcaggctactctttggaaaagaaaaagaatacacattatcatgggatcttattcatgccccgctatatacaagcggctggaattgtatatgcaacactatacaaacaacgagcccgtcattacataagagacataacaatgggatcgttcagtagtcattataccccctgaacttcatgccaacgttgccaacgttcgtgcctcgccacagttgcttgctctaaacgatgtctgccgcttcatcgtatgccacgctacggtaatcgcgctactatacatccgtgacggggtctcatcatcggttatagttg

SEQ ID NO: 31209 - DNA, 578 bp, Arabidopsis thaliana columbia
ctccatttccgtctaatatcccctgattcctctcctcaactcttaatagcttgttaagcagaaaacaaagaggccacatcaattaccaagtgagctgttacgcggtcataaaacaaacttgtaacagccttctctaatgatcttgttgcggatataatacacctgaatatgcaacacaacggaagaatcatcaagataggaagacgaataaactcataaagctcaaattccttaaccagtcaaagctaaattccgaaactgaagctacctcaaacctaaaccccttaaaaccatgactttttcttcgaaaacagaaactctacctaaaagggttcaacgaaaagtacccaaaaagaaaagactttttgaatcgaaaaccccaattttgttaaaatctcagtggcaccagaaagtctcgcagttgccaaccaatgacgctgaaattcagatgtgactcaacccaatcaaaaccccaacatctaaaatcgagaaatctgtgatcaagttccttacgattgatgtaccaatcgattggaaggggagagaagaaggacatacctttgattaagatgcaaggg

SEQ ID NO: 31210 - DNA, 1392 bp, Arabidopsis thaliana columbia
tagaggatccctgatgtagttaggaaaatatacttggagcaaacacactaaagataatgcagctaagaaatatacttacttggcttcttgaacagagcgtgggcagagctcagcagcatatttaacaagctcgctgagacatcgaccccatttgtttttatcaaggctctcaaagataatggattgaagagtcacatcagaaggaatggcatcggaatctcgtcttaaatcaaaaggacgggcagaatcccaatagcaactttgaacaatatcatcctattatgtgaaagaaataaaggatacaaatcttaattttctataaagccagacggttttaaaccataatcaaccaaaaggctaaaaagcctctgaaatggtgagatctacacagaagctacttaccccatgttcttccaagacatcgatcatgtatatgggttcagcttcaaatttcataacatggtctgggtgctcttgaatcatgagatcccgaatatcatttctcaaagcacgtacacatcgtaataattctagggcagtgtgccgaatctgactgtcgactgaactaagaaatattagcccaacagcatcaatatcagaagcgcgaaactcaattgcatctgctgcttgatgaaaagataatgtcttgaacctatcatttccctttgctgttttgttttcttcttcagcatcagtatcttgtctgtcatctactaaacaagccctccagaaacgcatgagttccaacagacgtcctagtgatgcttgaatgaggagtgggaattcatcaggaagctttaagatgaagtttgccattcctctcatgactgcaaaacgacgatgaggaaggtatctaacaatccggttcaggacttgcactgcttccactcgaactccaggatcaatacttataccatgctgaggtattatttccgtgatcttatcactccggccaacttcctcaatcagataaggtatgcacttcagcactgactggaagagagatccttgagacttttctttattcacagcatctgcatataacatgaaggttagcgaaaagtgttttcggaaagtaacagccaggggatcctaggtagaaaatcaaaaataatatcacacttaaatacacacaacatataaagatttcttaacctcctcacaaaaccatgtaaatcagactaagctttttgcgtaaaactaagtttaccgattgtagtcctcgatgatgttagaagagcttgactgtaggtcctgtggcaggatcttaaaattgactcaattgctgctttcacctttggtatgtaatggcctatcccatgacctattaagtgaacactaagaaaagttaagtgtatgaaaggaaaagcttattgagacctactaacaacc

SEQ ID NO: 31211 - DNA, 580 bp, Arabidopsis thaliana columbia
tcctcaaattgcagcactggatttttatggccttaccaaatatttaattacttatgaatctcgaaaattttcagatatgttgaaacaattccagtcactcgtaaacagcactacggatcctagtgctaaaggttcctatcatgtatgcgtaggaacgtttgacaaaggtactggttgttttgatgacgccttcagacatttggcatccaaggactatatcactttggaatggagtgttgaatgtacgtttgacatggcagctgggtgtgaagatgagctgtcaactttcaaacctaatccacaactcttcaaagatatttctattgtcaaaaatctgtctattatgggtttggtgattgtgaaactatttctgaaaaaataaaaaacgttatattagtgttgttattgcctctttttaagatatcccataaatctctacaaaaatatcgacgattgaattgagaaaagttaatggatctctcattatgagaaagttttgacttttgagaaatcggtatgacaattatcttcacatgatttattaaacttcttcctatatatttttaatttttaattatat

SEQ ID NO: 31212 - DNA, 565 bp, Arabidopsis thaliana columbia
tagttttttttttcttgtttttgttgtttcatcatctgcaagatttagtacggagattacaaaaagtgaaatcaacagtatctgcacacatacagaagccaataccaatgcttcattgtgctttgagttcctgaactcatcccctgaaattgcatcactggatttctatggccttaccaaatatatacttacttataattctcgaaaaacttcagatatgctgaaacaattccaggcactcgtaagaagcacaacggatcccaacgctaaaggttcctaccatgtatgtgcagaaatgttcgacaaagctactgattgttttgatgacgccttcacaactttggcatccaaggactatatcactttagaacaaagggttgtttgtacgtttgacatgggggatgggtgtaaagaagagctgttaactttcactcctagcccacaactcttcacagatgtttctattgtcaaacatctttcttctatggttttcgtgattctagattatcatctgacaccataaatcacagtcatcttcagtttggtatagtgtgtttaattatat

SEQ ID NO: 31213 - DNA, 497 bp, Arabidopsis thaliana columbia
ccaaattcaattaattacacaaaatctatattttacgtggggcctaatccatgtcactatcattcttatatttaactataatcactaaatttatgtattattttaaataaatatagagtattaaacatttgaaaatactgttattgggttatgaagtaaaaatagaaatcctactgtattcctagtttccttttatattcccacgaacgattttgctgtatgtactcgtatgtatcttacgaagtgacgttttacaccatgtcagaatatgttaacagtggtattacatagaaataaaactgtactttaatttagttatttttgttaattaaaatattaatatttaaatacaatatcctatattctaattagtttacaaaaaaagtcaaagttaaccgttttgcttaactgtaattttatcatttcaatatgttaaaattattagatggaaaccagaataaaattcgaaaacaattttttttacaaagtgaatagaa

SEQ ID NO: 31214 - DNA, 1219 bp, Arabidopsis thaliana columbia
ggtctatattttcctcgaagattacctccccaaaatgtacgtgttcatccataaagtcatccaagcggtgaacaatcatttcatcaatccagtagttcacaacaacaaaattattaatgagctaactctatatgtcaaaaaagattcatattatttacctgaggagtagatccgtcgatgttgagggcgatccataaaataaaactagaatttttttttgtactagtatttcacatgttagagcatttccatcgatgagtttttaaaaaatttagaagaaatttaaaatattatattaaaaatacaatatgaattaaaaaaaaaggagaaaaatggtgcttatataagagattttagattttaagagtctttataacatttaatcattattttttatagcacatttatttagaactctaagtaagagttttaaatccgaaagaaaacaaattgtcacaccaaacttctccatttttagtctatgattgaacaaaagaaattattgttgtaataattaaaaaagaatttaagtattttttacacaacgaatgagttggtaagaaggatgttgttgagaagtcttcatcataaactatagtcgtttgtatccattctcattcactaaagattggtgtcctgttttatctttctttactcaagattctttctattagagcaacctttacatagacgaaagctcaacaaacgcctaagcttcttgttccacccaaaatagaatcaaagactaacacaagtggatgtcttttagtctctacacgtggctaaatccgaaccttacatcagagccccatagaaaggctagtaatgaaaaacagagtgtgaaaacagaggaggtgcccaaacttgaagcaccactgcctgggttgcttgggttgaagactccggttggaccaaacaccggaggagttcccgggaacggtgttcctggaaatggagttcccggaaatggagtggttccgtttgtgggagttgtcccgttggtggtgttgttgatggaggagacctagtagagctgttacaagataaggaacaaagtaaaataatgtgaatgaagcagttttaggttaatgaaagtgatcagcaaacatacctagggcttgacggatagatgcaacattagccaaatctgcaccacagaaaaaaacatcatcaagatcacaaactttttctcacaaaaggttttagacttttaggagta

SEQ ID NO: 31215 - DNA, 503 bp, Arabidopsis thaliana columbia
tttttgtaaaataatctcacatattattccaataccaacatctgatctccaaggaatccataaaagttaagctgtttttatcaccatgaaagtacaagattttttaacgcatttattttgtcagaaagatttttttcactcattaacatttaactttctagcaaaaaacaaaaattacttttaaaatcactgcataatcaaacagtaaaatgataagtaaattggttcaacaaaagtcaagaaacataatctttatatttttgaaaaatctatcgtttgatgatttaattattaatgggaataaaaatttcaacggcgaaaagaaaagggacaactttattgtacagcatatttgctttatgtgtactgcgaaaataactttttcacagttgtaaaataaaaacattttaatatctcatttttttgatttcacaacaaaaacaataaaataaaaatcttttataaataaacactccctatctcttcttgtttccccgcccctg

SEQ ID NO: 31216 - DNA, 533 bp, Arabidopsis thaliana columbia
tagtactaggtcccactacgatataaaaaggaaagatacgatttttctttatctctaaacacgaaacatatactgtatgatggtttgtaatagatggtataatcagaatgcatttgaatagttgattaacattttcgctttcgtaaagatgaaacagagagatataattctacaacatttgccggagtccaattgtccaaaagtaatatctttaattcatttttaacagaaaacaaaagtaacatctctatgaatcatggtttatagcccattaatatgtagttcatacatatctaaaaatatattatcgtctactggaaattattgcaaggagattcctaatagactttctaggactattaattaatagggctattgattatcagttgtttcataagttaagtaggaacactaaagtataattgaacaatagactatttatttcgtatactgtattagtgtattctaaattgtattttattacgttccacgtaattgggccataagaagacccggcaatccacgtgaaagag

SEQ ID NO: 31217 - DNA, 579 bp, Arabidopsis thaliana columbia
cgttccacgtaattgggccataagaagacccggcaatccacgtgaaagagaatccttcccactagcatccacgttgccacattaatttttaaatagtttctcatcaattaaacattataatattaatcaccataaacatcaccataaattttttgttggtacaacaatctccatcttttgtttgtcgcatatcttcggataacaaactttttttagtggaatgtgttttctaaatggtaaatgaccatactatatactagtagaacgtaaaaaacaaaatgctaaatccaatacaacttcttaaaccttgtgtaaaacttttaaattagcaaaaaaaatattaacgagatacctatcaggctactacaccacaattaatctcagagagcccaaaacaataatcattaattcattacatatccctaggagaactcctttttaaaatctttcaaaaactttagcatttccgatggtcaaaatccccaaaataataatatggatccgttccacgcgctccttgcaatttataaataaaattcattagaccaaccttattttttacccttatgtatatagtat

SEQ ID NO: 31218 - DNA, 557 bp, Arabidopsis thaliana columbia
tgaagatttctttgatatcatcaacaacagtgactagaagcttccactcgactggagttaagaagatgagcggaggaggacatggtggttacgatgaatactacctccacgcaaaacacatgtacaatttggaccgcatgaagtaccaagctctcaagatgtctctcggtgtattcaccgctttcagcatcggtgttggggttcctatcttcgcagtcgttttccagcagaggaagactcaatctggttaagtccctcaggatgctcttgttcacagcttgaataatttgtatgaattctcaaactctgcttttgcaagagagtttttctttctccctttggatcttagccacaagtcttatcgttatggttaagtcttctgtgtcttcctcttttgctggctgtttgatgctgtaataatgataatctgacagatatatttttttttagtttgattggaagtgaaagttttgtttgagtatcgtagaacccaaaagccaagaaagatcaacatatgcacaaatctattaataaaaaggtacaatcaaaaggagaga

SEQ ID NO: 31219 - DNA, 519 bp, Arabidopsis thaliana columbia
gtttcaggtatgcttcgttgtatgcaaagtctcttctaataatgcttcgggaagacggtatctttacccggcctcttggaaacgttatctatctcatgtgtggcccttgcacctcgccggaaatttgccgccggttgctcacgaagctctacaaaaggctcggagaattcaatagaacatgaaacccaaaactctctctccagcttattttgttgtcatctctgtatctgttgcatattttaatgacatatggaatctgaattttctattggtaggtagatctatggaattcttttcttttctttttttcccttcacgagatctatcggtttatggaaattagtataaagatatcggacaccaaatttaatgcaagatcagtttcatactaatagacaaaaaagaaaaatattctgtaataattcttttgatgaagtaaaaagttgccttaaagtgtaaagatgagtcctacatggatctacggctgagattcatcggacaaagactaatgaccactgt

SEQ ID NO: 31220 - DNA, 902 bp, Arabidopsis thaliana columbia
gatgagattgtcgttactgtgtaggagggaaacaattatcaaaatattgaattttaaaaaataaattcatccgttataaattaatttaacctaaaaattagtttctctttaattttttgtttttgaaaatgggcccataagttaccaaataaagccttctaaaatgtgggcttttcaggcccatatattgtttggatttgtttcctttttttattccattttcttgaactataaatcttgttcgtttcctcttctaaatctctcgctttcaccaaccaaacccagaagaaagctcgagatcaatatcgaataaggatcacaaaattagggttttaatttgatagagaagatgaatttcagaagctttgaggagttctggcctttctacatgatgcaacactcgaatccatcgacgcgaaggttgcacttcataggtatcatcgcgagcatcgttgctttgatatgttcgattttgatcaactggtggttcttagctctggtgcctctgcttgggtacggattcgcgtggtatagccacttcttcgtggaagggaatgttccggcgagctttgggcatccgctttggtcgtttctctgcgatctcaagatgtttagtctgatgctcacaggaagcatggagagagagatgaagagacttggtaagaggccattgttgcagctctcttgaagcagcagcagatatctctatagaattgttcttgattcttcttattgcgttctgcgattggattttagactccagtttgtaattacttcatggaatcgttgtttgcgaatgatcatttcttcaaattcaaatttcgtatgaacaaaacataaattctcaagaaattaagttgtcaaaaactttataaactcagaaaagagttgatctaatacta

SEQ ID NO: 31221 - DNA, 541 bp, Arabidopsis thaliana columbia
attccgaagaatggggctattataccgccaaggaagaggtatcatcaatccacgtggttcatttctttgtttgataaatggattgtatagttcttgttccgatttgtgtatgttacttgagatccagctggatgcattgatggggtcactaaaccgtaaaggagagagggaactgtcattatatacacaactagagatattctatgacagaatatggtcagtttatagcttcccatttctattttgcataatctgcagtatttattattctggtaacttgttctaccctcactttaatgcacatgtagaagagtaacaccacatttatcgaagtccccttgtttatgtgtaatggctttaaaacctggcgatgacttgtgatttgcagctctacactacaaaagaggacgaaggacattgctcacaacatagaaatggaagaagcagtggttaggagatctacccgtgtaagagctccactacatgaaaatccagctagtgccttcttgagatatgttacaagtggaaagaggactaacgt

SEQ ID NO: 31222 - DNA, 896 bp, Arabidopsis thaliana columbia
tgaccaatcagccagaaggtccacaatggccatactcttagtgaaatctacaaaatgtaagaagctccaatataccggatcaacacggggatagaccctctttctgcatgtttcgtctgagcattgtttgctctttcctgcttcctttggaaaagttttacttccacatgatccacaaaattgtgacacgttgtgccattcaagtaacgccctggcctgtcattaggtatataagcaccaatacaatggtattatcaatattgtgggagaaaagcgagaaactatcccaaagttttgaaatgcagcagtttcagcaaataagctctaataataatagcattcaaagaactttcagccatggatacgactctattaccatagatgagttcgtttagctcaacttccgcaaaccatatcattaaaaaaacacaatttttaagcatgattgaaatgaaatgcatctggaaaaagctcacatacattgccggcaatagccaactcatccatagcacgttgatccgcccaatcagcagctaccattagggttcgaagctcaacaaaacacaacttcctacctcccaattcagaaacgaaaccatcctctgccaaatcaacagcccaatacaccaaatcttcttccaacttgggtcctaaatacacgagtgagtcctcattcagatcaaccccacaacttgctaacaaaaccttacaatcagccaagctgacccaacccagatgccaaatcggcgtcgtattagcatctccaccgcttgagaacaccagtggacgacccttgctaaagggaaggactttaaaatcaggggaaggtgttgagtgattagggattactggaattagggttttcagagattcgaaagcggaggtgggtgagaatg

SEQ ID NO: 31223 - DNA, 780 bp, Arabidopsis thaliana columbia
tatattccacgccataagttataaacttgaaaaatagtttactagttcttttggcgccatccgaaattgagaagaagttgagacattgaaagggagcaaagacttagttgaggtaattaagttgttgcattgaacacttagcataatttcaacaaagtttagttgaattgaactcaagtcatttcatatcacgtctagacgttctagtgcttgtgtctcaagcttcttccttaaatcccaagtttttcctgtcttaccaaatacacaaatgatcattaatcatcatcagtaagaatagtttggcaatttaataccaaggccactcttttaacaaacaaaagtaaacaaaaactcaaggtcacatgtatattatttaattatatgtaaccagattaatgattttgttgtatcttctattggttatccaaactctaaaaaatgggtaaataattttctattcgtattagacgaatttctcaataacttaacaatattaattatttataagaaaattgactattgcataataatatatgtaggtctaaatccattcattttaaaaaatatatataaatgtaaatcaagattcatatctcaaagactcaaactctaaagatgaatttggaatacaaacaacatctagatgcagaaaacctaaagtcagaacacggatgaattgggacgttgggtcatattggtttacaatctcatgatttcattttattgtttttgtttttttcttaacaaccatagcatattatgcactgtactagagtgtac

SEQ ID NO: 31224 - DNA, 565 bp, Arabidopsis thaliana columbia
caagacttatcatcccaatatccgtcacatcaacacatctgctcagtccaatctccattaaagatctacagctagagcttaaacttacaagagaggaatcagaaacatgagctccatcaatccatatagtcttgagatgcttcaaacctttgatgtactttaagaagctaccagagacttcctgtgaatcacaaagattagcagagaacactatcgagtaactagactaattcaaggtctcaatcgcaaacttaccgatacacagtgactggctttaagaagttgaatatcaggatggcctctgactatagagatcaagccagacaaactcacacggtcacacctagtgacatcaacctcctgtttatagcacttaaacatttcaaaaatcgaatattgaatccataaaagcttagtgtgtgaagaaggcaaagtaagtacctgtaatgaaggagaaccattctctagaaactgtaacccaccatcatctatcaaaggacaacttaccatatctaaaacctcaagctttaccagcaacgctatagaccggatcgaatcatttgtg

SEQ ID NO: 31225 - DNA, 789 bp, Arabidopsis thaliana columbia
tatctaacagacgccattgctgagatttttttgctgcttcttttctgtgatagtgatacagttcatcacctgaacccagggagatagaagctagaattacacttttcaatatagaataagcaaggcttgtgttgattgcatatacttcaattgttgttatttatcatagatttcattagactttgagggctccaatatttaagtaagtgaattagacttgagggctccaatttttaagcaagtgtccacagaaatttagggggttccctttgcacaatgtttcaattctcagagtttgaagtttcactcgtatattaatctgcttaatgtaaaaaccttttaacattaagactggtcttaaggctaataatcataaaccagacctaagattgaaacagagctaggaatagttggccaaacaaatacactgttaaaactgatttgtatatgaagaaaaaaagaagtgtcttcttaacgtgagacagcaggagaaacttcattacaaggattacatgtggcggacaagtaaaaccacttaccaactcggatttaggatttggttcgtggaatgctatgatccaagtcacccagcaaatggctaaaacaatgttcacggatcatcaaaattgactccaaactgtacaatggctaaaactagcatatacgtgctctttggcttttcttttcatctgaagctaccagcgtcaatgatgatgttacttctctttctgataggcatctcttgtatggcctgaaccacttgcatttacaggattcaagatcttgttt

SEQ ID NO: 31226 - DNA, 1002 bp, Arabidopsis thaliana columbia
caaaacccggtttagtttgaagtgtgaatatattttggttaaagcggctagcgattggtatttggcaaattaaattacttgtacaagaaagtagaaacgttttagtgaaatattcttcttttgtactaatcaaaagcttgtgggctttgttatatgttgtcaactgttataaatttgtatatttaatacctttgtttttcatctttctttttcaaatttatcagatttctgattgataattcaagattgcaacgatggttcatgaaatggtcctttaaaaactcataatgtttatgtgatggataacatcagatatatgatgatatggttgaaacttgaagtattctaacttgaagtcatgattcatgatccgtttaacaacgtttgaaatgagtatcagaaaatgattatcgtagatatgaaacttttcctgcagacacgttctagtattttgctaaaataatagtttgttgcttattcaaccaaacaaaaacacttgttcaagtagcgcaatatcttcgatagttcgattcattattatgatacccttcttcgacttctttgatttcctcgagttcttctccatacgtcacatgactcacatcgtcagcgatttcatggcaatgttacatgtggtggacgacatggagtatccgcgaccgcgagatgatcttgaagaggtgtttgctttatgaatgacgatgaatcggctctgttttcctgtttccaacggttgtaatcacaccatcatcgttgtcttcatctatactaatattcaaatggtcaattataaagcccaataagctaactaagcccaaaaatgaaaacacacggactcagcccatacaaattttaacacttaaggctaatgggtctgtcacgtgcggaatagactgaaaacagagcatcgcacgtgccgcatcaaaatttgaaatcacgacgacttcaaaaaaatcccaaattggtaagaaaaaaataaaaagttgcagaaaaaacagaaaa

SEQ ID NO: 31227 - DNA, 817 bp, Arabidopsis thaliana columbia
gaagaagataaaggattcaaaaaaccctaaacactccaatgtcttcttctactcttcaagcttctctttttcttcgtcctcctctccatacttcttcgtttaagctttacccttgtctattctcttcttcttcattgagtttttgtccacaatctctctcaagtttctaccgtctttcttcagttcttcacaactctcgatttcgtccccttccttgctcattgcgtcaagacaatgtcgcttccgattctgatttcattcccaaagactccgcttttgaggttacggattcagctgagagtaatagattggtttccgatactgaggtttcggaattagagacgaatgatagatttgtgggtggtgaggagacgaaaagtggaggagaagaagcggaggttagtaatggagtaacggaaggtaaggaggaagatcagaagaagagcaagtttaggattgtggtgttgatgatggcactatgggcggctataaagagagctatagagaaggtaatggagtgggaatggttaagctggtggcctttctctcgccaggagaagcggctcgagaaacttattgctgaggctgatgctaatccaaaggacgcagctttgcagggtgctttattggctgagctcaataagcatatgtacgtaatttcaccaacctctaattgattggtttcgtaggtgttgttgaattcaatttgttcttagttgattctatgtggtagctaatattttcttttaatttagtcctgaggctgtagttcaacggtttgaacaatagggaacacacagtggatagtagaggagtt

SEQ ID NO: 31228 - DNA, 671 bp, Arabidopsis thaliana columbia
taagcacatctctcattttcttctttctgtagcagagataacaatttttttttttactatgatcatgtggaaatttttgatatcctaattgatcatacaaaccataaatctagcacaacgaattctaacttagtactgagaaaaaaaaaaaccataaatcagatgaacaaagggaaaaacaaaagttcataatcttaaaatcaaaaccttgtttcgaagagccagtggttctaccatgaccacgaggaacaatagtcttctgattccgattaaacggaggtttaagaacggtatcggaggaatcttcaggtctaggacctgacgaagctaaccgagttttgatccggttcaaaccagaaggaatcgcaacagtagaagaaacacctcgatccttacgattctcttccgccatagcaaaatcaatgagaaattccgaaaagaaaaccctaatacctccaagctctggcgtctccggtatgaagagccgctttcatcgccggaagaagcgacgaggaaggtgaaactaggaacggcgatgagagaatcggaatccagagtgaggtcggcgatgaggaagaagacgatgacgatgatgatgatgagacgaagaagaagaaggattcatggttttggtgagagcttaagtgctcaatggggttggttggttttta

SEQ ID NO: 31229 - DNA, 775 bp, Arabidopsis thaliana columbia
cactccattccataacctgcacaaaatcaccaccaacttgttcagttttattatgtgtaatgaagaaagcggcttttagaaataataaggaaataactgcaaccatggcagaggaaaaccagagctttgggagaagacgaagaagatgggatccatctacatgcgaacaactctacacctcttgaatttctcacgtattcctgtcaccaattcatacacatatttgtttattcaaagatctaatcaatcatctcaacacctcttgacatcttcactctcctgttaaactattactactacatctaaaatctctaagcagagagagggagagagagagagaacctcgtggtattggaattccgacgacttcatgaccggagctagatcttgagagagagacactgaaggtgacgaaggggttttgaggacggtctcaccaatttatagaaacaagagtgtcactgttctttttttcaattcacttttttccaaattatggaaagctcagaaaatgttttcggaattttatttatttgacgtcacactgggcgcgtgtgaattagtagagagacccatccattggtcagacatatcgacaaaagaggtatgtaacctaaacctactctcctcattaagtcaataaaacacattaatactaaatacatataatcctcaaaagtcaacataacaaatccataaggaatgagaaaacaactctaccccaagagaaaaaaaaagtacgaatgaaagaagaagatcatttcacgtacgtatg

SEQ ID NO: 31230 - DNA, 1006 bp, Arabidopsis thaliana columbia
gtggttgctaaagattagtatagagaagagcttatataatcataacattgaggttgttgttgtttgacttgccctccggaactaaccttctagtgggttgtaatcatctgcagagaaagtaatttaggatagagcgttgtttacggtttgagtaaccctgtttgtggtctggattttcaaaggtgaatcccaatgagggtagagaaacgatttcaggtgttttttagtgagtgaaggattagtgtgtgaaatgtttcagtttgttgcggtcatgccgtttatgattgagaaaattgtgtatgaaaaaaatgaagtagaattgtgagagctccctaatcaaaccagatgaattagaatccgtaaaagttttgagacagctttaaccgaactttgttcgctatgagggcaacaatgttcctttattagtgagtggagccgaggaggttgcagagcagacatggtctactagaacaaggtctcttcctggtgtgtatatcctatgttcttagataataagctgcggtgagtgtagatttgcagtacaagattgcagggaagacaaagaaagtggatgaattaaagcatgataagaaaagccagagttccctgaggtcaatcaaaagtttcgagatcctctaaaactgacaaaaatgagtttttattgtaaccctctgcctattccatattgctttgtggaaatgcttcattggatttgattctctcgaataccaacatttaagtgcaattttagtggcagtggacatatatgcgcaagtgtgcacatcttctcggcagtggatgttacagtcacttttcgagagattttcagttacatggccttcctcgatcgatgttttctaatcgttattgtgtcttctcataacaattatttcgtctagtattgctttccacctacaagctggtggttttactcatctatgatcgatttgcttcttttcaacttaacaagtggtctttttggcatgcatgtacagagttttggaat

SEQ ID NO: 31231 - DNA, 610 bp, Arabidopsis thaliana columbia
cctaatgttggagaagagattgcagtcttcacgaggagaagagacgagcttggctggcaagaatgaagaggatggtccaagaaatgtggagtcatcttgaaacctttgagctcaccatagaaatggccgtaggaatcagttcgaaagactttgtagaaactcacttgttgcctatgattcttgcagataatgctgattttagctccggctatagcttctgctccggccaatgaccatgatccgaatttgtcgcaggattgacagtacaccattccttccactgccgcttccacggttttcacggcagggtatgcggtggttggaggaggaggaggaggagtgtaagcgttggccaacaccgccgtagcaatgaggatgacgagaacggagaagggtaaggctcttgagtccatgttacttgttatacactctgcttcttaaacttcttcttcttcttgatgtgtgattcaggggtaagaaatatgcgtatatatagaaacatatagaggctggtatttgattgtgtaattagtttaattttttgagaaatttgacaaattgtatgaaacgtgtgagcgactaattatgaagattatacatgtattgtatg

SEQ ID NO: 31232 - DNA, 639 bp, Arabidopsis thaliana columbia
tagtaacgaccgccagtgtgctctaaaggcaacaagcttcagcggacccgtgcttccagtcaacttggtctcagaggataagcgacgtacttcaacgatctttacgactttatggccctatatcaacctgtttcaacacccctgatcttcctcatccctggatggagaagatcagtgacgtgacatctttcgcttccaggcagtgcgggcgggatcgagcgctgatcatagcgccgtcacctccgctccacgaccagcttgcacctgagacgcgatcgacatcgacactcggtgcctgatgttgtgtcgtaggggattgtccttgcagatcaagcctgcacgaaccgcggcttgcgaaacagtaaggaacctccccgctggtatcgaccacaaatcccctaggacagccgctggtcaacaatccgaccacacccacttgtggaaattgtttttcactcaccaggaagttgaaatgatatgttcgagctgtgggtccattgaactgtccagaaatctaccgggatgaaactccagaatctcttgaaagtcgaaccatggtcgtgacgtcgaatacactctttgcggaccatggcggaaagataacaacagatactcgaacgactccgtatatgtacagag

SEQ ID NO: 31233 - DNA, 1014 bp, Arabidopsis thaliana
tgtggaatatgttctaaaaggtctgcgagatgtaaaatatataagagtaaggggtataagtgtaatttcgacatcgagacccgacccgacccgggattatgaatcctgatcgccgcggggtccaaataaatatatgtcagctcctccgttcttttattttagtccgtcgggaaataatggtaagcgaacggagctccaaggagaagaagagaagcagagctcggagcgaagattcttcatcttccgattgtatgttcttcttcttcttctcctctatgtatatactttttcttccgattcccgagaaatgccatcaatttatctatctgtgttttcgattagattttgtagttggcgttgagagtgtgacttattgttgtgaatgacataatctgatacatagtgatttatgaattgacagacgaagagaaagttaagaggcatcgaggaacagagaaagatgatgaaaggagaagtaggagaagtgataagaaggataagaaatctcacaagcaccacaaatccagtacatgtaagatactgtttctcatgttttgagttagtaaatattgttccatccgttttagaaccttgattatatgttgagtcaagttaagtttgtcgtatgataaatttgatgtgtttgcttcttcatctagagagtggtgtgtttatagttatacccatgtgagctggagttttcttgttcttgtatgccattaacggagcatcaatttagctttgtcttacctatattctcctagagaaggaagaggttgtagtcggaacctgttggtttgagggattataggcagcaagaaatatcttgttttggttacagctaaagcagctatgtttatctttcatcagcatgacttatatcatgtgtctttgcttttcagtatgatctgtttttcttgctgctgacatttttttttctcttacagcaaagaagtccaaggatgataagccgaaaaagaaacatacggaaagcgaccacaagctagtgagctc

SEQ ID NO: 31234 - DNA, 564 bp, Arabidopsis thaliana columbia
accatatgtctacaagacgccttattattgattttgaattgtttctttaagaagaagcatgagtgcaataatttctttttatgattggttttttttattcttctgattttgttctttgttgatttatcttgttaagctttttttatgtaataaaatttggctatcttgttaaatgcacttttttgttcctatttttgcttaatatatatattatatgtgtttcactatctaatgattgaaaataatttgggtaagatatatagttttagaaaaccattaagaatttatatatagtttattttgttattttcttgattcctcgttttctcacatatattatataagatacacgaaaattgaagatgactaggagaggaagagttaatcagttagtcagtggactggcagcgtaaacagttgcagaggaacccaaacccttgagagagtattgtttgtcgcgcttcatatcccatgcttgcatctatataacatatccgaagctcttcacctgaaaatatgcatgtagtgttacaatcaagtgaaatgacacaagattgagtgaat

SEQ ID NO: 31235 - DNA, 573 bp, Arabidopsis thaliana columbia
gccagtttgctctaaagtcaccaacagccttgccatccccgttccttgaagggagtctatcaagattcccagttttgcgcacgtcttcaatcggagtcctcagcaactccaacgccgctcttttccatcaccgccgccgagttctccttcccctcatgctccaaagtccagagtacacttaggcgaccgtcctcgttctatctcagccgatatagacaaactcaggatggcattcagcatgggggctgcaaaccctcccgccgaattgggaccggaacttccagatctatatgcggaggtaagacctctggattccgtgtacactcgatcaattccggccgtaacgtgcctaacgctcggaacaggaagtcggtttcaaaggcgtttccggcgacagtaacgtccaactcctccctacaccttggcctgccgatgcgcttcctgccccttcctgcaccttactcgctgtcgcagccaccaaaggcatagtagtcggtgctggtcgaacacgttatgtgttgcgtctactgagtccgtcagagcggctatatcgcagatgacgagaaagagaag

SEQ ID NO: 31236 - DNA, 506 bp, Arabidopsis thaliana columbia
atcaacaaaagtttcatggctcatggaggatggacctactatcgatgaacagaaaaatgaataatcaaaacttccctaaacacatatcaatacgtgatgatactataaccaacagtaacgttttcatgtctttgctcctacgtttatggccacactactcaggaagattcccaccaaattttcaaaccttacctacatatctaacaatcgtggtttaggtggacaatcgatggaccaagtctctgttggtttccagttcattcgcagtgtaagttgttactgctggaaaatttcaaaggtgggaagaacaggaaagagtagagccgtaaaaccatgggagacaacgaagaagaagaccaatacaaggaagacagcaaaaatgaagaaaaaatagatgaggaagcaaattagcaatgacagtagaaccatgctgtgtccaacaggatttacctgtgttgccatggtgtctccaacaggaggacaattctcgctaggtgtaaccaata

SEQ ID NO: 31237 - DNA, 504 bp, Arabidopsis thaliana columbia
gacttgatttgtcgattggtaacaaaatttaatacaaaaaagacgcaaatatacatgtcaatttcacaaggaaaatttgcactaatattaaaatatcgatattaataattgagtgatatgtgtgttatagcttttgggtcatgctaaggttgctaacttgtaacaacaatttagaaatagacaacccaacatatttctctcccagttttatgtttttgctcatttttaaagcttttttaaaagctaaacgaatttaattggtgactgatatttttcatcgtagtttaaaactaaagagaatcaatttctaagattaatcggccaagcatcttagcaatttacaaatgtaaaataagattccagttcgtagccgtaaatgttgcataccgtctgttatttaaaattattttaccgctcttagctatacgcttttgttaaactagccgtttgaatgctaaataccaaaaataccataagaagtgaaaaacaaaatttgtactactg

SEQ ID NO: 31238 - DNA, 622 bp, Arabidopsis thaliana columbia
gaggcagtaaattcccagtttattagcgacgcaactgaagacccgtttcagtttgtcggtatgaagcaaccttcccctcctcccgtgcttgctcaagtgcatcaagagttagcccaaatttgcccatctaaagtagctgatcctagaccaggacctgcaattccttccctagaaggaaaagagggcagcaattcttatcagcatttgcatgtggtatgttccagctgtatcttctttcacttttgtgcagtttccaccaattccatagtgtttgtgagagtaaagtggaagggatatgcatatcaagtagaaaattatccatgattagtctaattatttggtatgtgttcaagaatcaacacattaaatcatcgaagtattggattcatgaccattacagcttcttaaaagcttgctagaatcggttctggaaatctttctctttcacctcttcttaatctactactaatgttgtcaccctttatttaaatttgctgaagcctgtgcgcataatggatgattcctaaggctagctcggtcaaacacagaacggaatttagaacttgtggagtacttgctggttctctggtgagtagatggaactttgcagttataattttga

SEQ ID NO: 31239 - DNA, 532 bp, Arabidopsis thaliana columbia
ccagaggtgaagaaacaagaaacttaataatcagcaaattattacacagtaacaattacaattccagatccgaaacccaattgtccagctttagatccaagacagcttttattaaaatgacacagaaacaaaacaacaaatcactcgagagaaagtctcgcagagcgtaaaaccaaaatatcatcttcttactgagtcttggtgggtacccatgattggtaccgagtccagttcttttgtcccgggttcaaggtatgtcccttcgaatggtagatgtatgcatcaccttctccagagaagttctctttatgctcaagcccatacctttttggtttcaaactcaagagcttgaaacagagacattggtatttattatcaagttacaaggcaatatattatctattgattgaacgagacagcgaatttgaaatggctcttggttttactcatcgccagtgtgatcagtgatgaaatgaagccaccgtgccattcagctggtacttgagatgcgttgtacgatcctttgaagcat

SEQ ID NO: 31240 - DNA, 654 bp, Arabidopsis thaliana columbia
aaaagcattccagtttattcatagtttacatataacatagatgtaaaaaatgttagaaccatcttataacttttttgataaagaaacaatacaagaacttattccacacctttttattctttcttttgggaggttttgaatttcaggcaacttaaattcatctacgttggtaaaaacaattctttatcctcagaaatgtttattggaaattgtgtagaactcatctataacttgtctaaaatattaaacacatgattttgaagaagattgactacatcctcatgagagctcatttgctatggttgaaacctggacacattttaacaaatgcaagtggagtgaagaaccggttcttgtttgatactatacaaagggaaatgtcgatctaactgaagttagtttcatctctgctgttagggtcgatttagtctcggttcactgattctttttaccaaatagtttaataagctccagtgcgggcattagaaataaaaatggcgagataataaggtaatgatgttactcaatcaaataataataatcactccttagcctagcctgcccttttgctttttatgaaaaagtttcaaactccaaaaagctattttttagatgcttattccaatgaggcagaaagaaagaaacactaaagat

SEQ ID NO: 31241 - DNA, 413 bp, Arabidopsis thaliana columbia
tctctttcacttcccacatacgctgaagttaatcagcagaaccagcgtcctcctccttcactctttcccttaccttttgacttggctgaagccttggctgccttcacacctataggccttttaagactttcttgttctacagatgaaagtttagctttcttcttggcagaaactttgatcagtcttgaggattctccaaacatgctcaaggatgaatttgtttttttgatcttgatggtaaagcttgtaggcaagcacgagaatgtcatattgagtctctcccctgcgaggagtccgacaggcaaactcataacagcctgcaaagttcatgatgagctgagagaagagagaaggtcgttgaagcgaagaccggagaagtgaggccctcgaggagatgcaatggaagagatggg

SEQ ID NO: 31242 - DNA, 252 bp, Arabidopsis thaliana columbia
tgtgctctcctggctgatcccgccaggtttggtccccgtctgcgggccagtggtgcgtgccctcgcgaccactctccagtctggcgtcacggtcgaagttggaggtcgacctgtctcctacgtagaacgggtctaatgtctgctttacgctcccacgcggtgtcgtttcccgtgtcccgggtgacaggggtcgccggtcggttgtcgtcctcttgcctcttgtcaatagcgcatatcccctgtaggtcgttt

SEQ ID NO: 31243 - DNA, 826 bp, Arabidopsis thaliana columbia
tcatgactgttattactttttaaaaaagttgcgtctaatataatcgtcaacttcacttccaccattgaatctttgttcctcgggtcatccttcttcctttcgtggtcacccctagactttgatttaccctttcctcgtactgtttcaataacccagacattttcctttataaatcccgtctttacaagttgaatttgcaagtcttaaaagtaggattaagtaacattcagtcacctttgttacttcctcgttttgtttcttaaacaatatcaacaaatttcaaaataaatgagaatcctcgtagcaagactaagaaacagtaccaaaatgaccatacgagtatcacaatataactactttaaaagacgctattaagagattgcacatgacatgagtatccaaaaccaacatgtatctaaactcgtcgttagtgttcaggtttttcaacgggcctttcttatttgggcctctgatttgggtccatcaattctcgttgtatctttttgggctatacgaaacacattaaccattccattctgaatctctgattatgtcatttgttttttcaaagtctacgacgatatccccacataaaacatttctttcttatactcatagatgctcgtgtcgtgtgctattgaatgtaaaaacactacaagaaatgaatgtacacctcggcgaaaaaaaagaaaaaagaatgtacaccacttgattcgttgtatgtgactggcgactattattataagacaaactgacaaagaacaagaccaattgctacaaacatcttcactgataaaaaaaacatcttcactgataaacaacatct

SEQ ID NO: 31244 - DNA, 689 bp, Arabidopsis thaliana columbia
tcgatctagaggctagaggatcccctccaaaatccatttctctaacaaacttagtcttctctctcagactcgaacccgtgacaacatgaagctgcgggttttcgctaaaagtgataactttccctttccacggctcttcattaagttccgaaaccaataaccctaacgcaatacaaacattcataggtgtaccagccatgcttcccgagacatcacaaatcgccaatgagttcttcaacttccctttcttggcaagatcatcaaccattctcgcccattgaagctctgctacttcttcaccttcactatcattcaaaagctgactgataatctgatgaggaagcaacgcaccagccgccatcttcttcttcccggatttcacatcctccaaaaactcggtgaacctctcgctatcgtgttccgcaaagcgtgaactataattctgcatggctatagaaggaactctattgtacttcaacagattccattccttggcactcatagacacctctggcaactcaagagctttatgtaacgggacaagaacttcttttctcaacctatctctaatcctatatgcataatgcacttcttcgataccttcttcgtattcctctctaaggaacattcttctagcaatagcgtcacatatcacagtagtcttatcatacgaagaatcccacagagga

SEQ ID NO: 31245 - DNA, 457 bp, Arabidopsis thaliana columbia
cccaaactcgcacccgtgacaatatgcagctccgggttttcgctaaaggtgataactttccctttccacggctcttcactaagctccgaaaccagtaacccgagcgctacacaaacctccataggtgtaccagacatacttccagagacatcacaaaccgccagtgaattcttaagcttccctttcttagcaagatcatcaaccattctcgcccattgaagttctgcaacttccgcaccaacttcactcccactatcatcctccagctggttgattatctgatgaggaagcaacgcaccagccgcaatcttcttctttccggacttcacatcctccaaaaactcggtaaacctctcgctatcatgttcctcaaacagcttcttgtaattcttcatagcaacagaaggaactctattatacttcaacaaattccattccttagcactcatgaacaact

SEQ ID NO: 31246 - DNA, 825 bp, Arabidopsis thaliana columbia
cactgtatttgagttctttgataatgtgatcaatgtaacattgctttaagattttctatgtggaaatgatgccttaagctcaccattgtagtgtacattcctttgaagcttccttataagaatgtgtgatggaatcgagaactcgagactgtctttctctgatttttttttgctctcacttgttcttgtgcatgagttccatattacttttggcgaaatataaccattgtagttcaatgtgtacctaagaggacgacactttgaattgatgttttatgatgttttgcttgacgataatagtgtcacttcaaatgcaggacttggcacgaaatagtaaagttagtacacatatgttttcaagcacagtgttgtaccacacagcatcatatcttcttctttgggtttaagaaaaccgtgtggtagtagtgaaggcagttgcagcagcagcaaccatgaagaggaagatggaagaagcttaatgaaagaagggacaacacagagaacaagaacgatagtgctcgttacgacgcactcttgaatgttaaagatgtcaaggatacaaactggctacttaacattgatgatgaatctcctcaatctctcatcttcgacaatgcttttgactctcctcctgatctattctctcctctctgagactctgactccttttgagttttctttcctgtttgttgtagttaaaaacaagagagctgcttggaaaaataatcctgtttcactctttttaaattcttatgcaatcaagagaaaaacattacacatagttcttctactcgttgtttttttctttcaaagtgtttgtttgta

SEQ ID NO: 31247 - DNA, 714 bp, Arabidopsis thaliana
ccattggttggatcagcttcagcattatcagatatattcagtccaacaaaatcggctgataaaagaaaaagagattaaatccaatagaaaataagaagaaaaaaatatatatttttacccaaaaaactatagtaacgcagcatctaaactagaaatcgttataagtacataactaacttcctcctccgtcgcctccaccaccacatcctcctccaccacaaccaccacatcctcctcctccaccaccatgatgtccaccaccacaaccaccgcctccatgatgtccaccgtgatgataaccggcatgatggtggcggtgattgtcggaatcggagatagggagagtcgacgcagcagctggataaaacatgtagctaccattgcttgttcttactgctcttgttctctggttgttaggcttttgtgcagatccctcattaatgacagtctccttcttcccccactccaaaatgcacacgattattaccatcaaagcaaagaaaccacaaatagctatgacaccaaaaaaaggagttaccatgatctctctctctctctctctctctctggaatagtataaattttcaaataatcacgttttcttccaccaatgcaaccgtatttatctcattatctgttttctggacagaaattattatttattttgtatttggattaggtaaaggctttgggctagaggcgtagttaattgat

SEQ ID NO: 31248 - DNA, 718 bp, Arabidopsis thaliana columbia
tttattagctctttaaaaaatattatttaattaacagaaattaatttccaattaatatatagatattataacacatgacaaaacaaggttgtcttctacaagtatttgaatttcttaccattaaaaaagagttggaataataatttaatatgtattttgtttgtggtttaaaatagattattttggtacataaaatttttctatgaaaaataagaataattggtaatgttatttttacaattgacatgtttaatttttttttattgtaacataatctaagtaaaatttgatgatatattttggtgttctctttcaccaaattattctttagatcttagaaatgttaagatatcttagtttaagcgagtatgagtgtatgttgataactttattaactcattttaagattcgaaaatagtattaatcagttcatatatagtcccataattatatgtataaaaaggtaataattgaggttaaaataaacaagacgaaagggtagacttttttgggatatagttatgctaatgttacatctagaagaatataagcttttttgtgacattcttgtgagatgatgacacgtggaaacattaaggtgttttagataacgataaacggtaggcaactaaacttgttgggattacaggtggtggtggtgtcttgctctagacttagacaatgaactaacctctcttttgttagtttttttatatag

SEQ ID NO: 31249 - DNA, 585 bp, Arabidopsis thaliana columbia
gaaaacctataaagaggtctcataaaatatgagttcacattttgccaacatagaatttaactataaaacttaggttattactctgaagctaactactaatttaaaagtgtagatcaacaaccattcttgctcttagttgtgtgtaggggagttggggacaatacgagcgcactatccttgaggagaggagggaagaacggattcaacggaaacatgtgaggccaacagttagcatctaaggtcgaaaacgccttgcaacatgcggcttcgacattttcgaattttccagagaaaattgatttggcgatctcgagcacacatccttcaacattgaagagagacgaccaacattttaccagatcaataggtaagccaggtgggaaaattcctggaaccgtcgtcggtggtgtttgcatatgagctactccttgagtgacaaaaatggcaacacaaagggaaacaatcaaaatgactgagagaatagttttgcttccatctttctttgttaacctttgatatgttttgttcctttttggtttagatgtttggatggttttggatttagcaagaaaggtagtatttata

SEQ ID NO: 31250 - DNA, 631 bp, Arabidopsis thaliana columbia
aacataaaaccaaaaagaaagaaagaaatacgtagaaaaaggattaacaagaaagatggcaaccaaaacttttctctcaatctctttaatggtttccctttgtgctgccatttttgtctctcaaggagtagctcatatgcaaacaccaccaacggttccaggacttctcctacctggcttacctattgatcttgtaaaatgttggtcgtctctcttcaatgttgaaggatgtgtgctcgagatcgccaaatcaattttctctggaaaattcgaaaatgtcgaagccgcatgttgcaaggcgttttcaaccttagatgctaactgttggccccatatgtttccgttgaatccatttttccctcctctcctcaaggacaactgcgctcgcattgtccccaactcccctacacacaactaagaacaagaattattgctggtctacgcttttaaattagtcattagctccaaagtctaataagtttcaatgtttattttgttagcaaaatgtgaactatatcttggaagagttctctttttatagtttactcaatgacataaaatttcaatattttcgttttatataatacgtcttataaatgtgttttgttggttgccaaaagaaaacattgga

SEQ ID NO: 31251 - DNA, 699 bp, Arabidopsis thaliana columbia
acctacatgaagcatgactcgttaggcaccactatgaaaagtgatagagtatctgtaactgaaatgttgttttccattaaaaagtattgtagttgtcaaaacagagttgaagtataacaagactatatacctgccgctcttctttaagcatatgttggcatatagatgactggatggtgcctatgcataaaataacttcacgaagtacatcgcttctacttcctatttcttcttcaagaacatgtagccagtggaaaattgaggtaaagagatcatctgtgccagcatgctcaagtgagtaattagaaactatgtttttcactcgtttatctagcgccaaaaatataacctgccagtaagaaaagcatatcaaaagccactgttacttatcatgataaggatttcaatctaagagtcagattcttgacatcaataaaagattcacaaactgaaactagagactgcaacacgaatttagacaaggtcttttaccctagtaacctagtctaaccaagaattcaaaggacaatctttatttctctagttgtaattagcttcaggaagcaagagagttctaaactcgaatttaatttgtgaacataaagaggagtaacagagattaaaacagagcaactcatttagggaaaaaaaaacttataaaggtgataaaatctagcctcatcttcagctgcgctatga

SEQ ID NO: 31252 - DNA, 1063 bp, Arabidopsis thaliana columbia
tctagccgggtaccgagctcgaagttaatggattgtatgaacaaatacaatgtgtttcttgacttctcgacttcttgacttatggatctactgttgtttaacaatcggttcataacagatatattctaagatttgatgcatggccgtataaaaaatcacatattttatttttcacatcttatttgtcaatagataaacgataacttataaagaaacacatttcactttacagctatgaagaaaaaaaaagagcatatataaatatagtgaaaatattgtatagatgatatatttgtaataccaattccatcctgtttgagttcaggccaagactgagacaagcagaatggttaaatcacaattctcaactagcttaattggcacattttatcaaatctaaattcccttacttattataataattaaaaaataaaagtcaccgacacaacttccaaaaatacaaagtctccaaaatggctcacctccaaaaaaaaacttgttgtatataataagaaactacacatatctataaagagcaagaaaaagagaaattattgtttctctctaagaaacaacatcataaattagaaatcaagtaaaacaaaaacgaatgactcctttgaagattatggacatagtgattgcggtaatattcttgataatattcatcttatgtctcttctactttcgttaccaaaagagtcagaacaacggccggaaagaggccggtggctgttgctgaagcgtcgaggcggctaccaccgcacgacttgtcactcaaaccatttcttacaaagatttttatgattatatgtatttgtttttgaaatatgaaagatgctctatagtttgggtttgtgtgagcaagttgtagagatgaaacaaaccatagacatgaaacaatttgttttattgtttattttacatcatattttattatatattgcaaactactagattttgtataatttaaaatatataacgtttaatcgtagaacatatatatatatatatgtagtgctagctgatatctaactttgaaaactaatattaatttgcaaat

SEQ ID NO: 31253 - DNA, 504 bp, Arabidopsis thaliana columbia
ctactcacagtaataaaaaagaaaagaaaagaatgaatgtgatcttagtagataatatttgctaactaatatgtagaagtaagagaaaaaatagatctgttgcaaatgtaattttttgttgcacaaggcctgaaattgaactaattaaaactgtgatctaaaactaagagtaaagataatagtttagtttagaaagatgattcaactgtgacttgatacacaagtaaaatgccaatagctccaatatgtagtatgttacgataagatcaaaccagttacgcgatatttccagattcccaccataataaagaaggaacacatccataaaacaaacagctaaataaaggataaaaaagcaaaattaagtggatagattcttagagaatatcacaactaaacatgttgtgattataaaaaaaacggtcttatcacaaatctgatgcttaattcacttcccatcaagctgaatggtccataacttgaaattaatattgtcacacgcag

SEQ ID NO: 31254 - DNA, 609 bp, Arabidopsis thaliana columbia
ccaaacgcccaaagctattatcttggatcattatggcttaaacttactcgctgacatttttgacaaaaaaataaaaagaaaaatactccttttctttagagcttttacgagttcttcataacaacaaaattatttgactttagataacaactctaaattacaagttactttttttctttttctttgtgcaagtacaaacctactaaattacaagttactacaatccaaaacttgttcataaaacacaccacatcttctccaccgcgataaccgcctgaatcttgtctcctacgtttccttttatgtcaaaacaatgccacaaaacgcagagcaaaataattcttctttaggcaagcatgtgacgtctgcgtgctgattcgtaggaaactgggctcttcaatgggccttattttcggcctcttgtttaaaactttctagataagctcttcccttgtgttatagctgaaagtcttcccatggtttttactttaaggggtaggtaatttggtttattttcggtttcggattggattaggtttatttggttggtaataactagatggatcacaacaaaggtagtttattcggtttagtatgttggtttggatt

SEQ ID NO: 31255 - DNA, 515 bp, Arabidopsis thaliana columbia
tgttatacatttgaagtcacaacgctaattagtagagctttgaacttttcttgtttgtcttatatatggaggaatgtttttgcttttgtttgctactcaacgaaatttctcatatgtttttattgtcgaaacgaaagaagttgttgatgagaaaaaacgctacttcacactaatcgcttaagtaggggacttccgtcatcttcacgtctactcttctaaagctaccacgtcataaaacaaaaaaccaatgaattacgtccacgtgtgaaagcttgcaaaagagtcaagccccactataatgacttttgttgaagattctcttttatttccccaaccctacttggctcgtcgacgcagccgccacgaggtcgccacgggactagaggtatcatcgtaatttctacatttcaagagattacgtgacgtctttgcccccgacatccgcgtatttccggtgctttattacaagacctttggttaaaaaggttaacgtgtccgcgtcaactttttcttgc

SEQ ID NO: 31256 - DNA, 480 bp, Arabidopsis thaliana columbia
agctcgaattcgtatatcagtgatgtgttcttaagtgattgtcttgtttgttttattgaaaagcaagtacttaacactgttacaaacgaatcgtgataaaacgattccaagatatgagtgaacgtagagttcatctttagagtttttaattggtaatgacattgttatgtttatagtaaagtttatcgtttcgtttaacttttttttgaccccagtgagtcattgttctggctccgccactggttatggttaagccaatggatagctaagctaggcacaactgcaagaagctacaaagatactaactactaagtttatatcaagaacagaaactcaaactcactatacaactcaagtaacacaagatcatacagagtgaatactggtagcatcatccgaaacttattctatgagaagagatttgagtgaaaaaaaaggcgagctcagatcaagtcaatttggccagattcgattgccctt

SEQ ID NO: 31257 - DNA, 317 bp, Arabidopsis thaliana columbia
tttcctttttctttgtgaactctcagattttcaacttctcaaaatacaacaaaagtttattgaataataacacacaatgcgaactccgaacccactttgttaaaaagtttcactttcggcgttcttttttatgcgattagaagaagtagacaaatgctaaccatcttttgaatatagatactagtctcactctctctcatttttgctttcatgcttaacttgtacttgatatattacttaactatatgcgattaatttattctgtttgaaagcgatttgttgatatggtcaaatttgaatccggttacgatatatga

SEQ ID NO: 31258 - DNA, 561 bp, Arabidopsis thaliana columbia
gggcctttttacttaatagtaacatatccgtaagattttccgaccaaaagaaaaaaaacatataacataattgtagtgcatgcatctaaactttggtaataaattcgaaacttctctcatgcgacgtggcttaaccactcatctcaatttctcccacggtctagattctctccgcttctatgtctttcccgagaaaattcgggacagcgattcacgccgctctatcttttatcgtcttctttttcttggacctcctcgacgcgattctctgtgtcgtttacgagttcgtcgatgagattttggaagaaaactcaacaggttgttactgcacggcggcggctcctcaaagtcaaaccaccgacgaaaatgagttgtcgtcggagactttattcgggaggagaaacattttccggggaatgtggtttctgggattcgcgagagaattcaaatccaagctttcccggaaactgagaaaatctaagattcatcaagagtcagtgaatcgatggtcagattgtggatgcaaatcttgcaagtcatggactaagaacgaagatggga

SEQ ID NO: 31259 - DNA, 525 bp, Arabidopsis thaliana columbia
caaagtaacttcaagtttgaaacacatcatggcttatctcaaaatccatctcaatttcacagtaagagagccaaaacaaaaacctagaaatcttcctcaaaactcataactaataaaaattaaaactaacaaaccaattcgaatgtaaaagtataattttcttctccaagttttgcttaggtgtcaggtttggagagacatggattttagtttaattgtattgattcaacaatattgttaatattacaaagaaaaaaaaaatcattaaaatatacattgataactttaattgaacagagtaaagtcgtgtactcaaaactcaattgggatggagacagagaataagaagaagaaggagatgatttgattttcttaacagatgatctatgggcaattatacttgcgagattaccactaacaatcatcaccacttcaaaactagtttgcaagcaatggaaatcgctcgtagaatctccgtttttccgcaaacttttcaacaccaccatcaaaactctcattcttcat

SEQ ID NO: 31260 - DNA, 538 bp, Arabidopsis thaliana columbia
cctattaatcatataaggcagacgaggttgaatttaaagacgtggacgcctgctgtcctatccttgcaatgataattttcatatatatatatttttttggcaaagtcttgatactaatttattacaatttggctaaatttaccgtggcaagacatgagatagatcatatattattcattttgctgagaacgcaacaaattcattttcaccaatctatgcatttcgattgaaggcttgttcatgattgtctatctaaaaattagtaacatttgtttccgctatgtacagattcactagaattgatgttgctataatgctatgattccattatggaataaaaccataaaatatttattttaaaatcaaggataatatttaaattatcatagttgtccataaagtccatgaccatatgattttacgatttatattattcagcaaatgaatattgtttctggtacgatgtgacacggcaagttcaagttggccattctttcgtgcgattgttaaatataccgatttcacaaagacataggaa

SEQ ID NO: 31261 - DNA, 563 bp, Arabidopsis thaliana columbia
caagagctaattaccactactgatatataagtctacgtacttgttgtgtttaaatcgaagtaatgccaagaaaaaagtttttgcctgatgtaaatcaatggtcggatatttataatattattttcatttttcttttgtgatagatagtacataaatcttgaactcactctgattattctcggtagtacacaaaaaaatagtaaaaaaaggaaaaaacaattatccgatcgacaatcatgtttcagtgcattaaaccagtcagaccattggtcattggatatttgaatttatataattagttgaatgcttttataaataaaattataggatgtactttcttttgtttgtcaaataggatgtagtccagtttcagaaaatactagtagtcaagaaaaccaagcgacaaattaatgtcgagagacaacttctaaattttcgaagaatttttggatttgattatcgatttgaccacaatgtacatttgatatatacaaggaaggaggcaggggaaacaacaaattcccaccctgatatttcctactttgtgttttggaaataaatgg

SEQ ID NO: 31262 - DNA, 669 bp, Arabidopsis thaliana columbia
ttttaagaagaaaaggcgtcttgtagtcctatttcttctgacttattgtcaacttttgatgactacttttttagtggcttggaagagaaattgaattgttaaaaaggcttattgatcgggctaatgagaagggatggcgaagagaatatccttttttgggaaatagtttcgtttcttttacttttaaatgaataataatgttcggaataagtgatagtgaaaggagaaaaaatctttgtttataagttttccttgatttcatgagttgtaacgctgtccgagtacctagataagagggagcttcttcaaaatccagatgaacaggccaggctactccgcgaagttccagaagttattggagaggaacttgtacaaaaccctgaagtttcgtcccctgaggctcataaaagtgacaacgagcaacgattgagtgaatctccattatcgtgcatccatgaaaccccagaagctcgcaacctctttggtggagaagatcaacaatttaataacggctatgtgatgtcaaacccatcacaactccgggaatcacatcttgtgctacggaaattaacaagggattgccaacatggattgcttctgcaggtgcgcataacatgtatagggtttcttgtttcactttgttgcatcttaccaccattgttctttgtt

SEQ ID NO: 31263 - DNA, 593 bp, Arabidopsis thaliana columbia
cttctccctatgctacagcagttacaccaccttcactttctatatcgcctccgatagcccttgtttccacctcttttatggcagccacgtcggtggtttcaactggtttgtggccgacattcatggatgctgctttaagagcctccgttaatgtcgttgacctcccgataagtgcttccgctgcggtggaaatctcttctgttgggcctacaaactttttcaaaacgtttcacatcattcggtattatattgtggtcacaattgttcaaaaccagtatgtgtttttacgtttttcgttatttcatatttgcgttttacgttgcgttaacatgagaaagtgagactacaaaataaaaattcaacataaattttttttgaaagaagtatatcaaacaaaatattaatttcctttgtgttttcaacaccatgcagtgtacggatttaactttacacagccataataattaactacaaagttgggccaagttaatattcacaatctttcttcgtccaagccaactcttgatgatactcattttgaatgtagaataatccactttaagcgtgtactagaagaacatcctttcaaaatg

SEQ ID NO: 31264 - DNA, 595 bp, Arabidopsis thaliana columbia
ccccttaatggagatgtttaaaccgtaattaatcgcatttgtatgatattcgccaaattatctttcacaacccaacaaatgagaaatttggttgttggttttaaaccttataaataggtcacggttctcaatactttaaagaccttcaattttttaaaaaaaaaatctctcatttttctgtaatggacggaagaaaatgtaattatgtcttcttgtataacctttaacgaagagatgtaaattctgatgaggggagcgagtatatgaatatcacatgaaagatattaatgcaaaagaatggaccgaccatggggtctatcagtgtgtatatactaaggaaagcaatgctcggaggtatgtggagcacatgtaggaatgcatgggtcgtggctcgtttagtcatacagtgttttccaatttaatcagataaaaaccaattattcaattcatattgttttcatcaatggtcctatctacgctccaaataaatgcttctacaataaccacacctttcttaagagaatctacgcatcaatgacatgtttgtgttgaagttatgaatatgttgggttgtagtgtaaatatctcatggatg

SEQ ID NO: 31265 - DNA, 800 bp, Arabidopsis thaliana columbia
tgaagtcgctttcggttggagaacgagccgatgcgcttgtgaagagagctgagatgaagctggctgtgaatcggcgacggaggattgattcggcggtcgaggatctggaagaggcggtgaggctcgccgccggtacagatacggcgagattgttccggctgttgggagagtgttatgagttcaagggcttgaaagagaaagcccagtggccgtttaatgaagctttaaaagctcaacctagttccgtaaacggcacgtgatgaatgagatggaccggactaggtcgtggctttgtttccttttagtataacttcttagaatttcactttgtatcctgctatttttcattatttacattatgacctcgaacgctttagttttactcagatttaaagtgtgttcaattatgcttttaaaaatgttatgacaatttgagaaaaatattcataaatggaaacagagttataccgttataggccgattacattcaaaaaataagtaataaaaccgataatccacccttgacaaaagaaaaacattaatacaaaattgaccccaaaagtttcagattcttcaacttttctcccctctacttctgtcttagcctacagttaaaaaaggaacttgaaagattcatccttatagccagaatcaagaagataagcctcgggtcatcggttagtgcggtgaatagaagtctaagcaagaacgaaccaaatgatttagtaagactggttaggccacaagaaaaactcagcttggttcataggagcttgaattgtagagtcagagaccaaagg

SEQ ID NO: 31266 - DNA, 471 bp, Arabidopsis thaliana columbia
ttttcaatttaaatgttgtttttaaatttctatgcaaataataaatgtatttaatattttttaaccaattatatttaattatctatttttttattagttgaattgattataataaacgatgtttttattaaatgagatttttatgttttcttaatttgtgtgtaaaaaccttaaatacaactaatatgaaacagaggtagtactaattacgattattttgtttctccataatatgaccgtcgttgcttaatgacgattcgacgactatgcctacattaatttacatgttggcatgttgcgtagtcaaacgaatcggcggataatgacagttaggcaatttttgtcatgtcttgaaaatgttgactttgttttagcttgttttgtggattaccgtccattaagttgacaagaaaatgcaattacgttaaaagatttcatacgggattcatattttttgacatgtaattaaat

SEQ ID NO: 31267 - DNA, 587 bp, Arabidopsis thaliana columbia
cagtcacctcctcccgttggattccttcgcctactctacccctcaaagttcgcgtaccaaccaagagaaagagatgactgtgattagagaaagggtcaacagctcctgagatttcagatctatggtcaaacaagagatggaagagagtcaacacctctctccttcttaagcccctgtcctgctccttagtttccaggaacgccgctacccatcgctgagagacagaacagagacatcttgcgcccttgtcctacaccggtaacacagtctaggccacaacacatgcactttaacaccccacctccagaacaagtgtatccgcaactacccccaagagcagatttgacagttaccaacttggagttatctaactatgaaggtggtaacccagatgactggttattcagattcgagcagtgtttttaaacccacaacgttcgtgaagaggaaaaacttgcaaaggtaatctcttctttaactggagattcaataacttggtggagatgttctaacgatagggaaaagatatactcttggaaggattttcaggataagtttaaggttaggtttaggccaagtacgagaag

SEQ ID NO: 31268 - DNA, 484 bp, Arabidopsis thaliana columbia
gtctcccctcggcgataaggaaatatctaaccagaccggcccaaggagcgggcaaaatcagaaagcatttgatcttcaaactcttgggttcttctctgattggaaatgagcttatcatcgccaaccaggtccgataaagttccaatttttgttctttcgattactgttatgccaattttagtactttgcttttgctaaattctgttgtagacagtgcttgtagctcgtccagatgttactcctcgggattatcgtttccgattggatttggatcgaatcccatcaatgtgggattggtttgttacccaaaaagatacagtattgctgctcggaagttcgtagtggcttgctcctcctcctcttccggtacataatgatttatgcttgttgatattgaaatgattttagtcgattcgggttactagctgctcattggaatgtcatatttttaattaagcctgagtttagatgttgagcatgaatg

SEQ ID NO: 31269 - DNA, 359 bp, Arabidopsis thaliana columbia
cgatttggtaccgctctcgcgacccgcaccgatagagtgctttagccctagatgtccagtcaactgctgcgcggcaaagcatttctgggagaaccagctagctatcgggtcgaatggcatttcacccttagcacaaatccattcggctgacttttgaatatcaagtggtttgggactccaactaagcttctccgaaccataaaacgtgtgcagaaatacacggcaatactccgtcagatttctctctctggtctgaaatttatcaacacgatcttctttaatagtagtctcactcttttctagaacaacaaacgcacacggggtttcacccacgtagggtgaggcatggcacaactgca

SEQ ID NO: 31270 - DNA, 477 bp, Arabidopsis thaliana
ctcaaggccgtggtggttatgatggtccttctcagggccgtggtggttatgatggtccttctcagggccgtggtggttatgatggtcctcagggtcgtggtaaaataaattaaaacattctgtattcttttacctggttcttgaactgtaattgtgtgaagaagccatgagttttgaattggtttgatgcagggcgtggacgtggacgtggaaggggaggacgtggaagaggaggaggacgtggtggtgatggtggtttcaacaacagatcagatggaccaccagtccaggcagctgcttgagagtgaggtttctcttacacaaacataaaaagaagaaaaaagcccaagtcgttggatgttttttttctatctccttgttctctcactttctttctatgtttgcttcttctgtccatcaagaagacatgtttgccataagtgtatctcattccccttcttttttttttactatcca

SEQ ID NO: 31271 - DNA, 586 bp, Arabidopsis thaliana columbia
cgactctacattggataggcccaataattgggcttttccccttagttttttattacagcgacaccgtttttaaagatgttttgtcttagctccgacagcaagtgggagatgacgtcaccttttcactgcagtttccctttactttttcctcgcaattttctctcttctctctctctgtcctccttatctcatcgtctctgactcgctgcacttagtttcagatcatataaacgaatttggtgattgatcggtgcatgacgagcgcatcggaactcttctctacacgaagatcacgtccgggtcgatccgacccgtctttagaatccgacacttcttcctatcgacaccactcacaccatcatcatcgccgtcacggcgtccatcatcataatcagcgtcatgattccgacggctgtgatcctctccggcgacccactccccgtctccgacgcttctttcaccatccggttagttactttccaccaaattagtaattactaatttcagtagttgtctgaatttggtcctttttactaaaatacccctaatttacagattcaggaacgtagtagacatattcgtgatg

SEQ ID NO: 31272 - DNA, 637 bp, Arabidopsis thaliana columbia
ccaccagttttatgggattaggttatggtttgaaatcctctggctccaagtctgagattcagctaaccatctttgcactcgcagcgatcttacccgccgctctcctcctcatctgagtctttctgcattaactaccatctcggtctcttctgttttgtgttttctcaatgaatcaagatcaactttataactttaccttacatttataaaagaagagattattggaatgattcctaaagaagtttgcagttcagaaatgaaatcggaaaacagaacaatgaagaacaatactcttcttttaactttgaatctataacattatgaacacaacaagctcaagatcaacttggaatatggctttttaaaacaccccaatagcaaaaagtttcagtctttaaattctttctctaaacactgaactgaaactattccaaactaggagccacttctgttgggttggactcaaacacatcttcagagtttgaactctctgcttcatcaagaaggtcacgagattgaatcgcctctttatatactggcgtctccttgaaatccgtcgcaccttcgttatacgtcccgccgcaagtccaccagagattagctgttacaacattttgacccatagtgaattgattgg

SEQ ID NO: 31273 - DNA, 528 bp, Arabidopsis thaliana columbia
aaaaatgtgaacattataaaaatgttggtatctaaaaagtagaaaaacaaggtgctttatgaaaagttgaaaataagaatggagttacccaatatataattaactaatcagaagtttaagacacagatgtaatgtagtaatctaatccaaccttattatctcctgcacatccaaacagaatccaagattacaatagctttatccaatgactgatagacacgtgtcaaaaggtaccatcactgtcagctttccctctcgctccacctacatacttctgagtgagcgagaaaatgagaacaaaacttagaaagcagagaagagttaaagtgttagagagagagagagacagagatcggagatgtgtagcaacaaagcaagtccggtcgtcggagaagaaaaacagagtacgagatcatcgaagaggatcaagaagagaaaaaacagagaagctaccaccaccatggaggataagtcttcttccaatcttgacgcgtctcgtaagatcagaacaaaaccgaaaaaacccaa

SEQ ID NO: 31274 - DNA, 553 bp, Arabidopsis thaliana columbia
tttaatgcgccaaggaaattgcgctcgcagatattctcgagctctgattgcatcaattatgcttctatattctgctagagcaaatcctttcactggatcaaaaaagaaacggtctacagggccgtacctgtcaagctgaaaccttagatgaccttctgtttcatctggtcctaaatagcctaaccacaactgccccgaagccggaaaaatgtcaaaagcagtggggtccccatccaaataccaagcaatttgccctgatgaagggccatggggtactgcctgataaacaggtgatcctgcaagaacaaaattgttcctacgatccgtagagttacttcttaaatctgaaggccctcttgcagaaggagatggtgtatgctggtttaataatccccttgggactgaagatctaccacatgacaagtctctctggtcaacagtctcaaaatccatagatcgtgaacctccagcatcataaaccgatccagcactagagcggacatcattgtctgcagaactgtgaggtttcacatgtgaactgaaaatttccata

SEQ ID NO: 31275 - DNA, 571 bp, Arabidopsis thaliana columbia
cccctgcccatttcgtaatagtttctctatatattaatatatacatgtattaatacgtttgtatatataagttatacaagttgaagttgtttatctatatcaaaaacaaatataaacaagaaataaatatacaattcaattaatttattattatataaaaaaaattatgctcgaaattcaataatttttcaacgaatctaacaatatgatttgtttattagtaaccctaataattgttttgcctaaatcacataatttccaataataatataacggaataatacgaatatatacatatgttggtacgaataatcaaaaagatctctttgtattggttacagcggtttcttttcttcgtcgatgtcacatgttcgagtcttgttggaaattttttgaatgtttttaaatcaattaaacgacgtcgttttaataaaagacaacgtgtcatgccaaatcagcattcgtcatgccttgtcagcggattttacaattgactaacgtcaaagttagtcaatgcaggttttgacacttataataagagtttaagttcttaatttgaattttgttaaga

SEQ ID NO: 31276 - DNA, 593 bp, Arabidopsis thaliana columbia
ccccacctcgtcagcgggttttaacagttgattaacgtcaaagttagtcaatgcatattttgacacttataataagagtttaggttggtaatttgaatttgttaaaggttaaagttgaaataaacaccatctaattgtataggtaggaagaagtaccgtacaaatagtcagagttgaaataggccatttacccttattatcaaacatgtgtatattgagaaagtaataaatataaattgtttttgaattattttgcgtttgaaccgtccttcgacgaaatttatctttctctaatatagttaggccatatcatagacaatataaacatttttagtatataacatatcttaaagatatcaaatggtcaattaatggacccatttatctaagaacatgtgatttcaacatctcgtttctttgcgtaaattacttgtttggaaagagttgaatcagtgttatgggtttaagaattatttagtaccaaatctgtacctctttcgattggaaaagtgtgatatagtctatgaagtatagttgacaaaacaaattcatgaaaatatattggcgcttgcattaggaactttgtaagatag

SEQ ID NO: 31277 - DNA, 511 bp, Arabidopsis thaliana columbia
tacatccattacacttacacatgtcgtatcattattggtcaggatggttctgctaggattgtcgtagtgtgtgtgatgcactaagatcaaacggtcgtcaaggctctccttaaaagcttatgccgagaggttttttgctattttgtgtggtaattaactggtgagagagttcaacatccaatctttctctctctctctctatcttttatctctcacactcttaaaatgcttcttctatctccgatctctgcctctcttccaccgtcgtttcaccggggtaatttgatccggcgatcaattaagccgttaggtagggttgttgcaaaggccaaggacaacaccgacacatggtgagatttctggagacggcagctatagccggtagtttagtgtcgacgccggttattggatggtcactctacactttgaagaccacgggatgtggcttacctcccggaccggccggtttaatcggagcgttggaaggtgtgagctacttggtggtggttgg

SEQ ID NO: 31278 - DNA, 337 bp, Arabidopsis thaliana columbia
gcctaatggtttactcaaggtgcataaatcaaacagtactagaattgtagtttcttgttctatcttttaagtcattaaactgagatatcagagacatgttttgcatagggtaagaaggctactactcacccagtggtgagcgacaaactttcggactcgagtcacattgagcacagagtcgtggtagatggggatgtcgtgccgagcagagctccagggactgcgatggagttttcacttgccactgtcgacaagtcttaccggcgagagaaagccccgcagctcggaaaggcaacacttgtgtgatctgccaaccatgacagtgtgagagtggctt

SEQ ID NO: 31279 - DNA, 525 bp, Arabidopsis thaliana columbia
ttttatatgaaatcaaagtaatggctaggcgagcacgggagatagaagctggcatagaacttaatgaaaaggagaagcgcgatgtgaacaaagaaacaggcgacagtgatgaagatataagcattcagtcacagaagagtcttccacatgacggtttgacacacagtgaaggtgatgatgataaagatgaacgcttgggaacttcgactgacagtgagaacactgaactttctgcttttgctgttccgatgttgaatggggctatggtagattcaggttttccgaatcatgaaatggcagcatctgacaaaaaaaaggtgagtaatgtggtaccactagttcctacagacggagcatccaagcttctgatgtcactaaggatcagttaagtatgatgaagaatagcactggtcgaaagtcacgggtcatacggtctgtaaaagaggctaaagagttcctttcaagaagaagtggtgagaaagagcttactcaggaactttctcagatggcccaagacagtgatga

SEQ ID NO: 31280 - DNA, 504 bp, Arabidopsis thaliana columbia
ggaggttttggttacatgatgaatcaaaaggggtttcaagtctgaagcaaagtcggttctgtttttgcatatgattcaagttatttctcagtaaggtttgtctcaatgcgcatgaggaaatcttagaagctggaaacgaatcataaaggcaaagggtaaatgagttcagtcactacaacagatgtggtgagaactgaagctgcaggatattttgtgtgatttgaaaatcataagtggtggagcttatgaagaagaactctattgggtttaacaggtttggtggagttttctctttaaacttgttaatagagtttgctgactggttagtatcaagactacaaaggcacgaagaggtcaatatgagttgaggcaaaacacttgtgtgtttgaggctggttttatgactcagtttggtaagtgttgcaggtcttgtggttggatcagtttgttgagtgtttggtctgcagaatcagtaaattatgcagagtcattggagttgcaggt

SEQ ID NO: 31281 - DNA, 561 bp, Arabidopsis thaliana columbia
actctagacagcacattggtagaaagagctacataagttcttatcctattgatataatcagctgatgaaaagtacataacctcctttttcctttcttcataaatggtcatgtttgagcctaactattaatcttaaagaatttgcagaccaagtagtgtaaaagcattaaccatctaaatcccaaatggtgataactgatatccaaatgaagagtgcagaacgtgtggttaaagaaaaccaacgaaaaagttattagtattcaacaaacacttggtaaggaacaatcaccgcaaaataagtacaagaaaatgattagagaacttcaaataaaaaaattagaacaattagaatgaccaaaatggttattaatcaaatacaccatgtagataataattctagttgaatggtgtaatacaacgcggtcactaaaaagaggacaagccatatgtctcaatccatggccatagactcgagagaccagatgatgaagttcgaaaggagacgattgatgttgactggttgaagatgagtgaagacattggacaaaaccgacaaatagcg

SEQ ID NO: 31282 - DNA, 617 bp, Arabidopsis thaliana columbia
acagaaaaaaaaagttctgaatttaaaatgctaaaacggcaccgtttagtaaaaaaataaaattatttcttgttttcataacttgtctgcttccatcatctctcccattttatcggagcacgacgatgtctcaagctttactaaattttcagctttcttcttcttctttctcaatccccaaaaccctaattcactctcactctctcaaaaccttgaaaaccccgaaactaaactcacgacaattcttctcacaatgcacagcttcttcttccgatggacccaaaaccttaagaacttgcaaaaactgcaaaacccaattcgatcctctcctcaataacccacgcgcttgtagattccacactgctcatttcggaggtaaaatttgaaaaatccctctctgatttcggaattaggtttttgaattttggggttcttttgttttaggtgagacaaagaggaaatttgagagtgtatatacaggtggaacaatggatacaccaaattctggaaaagtgtacaatattggcattgttgtggtctgaagatcttttgatctggttgactgttctcccatcaacatatgatgattgatgagaagagaaggaaagaatttgtgt

SEQ ID NO: 31283 - DNA, 396 bp, Arabidopsis thaliana columbia
cctgaattctaatgcttgcttaattctagtaattttagatggagacacaaaaccaatattgttaggcatagttagtcaattataacgagagtcgattaactatagattaagatttgtagttttagaacggtgcaataacaatcttgattaattgctagatctactattagtctatttttttgaaaatttctctaaatctaacattttaatcatctgaatttacttcaatcaaatctgctttcctgtctttttaagttttaatttacttaattttgatttatcttaatttcgaaacatttaacattttgtgttaacaaaagaaacttttgtagaattcaacatacatcagtataaacttaattttgatttatcttagatgtaatttgacacacatca

SEQ ID NO: 31284 - DNA, 497 bp, Arabidopsis thaliana columbia
taagcttattgaacaaaatttaagtgtcagcgaatctataaacatcttcaagtctcaatatgtgaggttattttgttacaacaagcaaatacacagaaatcataacgtaattgtgaagaaatgagagataacaaattcactgaactactgcaaacaagtgtttactcatgctcacaaacagctgatgaattttgaaagtaaaatgcacggcccagcatgatttcatcatataattaggtattccatgcattcagttacagttaagttcagttttatgctagtttccacatgtattgacttatcaaacaaacccgtatgacatagttttggtaaactagttactaattatcaactacttgtacttaaaactctttcggcatgacaagccacgttggttaagagataaatatcaatctataaacaaactgtggaaggttaaactctataaattaaaagctttacggatgcaagaacgtcattaaccaacatgagtactg

SEQ ID NO: 31285 - DNA, 241 bp, Arabidopsis thaliana columbia
gtgtgtgcgtgcgctggcgcgagcgctggtgcgtgtgtgtgcgagtgcgtgagtgcgagagtgtgagagagtgcgatggtgatggagcgcgtgtgtgcgtgcgtgcgtgtgcgtgcgtgcgtgcgtgcgtgcgcgtgcgtgtgtgtgtgcgtgcgcgtgcgcgtgtgtgcgtgagtgtgtgcgtgtgcgtgcgtgtgagtgcgtgtgtgtgcgtgaagcgctggtgtgagagcgagagagt

SEQ ID NO: 31286 - DNA, 991 bp, Arabidopsis thaliana
aatctctcgagagaagtcaaatatcgtgttcaagagcaaactcttcttctcctcgaagaaatcgagatcttctagtcccagtagcagcaacagtccacgatctgttggctccgattctccgattcgatccgataagaagaaaccgaaatcaaattctaaagaggaaactcggagccctaatacgaagaagcatgtctcagcgaagggtaaagaagcttcgttagaagttcactcttctagtccaggcaaatcaaactcgtcatcttctggttccgaggcgaagaaaccaattactgaaacgccggcgacttctgacgtgaaggaggaatcgccggcgtcggtttcgcctatcatggcttcatctttgggtttgaatagaatcaagacgaggtctggcccgttgccgcaggaaagttttttcagttttgagaatgattatgcaattccggtcttaccgtgttacaagttgtcgaagttggatactggcaagaaggaagctggaagcagcaaggtagatattggaccgctaagaagcagcaatcccgcgttgctggcttcgggaactggtatgacttcagatgctcaaaattctcttgatcatgttgttgaatgatatgttgtgtgacttgtgtccatctcatcctaagacttcttgcattttatggtggcaccgttggtatttcagttcttgcttctcaagtttgattttgatgttacaaagcaggtcaattcaaggtatcacctaccatatctggccctgaaggaagcgcagaagtttgcacaccagaggtatttctagtctgcttaccgataaaaagagagtatgtgctatctatatacatcagctctatgtgacctttgtgacttgacgtctatcgttttagaattcatacgatttggatgatcaaaagagtcagactcgcctcgttatcaagctttacttcgtatgaccagtgctccaagaaagaggtttcctggtgatacaagagct

SEQ ID NO: 31287 - DNA, 549 bp, Arabidopsis thaliana columbia
cttatttatatgttcttcagttgttgttacttaacgtctctctctttttattttctttctaggagtggaagtagaagtaatagcaggagtagaagccgtagtagaagcccagtctatagagctagacgagacgcgggatcttatgacagacacaagacgagaacacaagtttctcctacgccaatcagagaattcaataagagaggcagtgatcatttgtttgatcaaagcagaagtgatcattatggttgggaagataacattagaaagccgagggagaccaaatatcacaccgatgatttcagagaagaggcaatgatggaaggtgcaaggtcttctgactataataatactgattatcccgaggataattcgagaataagaaggcgaagaagcgagtttacgggagagaaggaaacacaaagaagggatggtggtgatggtgaaggaggattccacaggagttcgaatattccgtgtaagtttttcgctgcggggacggggttctgtcgtaatggcaagtattgcaggttttccatcatgttgctg

SEQ ID NO: 31288 - DNA, 552 bp, Arabidopsis thaliana columbia
  unsure (1)..(552): unsure at all n locations
gatctaagatgtgtctttcttatatcacacgttttattttaataatactcttcagttgggtttgattccatttatgatttatctatgaaaacagaatatgtcctcatgctgattatttcgtttgtggttgcattttaccatctgtagttttttttgtttactgacaaacaactaagattttatgaattcatttgatgataaatagttaatcaaatatattattatgagtgactcgatggcgaaacgtggtattatcttatggctgctaaagtctacttttagaagaagaaaaaaaaagggtctgttgcattaccctgttgttgcgactctcctacaataactctcacgtggcccgtttcttggtttttgcctattttccaaaagtaaacagagattttcactagcaaattgggccaattggagacaacttcatgtggtttgaatcgtatatttcagatagattagacatctagtcttctttgatgtgcggtgaggatcttaagtcgctataacgttgtgaaaaaaganaagaaaaagtcactataacataga

SEQ ID NO: 31289 - DNA, 395 bp, Arabidopsis thaliana columbia
ccctcggaatgggattctcatgccatctcgtcctaagatcctactcacggcttttactagctactagctagtccatcacatcatacaccttttaaacataataacgtatgtgaattatgttatgaccggagactttccttcctatgaagagtttgatgagtagaggagtgacacggatcgaatatttgataaatagctcattcatctagataggtttaaaactttagactattacattgtagacaaaaaaaaacagaaaaaaaaaaaaggatacagaggccttttatcggcccaccttaaaaaaagagagctacaggggccttttatagcccgctttaaaaaacaaggatttttgaatttgagatacgaaaccttttttcaaacaagagaatagt

SEQ ID NO: 31290 - DNA, 572 bp, Arabidopsis thaliana columbia
catttgacctaatttgaaaaaatgttaccaaaaaagatttggaaaaaaagacaaagatattgagataaccgttgaagagagtttgggatgacaggctgacgagaaaaccatacacctcatttctatcattaaccctcacatggcttatctgtacatctggaccccaccaccttctacttttatctcccattttttttttcaaattattactacccaaaaaaatattcaacaaacctacaaaaacacatgtcttatttttatttatttaaacatttgtgtatttatcccattgttccatatttattagtaggaaaaatattcacattttacagaactgcaaaagatttggccatgcaaattataccccactttgattgctattttatacactatatcatacagtacaagaacaaaaatttgattgggccagtaataatgcatataactattgatgttagcaagagaaaaaaatgcattaaaacacaaatttgactattattttgcaggaacattcgtgataattttgactattattttgtcagtaataatgcatattaatcgtatgtgatttt

SEQ ID NO: 31291 - DNA, 1059 bp, Arabidopsis thaliana columbia
catggataacacccaaatgttgaagaagctaaggtgtccccatgcgagtgatttgatgtttgttatccttataaacctttaatcacgtcgcaagttatagaatagctttgtggaaaaaagcaagttgatcatttgttttataataatatataacattgcgagtttcacacacaatttacattcaatattggactccatcgaggggagagagaaaatcacgaccgttgatcgggataagagtataggatcaacaaaatgtgctatttcgtgaagagacaagagaatgagagaaaatttatcaagatttcctattttagtgaatgggttttgtgaagagagaaggagataattaaagggattgtaaattgagaagtcagaataagagcacacaagtggtgacatcttttgtgaatcaaagagaaactcatgttcatataaagtaattcacattcttatagctagtggttattagtttattactttggtgaaagccactttctcgatataccctaaattcaagtctcaatgtgggagagggaaaccctagccaactcaaaactatctcattagtcaactggagctgctcattaaaaaaaaaaaaaaaaaagcgattatgccaactatatgtatacaaaagtgctacaacgtttataaacattttcggagcataaaaaaacttcttattcaactatatacaatttaatctttttctttggtaacgactagtgacgtccacttattgaaaagatacatataaataaaattattctttattttttctccgaaccaaaatccttaattgcatcaccaacctaacccctcatcatatgatcacctttctttttttcctttaatatatatatatgctcacacacacacatatatatatacatataagcatcgcctcaagcattaaaatttttacgaaccaaacaaacaaaaattatgaataattataatatgaacccatctctcttccaaaattacacttggaacaacatcatcaacagcagcaacaacaacaacaagaatgatgatcatcatcatcaacataataat

SEQ ID NO: 31292 - DNA, 516 bp, Arabidopsis thaliana columbia
taatctctgtcttctcttttcactgtcctttctcttttctataaaaaaaatgttaatatggcaaaagcaattcagcatagagaccgttggattatgtccacaaatctcgggtaatttattttggatttttgtcacaaagttttctaaaattagcacgagaaaggaaattaaagtacatcatacactttttaagagatattattggttttttactctgcaagtctaaatcactgtttagttacaatctttacttgtacatgaatcttgtgactatattgttgttcaaatagtttttaaagctttgtttttgctacatttgatatccttaaaacctgaagcaaaattagtaaaaaaactcaaatcaaatgacattatacaacaacacaattttagcacattgattcagatttctctcttgttcgcaatctgagctcgaacaatctgctttctccattagtgaattggtactgaagccattttcagctctgttttagttagatatcgatcaatttgagt

SEQ ID NO: 31293 - DNA, 940 bp, Arabidopsis thaliana columbia
ggtttgctgacgtgacaatggcattccttgtaattatattttttctgtaacgtttagtaggttcacgatgggtataccaaataggtccgaaatatgatagtaataaaaaaatgttctacaagattccggtaaatacacctaatttgtatgacatttgattaaagatcccacaaatattatgattatggagaaacaattactagcagccacatatgccgacattataaatattttcttaggaagcattagtggagttgtgagggccaaattcatcattcggttgttctatatctcccatgtcatacatgtctctatgcggaatatatatgaactgcaatcttccaatcactctaagaaggatcttgtacataatataccattcttgcttgagactccaatatatatggttcatcctctttgttatctccagtgtgtaaaaattaaccatatgatgaccatatgtataatgcctcggaccttaactatgacccggacggtcgaacgtgcattctgtcgagtaaaatgcgagatcaagccaagggaaggcaagatcagtcgggccaattagtgtggtaagtcatgggtaaggagcattgaataggatcaagtacatgggtaaaagaatgaatctccatctgacgggccaagcttagctacgatgcgactatcggtaaaccccaagaactagtgtagcttaaggaacctttgttttggtttaggaaacccttacagggtcgggaaaaacttagagggtcgagggaaatcgatctcgggtagtccaatatgagagtgggtcgtgtatggtcaaaatgattgattggacaatgcggatgagtgacgatagctggcatgctcggtcaattctggcatggaacgtattatagtcctaagcaagccttgaattgtttccggacctcttgagatattggtgacggagaat

SEQ ID NO: 31294 - DNA, 600 bp, Arabidopsis thaliana columbia
  unsure (1)..(600): unsure at all n locations
atttaccagctacatagaaatcaaaatcacaattaatcagtagagactagatttgaaacttagcgggagatatgatgaatttggaattcgaattggagatcgtggagacacgattagaaagatttaggaatgattacatttctggatatcgaagaactgcaaagcgagcttaagagcgtcggcgtatttcttatcaatggcgccgggaggtccaggaacgggaccgccaccgtcatcgtcaccggatttcttcgttctcaatttaacagtgtaaacgacggcgaggataacagaagctagcacaataatggcgatgaaccaaccgcagcnaactcttgacttggatttctcctccatttttttgaattccagagagctggaaaccagaagagcttggttagatccgaggtcaatgtaactgcattcaccgatcggagaagagaaattagcttcccggatctaagattggtgtatagtgactagtgatgaagatggagcaacggcaagggaagtgataggtagaatcaaaggaaggtggagagaggagtcattaacactatacttagatcaacaaaaacgagtagtttaaagtcggtggag

SEQ ID NO: 31295 - DNA, 1069 bp, Arabidopsis thaliana
actaaatcagtccttaattaaacagcattaacattacacaagcatcaaaacccctcaccaagtaagataaatcatcgaaattacataagcaaatacaaaaagaggaaatacccagaaaggagaaagcagcttacaaatctgggaatctgaaatcggaataaagttgttaaagagtcctccgataatcaaggacgagaaatccggcgacggaagttagggattgaagtcccggagaaaggggcttcttcttcttcttcttctagggcacggcctcacgagagagagatacgaagggaaagagagagagagaatgagagaaagagagaaggcgacacgcgaaacgataaataaattagagatagagagagagaaaggtcaagtctttgagagatgggtttgggttaaagggagagagagagagagagagatagcgaaaagaaaggcatatgattcggattcgccgggctcataggggaacggactctgacatggcacccaacaatcgcaccgcacgagacagaaccgggaacggagagtgacctctcttcctctcttttcactacacgtgtccccctctctctctctttatcaacaacccaacaacaaaggtcttgcctttttgctttcttcctccgtttcggttcggaccggacccttctctgctgttatgtctcgaaccatcatttgtgtcaagtgcgatccaatgagagaagagacaaaaatccgccatggatcttaatttcgaattttgtcttacttattagatcctttagtttctactttgatattatttttatgcttcttgtttttagctggttttagttaaattcgtttagatactactagacagagagctttttagttttatagaataaagttaaaaatttcaaatctatgtttttaaaacgccgccaccagagaaaatgattatcttttctttgacgttaataaccttaatttaatgttcttcagactgaataactctttttttttactgttattttatgtacttaatatttatgtaatgaagaattgtaaagtggacatcaggtatttgggcagacttagg

SEQ ID NO: 31296 - DNA, 549 bp, Arabidopsis thaliana columbia
tgatcgactacaatctcataattaaggttttgaccacctctaatctagcccttaaataatttatccttgtatgtatatgggctttatttgtatatttgttgttgggcttcgatgatacttaaagaatctgaagcacccaaaaagaaaaaaagagatttggtgaaactaatcaaattagtcagagacaccccagtacctccttcatcatcactctctctctttcgttacagttccctaatcaagcaagttgcatatcacgagctctctcaactctcaatccaatccatctctctctcacgcattttcgtttgtatcttcgttttcctcttttcagattcttctcttcgattcttcacattgataaaacttgtctatggtggttgttacgtcgattgagtagatgaagttcacggaaaatcaaatttgacggctacattacccgcaactgtcccaaatatcagggatattcatagaaggagagcgcgaaaaccgagcttcactcgtcaacgaagatctggcgtgtctgtcaggaggctaagcaggccggag

SEQ ID NO: 31297 - DNA, 454 bp, Arabidopsis thaliana columbia
gttcaaacttgtcatgttgcttccacaccacaccaagtttgcgggggaatattagaacacacataaaagcccaaactatatctttatagaagcccatccaaacccatgtaattaggttatctagcaagtagtctctcatatatatattcatgtattgtgaactatgtgtgtaacctagagagttgccacattgagcaagtcttctctagtctctattgtatgaaatcaaatccaaatctattttactcttgaagacaacttaaagctttcacctttctctcttcttttcattttcaataaagctcattgagctattgcattttcaatcacttctaataagctcaatgagcatatatttagaaatgttttcacgattgtaggatccaataccaaaggaaaggtcttctgttgactaatctttcgtttatctttcattttttcgctttcatatttt

SEQ ID NO: 31298 - DNA, 300 bp, Arabidopsis thaliana columbia
ggttgactttaaatttaaatcgcaaagtttcggttgaccagtcatttgagacatgtcgtgaagttgcttaacagagaacgttaacgctgtttaagtgtcgttagttgcctctgctatctcaaaaacgacacagtttactgttgaaacataacgactcttaaatcccaaatcgaacttcatttcccccagatcgaaaaatcattctaaccctagaattaaaaatcccattgaaatggctcgtactgtggtggtaaaggttattctacttcggtcacagagattgagtcaagcctctgccga

SEQ ID NO: 31299 - DNA, 451 bp, Arabidopsis thaliana columbia
gagtgttttgtattgaactagacgattgttttccgaacaaagaagattgaagaacataaaataaagaagagtgaagaagagtgtatatatagagaagtgagaaaaattgaactaggacagaaattgtgttccgattttcttgtgtggtctcaaaccaaaaatatatgtcctagtggcttacaaaacaagtggtatcaaacaaaagtacatgtcctagtggtttacaaaacaagtggtatcaaacaaaaatatatgtcttaatggcttacaaaacaagtggtatcaaataaaagtacatgtcctaatggcttacaaaacaagtggtatcaaattgtgggggtaaaaaagcacaaaatgcataacaagttggtcttgtctaagtgatgtcggtgagaagtgtcttgtcacgacttcaaaattgagtagctcaaataattgacaaacacatgga

SEQ ID NO: 31300 - DNA, 556 bp, Arabidopsis thaliana columbia
tgaaggatatattacaaaagttacggctggacaaagctgatcctaatcaaatggcaatgactattaagatgaaggctaagtttgataaatattgaggagatatggagaacatgaacttggttatttttattgcttgtgttatggatccacgatataaaatgaagtatgtcagttggttaatttgtgagagctatgctgatgatgttaacagcatagctgaagctttgattataaaaatatacttggttctggagaagatgtttaaactttatgaagataaagtttctggttcttcaatgcaaactagccaagctgaaggtccttcagaagttgttgtagaggctccagaaataaatgaccttgattccttgattgatatacatgaagaaagtgaagataatattgatggtcaatcagaactagaaagctatttagttgatgcttgtgttctgagatcagatccaaagtttgatatattactgtggtggaaaaagagaggatcaaaatataagatttcgtctctaatggctagagatctattggctataccggtttt

SEQ ID NO: 31301 - DNA, 163 bp, Arabidopsis thaliana columbia
aaatatagccttagcctgcctgttgttcttgctgcgcggcatcgacagaggcatgggtattcggcgtcggggtctttggcagttcagaaacaacatcatttggcttcatagggtgtaaatcacttcttacagttaaaaatgggaaataaaaacgcaatctttg

SEQ ID NO: 31302 - DNA, 474 bp, Arabidopsis thaliana columbia
tttttatactgtgtcatggagaattcagaatttatccaagaaaaaattgcagttttgatgtaatttaccattttgtctgattttggatgtgacagtgtgaacgaatattcgacggtttgacttttgctagtttgacccatcggagggaccccagagagacaaatgtccaatgtccacgcaaaagcatgtccgccacgtggtgtcgcgtcggtacaaagctgctttaggtgcacggctcaaccaaccaaccaacgtacgcgactagctcagctcccttcgagcccgtgaccaagtaagttaactgtatacaaaaatccagcaacagcatttcccatagccaatatacattacctcttctaccgttgaatcatgttgctcacgaaacctctattactttttttgcctttcttccagctcaaaaatgattccccatcaccatctttgggcttgtctcagctttttctgccatatgaa

SEQ ID NO: 31303 - DNA, 419 bp, Arabidopsis thaliana columbia
catgatcatcagcatatcttctgtcccgttacggaccagagcgggatcggagacgattaatcacaatgatctgctgtaccttcgattttgggagtgtttctatcccatcaacatcggtatatgagaacatggacttcatattatggtgtcaaccgaagcatgacggttcagaacaatagacagagacattcctttggattttctagtatttggatagttacaaacgataaaatattccaggtagttattggaacaactagacatgttaaaatatgctttaagtgaaccaaaacatggatttaacctcacatcatgttgaaacatcccgttgagagggttgtttttaaaaacacagcatagattgcctatggtcagatttgtgtgtattcttcctaaactgagatgtgtaatcccaagtt

SEQ ID NO: 31304 - DNA, 581 bp, Arabidopsis thaliana columbia
gaagaaacgaggatggtgaagtatttaccggatggatctgagagacgtaccggagagaatgccggcggagagcagagagtaacggcgagagagagagagatagagattggtgggcttttgttgggttggttagctttgtgatggaaaaagcaaagctcattagttaactttatttgtctttgagttccattttcaggttataataatgtttttacagtttttaatcaattattcctaaaacttatatgatttactatgtgttttataaattaatctttggcacaaatatgagcttatcccctctctaatgattcgaaagaccagatcagtttttttactttttatagaggcaaggcatagatgatttgagaccacaattctcaactctacattatgggatcaaactagaaaaaaaatccttggttaattggagcaaagtggtgtagtttggccaaaggatgccccagtgtgctcttttatttggttttttagttcccgtgcataattgactatcaaaaagagctcgaatgcgtaattggtgataaatcgacttatgttatacggtgaacggatgtatcaga

SEQ ID NO: 31305 - DNA, 597 bp, Arabidopsis thaliana columbia
ttttatatttcatgctactgctatagagatttcatcattagcaatatgaaataccattcttcaatgtttaattatgaatttatgatcaatcaaaactgtgtacttgcaatacaatacgatttaacaacgctaagtgatgtgacattataactgtggatccatcagatatatcgaaaacaacagtcctgcagatcgtattttttgtgggattgactagtttcttgtagattaacatattgctggaaatttaattttaactagtttatagtttgttttgtcccaaaaaaaaaaaaaaaaaactagtttatagtttgttacgttgaatattataagtttaatcgatattatcggatctgtagaacgctaagcattatgaatgccgtaaaacgaatctttttatatagatgcgcattcaattatttttcaatgcggtgagcgtagggcagtttggtagttagcaagactcataacctgcggccacacagggtcaaatccgtgccccacaacaacattgttttctagattccatcatggttactacactaataaaacgagtgacgagaactcttaacattgtattgaaaattaacttctttt

SEQ ID NO: 31306 - DNA, 633 bp, Arabidopsis thaliana columbia
atgcacgtgtcaattgcatgtttatattcgaattgacgaatcgttttgcttgttttctctgcacgtttttttttttttttcgttttaaagttgacgcatgcttttggaaaataaataagaaaattattaatgctaaacgcatgctagggattatcttgttattctgttaggctgttacattaggaaagagcatatgtctcttttcaataataagttaatctcatttgtaacctttatctataaatattgggttgattttttgtgtcttcacatttttttttagatatcaaatgttgtttttttctaaaatatatattaaacttcgtacggtatgagacacataattcattttgcatattgataaatagaaataatgattgtagggatctaaatacgaaaaaacacattattataataatctcgatagatgaatatataaagtaattatttatagttcttgcttgagtcatgttctattggtattggcatgccgacggaatccattaaaacaaaagtcgaatttgttatggtgaaattgttattaattcttctataaatggtgagattttaaggtgaaacttgctgtttgtcttctcacttgttgtgttggccgttaggtgaaataataatgct

SEQ ID NO: 31307 - DNA, 530 bp, Arabidopsis thaliana columbia
taccctttgttttaattaaatatctatcgacatcattttggatagaacttaaacttaattgacaaagtggaacgttatcaaattgtttttatttttttggaatttatcaaattggtattgttcaattgagaagtattagatatatcaagctcttgttatcaatagacaatagttacttcaaggttttagcatttggttttatcgtttttttaggaaatcacatgttgaccttcacgtacgtggagcaggtaaaagaatttaataagtgtttcattttattacaaagtcgtgtataaactcgtattgtggtccgttcaaatcctacattgcaaatttgcaattagtcctttacttgttttcattttttggactgttttattcttacaccataaatgggaatacgtagatcgcatttatttggacgttgaattatataagcatttgaactttagacccgcaacgataaagattgagaaacttctcgagatattacgaaataattgtaatcccataattagaagataatgaca

SEQ ID NO: 31308 - DNA, 559 bp, Arabidopsis thaliana columbia
ccaatggcagagttctaagtttgttttaatggcctgactaaaatcttaaacttgaatatttttttaaaatatagaaaagtgacgacaaagaaatgcaaaccctttggactattatttttgagtgtcgattgggtcgagaacccgtggattgggcataaattaccctaccatgagacgagttaaggctacaaatgttgatgctaaaataatgcgggctacacgagttggctcatggtggatagtggttttgagcagtctaaatggattatattaagtcttgtaaatatttggaacccccaaaaacgatgtaacaagaagaaaccaaaagataagagcatgcccattgattgaatccttataaaaaatccttaacattttttaataatatattttggtaattttaaagtttagagtttttgttgagtctctaaattttttgttatccaatggtggagtccttatgaaaatttctttaaaaagcaaaaatatttttaaaataatttatttgataaaacttaaaagttattagaaaatattacaaattgtaaacatatatgat

SEQ ID NO: 31309 - DNA, 843 bp, Arabidopsis thaliana columbia
tccctattctctgcagaccaagtcctaaactctctgtttagacttgcatttgaggtatgatatcattctttgtgtgttgtagtcatttaagtatatgatgtgtaaagtgtaatgtgttagttttgattagatctcatgggattattgactttaatctttctttctaaattgcagattggatatgttgacgcctagctaaccaagcttcagatgcattgaggttatagttttaagctttatgttaagtgttaggtgtaatcaagtgtgggacctatatatgtgacctatgagtctatgactataatattttgttgtgcctttaatggttatcaatgagtttatgttcgactcatggtaaagaagatttgccatatacttcaactagtgtaaaaagtacaagtcaacggaaacttgcaatattagagtcaattaaaaaaaaaatcagaaatacacagtcgataaaaacaacaataataacgataattacatccataaaaataataataaattatttaccatcttcacaagataattaaatatgttttatttttaaacttatactaattagttaaccaaaccactcacgtaaaagataggacaagtctttttgatgataattcttgcatatccgttgaatccccattttgtccccacgtttcattttcatatagtcaactcgtcaactatgaaaagaaaaaaatatgaacatcggccaactcgtcaactatgtttcgagaacttttttcatggtcgaaaagtttgaaacaaaactctcatgttatattttttctgccaaaatccaaaccaatcccgataaaatttaaaatatcttacaattgaagt

SEQ ID NO: 31310 - DNA, 172 bp, Arabidopsis thaliana columbia
gccttcggagctcctacattgggattggggggcgtcagttggggattggttggctgtcaggccgtcatcgcgagcaggctcactcctacagttggatcgggtacatcagcaagagattggttggctggtgggccgccttcgcgagcaggctcctcccacagtgggattgggt

SEQ ID NO: 31311 - DNA, 885 bp, Arabidopsis thaliana columbia
ggtccaaagccttataactccacacgaccactacactctctacacatggctcgtcgtcgttttggggctatacgtggggtcgggcacttcttctttcaagtttcttcgaaatgaagtatccgaaacttccagatacacgcaaaacccagaaaagagaaaaaagaaatcgtctttccttttacttctcttcttccgattgggtctttgatcatttccccaatcgattgataagttttgttgggttgctttcgattcttcgtttgatgatctaagaaagtctctgtctttccacgatggggtaagtcagttaactcgttttaaggttgtataaggtttttgattctgtggcgaaaaatgttatctttttaatctgggccattggaattcgaaagtttttagctttgggtattcataaagatttgagctttgaaggaataagcttttggatataaggatgatgtttttgtttggatgatgatttggtttagctattacacaaaatgaatgatatgtttaatgattttgtaacacagcagtagttgtttggcttgttttgataagtcgaaagcaaaaacaagtgtagatgtgcctttgaatggcacaaaagatgtgttagtagaagaagattggagtgaattgaggaagcctagtgtagtagcttctgaagatttctggactaataccactttagatatggaaagcaatgctcacggaagtgtttcttcaatcagtacaaccaatctgactattgattctcaaggatgtggtccagctctaatgaacctgctgaatttgttaccatggtgagtcagtgagtgagaagagtatgattggtgattggtcttattgagcatttgaaaaataattggagaatcttttggggtg

SEQ ID NO: 31312 - DNA, 1023 bp, Arabidopsis thaliana columbia
atctttgtgcaagatcacactaacatttccctttatgtgagccaataaatacttagctgcaggagtgtacaacaacagacaagaaccgagcttacgtcaagtatggacagagaaactaatgtccttgaaagattgtggaaaaataaatcaatcaaaccattcttgtatgaagaagctccaacaccatttagcagctgcaacctgcacacaaatatgtcaagcttgagccgattctttacccgaaaattatgataatctagtatagagcttacatatctagacgagggagagaggaaactctcacacctaactgcactctcttatgcaatggctttgaattcgttgacctcaatgaagtggcccacaaggcgaatacaccctccattgaagaaacctgttcgggagagagaactggcaacacgtttagttaaagaaagttattggtatatggtgcaataataaagagaaaccaataaaaaacaaaggaaagccactgaaaacttgaaagaatcaatggcgcatttcgaaattaccttggccagtttgaatgaaatgtgttagaagaattgaactcctctcaaagtttaatgaattcaatacaagacaccggacagctctatagtttgctaaatatataagaaaggcaaacagtgagagaaattctgatttgatctatgctttaaccttcatttgtgacttaccatacatatgaaacacggtgagagagagaaacgaaagccaaatagccatagggtttccagaggtaaaccgagctagcaacattcccaatgacatacccatcatagttgccatagtctcttggcttccttcctttcaatagataaaatagaagcaaagaattactcaaagttcacatttatagtttctatatcattcacagtgacaagaagtaaagagtaccttagcagatatatccgctgcattgtcttgaagagcaaagtgctgtgttagagctgctctggttgctcccttgcacaccagctaataccaagattgaaaaag

SEQ ID NO: 31313 - DNA, 650 bp, Arabidopsis thaliana columbia
  unsure (1)..(650): unsure at all n locations
cccctctcgaactcagatccaccaaacacaactttctttatcccgacataactagaaacaaccaaaacaaataccacgttagagcttacacacatttcaaacatgtccatctcaaaagcttaattcagttaataaacatacagagagaaggagagaattgaactcactctgagctgatttgtgtcaatgcgtttatcagaacatcgagaatcaacggctccgaggtcccaatatcgagcctgtcaaaaccatcatttatgtgatgagtaacaacaagacttgcaaaaaatgtttttagggtgtagtgagagttatcaccatattcgagcgacattgtcttgaacctcaagatccccgatgttataaaacgtggtgggctcgacattagctccaagtatggcatcatagtttggcctcttatccagtggtgcttgtgataactgcaccatacgagcaaaagataaaaaaacagcttaatgcttataatgcgagaaaacaaaaggaaaccgaatagataaatgctttcactttctcaatcatagacatacttgcatattcatggagttgtatccccaagtcgccaaggatatccnaggaccggattgcntgcaagattttagccatcaaacaaacagtgagtgatttgtaag

SEQ ID NO: 31314 - DNA, 428 bp, Arabidopsis thaliana columbia
taagaatcagcgtatcggcagatcatgagttacatgcaagtgacatagtcacgaaccacgtattgcaatgatcttgacacatacaagttgatcttctacgattgaatttgagattcaaatcaagcagcgttagtgtgtagtacctcggtacatgagttggaatccattatcagtatctacggtctgcatttccagtgacagacgttgctctagcagatgtcgacatgcatgctcgtgctgtaactctgtcggtccatacattcctggacactaagccaacgtgagttctggctaccgacagagactattcatccacaccagaatctgttactcagaatctactccctagttcccgaatccaatacgtccgaatcacgattcaatcctcataacttccaagcaaataccttattatcatcatccaaagg

SEQ ID NO: 31315 - DNA, 594 bp, Arabidopsis thaliana columbia
taaaaatgatgtacaatccaagtatacgaatcaaacagtgaaaagtgaatactttgcaaattatgaataataaaatgactactttcctaattaagtttgaaaaattgactattttactaacacaccctaaaaaaaatccagtttggttattcaccaaattaatcctctattttctttattttattgtagttagatacgttttcttttatttggtttgtatgttttagcaaaaaactgaccttgccatatgacatcctctaaagtcatagattttaaatcctagttatgcaatatcaatagaattaagataaattcctatcaataacgaatacggcatggtggtgatggtaccaaaatgtcaagttaaggcacgacgaaaaagtatattaaaatgcacgaaaatacttttaaaagataacattttcaagcaaaggagaaaaaaatgtagtttccctaattcacgaaattactttcaaatataaaatgcgtcgaaacattttaaacaactgaagggtcttttcaaacacgataatcatttataagcataaaaatcaacattctagaaattctttattaagaagaaatgaacatata

SEQ ID NO: 31316 - DNA, 602 bp, Arabidopsis thaliana columbia
cacctgttgtccatcgaatatttggcttcatatggtattgtatatatatgaaaatccacatgcgagctaattgatcccaagcaaatctataaattaattattttttttgtcaacagattgtttctttttaaaaaattgtggaagctaattaaccataatttttattctatgttattgttgtttgtccatttttagggaaatacatgtttaagaataaaatcgacattcgttactgttgctgttatccacaagattgagcaagaggttggtaatacgttaagtgcaatgtatgtcttacgtttgaggtttcttaacttatctaaaatatcttgtacgtgagcaagtcttttctcacagcgcacgctaacaacacaaaagttactaaatttaggagtcgaaaattaaaattggattttgcgacaaaccatagacttctaagataacagagtatgtgaagtttgtgatcatattattaggtatatctttgagcaacaacgaacgtgtcaagaaactttaacaaacttattgtccttttttttgctaagaacaaacttattgtcttattgtagcaatacgtagaagcattctctacaggagatttt

SEQ ID NO: 31317 - DNA, 542 bp, Arabidopsis thaliana columbia
gtcgagttctttgaaactgagacaatcatgaatcttcttagaatcaactagatgggttatcgcttgtgttttttccttgttgcgttttattgtagttttcattctttttgttagcttctcagtcttttccgatattcgtgtattttctgttaaattttttgaaaattgtataaatacttagcattgataccaaaaataaaaatataaaagaaaagaagataaacaaagatggtaaagcaaggaaaaaaaacgagggacctaaaagactgagattgggtattaattaataaaagcttcatctcaatgagcatatcgttagtccataaacattttgaatattttaactctgttattctatatcgtctaagaattcgtatttagaaataatttaaccattgacccaaaacaaagcgtgataagtaaatatttcctactaaacttcttcttaaagtgttttcagttaggtctatatttaatgaaacccattgatcaactagcaatcatagacagtttagcaagggatttacattaatgtatatatt

SEQ ID NO: 31318 - DNA, 541 bp, Arabidopsis thaliana columbia
taaattcataatgcaataaataagacatcatttgcaggtatatttcaaaccacaaatgcagagaacaatttatcaaaacctacctttgccagcattagagagaaagagcgatcataactccataaaatgagataattgatgagattcgtgtatacatgttagcacaactgtaaggaacatgaaagtaatattttagctcatatactattggcggaaaagaatatatttatctatataaaattatggttaggaatgttatatagagttttccgtagattccggccctatttatttaaaactcgtccctaaatgagctttaactctttttcagcccttaaaattatggttaggaatgttatattcgagacctttctatcccttttcacaatttttttaatacttaaagaaagttttttcaacaaaacatttatgagttaatatcactatgatttaaatattatatataaatactagaacatcatagacttataaatcaatttttttccataaatagcgtattcaaataaaaagaaaaaagagt

SEQ ID NO: 31319 - DNA, 516 bp, Arabidopsis thaliana
catcctagtgaagagttcgagtgcttcctcagggtttccattctttccatatccatcaatcatcgaagtccacgaaaatacgtttttctcttgcatttggtcaaagactcttcttgcatcattgatccctccgcatttggcatacatgtctaacaaagagctccccattttgatatgcgtgtaaactccactcttcataatctgagcgtgcacttgctgaccaacttcatgggacgtcaaaaccgaacacgctccaatcacgctagcgaaagttgaaatattcggatggaaaccagctcgttgcatcgaaatatacatgtcaactgatctcttagcagtttcacctgatctgctgaaaccttccaccatagcattgtaaactacaatatccttcactttggtagtattgaaaatctcttccgcatcctctacaaaaccttgattcatgtaacctgagatcattgatgtacaacacacaacattctcatctttcattgttcaaacacagtccttgca

SEQ ID NO: 31320 - DNA, 757 bp, Arabidopsis thaliana columbia
gaagattatgaagaaatacagttattacaacttacgaccatgaaacttgtacaaataatggattcaccagaaaccaatccaaatatcttatataacctcaaagcttattctatcgattctagatagcaaactcgttcatatatccatcaacaggcaaaaaacacaaagactctaatagaggatattttaaataactgtttgcattttaactgggtatatacggtttaataaccgggttatagatttaattgtctaacagttagagttgccacaaaggattctcagatacttcgagaccaaaaattaaactgagagatgttgggacccacagtaaagtgggaaccctccaaaaataggcgtatgcacattagcgtggagagcacacggtattctttagtaaaaggcgaaagaatagttcgctatgtgctcaccacatggctgcgtgattattatcaagggagagtgaagtctatttatactatcatttcctctatcaaagtctcttagctttccgatgtgggatacttgaaagtcccttgtgttttttttaaggctttgtaggatgtactcaagcccataaacacttttgtttattatcatttacacaaaatttcaccaacagagtcaggttttgttggtaggggcccatttcaactaaggactgtacaatgtttagcccattaaataaagggtttattagagaagtagacactttttagaaaataatttgagaagtagacatattttttagaaatag

SEQ ID NO: 31321 - DNA, 1018 bp, Arabidopsis thaliana columbia
agatccctggcaaactgcaaacaacaatccaaatatgacaaatagaagttcttaaacaagagtaattgagaagcaaaccgcaaacaaaaatctgaaaatgaaaatataaaagtagaagtctgaacgagttgattgatgatgactaatgagtgatgactttgttttgtatcttcggctcctgaaatgataaacaaacaaatgtcaaccttagttacatacaatgttctaaaagtcggtctccgcgcccgcctcggcgccgagtagtcgctaattgatgatggaccgccgcgatttggttagactcggtaaagaaatcgggaaaaatgaaaaaatacttaaaaaattaagttcttgtttagatatctgtagattaatgaaggatttatgatacgttggataagatatgtgaataatagataataaaatgttaaatctacgaaaaaaccagaaggaaaacatcgcagatacgatggcggccatcagggcttttggaggaagaggatgactcatgattaaattacgattttgtccttcgtatttaagctttttaaaaaactgcatcagataagagtcgaaccaagggttgaatatcatattaaaagttactcagaccactatgttgctataatactttgacaatatataaccctaatatttataaaatacccttatagatttctaacgcctaggccccgactaatacccgcctatatcgtttaggcgctaggcgctagtccaccgcctacctagcgcctagcgctttttagaacattggttacatagtttagtcaaactatcaaatacgtatgtgaaatattaattactaagtacttactgtagtacgtcagttactcactccaaagtccaaactaggcctactcaaaaccatggatgtggaattcaggatcaaactctacatcatacggacaagaacatgaaaccttagcataaacaatcttgtaattgtaatttataaaacaaaattcgaaaaaagcaaagggaatagattcctctcgta

SEQ ID NO: 31322 - DNA, 553 bp, Arabidopsis thaliana columbia
tgtcaatttgtgtgttttaggtgtagaaaaaggctagaaagctgtcattgttaagcttgtatagactcttttcttgccaatgaccattcgttttttttccccttacattttgtcctttttgtcgagcgaatcttcaatgttcctaactgaaaacggagtgggctgaagaaaatctcaacaacggctggaggcgatgtaacttgagctatcgaaaaggaatggaactgcgacgaaaccatgtaaataataataatagtgtattgttgttctttggtatattttcacacacactctcttctgtaacttacaaaagaatattcataatcacgtttgaatagctcttagacacaaatgagttgggttataaattagtaattaacaatggcatgttacaaattagactaacaacattgtagcaaatcaagccgattatattttatttaattagtaaaagattaacacaacaaaagaaacgtgaaaatagttaagtggagggcccatgaccactaacaaaaacatataagctcttttcgttttgttcactctccattga

SEQ ID NO: 31323 - DNA, 516 bp, Arabidopsis thaliana columbia
gtagtgccagtttgggatggataaggacgatatggcagctacattcataactttatcttgatcattaatcatatcattgcgtgtcttaattaatcagtatgtttcgttgattactgttaagtataagccttgacttgaacagtaccatctctaaatatcctgtcatgattcaggttcatcattctttcagttttaaaattcaatcatttttcatacttagattgtcacattaaactagctggtttatgagttcgtatgtttcaaccttttgtgctctccagtaaattgtgtatcacataaaaaaaaaacactgagctcattttgcagaagtgtttgatcgatttcagcccacatacttgaaatgaaaacatatgggatccttcgtgtgaccatttcacccataaaactcgtttgccatcttaatatttctgttcattaaagtgaacttttcgtcacaacataaaagatgctaatatcaaaggagtatgtacacaatgcaggagaacaagtcatata

SEQ ID NO: 31324 - DNA, 256 bp, Arabidopsis thaliana columbia
ccccgatggatgctgaaaagaagagtgcccattttcgccaaatctcatcttataaaccacaattacttgtcctctcctcaatccaagaaaacccttcttcaaaaatctcagaaaaagccaatatcaaagctgacaatgacgccgagattggagttttcggagcagaaaagtacttcagcatgaagctagatcatgttgattccacggcggatatcaccaagcaacatgaaaaggaaaacacacatgatcatcctaa

SEQ ID NO: 31325 - DNA, 524 bp, Arabidopsis thaliana columbia
caaacttgcaagcatctaaaagtctaattagtgatgtaagacatagaaattatttccataaattattatttatttgcatcagacatgaaagattgtcatttctgattattatgcttgagtaaatggttcaacttcgttttaccaaattgttaatgcttctagaaagcaatacttcgagttatttatatctattgcgtcaatgcaaggtttgttttagactttttagctatttaaagcaataagtatgaactaatatcaaaaaagtatgagctatatcaaaagtccaaacttaaaaacggtcaggcttttacttagtccatgcttcacattcctaattgcttatctagaatgcagcaaataatgatcataaaatttgaaaaaagcgttatagaaaaaactccaaagagaacacaaatgaccacatagatattatcatcacaaccccatgaaactgtacatctaaaacattactgaaatgcaaaaaaatatccaaaacaatatttcccgtacacacaacatcattt

SEQ ID NO: 31326 - DNA, 493 bp, Arabidopsis thaliana columbia
cccctaaacactttctgatttacctttttactggattatccggtttgtaaccctgctaagcgcatggcttcggttttctaaaccggttattttaatctttccaagtattgaaacttcctctacgcgaccggccacgtgacctcgggtcgggagacactaaccctacaaaatcgaaccacaagtggacacgtcgcaagcacttccagcataaccgcctctttaattgccacgtaaacatcgaataaccacgtaatcatcgaataaccacgtgtcttacaataaccgcttatctagtgaaagagaggaatgtgatctctccctctctcgctcatctataactagaaacttcctccatgaagattggaaccaagatacaaaacaataaatcggcattttacagactaggaataatggagcagagaacgttgatgatgattatgatgcttacgacgggtggtgacgctgacgtggcagaagcaatgctatggatggg

SEQ ID NO: 31327 - DNA, 560 bp, Arabidopsis thaliana columbia
ataaactttaccctctgtcacctatcgattcaaatctaatctgttagtagagtcttaattcttatatgttcataaatttgtctttttattgcctaatccaattgtaagtgactttgtaatcagcatcaaagtaaatgattgtattttgggaagtgataagcacatagaagtaaaagaagaaaaaaaggtgggaaagtttttaagcatgattacttgtcaattacgctccgactctttggcccgcaccagctgtttaagatcgccggcgtgacaagtgacaacaattggccacgtgtgtgtgatttattatcttaagtttttgttatttctctgcgaattttaaagaaaattttgaactttgatcaaacttgtatgaattagaggggatgcaaaaataaatacacattatacaaacgagatggtatgaaggataacaaaaaaaaaaaagatggtatgaagaccaaaatatattaagcatttgattaaactccgatcagctgacatattaacatgatcaaaggttaatgtttagacaaaaggcttttattagttgagaatgg

SEQ ID NO: 31328 - DNA, 563 bp, Arabidopsis thaliana columbia
tagtaacaaaaatgtagtgaattttactaaaataaactaaaagttgctctactcatacgtattttgattagaaattggatcaaaccgaaagaaaaagtaaatatctcaccaaatctggacaaaacataggataaaaaatgcctccactctggttggtaaattctttagagaaacaatacaaataaatttctttaaattaaaatcaagagaatgtttatttcattaaataacattaaattaaaaagaaaagaaaatcttaactatgtctatcaccaacctaacaaagctggaataaatccaaattacgaatatttaatttctagtcattggaattttaaaagactatcttaaataagatatgttataaaataactctaaattcgaatcaatcagttattgtgaaattagtttaattagatcactccactgataagatataatacccgacgtcggttcattagatttgattatttataaacacgaatgtggtgtttaattagataagaccattctcaactaataaaagccttttgtctaacattaacctttgatcatgttaatat

SEQ ID NO: 31329 - DNA, 599 bp, Arabidopsis thaliana columbia
ccggaaaatcatcgggaccgtacttcgccgccgtatccaaaccctaatgctcagtaccaaggcaattatccgtcgccgtaccaagattgtgctaggtatccgtatggagagatggcgtctccagtgcaatacgtagagcatcaggaagcagtgactataaggaacgacatcaatctgaagaaagaaactttgagacttgagcctgatgaacagaaccctggcaagtttttgctctccttcacttttgacgcctctgttcctggaaggtaatgatcaatgttttatacagctcgacatcttttcactgtgtgattgctagatgttgaaggtttgatcgatgctcagttcttatggtttttgattcaacagcatcactgtaatgttctttgctaaagaaggcaaagactgtaaccttattgcgacaaaggaggatctttttccatccactcaagttagttttgcaaaaggtctggaacagagattcaagcaggcttgtgggacagggattgatttccagatatgtcagaggcagatttggttgaggcaaacgagacagatgtgtatcatgtggcagtgaaacagaggtagtatcagagatg

SEQ ID NO: 31330 - DNA, 560 bp, Arabidopsis thaliana columbia
ctcttcaaagtcgtttgctttgtttttttctttttcttctttagttagttcttgtccactcgttttgatacacgtagacaattaactaacttaccaaacgcggtcgttttaattggatatatttttcttcatttaaatttaagtgtgtaattatgaccatttatacttgatattgatatgaatatatggatagaagttttaccacatttttttttcacaaccatatacaaaacatttattcctcgtttatttattttttcagaaatacaaataaattcagcaaagacttttaagttttaactcttttttttcttacaccatattcatcaattatacttgcatggcatgagacgacaagaagattctaaattgggaaagtatatctatatatcataaataaaaaaagcttaacactattttctccggcaattttgaatttccgtgatacaagtctccagtaggatatgtcattgcaagacagatcaagacaaaagatcaatttcttaaattatgaatcaaaatgatactggtggtgttgtgcttgatgaagcagggtgaca

SEQ ID NO: 31331 - DNA, 457 bp, Arabidopsis thaliana columbia
tttctcatcactaaaaaatccattaaacaatcaaaactcattactaaccttggctctcatgctgatttcgcagaagctgtctccttcgttcctctgattatttgtttagctttacaggatgaggagcggcggagatgaatagaaagattttgtagcttacgctcttattcctcctttaaacaacaacaaaaccctagtaactaacttaatgggctttattatttcaaaagcccaataaaacccaaatggataagaatttgccagaggggatattcgcacagagagagaaagaagatctttttcctgacaaggttcaagatcgattaaacattacatggaggagattcctagaaagaaaggaaaaaaatctctttgtctttgcagatgcgacacgcaaaacgacgattctgatctcgcttgtctgatttcaaaacaatgagaagatagttctgattat

SEQ ID NO: 31332 - DNA, 458 bp, Arabidopsis thaliana columbia
gagattcaggacataagcgaaatccgaagaaatatcaaagagaagaggagattttccattctctaatgatgaggaagtggattataagaaccctagaaacagtgaaacatttcctctcaaggtccttttttcaacggagaaatgaggattctcggagaaaagtttctgtttctttttgggcaatggaaaggaagagagacaaaaaagaccaaaataccaaaatgaaaaataaagggcaatggttttgtgttcttatttggaggcaaattaacggatggatccgaatattcgtttacaagatgattaaggtttcgtttcgggttatagttttgattcagcatgtgtgtagtagtagtacgaagcgaaacgtcttgccgtttatatatcacaataacgctacacagtttggcttactactatcgtgtagacctccattccatgatggctgtgtaaagagt

SEQ ID NO: 31333 - DNA, 508 bp, Arabidopsis thaliana columbia
attttcgagcattttctttacgcgtactgttttcgggtctgttgcttacctctctgtttggtcttatggtgttttgcagccgagaaaagcagaagacaagaagtgatgctgcaccaagcacgatcaatatctcttggtgtaatctcattgatttgacaaatctagcttttcggaatgtaagatcgtttgctgtgtgcaactcgatatgtgtctcaagcttagggtttcgactgatagatttgtattgttttcttgtttatgtgaaccgcaatggatgaacttttggtcaggaaccgggactatgacactgttatggaagctattgaagctctgggaataaaaaccaatttttataggcaaatatcaaatcaactggctggttcaagttttggcaacactagtatacataacttacacattgaatccaagagctcatgaacagcaaaagagtttcttgcatatatattttaagagactacaacgtatatgtgtgtatatacaaaccagt

SEQ ID NO: 31334 - DNA, 574 bp, Arabidopsis thaliana columbia
tatgctcattgattaagaacaataaatcattatctgaagccttatgcagaagcaagatatttaccttctttgaaaaaggggaccaacaaaccaaacagcagatggatgatcaacgacataatgaaccaagttatcaccggctggtctagcaagggctgcacaagtagccaaaagaaccaagaaacccaagtgcccataaagcttgaagagtcctcttaacctccataacatatatacgaattagaaacagagatagccccaaaccactagcaccaacaaagtaaaacaaatcatggttctgcttgattagttcacttaatcaatgatgacaatcaaacattagcatcatcattggtctcttgtgttcccatacatacaacatccgctataatttcagagacacatccaattcagaaatataacctttgttctgattatgatacatcaatcatcaatcggaagaaatcgattgaaccttctcagggagagacagcgcacgactctatgagtaatatcaaaagaacagatgagaagatttactggcgacactgagaagagacgatgagggaggtat

SEQ ID NO: 31335 - DNA, 573 bp, Arabidopsis thaliana columbia
  unsure (1)..(573): unsure at all n locations
taagaacagagtgaaattagactgaatctttaagaatgggagatgagccaagattcagtgagaaatgggatttcagaaggaaagagaacgactttgaagattcttcaagcgatgatccagattcaaactcgacccagcatcctatcattcataacccaaatcttgagtcgaatcagattgataatggaacaaaaactgtgactagagaacaacctgtgaaaacccggaagaggaggagcaagaaagatgagactaagcctgagaaagttaagcaagtaaggaaaaggaaaccgaaaactgtttgtgtggaggacaataagaagaaagatgaaacagttatggggacggacggtgttggaacgtttatggagacgttgcttgatgagcttacggcttctagagagcgtttaatggattgggtgaagactgaattgtgtggagcacccatgaaaatgtagcttccagtccgcctcctaataagagaggagttgctgcggtacacnacagacgacctgtgaagaagaggatgacaaagaagcagaaggaagaggaggacaagatgaagaagaagga

SEQ ID NO: 31336 - DNA, 594 bp, Arabidopsis thaliana columbia
ggtctattagaaaatagattgataatgattgacgagatactaaaccccttgattaagcccttataccaaaccctttctcacagtttcaaactcccatctacacaaactttctggaatcaaagtaacaaaactaacaagtgagtagatatagaccttcatccaatcgactaaccagctctgaatatggttctccaagagcttccttttgttgctcatccgtcatttttgcctcagaatattccgatagaacctttacaacaaaccacatagatagttaaacattgaaataatcaggatggatgtggaatggtaatatatattcacactcctggtatacctgcacataccttcttcaaccagtacgatagcgttccctttagtatctccagtcctgcctgtaatattacaaggtaaaaaaagtactcaactagatgtagcaatacagagatgagaccctaaaccctagaattactcagaaagaaacccattcattcagcacatcgaaactctatagaagaatacatatcgggaaggataagataggatccagtttaagtgcatacaacaatcctactcataggtatagaaattgat

SEQ ID NO: 31337 - DNA, 531 bp, Arabidopsis thaliana
cgcctccataactgccactaggtccaccataaccacctcctggttcaccgtatgacccaccatacatatcacctggtccaccaccgtacccaccgccccctcccatactgtatccacctctattgtaaccaccgcctcctcctccataacgaccagaatatccaagagctggttctcctctataaggtcccacaccaccaccatatccaccaccgccatacccaccgaattctcctccgtaccctccataaccaccagaccggccacctccataaccgccacctgacttgtaaggaccacctggaccaccatatcctccaccgtgtccgccaccataaccatctccataacctccaccaaagttagagcgagagtcacgaaccgcttcgatggggttgtaaccgagtttggttttttaggctctgcttctttatctctacctatacaaatacagggcagatgtcagtgttctgattatagctacaaagtctaagaatccaacaatatttgtagagcggctagtacctgagt

SEQ ID NO: 31338 - DNA, 567 bp, Arabidopsis thaliana columbia
tatgctcatgtggagccatcaaagacaccaaaaatggagtacgtaggctatgaatagtgacaaaagagttgatgccgagggtgatgatgtcattatgaatattgaaaacgtccacacttcagcaatgatattaaacgtaataaatatttctttcgacatggagtgatgttagccattcaaaaccttacggtttacgttatatcgtaggctcataatcttagaaaatataaacacttcaactgatatttgtgcgaagtatttataaagaaaatagagtgtaaaattgacaaagttttataaagccttcgtaagaaagaagtggcaactaaccacaaaattgaaacataacagaaaagacagagccgagacagagactccccattagcattagagagaaactaagaaaaccataatttggaaaaatagaatccttagttccttaccattgtttggcagactcgcgatattttatcatacgagaaaaactggaaatagattctgtaaaagattgcatccttaattatattctggagtctaaagccataatagtactaaggttcatggggt

SEQ ID NO: 31339 - DNA, 1146 bp, Arabidopsis thaliana columbia
cgtacccggcaaaactgtccctgacggctctcatctgcatcatcggggcgttggatcaacggtcaccgcactaatatgggagagaaataaacttaaagccttgaaacttcatccaaatgtgacagtgttagcgtctctggggtaagttgaattgaatcaagaagtcatttggttgtcatacaatttgtattgaaactcattctccactgtacagggatgtttctcagcaacaacggtttacgttgttgggtggatggcacagaagaagggtgagtatcttcaatccaatcaatctgattgccacggcggtcattagctcggttgtactctctgagcagatgtttgtcgggaggtgagcattggtgctttcctaacatccttggtatctcttagtagtcctcttctcaactcatctttctttgctgaatcaggataattggagctttcgtgattatcattggcatctcttttgttctttggggaaaaatgggagaacaaaccacgccgccgccgccacctccacctccagagcctgaggcaactgaggtatgatataggaaaagagtgacttggaagtttgtgagactatgattggtagaggtgtgaattgtgagttggcaattagtgattggctagaaagagatgaagattgttagagatggaagaccatttgtagaggaataaccagaaaagtatccaagtttgtatcttcttcttcaattctctctgtgtgttgatagagctgtttctacttctaagctctaccacatgagatttagattctcgttttatgaatgacaattcaatttggtgtttgtgatttggatttaattgagaaattctactttatggtgtaaaaactacgcatcccaatctcttgatttcattggattcttatttatccccatcagtgaatattcaacatctcattcattggtctgttatattctggataggcttgttctggggtctgaggttttgacattgtccagctactatatctataagtattgagatgagcttatagaggggaatataggttgatatattcatttatccataaagtttcccatcctagagaacaaatgacaggatggtatggtgtcttgagtctgaccatgttcaaattcaaagattgcttccgag

SEQ ID NO: 31340 - DNA, 523 bp, Arabidopsis thaliana columbia
caacaaaaaacgtctatgctaaagtttggatattacagactgtaacatgtccacgatgctattgcgataagaatcttttcatatgaatttattgcatgtcataattaatgacaaaacaaatatgtaaatccatagcacattatcgtcatagtctttgcatattatttcattttattgttttactaatttcgccgtcagattcattgggccggaagttataatctttccaattaaattagataggcccaataaacgaaactcagacccaactattgtatgacataatgacgacgagacgaaggacaaaattgtcatttaaggaataaaagatattcttacaaagatattttttgctcgaaacgaggagaaaaaatcattagttatcgaaaatgctcacatgatgtgggcctaaccactaacccaattaaccacacatcttaatcagagtaagttgaaacaaatctttcagcaaaccctagaaaacatgtttaccctagttattacgtcaccctgttctataaat

SEQ ID NO: 31341 - DNA, 508 bp, Arabidopsis thaliana columbia
ggtcttatgtatgggtcatcagtcatcatggatgaagcaaacagttatcgactctgtggttcagtcttctaaagttggtgttttctcaatgtttagtatggattacaaggcgccaaggaaatactcacacggaaggaattttggagttgcgagacagcaagattttgcagcagatatagttacgagaagaccttatgccccgtatgacaatggtatgaagaaaggtcctaataagttgtcaaggaatctggtttggacgtcaaaagagtacaaatcaccagagggaaacaggccaaggcagaatgcagccaatgggtcagcgaaaccacaagttataggcacaggacatcgtgtatcaaaccagccgaggaagaatgctgtgtatgggccaaggagctcttctctttcagacaccagaggttgtgggccgagactcaatggcagtcccaaaaagagtgtgtgtaattcttggaaagatggaaactgcaaaaagggcgagaaatgccag

SEQ ID NO: 31342 - DNA, 616 bp, Arabidopsis thaliana columbia
tgtagttaataaactatgcaaaacattccctctggttgaaaaaaagattcattctgaccaccattaaactattgtttagtcttcatgataacactaataagtgtaaacaattatacactacaagtgaaacaaaaaacgacgacgtagaacaaaaccgtcggtgagaaatagtcggagcaacaaaaactgagtacaaaaagagcgtacagagagagagctagacgacgagaacattttactgtaaacccgtgaatcacgcaaatccataacgtttcactgagtcatcccactttgttttctttatgtacacgtgtcagtcttcttctctcttttgttagccctcttattcaccgactattacctgttccggttttcaaagtaacatttaatttacgatgttaccctttcaactaagatatacacaccataatcaaatcatacaaccaaactgtacaaatgaaataatgaattatctctatcactatttattgtagaatttaaatgtgattgtttgcatcatcattcaaacgtgagatttttgattggagtttcttctttaaagagaccactttggagataatacaagctatgatttatgtattgaaaattgtaaata

SEQ ID NO: 31343 - DNA, 508 bp, Arabidopsis thaliana columbia
tgaatgaccaagaatcaatagttcacctataaatttgtagcaactgttgttggtgaccagcctgaaccatttgctgtgccaagtcatgcaaaagtggcaacacccgtgacggaatgaggattggaagtgtataagcagcagtttccgcgtcatcattgtgatgtcctccgtggggttttccacctccatccccgtctgaggatggtctcagtgagttgggaaggccatcaaataggcgatcaggctccaccgctttactgattataacaaaaaaaaagagttggccttagcattcttccatctaaaaccagttgtctggaacactcgtatcataggaaacttgtatattgacaagtgtttgatttcacaaaaaaaaatctttgtcaggtgacaactccgataatttagataaaaggtcattctaagtattctaggttatttgaaagataactaaagaagtaagaccatcatagagcgtgagatacagccaagatctcagattggtggt

SEQ ID NO: 31344 - DNA, 550 bp, Arabidopsis thaliana columbia
ggatgaatcggaggagtttacaagagaagttccttcagttactcgaaaaggttccaagagaagaagaagagacgagaagatgagtaataagatgcgtaactacagcaactcgtacctaattgtcacaaggttggtgtgtatatagatccttctatataatgtttcaatttaactattgagtgtctagtcttttccgtataagtttccgctacttccgttgcatatatgaagaaatcttgccttaagtttccaattctgataacgggtggtgcttttttacggttttcagacggacaaggtttcggttctcgacaagaccatagagtatatgaaaaaccttcaacttcaacttcaggtctatatttaactttattcactatttttatttcacactttattcagtgttcttcttccatatatttgaattattgaggcttgaggttttaagtgtttatctaatagtctgagtttttttttggttaatttaactagttgacataaactgttcttggtattcgatctgactcgccaacttatgagatatggatta

SEQ ID NO: 31345 - DNA, 613 bp, Arabidopsis thaliana columbia
tgttaaatttctagacaaatatgaaactgagataattttatctaattagtgttttagatattaatttgtttttagttttggatttacaatttagaaaagctctttccgcaataaattacaaagactctagatgcattaacttattcaaacgatatacacaaattcttattttaattattccaaaatgaaaaactcacataaaattttggttatttttataatcaaaagttatagagtatatcctacaacactcaagtttaaaagcaaaaaaaaaaatttgtttcatacaatataagttagagagaccagctctaacagaaatttaatttcttagagaaatattaaaaccatatattagtatattattactgtatatgtaatcaatgcaaacaatcaactgctacaaacaacagactcaaagcctctctattcttttgatggtcgccgagattgccccttacactacacatgccaaagtttcttctttccttggtttcagtttcgcagttcgttcttcatacgacgctgcaagaaaaagaaaaaagcaagaggatcatgtatttgagatttcaatatttgcatatgtacattttacagtgagatttcgaagaag

SEQ ID NO: 31346 - DNA, 275 bp, Arabidopsis thaliana columbia
ctgaaaactctaaaaatatagcaacaataccaagggcgcagcttactcatacttaaacagtcatcactaccacatttggcagtaggtggaaaaaaagacagagctgtccacttgtccagcattgcacaaacaccgtgcaatctggatcaagtccgtcccacggaactaatacaattagaaaaaacagactcggactttgtcgagctaaaaatgcccagtaagactgcgtcgtggcatcagcttccctgggtcattcgtctcaccgttaccaaggg

SEQ ID NO: 31347 - DNA, 512 bp, Arabidopsis thaliana columbia
tatttcctcatcggtggtagttgtcaacatattgagctacttctgatctgattctcaatcaggaacctcgaaccgggggaaatctctcggttttcaaactcctgagcctccattatagtaacaagagttcatcgaactctctattttccagctttcctctgcaacaacgttaatggctaccgcacaaaagtcgaaacccttgaagacgactgaggtatgcttctctacgacggcgtttttgatatcagaccgctctttaactgggcctataattttgttttatatatgggcttattagtctcaagcccaaatgtttctcttataattcaagtcaaatttgaaaaagtcaactatatccattgagcacacatctttggaaatacagtctgttctagtgggcaaaagaaagagagaaaattatagccgttctaattgtatcaaagtatgaaactttcaaatctccttgaggtataggcgttgttgtcttgctgatggtcacgcgtcgtatgaaa

SEQ ID NO: 31348 - DNA, 281 bp, Arabidopsis thaliana columbia
attggttggaaccgttcgttccccatagctcgttgctggttcataaccgccgctaaatattgctgttgttgttgctgttgctgcatttgcataggatctatcccggccccttggaaataaccctgtggtgcaccgcctggaccggtcgctggtaacccctgaaccgccggcatattccccatcggaccacccatacccatttgaccacccattggcatgctcatattctgtggtcctccacctcccatgggtcggaaacctcccgaaactcctccagccat

SEQ ID NO: 31349 - DNA, 525 bp, Arabidopsis thaliana columbia
ttctcgttcacccccacttgcatattttagagctcagttgaaccttttttaattaggctcgactacaattgatcaggtctgtttatgttgctagtggtagtctcacaagtcacaaggcaagattccaatcaagggactaccctgctactttgtattttccttttgggaattagtctaatcactctatcgttaggttttatctttattttaaagaatctaggtttcttacagcaagttgtaaataaataacgagttaatcaaacaatataaacctaactacattttgacttcttatgacgtcagttggccaacttcttatgaatccatacacgtatttattaagtaatcaaattactcatttcatagtattttcttataccaaaaatactcttttgatataattaagtatgaccatagatacgtcatacgtgtgacagacagtgtgagatatagctatgtatctatgcagcatagagttgagaataaccattaacactagaaacataactggagcaacgcaacatt

SEQ ID NO: 31350 - DNA, 492 bp, Arabidopsis thaliana columbia
cacgtgctttacaataattttaaattaaacaagagaaaaaaacgaaatcgagacagtatctcaaaggaatcgacatgaacgtatgtgattcatgtgaagtaaaccataaacaaatcccaaattgtcgactattatttattctgatagtataaaaactctagatcagatcacacagtgaagtttagtactagtatacgtgtatctaatgtatacacatctgtattattgttattgaaaaattgaaagaagaagacagagaaagaaagatagaataagccaagaattaattttaccgacaagttgatgaaatattttaatgggtgtgagagaagaaagaatctggccattaaccttatagaaagaaaaacaaagagttgattaataaattgtttgtcgtacagatttttggggttttttattttctggaaaataattagcaccgcctgttaaagcaagtggtctcgttcatacgacaagacagagagagagata

SEQ ID NO: 31351 - DNA, 468 bp, Arabidopsis thaliana columbia
tacaccaaaagcaaccgaaacacaaattcgaagaagaaaaacaaaacgaagaatctaaatgctttaaccttgaacatcctttaactcgacgtctaaattctgaagatcctcttgaattgcttcactttccattgattctccggctgaatcaacggcggcgtgtttaccctttcgtcgtcggcgtcgctcccagaagtcggcaacggctcctaagcaagaggtgaagcagaacatattgggccttaaacgggctaaaataatctaaatgggcttttgtacttggaacctaactaatgatgctcgacgtatgcttaatttaatcataaaaatgttattgagcatatgaataaaactttgatcattgttttagtaagatgttttatattaatatgaatctcgatttttaaaacttaatagtatgtattacatctatattaattagaaaatttagaatagtggtgtatagca

SEQ ID NO: 31352 - DNA, 300 bp, Arabidopsis thaliana columbia
cacaattttggtatcagagctctaggttatgtcaaaccggtgttgtcctggtaggcagtcctgatttactttatttcatgtgttcagatgccgccaaaatgtgggagaggagcaagagatactagacagccaagagagaggactgtgaacccatcgatctctgatgagagtgtacatgatgaaaatttagaggttgtggccccaaccagacaagcaccagtgaatgtccctacggccaatgagatggctatgtttgaggaattctgtaggttccaggaattcatgaggagggagccagct

SEQ ID NO: 31353 - DNA, 504 bp, Arabidopsis thaliana columbia
cagacattgcagttgtatagtcttgaaacttctggatatatgagagagaccagggacatgaatccaaacatcaagacacattcagacaaagccaaatagtatcccatcaatgcttcacgaccacgtatatgcatagttattgtctttttttgaccacgtatctggatagttattgtctttttttgaacttataaacacaaaaacaaattcgcgctctctcacggagtagtcatacttgcatcttattaacatgtttatccttttggttaagtctatgacatttttttaataaatacatacgagtaattggaaagaaaagcaattgtgcaaacctgtgatatgacgaacgattcgtacattttttactttttgtatttaactgttatgggaacaaaaagtatatggtcaatgccgccaaaattgtaaggttgatggtgtagtagaggataaagtagcccgctttcttgagaagcagtcaaatatgtggtgtggaagacaagaata

SEQ ID NO: 31354 - DNA, 528 bp, Arabidopsis thaliana columbia
tgtcaattataagcaaactctcttttttcctttctcttatttctcaatttcctttaaacaaaactatgaaaataccacattttaagtttttatacatgaattaggatcatcttcgacaagtctaggtcctgtgaataatttctcttcttttatacctccaacagatgatatttttagctgaatctaaatgtggactgagaaacacacaaaatatgtaggaaagttaaaacccaacacatagtctacagaaattcaagataaagatcaactcttaaactgtaatatcaagcatatgacaaatagtttgctggaaatcaaaacagtatagttaaacaacatgcatcatcctgctaaatagaagaagcattttaaatccacagtttggttttgttctgtttgttttttcactccaagaggaaccaccaagctttatcacttcttctgaacttgaatctttccttgttccaaatccttcatcccttttctgactacttgcgtctccatacaaatcttttagctttgcgagat

SEQ ID NO: 31355 - DNA, 301 bp, Arabidopsis thaliana columbia
  unsure (1)..(301): unsure at all n locations
aataaaatgcaccacaataactagaattagccaaacttagataccaacttgtttaaatacatctaacatgcataggatgcaatagacgtgaaaacgacaatatatacgataaaatatatagaaaataaaggctcatattttataagctccatcaaggggattcgtagtgatcgcatcaataccgtgangacgatagtctggaaagatcttggaaccgctcttagtgcggaacataaagatctcgtaattagatactttgggtgagcgaacgatcatatggttgtaaaccatcaagagatac

SEQ ID NO: 31356 - DNA, 673 bp, Arabidopsis thaliana columbia
ctttcaagcttcgcattggagtactcttgaagatcagtagcttcctgtctcaatcccacataatcgtcctttgcaagctattcaaccaaaaccaaattttcttaaaaaatagcttaatcacacaaccgcaaaatagcatcattgtacttaaaacttgtacaaaacatcacctctatactcgtctaaacattaaaatcatcatctttcacaaatttcaaactcatcaatagaaagagcttagaaacataattcttactcaaacccaaatatacaaatctcagaaaaacattatcacacctgaactttatccttcaaactctgaaccttagacgcaagctccgacgagtgcggtggaagcgagttcttcgggatcgagtaccgtcgaagcatagaagacggtgtccgatgaacgccttcctcactagaaggcgacttcttcgattcgaacccagtcacctcccagttccacatattggtactcgctctgtccgccattttcaaattcacgaaaaaaccctaatcctattccagatttcagcacaaacccaccaaaattctcgagcagacaacctcagattccaaatgaaaacattcaaaagtttttgaaatttattacctccaaatccaaaacaaaatgtgtttcttacttttgtctctttgtctctctctcaga

SEQ ID NO: 31357 - DNA, 1332 bp, Arabidopsis thaliana columbia
tgaagctgtatgtgccttcttctgattcttttcttcatgcttctagttgagattctatattgttttcatgaggtgaagctgttatctagattgaaagtagtatctagtcgtttatactaatggctgcactcttggtggaaactgataatcctatgtatagacatgtgcttagttcgtttgtggaaactgatactgctatgtttggatgggttattggttcatttgtggaagctgataatgctatgtttggacatgtgcttagttcatttgtggaaatgtgcggtttctgtttttcatctttctagaatcagtaaagtttgtatcgatatgatgattggattttttttctctttttcgacagactaaatggtacctaaaggcagcagaaggtgggtatgtacgagcgatgtataacatttcgctttgttattcggttggagaaggcttaccacaaaaccgcaagctagcaagaaaatggatgaaacgagcagctgatcacggccacagtaaagctcagtttgaacacggccttgctctattttctgtaagcacctcaactcaactactgcttctgagagtctacttctcttagtagtaatagggataacttatcgacttatgtatatccagaaacaaacatattacgcaatgagttcattcgattttaggttatgagaaggtttggatatgtaagtaatgaatgtaatgggttgatgcaggaaggggagatgctgaagtcagtgctttacttagaacttgccgaacgtggtggcgaagcagctgctactcccgtcaaagaagttgtacaccaacagctttctgcaacttttggtggtcaggccgtacaccatgccatacaccaagccaataactggcgtcctctaccagttactcgatgactcctatcatttatttcagtgaggtctagtgattggctagttacatgtccataacttaaattccaatttgacaatgtatcaatgacaaaaccttatttcagatttctacttttagttcgtactcatgttttaatccaaatggtgcgactgataaatttgtatccacacaataccaccaaaattgtaaatccgcgtttgcagtaggataataaatattacagattgtttcgattttggttttcttttgtgggtttgaaatgttccatggtgtagtgtacaagtaatgatgatttgaaaacacaaactttatatgaataacatgtaaaccaagcttatcccaaacatatgcgatatgataaatatcatacggtatatcatttctcatagcacgacactgagcgtaccatttgaaaaattcaacgatttcttcaga

SEQ ID NO: 31358 - DNA, 543 bp, Arabidopsis thaliana columbia
tcattggtatcccatgtttaatgaactttggtgttatacgtcactggaatcacaatcgtgtcactgcatcatcatgtgggaattgtgtaaaaggtctttgttgttttgaggagaaacataagccaagttttgaagctatagggggcttccgcagattttgaccaggactagttgggtgaatggtaggtataatatatgtaaggggtttttctactagttgcaagacagcctcattctcatccacccgttactcttgtactaaaatctcgtcataactttttgttcagttgttgtgtatttgtgtaaaagataagtcctaggactgagtgtaatggttcaagatcagtgttaagtaaatgacggcaactctattgttttaaagttgacagctttcgttatatattatggggtttgattcagaattttgtttttaataaggaaaccaagtcaagtctataaaaagattttgcaattgtggagagattgtatgtatcaagtattcacaacatcaatcaatacttactagtttaatgaataatttta

SEQ ID NO: 31359 - DNA, 622 bp, Arabidopsis thaliana columbia
ataaaaagaagaaatcattttgtttattgacttgtaccttgaagctttgatttgaacctaaacctaacaattggtatcaaagcttctaaatagaagctctgataccaattgtgagagtcatatcaaagcttcaaggtagtagtcaatttggtagagaaaaaaatagggtttgccatcttgattttggtgcattcaacttatgctaggagttttttataggtttcgattgatatccttttaacttataacaccatgtctgaaatcttatttattcaattctctggacatcaatcctgctctttgcgtgttggggttgaagaataaactttgacgattcaacagagacttgcataacagcagaatttgtccggacagaatctagattaacaccaaaatatggatttatagacatgattaagttatttgtcattatttttggtactatggccagttccacacaagacacaacgaccaaactaaatatgtctggtcacttttgagaattgagattttatctcgtaattatatcagaaactcttatgatgtaattaatctaatcttcaaactgacgatgaaaaacaagtactttacgagagaagaatttttttggagtcaaaataat

SEQ ID NO: 31360 - DNA, 600 bp, Arabidopsis thaliana columbia
ttgtatcgttttgttattgaaaaatttgaaacaaagaatgaatgtagctgcattggtagtggaaatcaattaatgggtgcaaagtgaaatgttgaaagctacctattataactataataacaaatattgatttatggtttagggaaaataaattgcaaagatggtaaatctaagttcgataggatgatgagttaatttgtttcatgatgtgtggtattgattacatgatgtttgataagaagttaagaacattaacgtatggttggttagtattggtttattgtgtattgttggttagtatttcagtttagtgatattctggttctattagtctatccaattttgtattagcattggtaactcaatttcttcaagaaatgaaataacaaatatttaacatatctctccaaaactaatacatcggaagtgaaagatgaaagacatgttcaaagaatatttatcaaaaaaaaaaaaaagagagatggtcaaagttagacataaatattgacttttgaggattcttaatattttgaacacatgctgaaatgtttaggcgtgaggataaatgattgacacatttgaaagtgacggcaatgatga

SEQ ID NO: 31361 - DNA, 604 bp, Arabidopsis thaliana columbia
tatataactatttgggctgataacaattattcgattcaataatcagacccgtcttcgcaggtccacgagagctcccacgagtctcactttgtttttgttttttttttcaattgaataggtgaccgttttttaaatctcatttgttcacatctttataagtaacatatgggatccgagagaaaagacaagtattaatcgcacttaatataaacgaaaatattgaattaagaaaagagaggttgaaaagagtatataatttggtggttaaaatagtttctgatttgctatatcactcgatcagtcgattgtcaaactgagagcatgaggaatatttgaagcatgctaatgctacatcctatatattcgattcatgttggatttaattaaataatcgagaaagcagtatacacacaaaaaccaaaacttgtcttcttctcaacctctttcgccattttcttcttgtccttgtctcaaaaacttacatttcgccattattcagtttaaactctttttacttcaacgttatttcttctagtccactttaggaacttagcttttctctatttatcttaaaaatacgttctaaaccttacttttttttttt

SEQ ID NO: 31362 - DNA, 437 bp, Arabidopsis thaliana columbia
taccattgttgtaagatagtgcttttaatccaatgaacatgggtctctaaattaaatcacaaggccacaaaattacttaatgcaattcagtaaacttcgaaataaataactctatgcttaatcttgaggttacatagcaatttgcaagtcacatcattacaaaagggataaacatcatatatcaacgcaaactccaaacagataaacaatcaaactgtttttcaatggcgtaactacaatatgaataagtaaaataattatgtaacactctataaaagttaactcatcattatcaaacatttcgcagacaataaaacaatatcgagttaaaaccacataaaggagatatattggattgaacatagagaaatgggagatgtcagatacattgccaaatagagtttttgaggtcatgatgaaacattcgcacatctaat

SEQ ID NO: 31363 - DNA, 513 bp, Arabidopsis thaliana columbia
tcgactctagctaaaagttggaaacatgaatgtttttcgagtcttcattggtcaagcaataactattaaataagactgttcatattagataaaaatggaaaatgaatggacatgctcttcgtggaaagagacgtggaaattttccatgagtttcttttgtcttctttcttactttttctattatttcttttccaattctcagatttttctaataatattgtggaaaaaacaaacacatccattgaataaagacaacaaaagattgtattaagacattgtgtgactaataatgtcttctaaccccaaatgaaaccttcttccttaaggttcttctcttcttctttatatatctctttcacctctcactttcactctctccatctacatataacacagtgagaaaacagagcaaaaacagagagatattacgatgtttttctctaaggatcttccttcacctacttcggttttcacagcttacgcatcaatggcgggttacatgatgatgataag

SEQ ID NO: 31364 - DNA, 1077 bp, Arabidopsis thaliana columbia
tgtagataatgtagatgtgtagatatttgataaatagaggagaacagctcagattaaaacaaaacaaaaaaaaactaatagatatatagttagcacttaacactaattaagcgtgacaatagaataattacataaagtctgatctgcatcacaacagtaagttcgcatatcttgtgtaagtggcgtatttcgagtaatatatgtctgccacctactttctcatcgattttaaattagcatcatctaatcaaatatttagtccatacttggcgatcggaaaatgaaaacaaagagacgtttatatgtatatattttgccaatcaaaatcaatgttttcaaacaataaccaataataattaaatatatgtatattcgtattaacatgttaaaaacacaataatatttttttggccaatagaccacacatggtttggaagttggaaccatttctcttcgctagtcgctactgcagccacatcaatgcctacgctcatccacgagacgcgacgatacaggttgactggtttgtggcttagtattattctgttgagaacaaacaaatcataattttgaaaggcgatgaggtagcaatatatgggctatatatcttttaacaaaaacaattgaaaatactatatagagaccttaaaataattgaaccgacagttaaagagagttatgtgctcgttggtgagatgtccattaaatctgtctgaatgacaaccaatatttacatactttgtcttctatatttcaacaagaaaagtgaaatattatcaaaaaaaattatgtccataatgtaatactaaagtaattttattctctttggaacagcaatagatgatgatggatatgatccgttgttccagaagcatcgctatttatatttggcattgcaaattacaagtatgttacagatttatctcgcaataccttattgttttcgtaaataaacgatgggatgcaacataatatttcttaataagtaacaacaaatttggctaaaatcattgattatatcacaaggaaaacaatattgctcagaaaattccaccacttgattatttttccttcgaa

SEQ ID NO: 31365 - DNA, 519 bp, Arabidopsis thaliana columbia
tttggattcgacaggatataagaaaacaaagtttgagattttgtgaattttatatgaatagaatataatatggttaatgggtaagaggaagagtttgaagacgtgtgatcatatacaatattaacgtaaaacaggtgatatagaaatgtaaaagtacatttttgaaagagacatagatagtttagttgacatcacatcctttatatccaatttcatggggatttcaatattccaactcattagggaaaaaacaaaagaagaatattaaatttaattaatgaacccaccaaaccttgaagttaagtatattatatacacagtaaaccagttatgaaccaaaacaagttaaataagatatcaaatacacagtaagcatgttcactcatatcgtcgatcataattgtcaaaaatgattgccaccacagcatctatataatacagtcttaatatacaaatatatcttagattttaggctgctttctttttcttgattattttagaaaccttagtcttactaat

SEQ ID NO: 31366 - DNA, 609 bp, Arabidopsis thaliana columbia
gacataatttaaaaaccttaattatttacaaaatccaaatatatatatcaatatttcaaaacctctagttgaataagaggtttcaatcatttgtggtaaattgcataagaggtaatgaaaggatgatatgattgtatccttaacattaaattgtgaggctgaatttgttattttaacacaaatcatttaaaatgtttaattgaatacacactccgaatgtattataaagtaggattattgcctatcaaaaatcttgcctcggtttacaaaaaaaataatcaaaaatcaaaagactgggctgatacaccttagtcttaaaaggagtattgatccaggccaaattatagaaggcttcaagtctgtccaaattgaaagttgtattttgatgtatctattatatttatttagcccaaaggccttcatttatgttacgccagccttgttttgatcgtttgcaacttaacacaatagactgtcctttgttgattcgatgtgttctgaaatcaacatacttgccaaagttgccaattaacgaagtcgtgacaactgagtccgaattgtataaaatggatatggactacctgttcttactcactaattaagcagtat

SEQ ID NO: 31367 - DNA, 867 bp, Arabidopsis thaliana columbia
gggtacaagctcaaagaatatgcaatgaccattttgtagcacttaaaaaagtataatctcaaatacagttaaacctaataaaataataaaaattaattaactaaatcctcaaataaagagaaatctaaaaataaaaaaatattatacatccctccctaaagattctagtttcattttcttattctttctgatatattaaaaatggccagtcacatttttttgtttctctctttgtaaaatttatccttttaattacattattcggtactcttacaaaagaagtcgcaactactcccctctaatgcaaaacaatcaattgtgcacccaatatacaagtcggtaaatttttgaaaaataacaaaatcattcggtaattgcaatactttcaaatacatctcctctaatgcatatgttagtaatttataagaacacaaattgaattatttaaattaatgaacatttgtattcaaatacatctactctaatgtaaaagataaattctttacttctcttagacaaaatgtattctccatacatgatgcgagtaagacgtcgtcctaactcctattatgctccaaattgtgaatactctttttcctttaactttagctattgaaaaggtcaacatcggcaataaaatctagcgcgtgggtattggaagtttggaactcccatgcatttaactcatcagaataaataaattttctaaactacaaaaaaaaaaaacgaaagcaaaagaaacacatcacgagacagtactttgtgatgtaagcaagcacatacaccactcccttcttctcctccccatatgtttgtccttttctttttcttccccaataattctcttcttattttattggccttgta

SEQ ID NO: 31368 - DNA, 438 bp, Arabidopsis thaliana columbia
tcaatcatcatcactttcttctttctcccacagatccttccttatctcctacatcttccccttcttccttttccctcatcgcccaggaacacatccgatatgcaccctcttcgttcgattctcacaattaatatctagggtttgcgaggacccgccctctctattcaagaaaagagagcagattttctctataatcccctttggtcagtttcttctctacctatctgacccctttgtactccagaggaatcgagtgatgagtttatagaactatcgcattttgaagtaatttgggtccatctgtagagcttgattgacatttctggagacatttgtatgtactcagagctccatcattgtagccgtagctgatctagcaagttgattgcgatattgtcaacattctgggaatacgtcaattgtatgtttagtatagcg

SEQ ID NO: 31369 - DNA, 661 bp, Arabidopsis thaliana columbia
ccgaatcacgtgtagccatttgatttttgttttcttttgaatcatcatttatgctaatttatgaattttgcttaataatttctcattccttactttgattatatcccgtgtcactacgatggttctttgtaataaaaataacaaattatggttcttgtctcttcttcttttttgtgtaaacatgaactgcacagggaatcatctcacctcaaccaattagccaaatcgaagtccttaaaacgaggagtttaattctatctttagatttttaaaaataaaataatatgtgatcgtgaatatgtttacaataaatgtataagagtatattgcgtattattttttatttcgtaagattattcaacatttttcggaggtggagagtttagttacataaatggacgattttgaaagtgtttttgcacaaagcccttttaaatatgaaacaaaaaaatttcaaattatttatctaatcctcaagtctgatagccatttcctacgtactttgatctataaagagttaaccgttttaacgtaactgagttaaaaacgtaacatcgagtgtgactaagcagaacaatttagtgttagtcgtatcctcagtgagaagcgtgacatagagtttggctaagcaaaacgatataattttagtcgtttcgttgca

SEQ ID NO: 31370 - DNA, 802 bp, Arabidopsis thaliana columbia
tatcattgatatttttgtatttattgaaattatgttttggttgcaatattattgatcgcttatatattttatttgattatatagaaggggaggaaaggagtaagcttgacatctatggaggaattggtttcatttgccatgctattctcttgattcaactgttggctcctgattctatgcaacgtcaacctctaatatttcatctgcagcatttaacgatggaggaagttaaaaagttcatagaagattattgctaccagagagtagcaaatggtttatcacttttgcaagacactaatgctgctttttatcaagcaatgagtgccaactccatctttaaccagccaccacctatgttgacattaccatcaagcactgatgttccactgtctttgctttcgcctaacgaagatcacgatgttccactgtctttgctttcgcctgaggaagccctagatattcagccagttccaccacatgttgaactaagggaggaacccaccaccaggttgccgaaacaaagggaaaagcgacaaacacctcttgctgcacaggttatatctctagtttctcaatttaatatatagccactaataacaacacatgacctgttagggttacacgttacttgcactataaggaactcttttaaaaatagagggagtgatagatatattttgattttgggttgctgacatggtagttttggtataagaaagtcttttggtaatctgactatatagagaacagtgaccgaacgttaagatttgaaaagagtagttcaaattatcttattgtagac

SEQ ID NO: 31371 - DNA, 980 bp, Arabidopsis thaliana columbia
gtatgtacatctataattagtggtgaacctaatatttgtatggttaagtagggtttgcgaatctcaaaacggaacgagagaagccgaagaaattacatgaagtgaatcgaaccagtctgtaccagactcaaggaaaggtagtgatgaaaaatcgtaggtactactttgctcacgtgtcagtggttgtctctgatgtgattacactattggcatatctttctatggtttagagaggagtgaaggaatgatgaaaagagagagggctctagcttatgcgtacacttaccaggttggtcgccactctgtttctgttagagaaaaattccctcttaattgtcataaaatatgctatgcattataggtccttaaacatctttcataatagttttggttttcatattgaagcgccaaatgcaacacacaaatagtgaagaagggattgggctttcttctaatgggcctgatagaaaccaatgggcttggaattggcttgaccattggatgtcttcccagccatacactggccgtcaaactgtagtccgggtcccggtcccggacagtacaatcctcctccgtatccgccttttccgacagctgcggcaaccaccacatctgatgatgtatcggagaagacggtggaaatggacgtgaccactccgactagcctcaagggcaatataatcgggcttattgatcgagagtatatagacttaggatcatatagacaaggccataagcaacggaaaagcccaacccatataccaagctatatggctccaaccgcatctgctaaggctaaagttcgagatcaaggcccaaccgtcaaactacaaggaacttcgtttatgccgtattggaactcctcgaccaaaaacgggtcggttaatggatcaggttgtgattcgtcaagttcaggtggagcaataacaactggttatcccggtcctaggagtccgaacccaaaatcggatatccgacgt

SEQ ID NO: 31372 - DNA, 594 bp, Arabidopsis thaliana columbia
tggccatgatcaatgaccctcgttctctgtttggattagctgtggttgttatcttcatggtagttttaaaacgtgcttaagatctcttgttcctgaattcgccgatatagcggaaaaacaactacgtactctgtgttatcgtttaaactctgtttcattcctttgctttgttatcgtttaaactctgttttttgtttgattggaatgatttggaaccgtcattggatcttttcataatttataaataaaaagatcctttggatgttttatcgtttattttgtttggatcctttcatgttatagatgttagtcatcaagagatcaacattgcagatatgttttcttttcccttctcgctcgcagatgcctatggaaaacacatagttggcttgtaatcatgagatagttaaacctagtgtgggactttccacgtaataaagagtttgtttggcattaaaagtagaaaatagaaaagggaagctaatgatatctctcaaaaagatcacaaatcaattggagattgaagacttggtgggcaaggccattgctctgtattaatttaggtggagaaaatgtgaacatatcagggtttta

SEQ ID NO: 31373 - DNA, 568 bp, Arabidopsis thaliana columbia
atctgatgaacgcagaaaccaatgcactaactagttgaaattgatggcaaaattcaccaaattagggttactctgttcaacaatgcaggggcgttattggatttagatgatcgtaaaaagacagatagcattctattagggattgaagaaatgtatgtcttagaccattccttgttagagaacaatctatatttgaattgagtgcgctttgtttgtttatatgttgcagagtggcgtgcaggaacaagagttgtgaaactccattagaggtcatatcctctgagttgattgctactgatttgattccttcttctcttgtcaagaccctcctttatcctggtgccattaccaagtctctttttgctggctccaaaatccccagctaccaccacttggtttcagttttacagttcgacggccatgtatcgcacctcctcctttgcaaccgatattcatcatctagaggttttgcttcttccattctctccatccatctggttatacaacacctttagtccaacaatgtcaatccaaaatctgcttcaggtgtttgctgggagttgtttgt

SEQ ID NO: 31374 - DNA, 511 bp, Arabidopsis thaliana columbia
tcaaattttttgattttgtttcttttttctttggaatctctcatcttcttcggattttctcttcttcttcgaatacaaagtaatttctcgtcttaaggtcgactaatggcgtaaaaaaagtaagaatttgtgcttcaattggcttagtcaacgagaatttgtgatttaattgaaagttaatagaaaatagaaaatttaattcaccacgtccataattcatgatttaaaccaacgaaaatgatgaaatgatgatttaaatgataatttttccccattttaacacctaagtagaacatttataaatattggccagcctactaatctaagtccaggcccattagtattaggagatccgcgagacaaaaaagtagtaaataactagattccaaatttaccctccaaaccacaacgactctttcgagtttcgagctaaacactcctctctctctccgccacttcactatcacatcccacctaccaacaatgatacccgtaaccgccactcttatcc

SEQ ID NO: 31375 - DNA, 516 bp, Arabidopsis thaliana columbia
tgacgtatatttctccttcactgaaagacaaacctgtggtttccagagtatatcagagtttgctctaacagatcaagttatcatcgaacatttcatccttcgattgaggaatcaaaattaagcaaaaagaaatcgatgaagatcctgctaaattgctaaccttgtcactgttatcgtctttctccatcaccaattaccacgatttcagatacgacggagccatcacgactttcacttcgacattgcgtttaggatcacgtttgcgtttacaactttcacgtttgcgttttcaactatcacgtttgcgtttagttttatacttttgtagttttgaaataagatgcaactgtattattggattggctctcacatttcaattttcaagcgtttcgaaaagctaaagagttattgaaacgttcaaacataaaataccaaaccaacccaaactaagtgaagaagagtgccagtaaattaaagctgagccaaaaggactagtaaagattacaacaagagttg

SEQ ID NO: 31376 - DNA, 461 bp, Arabidopsis thaliana columbia
gaccaatatcgatgttacatgactacaagttctctgaagctgttgtctgcttgcctttgcagaaggcccaagctcttgatcctgctggtgatgcttttaatgaccaacttgatgcttccataagagagcatgctcttgctcagcggaaacaatgctatgagattattgccaacgccttgcgatctctagctagtcctctagctagtcccacgctagacgaggcttcacgtagtcaatatatatgccagatcgttcatcttggtgtgcaatcaactgacagagcgttccgagagtacctatacaaggccatgattgaactgcatcttgaaaacgagctcctggagtacggtggtccggatttggtaccttttctccagaatgctggcagtcactctgaatcacaggtttgctaattacacgttagccctttaaagttatttccattgttatggtgtcaagat

SEQ ID NO: 31377 - DNA, 550 bp, Arabidopsis thaliana columbia
caatgaaaaatatgttctggaaaagagaattgcctacatgcgtctggtaggcctttcctttgtttttacttatctgttttattcatctcgtattaaatgtatttaatttaattgtttggaagctgaaagattgttgctgttgtaaccaggcatttgatcaacagcaacaagatcttgttgatgcttcatcaaaagctctctcttacagacaagagataattgaagaaaatatacgcctaacatatgccttacaggtactatcattttgtgtgtgtgggaatacagcactagttgtctgtcttctggcatatgctttaattcctcatttcctttttctttggtaaccctatttagctggacaccttgaattatttcagtttccacttcagttttcaaactaggatttgtctctggcccctcactttcatcatgtttttggataactttatactgcaactggtatatatatatctacgtaaaatctggttaatttttaaatcgaagccaatatgcctgttttcgttttttttccaggctaccagcaagaaag

SEQ ID NO: 31378 - DNA, 508 bp, Arabidopsis thaliana columbia
tcaggtcaaattgaatccaccatcttcaaaatcacgtttctgcatgtttacccttgcctgactctcagtgtttcaactactattatccactgacagatcgacaccataattaaacgaagagtcttttttatatattttgagattttttagtttgcttgagtaattttcttgaggaacaaaaacattacagtatgtgtctgaagaaatggagatgcagggtattttagtaaattggatagtttgtcatatcatataaaggtcggggacatgtggcacaacttttttgctttaagcttccgttggaaaatgtgtggaccgatcatacaaacatgaacccatattcctttatgttttgttttctattttagagctaccaaattttaagtaatattcatgttcaccatacatttggtgataattttatcatattcacacaaaataacaatttgtaagaaaattattcggagtcatgtacctaaaatgttttgacaaaaatatcatattaatt

SEQ ID NO: 31379 - DNA, 599 bp, Arabidopsis thaliana columbia
  unsure (1)..(599): unsure at all n locations
tttgaaaatttcaaaacaattcaaagctgagctacaaacgctatccaaagcgtccactcaaccgcaaacgcaggtcgcttagcacataaaccgaaccgaaattcgctttaaattttaatcggtctattatactttcttcttcttttcacatccggtttcattactttcttcaaatttccaatctaaaaccgggatataaccgaattgatttgtttagtttaaacgcagaaatcacccgccactctagttacagtagtatgatccgccgccttctcatccccaacgccgccgcaaaatctcaccagtacattaaagtctctctcttctcgacatcggcgccggagataacaccgccgtttattcacaaatgcaaaaccatctctcaggtcaagcttattcaccagaaactcctctctttcggaatcctaaccttgaatctcacttcccacctcatttccacctatatctccgtcggttgcttatctcatgccgtatctctcctccgtcgttttctccatctgacgctggtgtnaccattggaattactcattgcagctacgggacaatggctggcaataaatgtcctatttgtcggctta

SEQ ID NO: 31380 - DNA, 1454 bp, Arabidopsis thaliana columbia
actgcaaatgcacagtatataggagtagtactttaggattgaatccacaaggagagaagtagttcagagaaatccttaagaagagagtgaagctaggaccaaataaaaagagagggggttgttgtatgcaataaaccaaaataaaagacaagtaactaaactaaacgataagcaataagagagaagcgttaggctttcgagggtttctccggatgtcatggttcaaacaataggatatagatctcaatctaggtgataacatggttaggtttgtttacttccaaattctcggacatacgaaactctatcaagaccagctaaccctaacggctggtaggtgaaagccggctattctcacctatatcttgtgtactcagttgccctaacggctagtaggtgcttacatggtttcaaaatacaagatcaaagcattaagttaaaattcgattctactccataagtccctatcactcggcgggcgtgcaacggttatagttttttattcagttgagctatttcaggcaattatacaagattctgccaagtataaaatatctaagatcatgtactaggtaacgtgctggacatacatgcattaagatcaaactcaactagaaagaaaagtgtaaaggatcaaacaaaaccatagaaaccgccaacctaaattgtatctaaggtccccatgaatacccttcgaaatccccttaaacctaactagatatctactcaaagaacacaacatcatatgaataagaaattgcataaaaagagtatgggtataggaaagggtttagagatcttctctgggaatccaaagttgatgagtcttcttccttttacaagtagagaatagagaagagaagagaaaaaaagagaaaacaatgaagaaccagaggagcgacggctcgaaagcaagggaggtagcctaatttcatgggttgtgattagggtttcccctaatcttagtatttatcggccttcattaggttaaagggtagaagcgtctttctattgattagtaagtgatgggccaaaaacctgggcttcgtaggaggacttgaattcagtggcaagaggaagggaaggagtggttgtgcgccttagtggtcagtggaaaaatcgaggggacgcccgggttcaagtctccaaggccggtggttttagattgatcatttccaaacagcgattctaggacatgtcttcactcttcgggccataacgtctaaacggcttcttggattgctttgattcgacttcgacgttaatcttgactcctctaggtttccaatgacacccagataccctgatttcgtgatcaggaagatcttcgccggatgccaaacatctaaagcacataaactgtactaaagcggaatttgatcaacttctacttttttgctcgaaaactcatcattcttccttgatgcttaaatacttgaaatatgccttgaagt

SEQ ID NO: 31381 - DNA, 535 bp, Arabidopsis thaliana
  unsure (1)..(535): unsure at all n locations
tatgatacgccgatgaccggtggtagtggtccttcatattcaggagatggcggtggtgggctttggtggatcactggaggtggtggtgctgtggtgaaccatgggcggtggtggactgtggtgaactaccggtgctggtggaggagattcttcacatggagctgatggtggcggtggtggagagctgtagtgtactggagatggaggcggagaatggtaatggacttctggtggtggcggagagctgtaatgaaccggcggtggcggaggtggagagctgtaatagactggtggaggtggcggagagctgtagtagactggcggtggaggcggagagctataatgaacgactggtggaggaggaggaggtgaatactctatacacggtggaggtggtggtggttctatacaaggaggtgggggaggaggggaatagaccggagtgggtggtggagaagaaactggtgttggtggnggcggtggagacagatatggataaatcggtgggggaggtgaatgtggtggtggaagtgaa

SEQ ID NO: 31382 - DNA, 772 bp, Arabidopsis thaliana columbia
tttttttcgattgagcttggtataacgtgttaggtatgagccgacaagagcagtctttcatgtagacctaccccacgctttttgggttagttaggactaggtggagacttgtatttgggattgggaatgtgtatggaatgtgataataggtttttaagatcaattaatcctaaagcactatcatgtcgttgtagcactgaaggttgtcaatccaaatgggtgtgatgctaacaatcaagatgtgatcagaagtcactaagtcaagccaagcaataacaggttttggtgtgttctagcagtcctaagtgaatatgcagaaaacagaaaatcaaacagaaacagcaaaacactcgaccaacacagctctgtgcagagcaatggatgaggtcgagtgacaggtcgagtaacaggcagaaagtgaaacagggatactcgactgcacagtctgaagccagacaactgggtggtcgagtatcaggtcgagtaacaggaaagaattgcagaaactaagcaacagagaacaagatgcagtaaacaacagtagagtaaacaaagaattcaatcagataaagaattcctaaggatggggtaattgagtaatttcatttcctcagtttacaggtgattgacatgctcaataaattaaccctagacaacaagttcattaaccaaatctaagtgccacgcaacagagactctcaagctaacctaggtccagactcaatcaccattgacgagaggtaacctacaggcatacgaacaacaagttaag

SEQ ID NO: 31383 - DNA, 787 bp, Arabidopsis thaliana
cagcaaaatttctgcgagttctgcagctactaatactggaaatagtgtatttggcacttcctcttttgcatttacaagctctggtagtagcatggttggtggtgtatctgcaagtactggaagcagtgtttttggattcaatgctgtttcatcagcttctgctactagctctcaatctcaggcctcaaatctttttggtgctggaaatgctcagacgggtaatactgggagcggaaccacaacatcaactcaaagcatcccctttcagtttggttcatctccatcagctccttcatttggtttgtctgggaactcttctcttgcatcaaacagttctccatttggattttctaagtcggaacctgctgtatttacttctgtgtcaactcctcaattgagttcgacaaactcctctgcaagctctagtagtacaatgagctctcccctatttgggacaagctggcaagctcccaactcttctccaaactctggtccagtcttcagttcctcgttcaccacatcttcaactcctaccaacttttcctttggaggatcttctgctgctactgtttcgagcactactactcccatttttggtgcatctagcaacaacaccccgtcaccttcagctatctttggtttcgggtcaactctggtaccactccccagcagccgggatttggtactcagggactccatacagtctctgtttggaactcaactcctgggtttgatttggtgcacgaataatggaaatggtacaacgataccaacaagtgagcatgga

SEQ ID NO: 31384 - DNA, 550 bp, Arabidopsis thaliana columbia
ttactcatcgtacttagcttcaaatcctaagtaagagttaatccaaatttttacccccccccaaaaaaaacagttaatccagttagaaataattaatatccaattgcgtcacttcacgtgattttgtattgaacgcatgtcctccaatttgtgtctagacacttgagtgatgtcagtgatgacattatgtcacattacttttgttgcttatttgaaagatactattacatcagtatgatggttaaaatgaagaaacttgaagcactacatatgacgacatcaacgttcttttcctgacaacattttcttttatcatccctaactttttttgggatgctttcacctacacactcaatgactcaaaccaaaccacacaagaacacttcccactacttatggctcatgatgggctttggtttagcctaaacccaatcaagataacttaaatagaaaacatcatcactagggatgttagtttttttatcaaaaccggttccaagagaatgcaacgggacttctcacttcgtgctgcggattgcccaagtgatgg

SEQ ID NO: 31385 - DNA, 532 bp, Arabidopsis thaliana columbia
ccattgccgactaataataatcctctgttgggaaaaaggggcatctttacttttgtctcttgctaatcatattcatgccctttcactatgactcaatagataaacacaatggatggtaggagttgtgtagtggtaaagtatatcagaccataactttatataagattatgaggatcttgaacaacaagcttttcacagtatgtggtatgaggaaaaacaaatcaccagatctgtattcaactgaaagatcttaaaaccaatgtgtttcgaagaggaagaataggtaaagcaaaccttgtagttgtagttgtactttctttaaagctgaggagctaattgcaggaaccaaaacgtcagtcataaataattttgaatcgaaccaaaccccatccgagtttattcggtttcagtttatcctgaaggggtgttttttgtcttgtcggtcggagaacctcgcctatataaataaatgcttccaatttgaagagcagctaaaccctgaccctaaaatctccagagagagagacgatgg

SEQ ID NO: 31386 - DNA, 511 bp, Arabidopsis thaliana columbia
gagtgctttactccaccgtgaagtaccaattcttttcggcccaatataaacttaaaaggcctgtggtgaagtatacgtttttgcagatagatctagttttgttttgtcatagttgggcacttggcctagagtcgttagacgacaactaattggaaagtcagagaataaagaatcaaacgttccaattttatttttatttttataataattccaaaaacatccatttcaatttctggaagtatgaacactgtctttacgtactgaaagaaaagaatcagaatattggttaaggctgctttgtttatttttttttctaaatataatatttgaaaaaacagactttaaagtagttgtatagtgtatatattatgaacgttttaatctttgccacaattgttggttattgtaagattctttaccttaaagcatcgaactttgtggcttatgtgtcccatatgtcacaacggcctctatcgccacaatcgcacaaatgcagcataagttatttgaa

SEQ ID NO: 31387 - DNA, 585 bp, Arabidopsis thaliana columbia
  unsure (1)..(585): unsure at all n locations
cggtaatctnnnnnnnnnnnnnnnnnnnnnnnttaaagcttgttctgccgcagatgagactatacatcgtcgagatcgcaatgatgatatgagttgttcctcctgcgacggctctaatcaaaaaagagcaggagtgcttttccatctattgcgatgatggctttattatctgaaggatgacagtcacatttaaaaaatatttaatctatagatcacaatgtagggtcatggaatatatgtatacaactattttcttcttcacttttaattatcgtattcattataaaactaagttaaaaaaactcctggagagtgagttattaatatatttttaaataaaattcagttatcattcatcgatgcactttatagaatcatcaatggccataatagtactattaactctcaattttatatttttatcatcactacaaatattaactgaatttatatcaatgattttctttattcttatctttcatctcatttactgtttcaatgcaatcagcggcaagttggagtggatttagattttcagatatggtcttatgatcttcccttacttaataaatagcatgtatagga

SEQ ID NO: 31388 - DNA, 407 bp, Arabidopsis thaliana columbia
aaacaaaaagtaagtttgtaacaagaattgttataaaataaaaggaaaattacgtacacgactttctacatgttttgagaattaatgaagaatcgagtttcacaatctacaggagttgttgtggttcacatttggccactaaaacgtttcagtttctacatgtctttgacatactattgtattgcataaagccgaaaatgataagcaagaatatgaattttggtactgtggcaaaagtcttagtaatagtcgtcaagttgtgaaaaagggtattacttaattacagagaagaatacgacggatactggcagaacctaagaatagagcaagagagatacatcgagattccgaaacagagtagaaagcggagaaaaatggggaggcacgttcagtgagcatgacgaggt

SEQ ID NO: 31389 - DNA, 542 bp, Arabidopsis thaliana columbia
  unsure (1)..(542): unsure at all n locations
gttccaaggtggagatgatggccggtgtatgaaatcttgggaagatgagccgccgtagttaaggtcgaggttctggagctgctccatgagctgcgaacgtctttccttgaagaaatcaagacgtgttgttaactctaccagagctgctgatgcacagctgacggatgattaagccttgggtactctgttatctgcaaaacctcaagcatgttagtgtgcaatgtcattgcttaagatgtttccttagaatttttaagagcagtcagctttaatttgctaggcagaaagcgatcgtgcatgtctctgtagttactattgaaaccaggtaaggccaatcacagaattgcacacaatactacgcaacccaaaagtgaagggaatgataataacaaggagcaaaaggtcttacatctaatactcttgaagtcgacggaaatagatggagaatctatggatgagagcttgtcacggatatctntcagagctcttcactgatttagagtcagttgtgtttgttgatctgggtattgttacgagatggt

SEQ ID NO: 31390 - DNA, 611 bp, Arabidopsis thaliana columbia
gaggcattagggtttaggattaggttttagaaaagggtttagatctctaccaactggtttgttaagaacataatctccttaccacatttttactcttgaaaacattttgatctgtttttgttatcttcaccaaaagacttgactccaagaaacaagaagaagaatcaagaagcaagttcaagaaccagcttttaatgaaatctctacttcaaaaaggaaacttgctttaaggaggatggatcttttgttttcttgaatcttttgtgtgggtaaaacattttgtattatcaagattttgatttgaggagataaagagtttgttgttaagtttgtgttcttgggatcatcaagagttaaaacaaaaaaaaaaaaacatttcttttttccttcttcaatttgagatttagtgtctcctttaacacccacaaagccagcagatgctttcctggtaattctttaatctatcctttcttcttctttttaaattcttaaattcatgcagagagataattctcataattttcattggttcaatttcttaaaatttgcttaattaagattttattacataatgtgaagtataaaaagggtttagtgttgtttgtgtttga

SEQ ID NO: 31391 - DNA, 596 bp, Arabidopsis thaliana columbia
taaaaaccttgcaaacgaaaatattttgtatataaaaaaaatagtttacataataaaaatatttgcaaaaaacaatataatttagtcttagtgttaaatttacttgagtgaaaaacagttaaactttatatacctcaattagataagctattaaatctatacctcaatttttttattttattttttggttcaacgctatatcctacctaattagattggctaaattgtataagctagtgcaaaaagttcatataagaacaaaaaactgtaaaaggaaagaaatctacaatttcatgtaaaaaatccaacttattaattaacaaattttgaaaaggaaataaagtaaataataatggttatggattcaccttatctaattataaatacatctttatatgctctatcctctatgagtgtactatagagagtagagagagtagaaaaaatgggttcctccatattattggttttgtttctctcatggttatgctgtccatttcttatgaaccactcaaatgtaattatcttgaattttttttgtttgcttttcttcttgtgctatggttttgaatattcataattgcgttgtagggatg

SEQ ID NO: 31392 - DNA, 873 bp, Arabidopsis thaliana columbia
cctcagtttccttcattctggaaactaaatcttcagcctttatatcaaataaaacttaggtatataaaaaaaaaatggtctcacactgaagaagtttcctgatgaaacatatatataaagggacagtaatctaacatagaagcttacataacctcgttactaataatagaagtaatccaaaatggtgagagccgctaagtgaaatgttaataggaaatgataagtccacgaaatgaaatttaagataactgaaatggtccaacttcaacttgttatagaactcttgacccttacctttcaataacactgtataatgttccccaaaataacaaaattcaacttttctactatagttggattgagaatctctcgtgttaatgggaagacgaactagggatcgaaaacaaaacgcaaacctcatacaaagatatctctactaacgaacaccaaatcggacaagtgttaaaaatgaatccgtttaattgatttaaatccaacataaacccatttgagaaaatacaataagcaattgaataaaacgacgaggatgatgatatctatgattttaccatggctactcctttttttccaatagatcctctctctttttcccagttaactcatccaagagagaccgattttgcagaaagctgactcagcgagtcaggcaacaagacgagtcagatcgggcagattctctcgagttggtgtgtctgagaaaaattctccttgaagtcagctcaaagcagacacggagaaatcgggagatcggaattaacggagccaaaattcttttcaaaaagctgaatctgaatgaattttttaatctctctcaagaaagctgattgattgttgaagaagcagaatgaaaga

SEQ ID NO: 31393 - DNA, 467 bp, Arabidopsis thaliana columbia
taagaattttggtatttgaaattttatacatataaagttatcaatatgatgagagaaaagaatccaatcattaacctatacacatatgatagtgtcgaattgttgtttctgtccttaaatgtctcctccatttccaaagtcttgggaaacgaagaaacagaaaacaaaagtcgtctcttggtttccatgtatgtacttattgggcttattattgggctgggccgaaatggtttgcaacttacatgtttcatcttcctttttctatttgtatcctttcatttgccgagagaacttcaaacgccggcgaagaagtgtcaacactccggtgagagagagagataacctgcaatgtcggaagtttccgtttggcctatctaactccggtggaagttttcccccgccatcgtgtcctcgccagctttctccttcaatcaatcctacttcctccgcaactcgatcatttgaat

SEQ ID NO: 31394 - DNA, 537 bp, Arabidopsis thaliana columbia
ctttttatagtttaatggtttgtgatcaacagttgtgttacacatctaaactcgtttattttcagcaaaaaaaatctaaactcgtttattacatgttgtaacccaaaaaaataaaaaaatgaaaaaccgtcgcaagtgatatcgacctttcgcctactttcgcactcatgttggtgtcttgacaaaacccactgtggacgcatataaccaccggaggagtacaggccaaaatttctattattaatatgagcttagttagataatccaagtctagtaaaagatttgaataaaagcaagttgtgtccacaaaactaaaataaaccaaatccaaagtcagtcacatttggaattatgttgtaatgacagtcactgctttgtcatcatctcaccttttaaggcattgaccttttgtttttgttcgacaaaaaccattttcgcattcatcactttcgaataaaattatataacagtctaagtaacaaactcatattaggataccaatttgaatttgacttttattggatatcgtagctaacg

SEQ ID NO: 31395 - DNA, 562 bp, Arabidopsis thaliana columbia
atccccggatgtgggaagatgcacttgtctgattgtgaaagaacaatcacctgaaggcttgagccacggatctgtatattcactttatacacatgtaagtatatagatattcgatttaccatgatgctgagtgagaattgagatgtagtgatatcaatgtttctgatatctcaggaaggtcgggggcgtaaagaccggaagttagcagttgcttaccatagccgacgtaatgggaaatctatatttagggtggcacagaatgttaagggattgctgtgcagttcggatgaaagttatgtcggttccatgacggctaatctcttgggttccaagtactacatatgggacaaggtcagaaattcaagctcaatgtaacggtgttggttctgcttataggttggaaatcgagtatgaatgtttctggtcttttgattccattgcagggagttcgagttggttctgtaggtaaaatggtgaagccgcttctttcggttgtaatgtaagcgttgaggattttgaatgccgtgttttttgatgaatttgcgtctgccttagttttggg

SEQ ID NO: 31396 - DNA, 644 bp, Arabidopsis thaliana columbia
  unsure (1)..(644): unsure at all n locations
ccatgacattgcaaatgattgtcttggtgaagcaagattcgacttaatgaagcaaacaaaaatgagaggtgacaagttcaccctgagagactctcgtagaaacatgcatttgctttaggctacaaagagtcttcattaagactttttgttagattcaacgatttttaatgtttccggatatataaaagatcaatttgatcatcccttatgttgagactttaccctcggcgatatagttaggataatggttttcctacgtgggtagacgaagaaataaaagccattaagtcatatgagataaatcaagttaggttacctatgatgtttacatgattcgtgcaatatctgatcgattgatttgatatgtgttatgatctctcaagaaattccaaaatctcttctcttactataatcaatcatgaattcgatgctcaatacctcccgattcttatttttctctctctcatcaccgacaatcatcagaaaaaataaagtttgacaccaatggcaaaatttcaaacttgtattacggtggacgtggagtatgcttgaaagttgacggtggacgtggagtatgcttgaaaggtgacggtggacgtggagtatcttgaaaggtgcnggtggacgtggagtatcttgaaagg

SEQ ID NO: 31397 - DNA, 986 bp, Arabidopsis thaliana columbia
ggaactgagatgatgcagaaaccgaagacaaatggcgggccagcgttttgtccttctaacacaccacgagaaaatgattctccctcactcacattatccttcaaacctttcaaattaaaaaacattattcttcattttacaaaataaaataaaaaatatccattcagacaaaatagataaaagaaaaatatctttggagattctcttttcttctttctacaaatttctgccttattattcaaattgtgtagattctcttctaatcttttggtaactattagttgagttggtggataaaattttattagttagcattatccaattcggagtaaatattactattgcttagcctttaattttaattgtttgtttggttgaacaatagttttggcattttgcatttatttgtatcatatacagaatctgcatgttgtttaaaactgttgaattttagagcaatggaaatctcccccctatatttggaaaatgcgtgatgattatgacttccaaacaaaggcatcgttgtaattatacatcaaaatgaattggctatactttatttccaaaatgtgcatacaaatatttttaaacatttttgtctcaatcttaaaggattaaaatgcaatcctaggaaagttttaaatttaggtgagataaaaaaaaaaaaaaaaaaaaagtggaaaaggtcttcggagccgagccgccggcttgagaagtagtagccacgtgtaatgctgacgtgccgtgctctgtttggctgtatctcatgcatttgacgtgagtcgaccaatcagaattccccgacggctaatccattgatgttttgttttcacaattatttagggtggaaaatcatcacactcttgcctaaattaaaacacgtatattcataaatcactctaattctgtcaatgaaatggataatctgagaagataaatattttgtaacaatgctaaatattaaatgacaaaactagcctcgacgt

SEQ ID NO: 31398 - DNA, 483 bp, Arabidopsis thaliana columbia
gaagcactttcatgatcgctctttacgagaagcacaaaagagactttgactttaaaaaccaagaacctgcaggtactaaccaaaactaattaagatgatggctttggagagagaagttaaagagtattggaaaatgaaaggtggatgaataaatagggtaatattgaaaaagaaacccttgtaagttagtgttttggttccaatgttccaactacgactatgcttaaaaacatatttttttgaagttttataataggttgatttataacgtacaatagataaagagaagagttgaaaattgacatgtattgacgaactagcacttacgtatggaagatatgcggggccctctctcgttgttgttgcaactaatacaattttggtaattatatttaaccgatttcagtttgataacttatgtcttcctcaatagtcaatatcatatgattcatacatagtatactacatattgttaactttaaa

SEQ ID NO: 31399 - DNA, 326 bp, Arabidopsis thaliana columbia
taaaaaaaatagtatatttataatttttaactttttgatctattaaatattgatgatgttctttaaaaataacaaataaacataattttaaatgctccaaactaaaatattttaaaagattattgaagtatataacaatatacatttaagaaatatatagatattcaaattcagcattcattacttagtcggacttttggttaaactaatttatatttaaaagaaatatactactctattgctgttgaatcgggacgaaagcatgatttcattcaaatatgataacaacaagtacaaggatagaaggtcactaagatcccaaagtt

SEQ ID NO: 31400 - DNA, 622 bp, Arabidopsis thaliana columbia
  unsure (1)..(622): unsure at all n locations
aaatagctcattagagattttataaaaaaaaaaaaaacaagccaacgaacaaaaaaacaaaaatgttatatgaacttcacaatctatccatgatttcttctagaaacacatctcttcaagtgttatatatataaacacacaaaaaaaaaatataatatcagagccatatatacgtgagaaaatagaaaacacaaaaatgagagaaacaagaagaaaaataattttgggttggagatatacgtacctggagctgattcactgataccaataaatataacttgattcacataaagttaacttctatggttggcatccttcaaagaagaacttctgggaaaattgttgtttttggacaattctcttggaaggatacgtgtgatcacgtctaaaatttttttgtttgtgttatgcaaaacttggataagaatttctgaaaaaaattatattaaaaaaggggttctctaattttatatacaacaattttaattaagtagtttcggagagatggtggagtgttggaatagtggaaatgatttttttaattttcaaaaaccagtttttatatacaccgaagacataatgaaaggtgaggatttaaggnataagaatacagttttttgca

SEQ ID NO: 31401 - DNA, 545 bp, Arabidopsis thaliana columbia
tatataacacaggatcattacagaaaatcaagaaaatgtcaaacacaatataagatgtcaacgaaaaggctaccgagtcagccggtaacctaacactcttttaatattaagggacctacattaacgcgtgcattaatataaatatacgtaaaccaaccatttcagacaagagagagaatcgcattaacaaaaaaacaaacgaatcttttgagtttaaaaccctttttcacttaccggagaaatggagagatcgacgccggaacatgtctcctccgcacacaagcgcataagcgtgacttcctcgtgtctctcatggtactttgtgctagacacgcaagcagagtttccaagaagcttaaacccaagaagactcggaagcaaactcatcttgaagactatctcgaaagccctaagtctaacggaaacggtagcgaagacggtagaggaggaggaaggtttggatggagtccggcaaggactttttctcctatgagggtgcgtctaaggagctctcacgaccttgagcacaaggcgatgactatggt

SEQ ID NO: 31402 - DNA, 583 bp, Arabidopsis thaliana columbia
  unsure (1)..(583): unsure at all n locations
tcttctggtttttcaaaagggtttcaaaagtcacctctgcattttgtttctttttatcacctgaaccaccatctctgaacggcactgaccggagtattcaagaaaggagcgtaacgttggataatcggagtcaccgtcctccctattctgctccacgtgctctggtggtaaccagctgttaccggtgcttgatacatcagcttcaatagctgccaccaaaataacaaaactcagttcatgagaacaactctcaagatccaaccaacaatcctgcaaacaacctagtagatctttgttttaggaagaatatgaggaaaaggtttttgaacttgacagattttataacaagaacacaagatttttaaccaaaaaaaaacaaaacacagttctcattactatcctgatggtcttagcccatgtaacactttcagtgacagaagatcatcaaagcaacaaaaaaggtgttattacggaaatgattcttcctatatgttcacttggatcaaattaaacaaagaaaacaggggttctacttgggaatgttgagccacacaaagaactgatgactacaaccanaagatga

SEQ ID NO: 31403 - DNA, 555 bp, Arabidopsis thaliana columbia
gaaacactcatcttgattacaggcaagcgcgcagcattcttggtgctcggaatatttgtaacggcattagcatcgcaacactgaaaaaggcgtattttgatggggttttgtcgaaagcagaggtgttgacacatcaaatgtgggcaagtgatggcatcaactagtttaaaagattttgtaaaatgtatgtaccgttattactagaaacaactcctgttgtatcaatttagcaaaacggctgagaaattgtaattgatgttaccgtatttgcgctccatttttgcatttcctgctcatatcgaggattggggtttatgttagttctgtcacttctctgctttcagaatgtttttgttttctgtagtggattttaactattttcatcactttttgtattgattctaaacatgtatccacataaaaacagtaatatacaaaaatgatacttcctcaaactttttataatctaaatctaacaactagctagtacccaactaacttcatacaattaatttgagaaactacaaagactagactatacatatgttatttaca

SEQ ID NO: 31404 - DNA, 557 bp, Arabidopsis thaliana columbia
  unsure (1)..(557): unsure at all n locations
aaactaccatctggcttagaaatggaacaagcaaggatgtgttatatatatacacacacaaaaatgaatggattagttgaataaattaagaatatgagatccttattttgcttttttataagtaaaaatgcctcttccataatttgacttttatcttttttggtcaaattatatgactccttaattatatatctccttgcttatataatagtagaaattacttgtttgcctaatccttctatcttcttcttcttttcttcttctagttaataaatttgatcaatctttgatcaatctttggtcaaatatcagtacggtatgcgacgtttcttctttacaaatgtctttatttttttaatattatgtttcaaagtctaacctaaatttaaagtcacaattgacaaataatcaagcctgccccaactgtttttcttttcttctagacatttgtctttgtccaaagacaacttttttgggagagttcttgtgtgggttggttacaatagtctctccaaggataaatctgnaatgtttatttgaatgatgtgtctatgatg

SEQ ID NO: 31405 - DNA, 571 bp, Arabidopsis thaliana columbia
ccgaacagtatgaccagctataatgtcttaggcgcaatcaaacaaaatgaactttggtaatttcaaaaaggtggaaacgaaaacatctgaagaaatttgtgatttgcattagcatctggattcatcttaccttccaaatgtttgtatcaagatccacttcatgcttccctgacatgtcgatagcatctacgctcagtactacaaaaagaaaaaaaatcaaatgattacgtctacaatgacaagtattccagaaggtatggcggaagaaaagtaatatagacttgacttataagtgatcaatggatttctcttaccatcacaaggtaaagatggaaacgtcatatttacatgaattggaagagtttctccacgctttaagtccactgacatctacaaaaaaaaaatgatacaaattccaatttgattacgataatttatagtaaacaaaatgagaaaaaaaaaaacctacgagtcagtcatattgacatagaaaaactagggtatcaatgaagttaactcaacagagagacttcaattccctattgcccaaatgatatgaacacaaaacttt

SEQ ID NO: 31406 - DNA, 1561 bp, Arabidopsis thaliana columbia
atacaaaaaggtgtcgatgaatgcaccatgagtgtcactctcgttgcagtttgcaaacggaaagagggatcgtaaaacagaggcagtgaaagccaacaaagacagtggacaatctcatgaagttcaaccatgatgctcatattctagatatagtctatactatgaacaaaaacagggcaaagcttggccatgtactatattctcaaactggccaccaccaaacagcacaatgcattagcctcactgcttgaaattcatctccgggagcagcttcatagctacacgggaaatgctgctggaaaagctttgctgtacaaaccgcatcattaacattatactggcaaagtggcaagtgtatgcaagtttattattctttttcaacaattgatacatgaacctctacaaatctcttatttagaaccatatctacataaacaagtaaaaatacaaggtgatattccatcatcctagtttacgtccactaaaatgagactaaacttgaaagttcaaacttctaaagtcaccaaactcttttatgtacagaaagaggtgatcatctatcaccatcagaatttaaaaatcacaaccaaagagcaaatcacatacaagcttctacctcgtcagctagacacccatcttccagagcaacacgtttcagatcaatgataaattgatctcgaagaaacccgaaaccgaaagtcccattgtcatacaaccagacccgcccttcacctctaagaaaaccaatgccattgccaggttctcctggcaacaccagatcgcagctagacttcatgtacaacattccagatacaacattttcatgaacttcagcgaaagggctaatatggattcgactattcagtagcagctcttcttcagctgaaaaaggagatctgatgaacgtatgtttgggtgtccagaacacaggaggagtgtaccgtgagagggacaagtcctctacttttctgcatataatgcctccaacttcatcatatttgaccaaatacaactcgatgcttccctcacagaaaccctgccgagttcaagaatcatggagataaactacttaacaacacaaccatcatcattacaacgaagataactaatgaaagattggtctattcaatcaactagacttagaaaaaaaccaaattttgcattccctttaccttaaagacaaaggcttttctcaatctcaaacattatcaatgaaaacaatatgataaggagttataattgagaccttccataagccttgtaagggtctagtaggcgtgggggagcaatcagcaactttgagaaagtgttctggttcccacttagtcctcgacgcttgcctctccttctccttcctcttctgtctcctcctgtcaccgcctggactcgtcttattcgccaattgagtgtacatttccgaaaaattgggcgatgagatcaaatcatcactctcatcccctgagctcctctggtcttctctacgattgttgttggtaaaacatcgattctcctccaccatgatatgaccattccccatgaaattcacatccaccgagacgag

SEQ ID NO: 31407 - DNA, 1274 bp, Arabidopsis thaliana columbia
gtctaactttatcatcgagcaccaacttcacaagtttgtcctacgttgtttccgcatcaatctgcacaactctacaccctatttcatcggtgttaaatacgtaacctgatcaaccatatcgggagaaggatgaaagaaatagaagaagaatgaggaagacgatgaggaattggaagttccggtggtattaaaaacgcaggtgaagaagacgagttgaaaaaatttggccctattttttggtccattgatgatgctgatatggaatattgcagccgacgtcgttttgaactgatgaggtggcaagtaagccaccaaacgaacatgtaaatttacctaaataattcagctatcaaacaaagctataagtcagttgcgacatcaatactattacagtaattaaaaaacaaaaaaacgccaagttaattcagccgtttaatgtcgtaactcaaccgataataaatatctctgtcgtatcgtttaataattcggtcgtaactgcatgctattatagtaattaatcttttgcaactgagtcggccattacaagactgagttattcagtaacccaactctttacggctgatttatgacactcgaaaataactcagccgtaacaacatctcataactaagccgtccttcataacccaaccagccgaaaaaagataactcagtcatgtcgaggtaataagtcagttgttttctaataactcagccataacgttgtctggattatgctcaaaaatctataactcagacaaaattcattaactcagccgtcatgtaggctggattatcgcataactcagacaaatcagccgtaattattggctgagttatactataattccgtcgttttcttataactcaaataaatttgtcttaagtcagccgcaacataccataactcagccgtaactaccgttgtatcgttacggctgagatcattaatccacgtcagtgatttctgacatggcgacgtgggtttgctgacgtggcagtggcattctttgtaattatgtttttttctgtgacgtttagtagggcacgatgggtatacaaaaaaaaaaagaaaatatgaaagaaatataaaaaagttttgtatggttctcgtaaatacacttaatttctatgacatctgagtaaagttcctttaataaaattaatgaaattggttgtccaaggtcctcctatctagacgtgagctttattgggcatgggcattttttgagaccattgtccattatggactacacaaaatcagcccataaaaaa

SEQ ID NO: 31408 - DNA, 553 bp, Arabidopsis thaliana columbia
cgccagtgtgctctaaagccccagtcccccatcttgcggatcctttctcgcgcgtccatcatcaacaatcagatggggatttgaaatggcaaaaactgccggctgtagtctcctcaagtcgctcgtgacttcaggaagccagggaaagtaaaagagacgcagaaggacataccactcgacgaaatgggacagtataagcatgataacgggaggcacgtaggggaaacggacgggcgttgtggccagcgtcgtcatgagcaaatacaaatcgccaaatgatacagctgggtttggatctgtgacgatgaaggcgtccccgccgaatattcggcagggctgatggagacgctgtatgttcgattaagcgttgctcgtagaggagatgcgcgatcgagacgttttcagcattgacgaggttttggattacgggatggagccagctatgagagttaggtctgattagggctttgctgaggagatatgagggctaggattcttacgttggaccgccgcccatcttcaggtacaatccaatgattgttgcgctggactc

SEQ ID NO: 31409 - DNA, 535 bp, Arabidopsis thaliana columbia
gccagtgtgctctaaagatatcaaagcccagccgcatccttggctccaatgccactaccgaatagttcgaacaagctttctgactggggcagttctctgctctttgacaatgatatcttcaggaatcttgggtatattcgaccaaacagtcatctcagctcaggagaaacgagcattaagggagtaattatcggaagcattggcttggtagaaccatagcctaacgacttacctcccatgagggcacggtcttgctgcctctttcgggtcattgaagattataaacatagtatcagcatggccgttctgttccaagtatctaggggtttctttctgaataaattaacaaaaactgctaaagtctcagtcgcctaccgtgagtgatggttcaagttcagatagaggtcgttagggtatggcagcaaggatcaggataatcatgaaatcataagtgctcagcatagaccttaaatactatgtgaaggcataatctatctaaaaccagttaccacaagaatcctgaacccagaggacg

SEQ ID NO: 31410 - DNA, 539 bp, Arabidopsis thaliana columbia
tggtgggagcaataggagcatgaacccataaacctccagattttagtttgatgacagtcattcgtatattagtggacacgctgctaaaccctaaagcttgttcttgttcaaacatccatatgcaacctttaaccgcctgcaaacaaacaaggttcaaaattttgtaaaaattaagagggattcgggcataattgacttgtgattctgaaattggagatgactgattaaagaaccctaacggaattgagagatggagcaaaagctaacctcggttctgatggtgcgccggttaaggaaaggaccaagaggaaaaggaaagccagtgaagttaatataaaagcgtttactttgatcgccgtctacgtcatcggtaaggacggtcttgctcgtcgaagaagcggagaccatcaccggactgttaaattcccggtttacggacatgggtcgacctaaattaaatgacccaccgagaaagttggtttttttatccaatggaagtttgggtttcggaagaaacgaagaatgtgtcgggagatgac

SEQ ID NO: 31411 - DNA, 528 bp, Arabidopsis thaliana columbia
gtgaataaaaaggaaacgtgtgttggttagaattagaaacaccacggttttatgtatttgttaggaagctttgggttttctcggttatgcgctattcggtttttggttcgaatctctaagctggtggtggaatcaatattacacattagtacattacttcgattactaaaccgatgaatctgaatcttgttttggtttatattggtatatgtttgatcggtgaggaaatatggatttatggggttaaccatagactacgtgtcggagaagtttttttccggtggactcggaacaccattcagcgcgaatcatgaaactcttggaatgaattaaacgtcacatgtttatgattagtaagatctgaaattttgcgatagttcaacagcttcggtttaattcggttcggtttaagggatttggatttaggatttggctttatgttgaaggagagaagttggagagagaaagacaagtcaaaggcaatgcaaaacatagatgttaaaaaaattgggagtgtagatgaaaagg

SEQ ID NO: 31412 - DNA, 471 bp, Arabidopsis thaliana columbia
atttggttgcctctgctgaagacttgatgctggtgtcatctttgttcaccaactattctggcgggtttctttggaaacaatcatcaacagatgtctcacaggtcttgaacctacgtgtaaggaagaggggtttggagccttctggttctcaacttgaagtgagcataggtattcaacacacatactgcattttaccgccggaatatctagccattataattggctatttctctctttctgactggacttcaaagtctggcctgcagtcattgccacaagctactgagttgaccaaggctcattctgagtttgccattagttataaaattgagatactggactcctctattgttcttcctgtggaaggtgatgaccgccggcaactgaaagttgacattcagcagttatatattagctttattccagagtgtgcgttgagcaatgtggtgcagcacataccacaggaatgtg

SEQ ID NO: 31413 - DNA, 419 bp, Arabidopsis thaliana columbia
taaataaacctaaaaaaagaacatcaaaaataaaaaatgtaagaaaattgaggggtattgctagtcttaattaaaaaaagattatatgaataaaggaaaacaatgatatacttttataaaaataatgaaaaaatagacaggctataaaaatcattttttcgaaaaactcgctctaaaagttgcaatatacgtagattcgactctagagtcattaaataatcaccattctctatcgaactatgtcgtattgtaatatccatatatttaggtcaatgtacgactcgaccacctgatgaactccgttggatctatcggtaacttattaagaaaagcatctgaaattttctgttatttggtccgcatgagatcagatatctgtgtgcgtgccctatcgccctatatagttgtatgacattgtg

SEQ ID NO: 31414 - DNA, 514 bp, Arabidopsis thaliana columbia
ccaaaacgctgattttagaacgagacagatcgctgagaacgcgttgaaacacattgataagatcccaaacttctcaagtatattcccaaacatcgcatagggaaaatctctttgaaactgtccagtgagttatagtgattttaaaactgtggtttttgttttgatgggattacttgttaataggcatccagtttttttctgggtatatattgtaaattccgattcttatttgtttataaatcctacgttggaaatcgaaatcatttgattggcctcagattaaaaaggcttatgtgtgttgcggagggagttgtgcttacttttgcatcaaatatatattgagttcatagattaaaccaatttgtaaaacgttttaagcttcacacaaactgatttgagatttgggaagaacaaaaacaactctttcttcgcaccctttaaataaactaatttagttaataaaagacaaagtatgattaaccagacccataatagccattacagatgagatgac

SEQ ID NO: 31415 - DNA, 519 bp, Arabidopsis thaliana columbia
tgcattataatactggacagatctcagatccggattccagaagtatttaaaatcgctttatttggactcatattcatccaataaagataactcaatttcataaaaagaaaaagacacgaacatgattaaacagttctgaaatcacaagaatcagatctcgagaatacctgattttataaaaattatgaattttctttttgagttcttacattttattcctattaaaagagtgatgaaacatgtgagaacgaataataaagtaattttattagcctattactggatttacacaacatattccacgtagacaacaaaccatgaaaagttacacgtgtcaacatctcattttaactccaccgtaaacaatcgaataacgaaaaatcaatcaaattatcgaaattaacaccgaaactataaaatgtaaaacctaatgttttcaagatgtaaacaatgagatcctaagccaacacgacggcgtaaataatcgcggcgacaagtgaaccgacgacgaaagctttg

SEQ ID NO: 31416 - DNA, 544 bp, Arabidopsis thaliana columbia
aaaaaaggaaaagactactggaatttcgtaaagcgttaaataccaagaataattaattaagaaaataattgtatttagtttaaaatgttccaaacaccaaaatcaattaaattccgaagaaaacactccaaattcacgtggcgactttctcaacgggcctaaaatattttcacctattttatgtaaatatattagtcaaggcccattaaagcccacattaaccgccgactttagcgttaaccgttgattagtctgacaacaattcctcatctaacgacacgtcatcgatctatgtcatatttcaggatccaattatacatcattacacgaaacgtataaattcaaaaccgaaaccctcaaaaatcatctttcattgcccagaagtattcatcacaatcgctgtatcgtggattaatggcgccgacagtgagaagaaaccggcggagaaagcaccagcaccaaaggcggagaagaagatcgcgaaagaaggaaggacgagcgagattgtcaagaagaagaagaagacgaagaagagcacagagac

SEQ ID NO: 31417 - DNA, 478 bp, Arabidopsis thaliana columbia
caaggtgtggagattactcgtgaatttgacagttttcctagcacctaaaagagttgttttagaagcagacaaacacccaaaatcctccactaatgtattaggagtattaagtaagagttgctgacaatgcttcatgtttacgaactttaacaaacatcaaacttaaatctagaggctatggagatttggagcgttgattaatgaccttttgagtgaccttaatgatctcaacctctactatgaacataagtggaggttagggatatttctaagatttttgaaaagttagtagagattgcatggacactatgccacgatcttaagatgatccaaattggaacatatattaactctggaaaagagagattagcagttggtgaccatttggagaatgtgaacacacaatatcccacttgctaaatttctaagtctaggatctaactcatgttacatctgtaagaaaaaaattataggcaga

SEQ ID NO: 31418 - DNA, 559 bp, Arabidopsis thaliana columbia
cttttaaaatgtaaaaaaacaaagctattaggaaaaccataagagttttgcccagtaggaaacgaaaattttgtttttaacaattaaaagttgaaaatgataattataactgaattataaatataaacagttctacaaataaaaataaaatattataagaaaactatacgtatataaaaaaattatatgtatatttttcataaaacaaatagaaattataatttaataagtgtacaagaaataaagatttaaaatagaaaaaagattaagaaaattatacaatcacttattaatcatatacgaaaaaggattgtaaatactcacttcaatataaacatatagattacctcataatttctcgccaaacaaattaatttctttaagaacaccatcattgctttaacttcattttatttggataatgtttccttttgttggatcacaaattattttttggatagtattagtaactaacctttactcaaaaataattataaaaatatactcatgagtcaaaaaaatttgaaatgtaagaattcaaaatagccctcatacaaaa

SEQ ID NO: 31419 - DNA, 323 bp, Arabidopsis thaliana columbia
caacgacggcgtcatcaaagtcgtcgaggacgccgaccgcggcgctaggtgggggcgacggccgtcgcccgccggcgcgtagatcctcggcgcgctcgcgtggccgtccgcgcgaggtgcccgtcgcgacgctgcagcacagcatctgggcctaccccacgttccaccgcgccatcgagaccgcgctgggcgacctgcacgaccccgacgaggagacgtccgcatgagcgagatcaccggcgaccagctcgcccagctgggcaaggcgttcgcgtccgacccgtcgctgcggctgctgcagaacgccgtcacccgcaaccccg

SEQ ID NO: 31420 - DNA, 305 bp, Arabidopsis thaliana columbia
agcaaaaaacaaaatgaaaagagagaaagaaaaggaatcaaaccaagatcacgagcgaggatggcgacggtgtagccttcgtgagcaaacttccgagcgatgcagcgaccgagcttcggaacacagccgactacggccgccatgccttcgctgtcacagctcgaagtcgctacgttgctcatgatcgatacgctatgatcaggacattacccgccaggatcgcataagagcagcttctccagggatccgacagagagatagcgaaggatgtttatcagacaagaacaggagaagtagagccaacc

SEQ ID NO: 31421 - DNA, 412 bp, Arabidopsis thaliana columbia
tgcgattttcctaatttctacaataattgataacaaatcttatggtttaaattaaagctgactttataattattacgtcaaatgtataaggtttaccaaccacttatctatatgtgttgaaaatattaaacagctaataagtctacggatatgtgtagtttttgcctttctagtattatcaaaggtggatatgtatagttttaagatgagtacatataagttcatataaatttatgtagttgtgtttgtacatgattgtaaactttttgtatacttctagacaatttttccagaaaataagtatatcccaaaataaattcgttgcgcaaatggaaaataagcccgagaggctgacattaaatgggcctggtcctaagaggcccatatatacccagattaatctggacttgct

SEQ ID NO: 31422 - DNA, 496 bp, Arabidopsis thaliana columbia
cggcggacgccccggcaccataggtcgccacctcgccgatcctgggctccagcacgagcctggtcctggagcccagtctcacggccgacgcggactcctcctgtccgtgaccagggcgaccatccgaggcgtcgaattcgacctggacgacgagtccgcctcctcccagatcctcaaggtcctgggcatggagatacccgatatcacaatcggtccggaggtcctgcccgcgggcgcggcgcgtgaacaccgtcgccgtcgccgacaaggggctggcgctgacgatatcgggcaagaacctgtccctggagaagttctagcgggccgtcgccgccccggtaggctcccccgcgaacttcacccgtccggaaggagcccgcgtggcccacgccttcgtctcgctgctgtgcatcgtggcggtcgcctgctggcgcccctgctgtcctggggcgtccgcggcggatcgtgccgagaccgtctgctcatctcggcggcg

SEQ ID NO: 31423 - DNA, 619 bp, Arabidopsis thaliana columbia
ttcacaaaacaccacaataatttcgatactcagtcgattccgacaaacctgagtactataaagtctcgattttgtttaatcagtctcttacactttgttgtccgaaaaatgttgagctcgctcgatgacagttaaagatttgtaagattggggaagaagtttacacgtggaaggtaaaaaatgtagggttttggaaaactttttttcaattgcctaattgataacttaggcccattcttattattagtaaaaccattagcacccaatacggcccaatattgaaaacctgtaaatttaaactcgaatttgtaatcggagttgagttttttttgtagaggagccaaataagagaacatcttttgtagaatttttcattttactctttgctaaacaatttttttaaaaaaaatatgttttacatatattaacgaagagatgtacaccgaattaagagttctttgtttgtctattaagtttaacgtaaaaataaacaataaaagatcagcatttttataaacaaaccaaagtagagtttctacgaaaccacaatgagtagagtttgcacacaataaatagaaattaatactaaaaatcttaaacacacaaataaaagatagat

SEQ ID NO: 31424 - DNA, 253 bp, Arabidopsis thaliana columbia
ctgatgtaaattattttttaatatttattaataaaatatttgatagttaaaagagtgttgcataataataaaaatggtgaaaagaaaataataaatgaaaaggtattccaaaaaatgatataaaaaactttagatataattaatttgaattttgataaaaaaataaaaatttaacttgaattacatataatataataattatgattaataaagatcaagatggactgttaggttttcgtggcagatcattttt

SEQ ID NO: 31425 - DNA, 400 bp, Arabidopsis thaliana columbia
tcccccacaaatcccccactacttgaatccatttttctgtcgctcatctgatagcacctccattacttaaaatgctctcaaataacaatatttcaaatagaatttagtcttcaaatcagttcttgacactgccccgttatatgcacaaatatcctttactgtattttcttgttacaaaatgtaagaatgttatctgctgcatgttcatgcaaaaatcttttggtgtaataaagtaacatttaggtgcaaaaattttctttattacaaaatcttaatgtaacggacaatcacaaggcagtctaacataatacaaatatgcaacgaacaatcacacggcactctctaacataatacacaaatagcaaatgcttagtatgtgtgatggtttgtggattatttg

SEQ ID NO: 31426 - DNA, 512 bp, Arabidopsis thaliana columbia
ctgatagactggatagttatagtttgatgatctagctaattgactttcatatttacataaaacagaaatgtgtttttatcaaaaaagaaaaaagaaaaaacagaaaatgaacaatacatctcacatggagtttgtacaagaatccataataattttttgttcggtacagtaggttagatatacatttgaatacagtttacaagccaaatgttagaagcaacatatttatatagtatcatcaatatacgatccaaaatgaattatagattgacttatggaaaagttagatactatatgcatgattgccaaatacattgaaaaataacaatttaagttcttcaaacaaaagtttataaatgactcggtgtttgacataactcggggttgtttttctttgttaattcacacacggggttggtgtataaatgacttcggtgtttgaaatgtatgacacggtataaataaaaaaggtaaggaagaaatgaagaatagaagaagaacaaaaaaaaaag

SEQ ID NO: 31427 - DNA, 579 bp, Arabidopsis thaliana columbia
tagggaaattatttttaagttctccagagcaaacaaatttcatatcagcttggagcactggttcggatagcagtgttccaggagctttccttaaccgatgcagttttgacgtcaaaagattgacaaaaattctgaattttataaagcttgtggaaggttccaggggtgcaactgacaactcttgctttaggcgcatcttcgtatgaagaaactgaggaacatcagacacgaaaagttttgattcctcatcgactaaagaaagctgatcaaccacatcaagaaatgccttaaacccatccaaggcatctgaatctacaaagaaaaagaaaaaagataacacatgtaagcattacttgaaatacatgatcactatagaaaaacaaagagcgctgaggagcagaaattaacattgagggaaacaccacctaccatcgacaacaatttcacaaacgtcaacccttgacataacacatgccaattccgttaacggattgtgatccaagggaatctaatcaagtacagcaataatgctagcaccagagtgatcttctgacacggcgtcttcttgaatgttgatat

SEQ ID NO: 31428 - DNA, 492 bp, Arabidopsis thaliana columbia
ttattatatttgttggaaatttatgtaaatacatatgtatttaatatttatcacctgttagaaaatatgttaaaaaaggatttgatttattttttgttgaagaagaaacatgatttctaaaatatttggaaatctttgattctggtttatacactttgtatcaatggaaatttggtaaaattggatttgtcagtgtgaaaatatcatggagaggaatcaattaaaaaggaaaagaaccttaccaaaaagaaagaaagtaaaagaatataactaaatagacattacagtcagcttttctaaacaaggaaaggatagacttatacatgaattagtaactatttccttagaattcaaggattttttttgtctaacagtacttgtcaagtaacataagtacgataattaaagtctaacgatgatgtctatggagccgtcttacacgtggcacagctattctggtccgaagaaaaggatgatttggtgcaggtgcgt

SEQ ID NO: 31429 - DNA, 509 bp, Arabidopsis thaliana columbia
cgccagtgtgctcgcaggtactgttttatttagtctagacactactaacgagtagcaaagaattgctccatgtggtaatcaaacatctggaggattattaaatctgtaatatttcatcttgcactacaatacttctaagaatatccaatactaaaatgtgaatgtgaagaaattataaaacaaaatcaacacaaaatctttcaagaatggcctcgtagatggatagattataaaaaaaacatgtttgttgtagtaatattacatgcaaaacaaaaaccgaaagtagaacaacaactcaataatgtttatatacaaatctcaaactccaagctaaattcgctcttgagaagaaacgcaaaacgcaaaaaaaccagttctgtttctgattttaaaactacacctccaataacacaaagtatcatccatttctccaacctcagggcagatacataacatatatccaaactccaaaatcttaatcgtctttgaattctttagtcgggcgagct

SEQ ID NO: 31430 - DNA, 478 bp, Arabidopsis thaliana
tctagtaacgaccgccagtgtagacgacttaggattgttgctcgtcagcgggttttgctgctgctggtgctgcttctttgatgtcatcagcaacatcgtcctgattgaaaaaaacatttgacaagatcatcataatcagaatcagaccacaagaaagaaggattgagggatgtatcaagatgtagactaagcaacaacttgatttccaaatctagtctccctcaatggcatatatcttgctcatggtttcagaaatcacaaacaggcttaagcaaggcataaggaggaatgcatcaaaatgtaaactaaaccacttgatattcaattcgtgtcttcctcaatggcttaacaaggcttatgatttcataaattaagcaacaaaacaggattaaacacatttgacaatcactataatcagaatatgaccaagagaatgcatcagaatgtaaactaaactgtttgttttccatatctagac

SEQ ID NO: 31431 - DNA, 1115 bp, Arabidopsis thaliana columbia
cgaaaacaattatacagtatgtggtagccccattaaacagccgccctaaccgcgccaactcgttgggacaactcggaatacaagttaatttaattagatgttttatgagaaactcaccgttgaaagcaaccccatagtcttcgttaagagtgagtttgcttgcagctggattatagaaaagtttcaacttttcaccctaatccaaaaaagttttgtaagaagttaattgagttaaagagcctcaacacttgaaaatagctagagaaacttactgaggttggtggaagaccattcatggttttccagtacacaggagcagtacccatctcgaacatggcccatgaaggaagcttgtatctatcaaaataatcaatcatgaactatgtttattattatattcatatagttatatcgaccaaagcaacacgatgaactaaaataaagacagactctttgatctcttcgagaggtgcaagagtcgtggcaacagctttaacttggagatcaagtttcttcctcggaaatctccttagtattggaccaatccttgaactgtacactgtatcattcattagctttagttttaactcgttatatagctagtattatagattgacataaatgaatcaagaatttgagtgaaaatacttacaaaaactacgtttcgaggataaaggctgcgacggagaggcgaaaacggcggaggtattagcggcagcagccatcgataccgatctaatgagaaaccttttttggggatgaaagaaggagaaaaatatgtaagtaattgatatatggcttcaagataaggatttttcacaccacaaatacaaatatctactatagaatttttttcttacacatacaaacaaagacttaagtatcatagagacaaatatcaaatttgaaatgtaaggtctatggaacatgtccctttcactcttgggatttttcctttaatgaataagaaagaatgggctcaaaaccaaaataagcccattcaagagatcaatgagcccaattgtttgaaagcaaatattggggtgatttgttaactttccaagaaaaacacgggcttttcagcaaaacaactcgaaaaattgaagagaagatcc

SEQ ID NO: 31432 - DNA, 561 bp, Arabidopsis thaliana columbia
tgatatttatattcctttttccatcagaatctatctcttccaacaaaaacttagtccgtgaagtgaatttattcggactggatagatttaagatgttgaaaacatagtttattatatgaacataaggattatgagcaagaaggttggcataaagaccacgcttaatgttcggaacatttacatagtatatacactgtacacatagaccatagttttcagactcgtcgatgttatcttattctcgatcacgatcgccatagtttaggtatgtgacatacatgtaaacaacatgtgaataacaaatgctgatttggtttgattcgagccttttttacttcaattaatctggtgatggttgcttgatgattcagttgaagatgcaacctctgaaggagtttctgtactaagtcaaagtacctcacaaagtagtttaagaaaacagagcatcgtggagcaaacaaatggaaattcgtaaagtcagtttatggcggttggcttggagtctagaagcttggagaagattctagaagactgaagagtttctttttcataggaggaaga

SEQ ID NO: 31433 - DNA, 554 bp, Arabidopsis thaliana columbia
ctggtacatataaaagtagcaagggaaaggttagatcacatccatctacttttgttttatagtattttaggtaccaaactcttccaaataattggatatttttatataccatttgtatgttataaccaactctcaaaagtctaaagtctaaactttaaaccaatccatatacgtaactgaaccaaccaaaatcttttaaaattcgcaatagatttaacaaacaaggaataagatagatagtgagaaaaaagaataactctagttacaaaagcatttgatcataatctatataacttacaacaacatgacttccatattctctgtttcaataaccaaaaactctccaattgacaaacttgtgacccaagaaaaagcttccaccgtgttataaaattgagagactactaatcaaaataacagagacgacgggaaaaagaaaagaaaaagagggatctctcatctgacatatttccactttttgccattgtgttgttgttttacaaatgccccccatttgaccatctgaaaacctcccacccgaaacggcagtcata

SEQ ID NO: 31434 - DNA, 340 bp, Arabidopsis thaliana columbia
tgtcccattatgctgataaacattttggttgtttcttggggcaatttgtgccaattgctttcaaggttttgcagattgtgttcttagacgaaaagggttttgaggtgtcatggattccgggacgcagccagaagggttgcaggcagcacagccagcagggttgcaggcagcattcgtttcaggcagcgtacccagcagggttgcaggcagcacagccagcagggttgcagggagcagggaagcggaacgcgcctacgacgatcgaggatccagatgatccacagcatataatccacgagttcctcagaatagtgatccaattggcgacgggagtggatct

SEQ ID NO: 31435 - DNA, 453 bp, Arabidopsis thaliana columbia
attccctgatcttttaaatgttggtaacttcatgctctcgagttaacgactgttagttttgctaacagaatcactaactgtggttaaaatatctccacacgtggttaattagacctaatgaaagacactgttgccctttttcattttcccccaaatcgatttgggattcagtcacgaaccctaattttctctcagaaattcgctctctttcaaactgggatcttcgatgtgtttgggtgtttgattggtaacggattggtccgaaattgagtttgtggagttcgctttgtcgcgtcgtggctgcttggtcgcgtcgggataaggtatgcaaacgattgaaattggtttcgatttttggttaagggtttggattccgagaatctgggttttgatttcgagtgtctggggtttgattcgagtgtctgggaattgattcaagtgtaggggttttga

SEQ ID NO: 31436 - DNA, 353 bp, Arabidopsis thaliana columbia
aaagcgaataatagcgtgataaagatctccaccatgacctagaatatccatcacccatccggctctagtaaagcacgaccctacagagacgccctacgaaagcttctacgattctcaaagacatacacttgtctggggtcctctgcttcttcctcagatccgatacatgtctcttccggatatatcatcgaagatattagggtagtgcgaaagatctaagctcggaagataatgtgatttaacgctggtgaggtcacgtaagtcgtacgacgaattgcctgcacgaaatattcgcgttgcatcatgagagcaataatggatctgatctcgtctacgtttgtgtgaccttactg

SEQ ID NO: 31437 - DNA, 612 bp, Arabidopsis thaliana columbia
gaacctagattggaacatcagtcacgactgggacacaagattctggagaactcaagaagaagtttgatatttttgtaagtctacttgttgacaataaacagtttggctgtcctttatttgattaaagtattcgattctacttgcttatgtttggtttttgtatgtaaatgatttcagcaagagaaagtgaaagaaattgtgaaggtgttgaaggatggagttacaagtgagaatcaagcagtggtgcaagccataaaagatctggaagcactaacagtgacggagaccgttgagccacaagttatggaagaagtgcagccagaggagactgcagcaccacagactgaagctcaacaaactgaagctgctgagacacaaggaggacaagaagaaggacaagaaagagaaggagaaacacagacccagacagaagcagaggcaatgcaagaagctctgttctgaagaataataatgatctagaaaacaacctagacataatagccttggtgtttggcgttaggagtgtttttttttagttgttttaggtgttggaacgcatcttaaattatataaagatctataaggaattttaattttcctaggttttgttgc

SEQ ID NO: 31438 - DNA, 526 bp, Arabidopsis thaliana columbia
taaataaaccccctgactctctgtttctataactcgtaatggcaatcatataaatcgtctttcgtctctgtttagttgtccttttcttcccgacaacagaatcggagcatctactaaaagtccactgagccgccgtgcgcttcgaatcttgttttggtatgtgacagctttttcaaaaagaaattgtcttggataagtggaggagaataaggaattcgaacaaaataaaattggagaaaaatgatcatattctctattttattatttaacatcattttatttcggttacaaaaaaaaaaaggaggaaaattaggcgcgcgtcatctccctcgcgacacatatatcataagacagagagcagggaacgaatctcaagacgttacgtattagcttatagccattagttttgtctcttcttcttcttctcgttggtcggcttcttcgtcttactaattccatgattcttcttcttccttctgcttcactttctcgatgatcctctgcaccagccgcgatcatgacgttg

SEQ ID NO: 31439 - DNA, 1503 bp, Arabidopsis thaliana columbia
ataataataataataaaaaatgaaaaatgaaaataaaaagaaagagcaggaaaggagatcaaggaaccggaaatgtcgagttattattggttatattgttaagcatcatagaaactcattgatttgattgggatagtatgtgttggttggtttgatccgaacttaagggaagctatgtaccacctaattggtttgtgtctcaccgtgatttcgtataatgacatgcatccgtttatacagtttgagaacccgaaacactctgagccaccatagattagccctttttgaccaagcccataacgtgtttgataccccctttgtgagagtacacgcctctgctaatgaatgttaaaaggttaagttctttgattttgaaagttcttttagatctcgggatttaattatgtagctacggttatggcgaagtacagtttagtacgggttgatgagttttgtgatggtcgtttgcaggcaattgacaagagcatgatcccaaagaaaatgtgagttctcgtgttttcaaacctcatctcctgataaagatttttgttttccttgaggataagcaaagatctaagtcggggggagttgatatgttgcgtttttggtgtcttaggtcccttagttttgagtcgtttgtcgtgtcatagtccgtcttttgtatctattcggttctgtcttgattcatttgcaggttttaggtgtttaagcgggacacagatgctttcgagacttatcgggctcatttggaccagaaacgatagaaggagtcgagaaaccagagtcagcaacattggatcgatcgatcccatcactagaacgatcgatccagggttcatcatcgaagacaaatcatctgccaggatgggatcgatcgatcccaactctcaaacgttgaagaatctcacccgccagctcgggatcgatcgatcccatgtggggatcggtcgctccacctctggatcagtcgatccacctctggatcggtcgatccagcttcctgatgactggttttggtattctttaaccggactgattttctattttctgtaattgggtctaaaaaccccaaaaacctagttttatttctacgttttcttttacgcttcttttctgcaacttttggagagctttcctttgtaagcacatttgggattagagattcattccttcttgacaatttggagaagatttatgaacctttatctcatttattcaatttgaattatgttttttttcatatctctttgtgttgttcatttttctatgagtgagtagtctcttaattgtgtgttagggttctaagtaggggattcaatgaattgatggtttgattgttgtttggagttcttaatctttaagttctttgattcatatgttcttaatgttagaataggattgatcaccctgttttagaacttaggttttctatgcacaaaaatgtcgaaagaatgcttaacaaatgtgaatcgacaatgtattctagcagcgagagtgatgtag

SEQ ID NO: 31440 - DNA, 574 bp, Arabidopsis thaliana columbia
gactctccattttctttcctaaggagatttttcagccgtttggagcagagtctattagtggaggacgagagctggtttcaaagctccgatggtttgcagccttacatgagtgtgacagagtctgcaagggcaaaagatgagatcactgagcacaccaaggcaacgtgtagggctcatggattctttgtttgataactacaagaaggatgggctctggtcttcttttgtctgtgaaaatagtaagatcaacaacgctaaaaagtcgtccctgactacatattaacataatttgttaaatctcgtcactttctttctttggttttctcttttgttttgttttttgggacacatatctcatgttctttatagataatgtttatgaagactttttggtgtttgcttctgttcattctgttgttgaggtattgtggaagcatctttatcaatgtgattttatttgttcaaaccatgaaaaaatctttaagactgctatactttggttctgttcttcttagccctgttctgcaaaacaatagatcaacgtgatcaaaatgagaagcaatgcgttagtagt

SEQ ID NO: 31441 - DNA, 961 bp, Arabidopsis thaliana columbia
gatgtggttatcagacattgaaattgtgatcattgattctaatttaacatgaatttgacataaagatccattgttatgtaattgtttgcccgcaagtgagaatgatttgaagaactctttttctgttgtataaaagggcgcgagtggagccgtgaatgccatcatgctgctcgatatcttcctgcacccaagagctactctatacttggaatttttcattccagttccggcaatgttgcttgtaagttttaagctctctagctcaatcatgtcaggcttttaaagctctcttcttaagtcgactaaaactcactcttctttatctttcagggtatctttctcataggaaaagacattttaaggataacagaggtaatctactaagacattgcaaaatttcaaagtttgtttggaacaatctgatgatattttttcctttacaaaacaacaaacaatttgaacactgcaggggaacagtaacatatcaggttcagctcatttgggaggagctgcagttgcagccatcgcctgggctcggattaggaaaggccgtttccgcttttgacttgaccttgcttggttttggtcatctttagagaaatctatctataaatgatttaagtaagtttgaatctttgagaccatattgtgtgtggctcacatgaacagtaattttaatcagactagattggtatggtattttctgtttttactgtcaaaactcaaaactattagttgaattcatattgatacaataaatggaatatttagaaatgttaaattcaataaatggaattatatagtttgacatacgtaaataaacaaaaatacacggaatgtttacatctattccatttaaatgttctgataacttaaaaaattctaatcataatatggagtaggatttaactcgtgctacccacggagtaaatattttattcatcatttaataatattaatt

SEQ ID NO: 31442 - DNA, 525 bp, Arabidopsis thaliana columbia
tgacctcttcataaccatatctataaagcacatgagatatgagatccaaataacaaaacaactgggaaaaccaaagaaataaagtgacatgaatgttcaagattcaacaattatgttgatatgtggtcagagacgacttcttagcgttgttgatcttactattttcgcagacaaaagtagaccagagagagactttatccccatccttcttgtagttatcaaacaaagaatccatgatccctacacgttgccttggtgtgctcagtgatctcatcttttcccttgcagactctgtcacactcatgtacggctggaaaccattggatctttgaaaccagctctcgtcttccaatatactctgctccaaacggctgaaagatctccttgggaaagaaaatggagagtcttgtccatcaccagagtcttgtctctgcaaagatctaagctttacttttgtagggacaagcatttcacttggaatgagaaatgagttgatggattttgcagacttggattcacccaatg

SEQ ID NO: 31443 - DNA, 409 bp, Arabidopsis thaliana columbia
attatgcttgttgtgtgacggaataggacagacgattattaccggtgaccggaatttcatgacagggtcttacgacattccgaactgcaaccgttggttagtattgatattttagttaattaaatcagtagttaattaattgattgactaaccttttttgtacattgcttcctttttggtttttgtcaaatttttatatatattagtgtgtctgaaaattagaaaagcatatatgctttctgcaatccgcaggctttcaagctttaagttatagtttgtttcttctcataatgcattcttttcttgtgctacaatatctaatccattacttaattgattgatcaatctcttcattaccgttcaatattgttttggtcacagtttgtttactattgtctctgcaaatcat

SEQ ID NO: 31444 - DNA, 718 bp, Arabidopsis thaliana columbia
gttattgaaaaagtgactgttgatttagtataattagattatcccataattagaattagtttagtttgttacaaagttttatttacatatttaaatttacggttatataggtttttttagcaaatttcattgaaattttctttaccaaataactttgaaaataacaaatctgagatataaatttatctaaatatattaagtgttattatcgagattatcgagttatcgtcaaatgtgttaccgcatagatttagagtttcacatgcaaaaaaattagtttatggtcttcgcaactcaaattcatgatatgatgatctaatctatgtcttatcgataaaattcgtcttcatcaagttgtaagatccataataactattattttctcttgagattttaagttttttttcctctgttcagtgtcgtgctaaagcatccagaggcttaaggcaagcttaaaaaatgtggccttataaataactttttttgtctcaaaacataaataatagcgccgcctcccttaaacaaagcttcagtcaagtttatgaccagcgcgtggcggctcatatagcgccggcgtcggtcacctcctttaattttttgcgtagtttttcatttcttagttttgtatccttcagttgtggaagcatggaggtttttgatgtggtggagccgtgagtttcgaggttcagatctagtaagattgtgctttggtgtttag

SEQ ID NO: 31445 - DNA, 631 bp, Arabidopsis thaliana columbia
ctgggatgtaaacaaattattgggatgataagctttcttcaactgatttttgtgttgattccttctgcggtttggggttgtttttttttgctggtttttgtcccttgatatatagattttaggcatgagagtctcaatattgaacgtaacatggttcaactgtgccgtgagaagtgtgttaataattataatgaatttctccctgagctgatttatagcctagatcgctgtaacaaaattttgatctcatgtcctccttacaggaacccatggggcggcagtaagcctacgtctgacgtctcggtaagtcttgaacttaatacttttatgtcgttacttttacatttacacctcttttagcgtcaaagggctcaaggaactcgcagatttcttaatgtcacaaggtttctactctgcagccaacagttgcagatgataatacttcagcatgggccaatgcagcagctgagaacaaacctgcctcggctagtgatcaacctggtggttggaatccctggggtaaacacctgcttctgaagctggcactgttagtggatggggagatcaagtgcttcaaatgttgaagcttcttcgtgggaaaaacaaggagcttctacttccaatgttgcag

SEQ ID NO: 31446 - DNA, 549 bp, Arabidopsis thaliana columbia
aatctactttgtctagctcaaagaacataaatcttagtggtggtttgtttgtctctagagaatatgagaacaagtatgtgaagtttggcgctagaatgcgttgtgatcttgtgaataggatgaaagatgttacgttggcttggcatgagtctgtgtcttctacaagtgataaaaatgttgagctttctagtgttgagaatcataagatagctccaaaggctgatgggccagggaactcttcaaatgaaagctcctcaagtccttttgatatcttcctcaagaagaaggtgatgagactaaaaccctcctttctggaactgaacagagaaaaaaagaaagcagctaagggtttcagtggaattgttattagacctggaatggtacttctcaagaactacttgtcaatcaataatcaagtaagtactctctctcactatttctgtgtttatgtgtttatctgatcttatatgcatcatttgagctttctctgtgtcttaaaaatgcttgtaggtgatgattgtgacaaatgtcgcaacttggtttgggtga

SEQ ID NO: 31447 - DNA, 601 bp, Arabidopsis thaliana columbia
gttgcaggtcagatcatccctcatcatgtatattatattttggattaatattcatgcatgtatgagattatattgtatgtttgattatacaatagaaactaaaagatgatttttaacataaattcagtgagaaggtgcaagtcgctcacaagagaagaaatcgacactttttggaaaacgaagaagaagaatgaagaagaagaacatgttcaagccttttccaagttggtaactcaggttaaaaccaaactttaaatttatttatttcttatttcccaaggaaagagacaatatttctactatcagtgatcttagtgaaaatcagagttcgactttaaaatttaccaaaaattattaaaatgatctaaaaaaggctttgaaattgtttgcaggaaggtgcacaaagccaagcgaaagagaagaagagtgtagatgatctttttgagaaccaaagcaagagtagtggatggtaattttttttttgtgcaaaaaccaatctcgtaactaagttctttaagagatatttgaaatgataaactgatgtggttggtcaggtggagaaaaactactgggcgttcttgaatgagctgagggaggaaga

SEQ ID NO: 31448 - DNA, 551 bp, Arabidopsis thaliana columbia
cctcatatgtaagctcttcatcatgttcaatcctttccagggccaacaatacctgaaacatttttaaaatagtattttgttatcaaaattcacgaccactcgggaacaacatatcaatgacttcagacaaaatggtgatggaaaatacctctgcaattccattcatgttgtagtgactcaaaccatcccggttcaccaaagagcttgaagggtcagcttccgtggggctaccaggcatattgctatgtacgcgtccagtactactgtatatatttgatggacaaaacgaaagagaaggattgggatcggttggtgttgtaggatgaggcatttgtcgagaagtagcagaggatgcagtagctccaagtcgctctgatctaccaaaataaccagctctcctacaaccatttgaaacaacagtactgctgtccctaatacttggtactactcgatttcttctgttatcagaaactgtgacgccattgccatgagaagaaatttgattccttacctttggaaccaacacactagtcttactacctttgctagat

SEQ ID NO: 31449 - DNA, 896 bp, Arabidopsis thaliana columbia
ataacatgatttttgttttcttttttctgttttgtaattttagctttaacttattaagtagtttaagtatgatatgacatgacatgtttttattggataatgtaaagggaggtgaataaaagattttacccctagaggtgaacgcaagtttcattcatggagatagttatattatatatataggccgagacttggggtgaacttctttattcacctcctttttccctctacaatctaaataaaacaatatgtcatgttatactatgtatttaaaaatcagaagtattgaaggagttgtcccaaagagatgaacaaataaaaataaaataaaaaaagaagaaaaaataagaaaaacacattaaaactttacaaaacgtaaaagtcaaaatatcatctacagctacaaataaaagagtacatataggaggaggcatgcaaccctaaaagagagagaagagcagtttaacataaagtcaagagatcggtggaaaggtctgtccgatcagcggtccaggtgattcttcactggtcggcataaatcatctaccgaacagacattttaatggatcttttcgcttaagatatattttggaacatttcgtctttctaatgcttattttagttctagaggtccaatttttttaaaaaggtttatttataaaaaaatatttgtttttgaatagaacactcaataaaacaagtaaaacaaaacctatacaatgtgttaaattaccacttgacaggaatgcctttacaatatgagttcaatatagggattagacaccatttttttttaaacccatataatgaagcgaagaagaatgatgatattactataagaaaactcttgttttcctaccgctaaaatcataagaaaatggtaggaaacatagctt

SEQ ID NO: 31450 - DNA, 524 bp, Arabidopsis thaliana columbia
cggagagtaaaagcggctcgatgtattacagacctccaccgttttatttttctttttgtaaacaataaattaaggaaagtaaaattaggtgcattgtatgaataattagtgtttaaccaatcaacaaagaaggtttgaagaaaattggaatttctataatctattgaattatatgaccgttcacaaggaatcaaggacacgatcaaaacgtccctatatgaaaagacatcgaaccataaaaataaataaaaggtgaatcatataataagcaaaagccaagaatgattctgattctgattcaagagtgttacaaaaataaaaacaacggtcataagagttttggcacttgggaaactctgatgccgagtcttgttctaaaaagatcaaaaaacattttcaactgtgtttcaccaaaacggtagatattttgttttattccattcataaaatttttaaagatatgaaaatgtgcaaataaaaaaagaaaaatttgcggcaagggagaggcggaatcagtggtggtg

SEQ ID NO: 31451 - DNA, 502 bp, Arabidopsis thaliana columbia
ccaagtagtccacttctagttatcctgcggtggtagtatttaaatttgatactaggattcaaaatgtcgcaactcaatttttttatgatagaagtataaaacaatatactacatagtcagaatgagttactataaataaatataattttcttggaattgtcaaagcaaatagttgatactagaattgtcattggttgcttccttaccatggtaatagtatcattcttcagatgagaatcaagggcttcaaccgccccggcttcactcacttggtcctgcagtcatgtgtagatgaccttgattcgaaggcaaccgtttcaacatctgcttataacccaaatgcacacatccagtgggaaaagttaacatggagtcaaatctaggcaaacaaaagtacaagtgagagagggaatcttgtgttaaaaggttttgttgaatcaaatagttagacaaaaatttattgacacaacaagtccgtcagggttggctaagatgcttaatt

SEQ ID NO: 31452 - DNA, 435 bp, Arabidopsis thaliana columbia
ctaatgatctcctttagtcgaatgtgtgtcatcatctcctttagccggtttatagagttagccattgactcgactggtggagtcagtggcaacacaattgatttctttgacatacttttgggtggaatagtgtggtttaatggatagagagcgaaacgaaattgtgaagcaagcactaatgctcttataccatcagctaatagctttggattttttcaaaacctgaggaaacagtacaagtatgacaactggaagatactaagaaccagagattttgtttggcaattgagaatacatattaagtagagaaacattacgagaagcataaaagtagagaagatggttcctcaacaagaggaggaagagccagtgatctctcattgtgagacagatcaacttcaaagtatgagactgtactttccggtttggtactct

SEQ ID NO: 31453 - DNA, 449 bp, Arabidopsis thaliana columbia
tggtttttaatcaaatcacaaagaagattagagtataatcaacatcattccttggcttattcttgccttcatcataagcccattcccacatatttcccacactcttaagttgaagttccaacatcataacctcttgtttccacccaaccttagctccagtgaaaaccgtgtccactagaacacaagacgtcttcattgacttttcagcttgcttaaggtgtgtcttgagaagatatagcctaggtctgttctcaagaatcaggatctagaacatacttcctagtagcaattcactatactcgataaaacccacgaactcattttcatcaatggggttagcttgacgcattgtaacatcactaacacagtcatcagcctgtacgactatatataactccctagaattgttaatagctagaactccacgagtatggactgttgcatgcagg

SEQ ID NO: 31454 - DNA, 506 bp, Arabidopsis thaliana columbia
  unsure (1)..(506): unsure at all n locations
gtaagtcgtttattgcctgttttcttgtagtgagaagttggaacaaaatgttttgcgcttatatgtagttttgtatagggttgaccaaacatttttggttccatcagggtgtccatgcagagaggtttaaaagaattgattttgccatcaatatcaccaaagagacttatattttcggtcaaacgtcctgagagaactccacaattaagcgtcattgaggtggaaaagtctcaggatgtgtgaccttatggaaagtgattgttggaatcgtgtaagtgaggacaaaacactaggaaatatcatgtggggatttgtagggcgtgtaaacaagtctttagaaccttctggacgcagagagaggatgtggggaccgctggcaggtacgttcgtagcgttacaattttttttgtcaatattttaatatttttgttcatagatatttcgtcaaaaatgttttggatatttggttctttcgcatctanttggtattttgtgtaaataacggg

SEQ ID NO: 31455 - DNA, 439 bp, Arabidopsis thaliana columbia
cttcccctgaatcattgatcaacctgacaacctctataccaattcaaaagagtgtctcccatttgaactaatattttcatatacatgaaaaatcctattactgtagccaaggcacttttgaagctaatgatcaggtaggagaagtgatttcaacccactgttgtaatacatgattgcataatcaaaaccaatctatggaatccacatctgaaatatattggcccgttttaaaatatttgtttggtaacgtttgttaacggatttttgatttctgcaaattttggcgcgctttccactttcaaactgaatttttgaaagaatctaaatggcatgcgatcataattaacattttttaagacgtaagatccttcatatttcataaccatcattaatttgatagacaataaatgattgcatagtgttccactgtggtgataga

SEQ ID NO: 31456 - DNA, 555 bp, Arabidopsis thaliana columbia
attaaaaacaaaggagttgaaataaacataagacaattattgtgtctattttatgtatttctatagttttcaaaatatgcaaatctgaagaaatgatgattgaacaagttctttgacaaatccggtaattatgccggataatctggtatgcaaattatgggtcagtcacgagacagttgagagatgtaataacactctctaaataaaacaattaaatgagtcaattacaaacagggcaagagggacatgtgagggaaagaaagaaagtgaaggtgtaaagtgaacatgtcatttgtctttggtccatccatattgctcatttacatgtgacctttgttttgtttatccaactaccttcttcacattttccatcatcatcatctctattcatctacatagtgtctaaattgttgaaaccaatacctatttcatttgtaatcatcggttccgattacaaaacaataacgataccaaaataactacgattagtaagaaacaacaatacaagaaatgctgaaatcacagcttttagtatcgctaacttttcatatttgt

SEQ ID NO: 31457 - DNA, 501 bp, Arabidopsis thaliana columbia
ccaatttttcaaagtaatgcaaataatcatctgcaaaattgaatcaaagagaatataagatcaacacaaaagcaagtgtttggggaatcggatgcatcataacaagcgaatatctactcaaacaagtttaaactcaattcaccataacattcacacccaataaaaaaaaactcaatatgaataaatcagtgtggaaagaacctgatacaaagctgctccatcaatggaaaatcttcaaacactccacaagaagcaaaagcatccactaatcaagttttttttatctctctctctcaagctaaaatcttaaaccaccaatatagaataaatgagaaatcgtttactctaaggaaataaaaactaattgaaaattgagaaaagtgctatataagagaacacaactttgattaaataagcccaaaattttctctcgccgctgtgattatcagagaagtgggagaccacgactgatgatttgccccaaaaaccagagaaacgaga

SEQ ID NO: 31458 - DNA, 527 bp, Arabidopsis thaliana columbia
atttacttttccgtcccttacattttcttatttaaataatctgttaacttgcttcttcttcttctttcttcatcttcatcttcatcttcgcttcacaatctctttgagacttttgcatcggagcaataataatatattcatcgcaaaatcagtgaattttgatattcaaatcttaatcggcgatggaacgaacaagcaacggaggaatgttgtatcacgaggttcaagagtcaaatctgtgcgccgtacactgcgtcaacacggtgttgcaagggcctttcttctctgaattcgatttggctgccgtcgccgccgatctagacgggaaggagcgtcaggttatgcttgaaggtgctgccgttggaggttttgctcccggcgatttcttagctgaagagtcgcacaatgtttccctcggcggcgattttagtatccaggtacgaattcgcgatgaaattgataaatcttgagttgcattcaacatttatatattgtaaagcctttttgttattgtgttgttggaagtt

SEQ ID NO: 31459 - DNA, 446 bp, Arabidopsis thaliana columbia
tgtctactaagcacaagaatttggagatttgacagtggtttttctcagcacatggagtctaagtaaaagataaaaaggtaagagaagacattcctacacctgcgaacatctaattacaaggacaaatctcattataattaaccaaaataagtgcattaacattttcatgtatatattcaccagcattgatggaaattgtaatgaacaaaagaaaatacaaactccaaaactaaatctgcacaatgactaaaagctgaacgggtcagtccacatttgcatcacaatctcttcactgctcttagcttagttaggctttgcagctttgtagatgaagattgtaatgaacgaacgccaactcttccagatgctttcgttcacagtggctcattccttcagttagcaacaacttctctgctaagcttctcttcagcttgtaccttgaagca

SEQ ID NO: 31460 - DNA, 1453 bp, Arabidopsis thaliana columbia
atgcgcggaaggggcctatttatagggtttggtggtccgtggaacatgtggtggagaatggatcacggaggccagaaaagtgggtggctacgggtgcgacacagcggcgattgatgcaaaactgtcgcaccaacatgtgttcgtcaggacaccaagccatcttcgttcggcgacatgtggtggagaggtgtgagctagttccggtggcgcatctccagccacacattcggctaagcaagtgacaaagctgcttcctccacaagcacctcaacgacacgaccagttctaatccatacgtccgaaactgttcgatgatgcaacagcgttgggtcctaagctgctcaacaacgttgccgtttcttgaccactaatctgacaagtagcttaccctcctgcttgatcggaagctgatcagtgacgtgcccaatcgtcgatcacacacctatcgcggatcaatcatgcattgcccagggtcgtccatcgctcaccacgggccgatcctgcatcgtccctgatcgtctgaatatctatgtcatcgccccaaactcgatttctctcgcccaacttccattttcattgttcatcttgcaatttccctcgatcaaaactcttgaaagtatcctaaaatacttcggctcatcgccaacaattattctctttgatattggctgatggttctttgatagccttccctcggtcaatttggagtcatggtgaggggtattccccttaataaaattcgtcctcaaattttcaggggaaatgttacctagaacttctccaaaatgttgacaacataacctatgccaacttctttagactccttgtcttcttgaacttctctccttgaatctgggtcttgcatgcttcaaattatggctcaccgttcttctcgtcctggtactcatcccctttgactaatcttcaagggcttcgtcttcgttttgtgattctcctcatacccttgtattgacttaatgacttgtgtattcggctcctccccttagacttaattttacattatgtaaagtatgtcttttatttttcacactctcttactttagctattttcttcttcagctataaccttcttggttcatcgtcttcatcattttcatcatttgtttacttctcttcccttcttcacttcatcactctccacttttcttagaactcttcaactccatttctgtatatgtgatttcctttcacatatcatgtgtgttgctcaaaagcttaacacacaatcttgccttcatccacaccacacgcctcaagttatcacaggttttataggttaaggatggtcggcctaaacaactacggtttacttaacctctaggtttttaaggttgaagtcttcagggttacatcaagactaatcctaacactcaactcactctgactactcaaatttagtccaaccgatcgatctaacaacgcatggatgggg

SEQ ID NO: 31461 - DNA, 487 bp, Arabidopsis thaliana columbia
cctggattttagcaatcctagtggcgataatctcttaactgcttatcagcctcataaactaattcacatgatatacttacgtggcactaataagtgcttacttggaacactcaccagattacacgtggctcactgtaacagactgaagcttataaaaggcaacactcctctcctccctatcttcaaaatggatctcaattttgtcattctgttttactttcaatgaaaacttacttttggttatacttatgtatgattcatttattcatttaattcaaaaacgtcacaatcccttttttttattacacatgaaatgagctcaacgtacaaggacaaccatccgtaccaccaccaccctcaccatcaccatcaccatccaaagagagaacccaatgaaaacaactccggaatcttatacactccctcaccttcaccgtcaccgccaactttaaaagtcaacaaagactctcacgttattaaaaaacca

SEQ ID NO: 31462 - DNA, 1010 bp, Arabidopsis thaliana columbia
taatatctaattctttgatagggaaggcattgaacccttggatttaagatgtatggtgctacacaacagcatatctatcaacacggacaaaacataatagtatccttctcgtttaaacatcaatggtaatacattcttggtaggaaagcatcttactctcacaagttccacattgttagccatagcagcagtatgcaacgctgttcgcccgtgctgagcatcttgcgcagtcggatctgccccagctgcaagcaatatctgaaccagctctctaccttctgcagcagtatacatgttaagtaaactgattcatatggtaagacgaataatgacataacatccaataaattcaactttgatacaatactcttgtaagaaatagcaggaaaaagttcaaataacatccttttttggtaatgtgcaaaactacaagtaactgatcttttagatgtactacataaaataccattggaaatgtgcttgaaaaaattcttatcttatagagatgaccataatcatcgtgtcatcaaataaagataaaacttcgtaaagatcctcataaaatatatcagatatagtcatacttctaccaagcaattcaccaaacaaaagatactacgatttcatcattacccttttcatgatctttccttatagaagcagccatacacagagcagtgccaactgggcttgggatattaattgcctgagaaatttcttctggactggaaacttccacccatctcttgataacagcaacattccatgttgctacacacatatgtaacggtctgaaacaaacataaaagtataaagatctgtagcataaaacatcagacacataggtttacaaaatgaaatatgctttcctaagacagacaagaaccaaggtacacattaaatggttcagctacctcattgtgacttatccaaacaggttaatgtagtagacatttttcagcacatacaatgctcaaaataagttataatgtagatgcaaataggagtat

SEQ ID NO: 31463 - DNA, 562 bp, Arabidopsis thaliana columbia
tcaaaagtttgtagtgctttttggaaattattctatatgcttatatctatgttatttagtcatatagaattctatcagtccgctctgattagcttcccgaatcgtcatacaagattagatttccaagaagaagccagcaacttacctttgttatcaaaactcaaggtataaaatttggtccattggtgtttcctatacgaatacaacaaatctcagctttgcttgtgcctcacaaccttttattttagcttgacttataaagattcaaaaagtaggcataaagttttttttttgttttgttggttctttgtttcaatagaagtaacacgtttcctctttttaatggatactttttgtaacatttttggtgtcgagaattcatgaacatgttccaagattcaggtcaattagttggaactatcttattactcggtgtcgttggaggttggagtcacggaacaatggggcgggcggatttgaccgttagcaagtatgaacgcaagaccttttggggtcgagctttgagctacgtttgatggtcatatatgtttcaagtttatac

SEQ ID NO: 31464 - DNA, 191 bp, Arabidopsis thaliana columbia
atcatcatcatgataattaccacacatcttttcaaagatatcacaaccttccaaaaatttcacagctcattcgcatcatttgatcatacccctcgaaggattgtggaggtttacatcgtttggtggtggacttagattaagatatctttgcatgtgatgttttttttcctttatgcggttactgtagatta

SEQ ID NO: 31465 - DNA, 501 bp, Arabidopsis thaliana columbia
tttcgtttttgtcatcactaaaaattatctagttctttctactttttcagcgtacaataatctttttttctatcaattggtacgttttttattttctcaattttaattttgttttctaggtacatttttaatcgaattgcaccaaaatatccaaacaaattcaataaaacaggcagaatgaggtattaccgtattagttaaacgagaagtggctactttcctcagcgtgattaaaatgcttatgggttcagtttcataattctcatatacggaactacgcatttgacctcatgctctctataaatattaagatctgatgttgagagcccattagaactaagtttacgaatgagcccatgatagtttaacttgggcctaattagtgtctaatctgcttctaacgttaccgagtcaaacgcggtctaaactaatttgtagagtagtgtatttgtccaaagcgtacccacacaattgctgagaaacttcaaaccctaagtgtgt

SEQ ID NO: 31466 - DNA, 592 bp, Arabidopsis thaliana columbia
tactttagatctatttaccttttttttttctttggtatttttgacgattcttgagtttctttaagttcttgcattaaccccccaaaaaaaaaaaacgctttcctggatttttttgtttgtttcattgtgccttttcaattatgaaaatgtcaatgcttgctctgttttaacttttctgttaaagtctcaatgtttttattttcattaaatcaaactttcgtgtgtatcaatctatacagtgagacgtgtgcagaccccagagaataaaaagtttcctccgccgctggtggcgatgccggcgttacatcccacgtttccactgccggaaacaggacataaactgagacccgccgctaccccgcctcgtgaaaaaccgcaacataggacgacgagatccgtcgagaacccacctcgtgaaaaaccgcaggagaagacaagatccgtcgagaacccgcctcgtgaaaaaccgcatgagaaaacaagatccgttgaaccccacctcaggagaagacgagacccgtcgataaccgccgtcaaagccggtagaaaattgggtttaggaagaaagcagtgccccgagtgggaagatagt

SEQ ID NO: 31467 - DNA, 627 bp, Arabidopsis thaliana columbia
caaccaacaaaattagaagcaagatcaacctttaagcataagcacatgaatactgcaacttcttgccctggaacttcattcaatgagagtggtcactgtatcaaggcatttcaacctgtagctgttatatcctaataatatgcatacagtgaccacagatatatgagaaaattatagcattaatttcaatcctactcgtgaggatagtggagtatctaattagtgttgatctaaggtatgaacatacaaacattacggatatgaagtgttagcctacctgtcatgataaactaggactaaaagcagtcaaatatgttatgtcagtattataacttaagtcaataaaacttctattgcagtagtatgaattagagagttatgttaatggttagtagtcatacttctgatggaaactgggaggccatccattcatgtcagctcttgcattctgaaatatcctccagaagccagagggctagggtggtcaagccactctgacttaaaactgtagcattctccaacagtgtggttaacgcaaaatttctgtccaaaaatgtcaatttgcaagagtaagcgcaccagttagaattagtcacaaatcagtcaccaagcaccaatgaatggaga

SEQ ID NO: 31468 - DNA, 549 bp, Arabidopsis thaliana columbia
  unsure (1)..(549): unsure at all n locations
tttctctatagaaatatttcagaaacaaaccaagtgtatacaatacatcaacatgttttttttggggttttaatgtgaagatttcatttcaataaaaagattacaagctaatctaagtaatacaaaccaacatattttggtttactctttatattaaaacatcatttaggataattatttaaaatatatattcaaacatctaaggtcctaattaagcattacaaaagatttccgttttagaaacatatcaagagttgattaaatggagaaagacgactaaaatttgtgagtgaaaaatgacaatatgccgcaagttattgtctcttgtgcaataaacgttggttggatacagacacatttgattgaatgtgaatagtttagttttgacagatcataagccgtgtcctcaagcagaagaccggtcgtgatcggtcaatctacacgtgtacggcagaaacccatgtgtcgtntccctgtgagagatgatcacccaaatcacggtcagtnnttgtcactaatgtgtgtatgatttgtacatgcctcgtgaca

SEQ ID NO: 31469 - DNA, 647 bp, Arabidopsis thaliana columbia
tgagtttccctgtggttgcgacatcgtttggagtgtcccaaagtggcagccaagcgggaaagaagaaaggtggttacgtcaactatgaagtcgagccaggcttcaccattcgtatgcgtcagaatattgatcccaccacggaccctaagatactcaaacggttaacataattttcattttttatcgatacatatcttataaatgaaaccctaattgaattcaatccatatatgaaataaaatatgtaggataatttcgaaccgtgttgcggctcaaaagtctaggtggaagaaggttcaatatcttgatgctctagtgaagagatccatggagctccaagtatatatatacctctacttaatttcatatatgtactacttcgattcattatgcttgcgtattacacatatgtatatacatttcatttaatgtgcagagagaggtgagtgagttgcgtcccaactagcgattaccagtgaacaaaaacgatatctagaaaatgagcaaaggcagctaaaggagtgtatctctgctcgggttcacattgtatcacagcgatggtatattaattatatacatgatagctaatttaacttaattaaatatatatacatatatttgggattattgatatacaataattataa

SEQ ID NO: 31470 - DNA, 547 bp, Arabidopsis thaliana columbia
gtctatatattccccaataaatttcagtgttctttctctacttgagtttggttctaacacccaatgagttttagaattcgattcttaaagttaatgcaatgcattgctaatctctgggaaacattactagtagataagtgatactaaacatggaaataatcaagaggcacacatgaactcttctttcttctttaactttattcttctcacttctttcttcttactccactttactcttctttctcagacgcttcaactcaaaaagagaaaccagcatagttgtaatcttgaggatcagctatttttctgaaggatatttggcctaatttcgaaactcaaggtatcttctttttctttttctaagtctcaattcagcaaaatgtaacatacacaaatatcactagtttacatattttattattattattattattttcactagtttacatatatatatatatatatagcagggtcgaagtaccaaatcaaagttcttgctgttgtttacgtatacgagagtgaattttggttaatggatactcaaata

SEQ ID NO: 31471 - DNA, 693 bp, Arabidopsis thaliana columbia
tgaatatatccatctgtcgctgccgccgctcggatcaatcagtccaaatgatgcaattcttctttcttgttattgagaagcaagtttatataaacttaaacaaatgtatatatgttgatctatataagattctcaagtttttaattttacctaattaaaataggcatatacgagttgaaacacaaatttattttcaacaagatcagaatgaaatagcacaagttaaccaaacatcgtcaatggaccaagtacacgaaggcaggttaggatggtctagactgtattgatgatcgaaccgtggttctcagaatcagttaacagagtactttgttgaaccaaaccaacataaaatctcggagaatggcgtattgtagaatacagcacacagagtaattcagaacacgctaaaacaaagaatacaacctatatggtataaaaccaaaatttctcaagaatctaatgtaagaactcaaatctgctgagaaacattcccatctattgccatcaactggatagactaaccttttctaggcctagttccgtagcaactgctcgtagtaaaatttgcaccagctctctcacccgcatttccctggtgaaaaaaaaactctcaaaatcttaacttgatagggtccatacagagaatttgctgtcacccttcctatctttagagcacactggcggccgttagaa

SEQ ID NO: 31472 - DNA, 538 bp, Arabidopsis thaliana columbia
atcgtaatgttcaaaaagaacaaaggatccctgaaatatatctgaaccttttttttttctttcttgtttgcagtaaagtctttagactcttagttatcctattataaaagaaattaagaaagaaaaatttaattttacattcaaaaaggagaaacaaattcaaatattaaagaggctagattttcttctataagatgtacctgtaaataagctaacatagcgtcacccacataaggattctcaaatctaatgaaaacttttaaaaaacgttcaacaggaagtataaggaaagtagggtctattggcatcgttctatctataagtagcgaagtcttaagacaccgtacctcatctcttatccttcgatagagatggaaaacatcacgaataactccgagcgatccctcgaccgtccaaagaggcaaagacctgtctccatggagaatgttggaggaacggcgagtggaagtgaggtggccgatcacaacactgttggagcttgatcttctggactgtccatctgctacacaaacttggg

SEQ ID NO: 31473 - DNA, 476 bp, Arabidopsis thaliana columbia
  unsure (1)..(476): unsure at all n locations
caaagaaattcgaagaggtttttttaggttttcgaaaattcaaattacaaaagtaatccatcccgctgctctatagaaatatatttcccgatccagttccagtgtcagttgctttatctgtaaaaagcaaaaaagagatgagaggcggaccnngggaaagagaagaacgacggtgggtttcggcggacgccgccgccacctccaccatcaatcgagcaacaacgtcacctctttaactcaagagactccgacgccagtttcgccagcagccgtccttcatcaatcggtttaggcggccgaggagcctccgatgacagatcttcgatgattcgattcattaacgccttcctctccacacataacttcccgatctctatccgcggtaatcctgttccttctgtcaaagacatctccgaaaccctaaaattcttgctctcagctttagattacccttgcgattccacaaatgggacgag

SEQ ID NO: 31474 - DNA, 820 bp, Arabidopsis thaliana columbia
cccatacaaccctccgccagaaacacctcgtgtggtgagtcaaatggaattccgtcccaggtctcaaaatttttgtggtcttattgtcgtaccaatggtgttcaaatcagtgggtgtattgtccttgattcatttttgtttcctgatgataagttttagttcataattttccaaaccaaataatcatgagatggattgaagatacttttccttctagcacatttttctgatgcttcaattttctctgttgtggataaaaatgcttcatttaaaagatcttgcataaatgatctttcttgcagagtgacgtgtgaaacatttctctattcactgaatcggtttttgttccctttcccttttctttgtagcatgttacccaaaacatcaaagttgaccatcatccaggtgaagggcactggtttgccgctggtctctctcctcatgtattgctctttgtcccttcgaaatatttgtaagaccttcaagttgtttgtgcacctattgtggaaacttatttacttctttgacaggtatcagggagaaccagaatcccgatgcacaatagtccccattttcagatgatgccttattcacatgcaaatagttatgggagcattggaagctatggtagctacaatgatggtactatacaggacaatagctatgggagctatggagggactggcaatatgtttgcatactattctcctgtgaatcatccaggcctatacatgcaaaaccaaggtggggtctcaatgcttggaactagtcatgatgccagacgtcgggttatgcagtaccacatggaaatgggccaaat

SEQ ID NO: 31475 - DNA, 500 bp, Arabidopsis thaliana columbia
gactctagagagatggtaggaaaaatttacggatgttgatgaagttatacctgtaagtgcaaagtatggacatggaatagaggatgtcaaagagtggatattatccaaacttcccttcgggccaccttattatccaaaggtactatgcatgacaattccctgcttcagtattgaaattcctctccttgctatagctaaagcttatagtctaatttgcttaatattctgaggtttgtgcttcagatgcaacaattcacttacctaatgtcttacggctatttgatttctaggatattgtgagcgagcatccagagagattttttgtttctgagattgttagagagaaaatatttatgcagtaccgaaatgcagttccttatgcatgtcaggtacaatgacaagtttggcttctattctcttgagtcctgtgaaaagccgtggccttattaatcaatcattgttaacactacaggtgaacgtgctgagctacaaaactagac

SEQ ID NO: 31476 - DNA, 374 bp, Arabidopsis thaliana columbia
taacggccgccagtgtgctctaaaggtatctatcaaatccgtttccaaaaagcaaaaaaaaaggtccttaactattaaacaaccgccctaccgaaatggtcggcccctaattaagggttaaagaaagtcctaccttaatttaacctttttccttcccctaatccgacaaccatttaggcaccttggtttccccacaatatgggagccaatctcccagaaaaatgtgccaatctcacaatataagtggccatagagagaaattcgtaaggtagaagagcaaaatcaacgagatcacactctctctcacgcggtgaaaaaaatcagagattctcagagctctgagtgtgaaaagtgctcaaaatacagattagatg

SEQ ID NO: 31477 - DNA, 570 bp, Arabidopsis thaliana columbia
atccgatgaacaccggaggtacttgcaatgcccatttccgataacaagttgctcattgctgctagcgtatatgctagacaagtatcattactaagctgcagaattaaaaaaaaaaaaagttttaattaacataaatgaattacagcttgtacaaacgtctcttcaaacaatgcaagctttagtgttgcttatgaattgcataataaagccaaacaatagagatgtgatccttctagcatgttccgaatacaacaaattttcatatctggtaagaatgcactgacccatgagacaccctaaaaatcgctttgcagaacttggtgatataacaatagaagaaactagctcaagattcagcttaaggaaactttcataaacctaaacatcgtgcaggaattcgtcaaacacgccactttcttccaaaagtactataaactgaactaacagcggatgataaagtgagaatatcctgctgtgatacacgcacagcttctgtcaaaacctgtggttaaggagaaaccatattatgagaaaccagacaatgatcagactctataaatgtgaagttga

SEQ ID NO: 31478 - DNA, 542 bp, Arabidopsis thaliana columbia
gatgaggcgtgtaggccatgaacgtctcatcttcgaatcgcaaaagagagattgatgaagtttattttgtggagaagtttaataatttagaccaatagttcctcttgagggttagatatatagacggcttaattattatataggcaagagtttattttaacaagtcaaaggtttgggtgttattatcatatggaatctaacaacacggcaacttttttttttaattatctcctagtgctacttgtattggaagaagtttgacgaaattagttaaactcgattttaaaatatggtactaaggtaattatgaaagactaattcgcagatctagagtacaaaagcaagatacggtaaaatcccttttttgtctactctactagatggtaattaaattggataaagaaaagggattaacgtgtattctatcgaataatttattctggatatcgttttatttgactctgtatctttattataacagtttaggctacaattttgtaataattttccctgttaataagtttcttattatttagactata

SEQ ID NO: 31479 - DNA, 628 bp, Arabidopsis thaliana columbia
  unsure (1)..(628): unsure at all n locations
tgagagcatgtcgatctcatctatttcaggatgtttcaacaaaattaaacatattttcaagccatttgaacagcattaaacaaataagtttggttatgtgatttgagtagttgtacgagagaatgtttataattcaatgaaagaggttcgcaaacaatgaaataaagcaagtgcaagagcacaaaagagttaacacacgacaatttaacaagatactaatgagtaactaatagtcaaagagttcataagatgattttaggcaagacttcattgcaggaatggatacggaagctaacttatttccaattattttcttcattgatacttaagaattttggatctcagagtatctgaaggccaattctatcgaccaagtttggtccaaatcaagaaacctacgctgaggcaaaaggatgaaacaaagtagtttagaatagcattattgatctgctcatttgaatgtaaacgtaaaaaagaaacccaacagcatcatcatttgaaaagaaaccatacgtatgatgatgctgttgggtttccttttacgttgttttgtgcatatgagtgtnaatttcacatctagattcagtaatatcgatatttcatgattattcatcacagttttacagac

SEQ ID NO: 31480 - DNA, 563 bp, Arabidopsis thaliana
tatacatagcccagattagtaaatctcataaacactaaacatagtactcaaatcatagtaatgagctcggttcaagtcttacatccttagctaacgaaccattatgctctgacttaaacgttttacggaagtcactcctgtaaagtaaaaggttaacatcagcatcaaccctagagactatatcacaatctaaaaaaagcaagtatgaacaaaaaacattacatgaagataaagaaagcggtaagaggtcgcttgggcttgtttgaagtagacgagctcttcttctcatcattggttttcttaagtctctttggcttaggtccatcagatgttgtcttcttcctggaacaaaaacaaacattcaaataattcaatatcacatacagaaactatacaatcaagtcttgacgagtcttacttctctgcaggcttcttcttagcctctgcttgtgtctccacaacttgtgcttctgaacaacaacaacaacaacaaccaaatacacagagactatgagacgatgaaacacacaatacaataagaaggggggaaaccaaagagatga

SEQ ID NO: 31481 - DNA, 308 bp, Arabidopsis thaliana columbia
cttctccctctctcgttactctcttcggaaatgatcaagacatatgcataaattcgatttatagcaaatatttatattaacatattgcataacaatgacaatactaatttatagtaatgcaaatgttcacatgccagatcatatacacctacagcaagagaattgtctatctcatcatttaagccgatgccctatttaaataaaacaaaatacaaaaaattgaagtcatacacattctaggatcagtttacaatctgaatcagaagtagacattcaaaatcattcaagaaacggtataacaagggtga

SEQ ID NO: 31482 - DNA, 998 bp, Arabidopsis thaliana columbia
aattcaaaacttttactctatagaagacctggagatcgagtatataacctggggagtacaaaattttgaaagtttcctgttgcatctcgagacccggaattcgagtacatcagtcgagtatacgtgatgttttaaatccaaattttttttttttttaaataaaaaacatcactatactcgaccatcaggagctacggagaattcttgcagtttacagtagattttctgcagattttctcagtcaacagagtgtggaccacgcgctgaggataagctggagagagaatctaaaactcaacctccaccactcattttgaaacttcacaagacttcacaaaatccacacgacctacctcttttcatctcaccaccgacactccaatttctctacaccacgaatcgccgtccaaagagtcactcgatctagatcaattcactcgacctccaagaaccactcgacctctgcgccgccgtcaccaacccatttcttctgtcactcgacctctgagaaccactcgacctccgcgccaccgtcaccagttcatttccaacgtcactcgaccatccctgcgccgctgtaatcgagtactcctcctcgttcaccgtcaaagtctccgggaccactcgattacgacaaagctactcgacctcgagtattcactcgaccttttgttcttgaaagcaatagagccctgaagcacaataagagtgattactcgacctctaggcttcaccggctgaactcaacctccacgactcactcgacctccgggagcagactcactcgaattcaagaacacttactcgacccaattcgtctaagaggaactcaaaaacagctcaggttactcgagtactgtattgtactcgaccaatagggtgtatttcatcgcctattggttacaaattttggtttcactgttatctttgagactaacctattgacatttgagctttgagttctaaatttctacaggagaatcatgagtaattaaagt

SEQ ID NO: 31483 - DNA, 123 bp, Arabidopsis thaliana columbia
catctggagtaaacatagtttatgattttataaagctaggtgctctgaatagggctgcttatattattctctcttctctgcatatttgaaatgttttataatggaaaaaaagagaggaaagga

SEQ ID NO: 31484 - DNA, 1333 bp, Arabidopsis thaliana columbia
ccccccacaacttgacacatcagcacataagagtttgccatctagacttcataaaataaataatacataattagtaatcaattcaacataaaaactaaaataggaggatataattaatcagaacttgaacatcactctttctacatttttttaattcaatatatcctctttaattttgagatccaaacatgttacacatattccttgcctaaaaattagacgattattataaaagaaactaaatgaatatgcagattaaatatatctaagcttttcgagatttatgctaagaaaacaagtaatttgaaagatgtttgaggagctatccttatgactaatacgtaagatataagattatgacaagaacttaactaaactttccaagaacatcaagttgaatatgattagattggatatgcagaaacatgattaataaagacatgttatatttttaatgtaagaaataaattttttaaaatttcaccgtctcacaatctaaacatataacaaaaaaaacaaggatttataaattaaaaaaaaactaagaatctagaagaaaaataaaaaacaactcaagcacattcttttttcagatgaactaatatagttggacttttcaaaaacaattacaaatcatatttatgtttcaaacccaatgcattcaactttactttatatgaacagacattatataaaataatttataaatagtaatacataaacccgcacgtagtgcaggtactcatctagtacaaaataaaacagataaggcccaagcccaacatagccataaggccaaaagctctaaaaaaactagtattaagccgagctcggttttcgcatttaatgagaagggtctgatcaacctaaaatctcagaacatagccacaaggccaaaaactctaaaaacaaaaagcggactttgccaacccgcatgcgataagtaaacaaaaccctctagggatcaaaatttgaaaggtttaaaggcctcctaaggcaaataactttttcaaaatataaagcccccttgggcaaaatatatagccctctagggatcgctgttcacaaacgagggctatttgggctgagtggagttaggttcgacggacatcaccgatgtggcaggtacatcgggtggaacaacttcattcgagttgctcggacctagaagaaatattcgaattaattaaaaaatacggacacactggtaataaatttgtaaataaaaggacttacaggcccagtagagtctggattcaccttatggaggtgatgcagtaaagaattcatcaaagtgttgacggtggaaagcgtggaggcgagactgaaagcg

SEQ ID NO: 31485 - DNA, 867 bp, Arabidopsis thaliana
cccaattatccaatatccaatcaaacctcatttacatgtatgtaatccaaatcgttttattagcggattacgtcggggctgggcttagccttaaaacgagaaagaggatttttctgaactgaacaatgaacattcagctttcaccacgaatatttaaattcagcatctgctagttttaagatgttgaatgaagcatttagttaactaagacatcagactgcaaaactggatagaggaacaaaaaaaaaacaagttgaatcaactattgaaatagtttgacagaattcaagatccacatggcaaaactatgttaaacagagacaaacatccttaaagacgtaacaagaacataggaaaacaagacagaaagctctgcttgaaggcttcagacacgcggtgcagctgcagctgcagctccaggtccagcaggacgaggtgcctgtcctggttgcccaggcttgggagtatcctcctgattatctcagaagagtaagtcattcatgcaataaaagatagaacaaaacagtctcactgaaagtagttttgttaggaatgaagtgaaggtactggtttgcttaatccaccaagaaagtctacttattgaagtcgtaaagactatatattgaaacaactattatagttcagaaggtaatcaaacccaaaatttggttccagcgagtgtcaactatacattgtacatgtccaaaaaaaccagtttaacctcaaactatcttcataaaccaaagacaaaatggagcgagcagaagtaacaaaagattgagaaatgaagcttaaaactattaatgatcattgagtcgaaaaagagagagagatattacttgcgtctggcgaaacgaggtggaggag

SEQ ID NO: 31486 - DNA, 505 bp, Arabidopsis thaliana columbia
tagtaacggccgccagtgtagaccggggggtttgactgctgatctgagggcaaccatgggcttgcactctcctgctcttgtctttccgcccggtcgagtggtcgagtggtccagtttgtcttccggactgctgcttgttgagaacaaattgccgagggaaaaggagtcaaacttaaaatagctaaggtttcccacgttggctaccttatttcccaaccctgcgctccccgactgcgcggctttggaactttcggcgtcatgccgcaactcttaatttccttgctccccactgatcagagtgagctcacagatgcgtgcttctagatactgcggcgataccttacgctcagtgaccactactgctattgactctagtagcctggtatcggccgtgccaaagggtatagtagaaagaggagcttacaaagcagactgagcgactcatgccaaacccaaacccgtacgttgggacgaagggtctgaactacaattgagttactgacga

SEQ ID NO: 31487 - DNA, 569 bp, Arabidopsis thaliana columbia
tgttagcagctaacgtttgtatttacttaataataagttatctactaagttaataatatatggttagttttgcagtatcgttgcattgtgggatatttatcatcgttgcattcgactcgcgttacacgagatactattattccaatattaatctatattagagattttcctcgctaacgtttttgttatcattgcttctcattgttgttaaaattcgtggattttgaccagccttggatcgttgcattaagattgcggtagtagataataataagttatctgatattagattagccgatttaaatggttagtgttgcagtatctcggtaagcattgtgggatatttatcatcgttgcattcgactcgcgttacgagattaactattatcccaatattattccatattagagattttctcgctaacattgttgttatcattgttactcattgtttttaaaattcgtggattttgaccagactcggatcgttgcattaggattgcggtagtagatactatattatcccttttcagcgtaaaggttactagctaactttgttgttacttaca

SEQ ID NO: 31488 - DNA, 560 bp, Arabidopsis thaliana columbia
gtctgcacttaaagcaaccttattcgaatatagagtaaaggctgtcatacccttccgctgtgaaatcctttttccagaggacctcaccatctatagcagaaacagcatgaaggtacccaccaccgaaaacagtaatagggtagtccttgtcaaccttcaaatttatctgcaagatagctttaattcataaataatcaaccaaggaaaggatgaagcaactaagacttcagataataactacagttgtccttcttataaagaaaatagcataactcctaataacttaccggtactgataacagtgactttgaatgttgtgcggtatgcagagatgtttcccacaccatttgaccatcaggaaggttccaggctcttaaagtacttccttctgatgaaagagtgataacatctgaaatcatttgaagccaggaaaatagagttcaagatgctggtacattatttattcagagtgttaggtacatccagacatgattgatcacatgtatagaagataattcttacattttccaaggcaataccaacccatcgatagcgtcttt

SEQ ID NO: 31489 - DNA, 519 bp, Arabidopsis thaliana columbia
gcacacgtttgtggtcctcaaccatcattccaagtaattcagcaacatcctgaaccctgtgattcatgcaacaggctacctgaaaatttgtccacttctaagagaaatgtgtgcaatcaaaaactcataagaattacctatcatatgactcggctctagtgtaggcttgaatcacccagttatatgtctcagtgtcaggcttcataaatactaccaaatcaagattacatcaagccatgtcaaaagccatcaggcaacaactaaaccaaacaattgaagcggaaattagctaagaaaaacatacaaccttcaccgtactccatattttcgaatgtagcataagctacctcgggaatcccacatgtagcctacacaacggaagcaaagaaaaatgtagttgatgtcaacaaaaagacttaccatcttcattatacaaagaagaagtgtgtgtatacgttctaaaaaaaaacataacaaacctgcacactaagaagacagttgaaatgaaatgttgtggcc

SEQ ID NO: 31490 - DNA, 534 bp, Arabidopsis thaliana columbia
attcctcctaaggacccaagcctagaatttgatcactataaatctataatgttatagtctctgttcatcaatttgagtttcgaattgaagctttttcaagtttgctaagatttatgacatcatcaattggttttgatcgcagcttgagggatcaaaatcaaaagtaaattaaaaagtataagtagaagaaaatattaacatgggaaatcttttgatttgaacatttttactggatgtaaaatccttcagtttttctgtaaactgtagtgacaggtcttttagtatgatgaattaatgaagaatttgagtagaagaatgatagaaataccacaaagttggagcaatgagagacataagagactttcagagaaacaccaaatggcttttactgcaaggctttcaatatatttctccgccaaagagcagtctctgggtcgaacctcaattcccaagtcggccagtaatggagatcttgtttcagagtcaatactcgtggcttgccgtttagatgaacagtcctaatacgcacaaact

SEQ ID NO: 31491 - DNA, 866 bp, Arabidopsis thaliana columbia
caagaactgatattttgtagaaaagatactaaccagcgtcgaagaatgaacttgatttgttaagcaattgtctctgccaaagccaccaaatacgtagagaaatctgccgcctttaatggcgttacaagtgtgtccccatctctttccggggccgaaagaagaagaatcaccgagacccacttgttggaccctctcccacctcattgtcttggaagaaagatccttcctttgcgttgagaaagtgcgggaaaattaagggttttgtggaatagaagattataaaattgaagacgagaagaggaaaatccaaaatcccaaaattatttctttaatggtaatggcgatacagaggaatataaaggtgattcctttgctttaggtttttctctaataacaatgtattaaagtatatacactctaatacacgattattgaaacaatggttactgcaaaagaaaagaaaaaaaaaaagaaacagttaccgaaattaaaacaatggtgcgacgacgtaactgaataaatggactgattcgtgataaacggagccttctttacttttttatgttgagctttaattcgaatgagtaatgatgtcaacaacaacaacaaaaataatccaatgagtaatctttcttaccttaaagtctatgtgtccaatgagtaattcgtggtacccgtaattaattgttacatacacaaattaataataacatggtaaaagtctaaaagaaattaacgtaacggcatagttaaatagaaaattgtcaaaggaaatatattgaatatttttgcagttaatggagtaaaattcattgtttgtcctatataatctttgtgattgacgtgaaaagcaccatacttgggga

SEQ ID NO: 31492 - DNA, 727 bp, Arabidopsis thaliana columbia
tactgttgggcgttccggggacaaccaagtgaagccatcgcttaggctttacattgtaaacacttctttttggagaactgctttttttttttacattaacaaaaagacacaattttttagttcatcaaagaaaagtttagaaagtttggacccgcacggtatagggaggaaggtggattattgtgagattgctgctgtggaccaacttcaatttcgaagatcccttctcgaaacttgcaagaaagctttctggagaacactttttatatatatcaaaacggcactagtttgggctttgtaagagtttctttatatgactgcgtctaggtagtttaattattctagtgaagactttgtaagaggttgaaaaacaatacatgaacgtatccatgatcacaaaattaagtaaggaatcaaattgcattgaatagttaacagatgatttgcaacaattataagttaagaaaattaatgatacatatacaatcaaagatcaaaaaactctgttctttgttagttcttgatcttggccgtagattcttttcagacatagtttctaccttattccctgcatgtcatcccaggaacaattattgttattattcttgttgtgttggtcgtttgttgcgctacgacggctgtagaatcagccgggaatagtgaagctaattgatgaacatcaagaacaagattgtcgtcagtgacaacagatgattgtccattagag

SEQ ID NO: 31493 - DNA, 518 bp, Arabidopsis thaliana columbia
gttttgggatcagcagccatatgtcctcttcaaattatatatgtttataaagttatctaatgctttaaaatatgcatagctttttttctattttttataaagtaatttaatgctttcaattgtacttatagatgtaagatattaggtttaaattttaatctctggcctttaattttgacaaattacctttgaacttttgaatttggagattgtaatcatacatcacacagaatatcacatatttgaatacttttaattttttgaaatggtataggaaatgaaaaatgtaaagcttcttattgaatgataacacacatatgtgatgagaataaaaaagaaaagaatacagaatttatgtgacatatatcttattcacaaccatagtattgatccattgattaacatatcaaggaaagtaattataaagttaaaggaaaaaaacaaaaaaaaaaaagctaaccaaaaaccaaaaaaggaagagacaactaagcgcgtgtagttccaaaccagaagccgag

SEQ ID NO: 31494 - DNA, 493 bp, Arabidopsis thaliana columbia
aagggacatggaggtgtgattagggtgagctcatttctggatatggtaccttcggggaatttgtttgggttaggttcgataaattttgatggtggaagaaacaaaaacaagatacgatcaatgtttttctattggtaagaatgactttttgtggagttaagtgaattagtgtgttattctcttctatgtttcctgaacttttgtatgtcagaataagtatcatatctctgaattaatccatacggaagtgtgtatagacgtcgaaataaatcgtgtctttattaataagccccattgctcgagttagagcagaacttccacatggaatgcaaataaaacctagcttcgttgacaatacaaagaaatttggttgtattttgtttacacaaataatgataaatttgttattgaagacaattagaaagttcgacaagtcaagtgacaagtaaccaattccatttcaagcttgtcctactccgtgattcatttgaat

SEQ ID NO: 31495 - DNA, 492 bp, Arabidopsis thaliana columbia
tggatagattgaagaattgagtcacgaacttgcgcaccgacgattaaacggttctgttcgatgcttgagattccggtgagttcttcgatggttggaggagtgaaaccatcggtgtaaagagaagagataagaggtgcgtattcgaaccagagagccattcgaccggcgaggatttcgattttaccggcggagtcgagtgaacggaattgggttggaatgggagatgacggtggtcggaacggttggtagagctgttgcctcgccggagggtttttgggaatcatgttagctgaggatcttttgggtatcatggaagcggtaacggtgaaggaaacggtacgtggtaatggattaacgggtcgggtaatcgggttggtgaataatccatgagtggtggattgtgtgaaaggtgaggagattaaggatttgagagagaacatggtgaatgaaatttgagtgagaggtgttgcagagtgtgtgaagacgaagatg

SEQ ID NO: 31496 - DNA, 414 bp, Arabidopsis thaliana columbia
ccaggaaatgaaccgatgtatgaattacatagtcatgtatctgaggattgtaaacatctccaggtttatatttccagacttctcaatgattaaagcttttcacctctagttcaagattccagcatcggatatcgagtttcaaggagcttcagtacatacgttatggggacagcaatggggtgctgcactttgtgggtagatcttatggtagtcatcagtgggtcaacccgttctcgcaaaggttaacctcacttctatcctacattctgtagtcatattgttggaaatccaattacgatgacaaggaattctgctggagaaaaatatttcctcaggtgagttctataagttgtacagaaaatcaacattacatcgagtagtcccacatccagattcactgatccaaaggctttg

SEQ ID NO: 31497 - DNA, 373 bp, Arabidopsis thaliana columbia
aaactcgacagaattaataataatagagagcggactcatttctgtctctgactcttccgtataaataacgcatatgagccactaaagagtttccacaaatattattacgaaaaaataacaaaaacaatgaatgaagagagacccaaaaagtcgaagaagaaaagtctcatgaacttctacaaattctcaatcacttcgtcgaaacactcactcataaaccctaaatccaaaccaaagatcccgatcagtacaccatcaatatctcaacaagaagtagaagaaaaaccaatcgtccagtcgaataaaagtcatcaaaaccatgtgatgagggatatatcgagttagagactacttgtagtagaaataatgaaag

SEQ ID NO: 31498 - DNA, 514 bp, Arabidopsis thaliana columbia
cgtaaagggcttttaatattcaccatctcaattataaataaaatccctcgattcctaatttcatcgagatcgaaatcaagattcttctatgcgtgatgaacactccatcacaaaatctattattaatctccgattcgaattcacaaaccctaatttcgcaatagatcaataaacctgatcatccaaaaaaaaaagatccatttgagattctagtactaactgcaaaaacaaaaaccctaattctagaaagggacatgtatgtacgtaccttgatcttttgcgattcgtgaagtggggattttggcagacggagaagaatggatcggagatttctcgatccagagggagagatgtggaaggaggttatggttaagtagatggtaacggtaattaatgttatgtattttccctccgtattattagcttaagttgcctaaaattaacctttcccttaatttattccaattttaggaataattagaatcggatcttttttagtgtaagctgacgtgtg

SEQ ID NO: 31499 - DNA, 498 bp, Arabidopsis thaliana columbia
ggtctgttacggatttaccagtttctgctgtgaaatcctcggcagcgggtaagaagggaactgcggtaagaaaagacggtagacaagcgaatcgcggactcgaatctcctgcattgatggggagaaagcggaaccgggttagatgatttttgtatgaagggtttgtttcatatgttttttgtagttaggcagagaaagcttatttgatgtagtagtttatatttgggtcaatctaatctgcaggcatagacagtgatgaatcatgatcattggtaaaactaattgttaaagaaaatgtatattaatctcattgttagtttctctcattgtcaccttttaatttatttactaatcatagagaaaattgatagaaggttgttcaatagcacgtagggatgtaaatacattagttgtaagtgtttatgatcactaacagaccatttgtgaagtatataatggtttgcaacggtttacatttgcaacgattttgcgtttgtt

SEQ ID NO: 31500 - DNA, 466 bp, Arabidopsis thaliana columbia
tcaaaccaagcatttatactgtctctgttttcaatttcacggaaacaaagacaaacaaaaacagagcgcgtaaaaaccaaaaaatggagaagccgttcgaattccatggcgtggaggcggagaaagcggaacgaatgaggagatacaacaaccgtagaagcttcagaggcattcttcgtttagtcggcgtacttttctgtgttacttatggttcccgacggtggcgattatactacaaaccgtcggcgactggatttattggaccggagcggttttaataaccgatcgttccgtcgtctttttcttcgctaacctaatcgtcggtttgattttctttctctccggcgagagtaacaacgagagtagtagtagtaatgtcgaaacagaaccagatctctacgatcaatacacctcttctttctccaccgtgatcgcaaacgcctccgccgcgaaagttgatgataat

SEQ ID NO: 31501 - DNA, 562 bp, Arabidopsis thaliana
ataatttaaagttgaaaaagttgggtcataaagaggtaacacaattaaactctataaaagattatctatgaatataacatctaaagtttgtttatattattatagctcatactttttatgttatcttcgcagcttgtatcacatcattttcgtactttcaaatgttggaaaatcattttttactggcctctaatatttgtcatcaattttgactgtcgtttcactaaacatttcaaatcattaaagcaagtacctttcgagaccattattaacggttttgattcattagaaggatatattaggagaagactctaaatttgtatctatgtatcggaaaaacaaagtgcattgtaatcaaaatgtcatgtaagttaatatccaagagggataaggtgaaattggggtcatagatcattagaacttttaagcccattattggatagtgtccgccaataatcataaccgatgggtccatgcacgtagcaaacacacgcttcacccacaaccacaacaacagccactaccactaccacaaccacaaccacaaccagaacagtatagt

SEQ ID NO: 31502 - DNA, 1642 bp, Arabidopsis thaliana columbia
ccctctaggcgtgggagaaaacataaatgctcctctgccacgacctcctaaaattattgctaggcaaccgacctatgttccactgataagatgggcaaccgtactatagccgattacgacgcacctaaccggtcgtaatgctcctgactttgatgtgtggtagtacatgattcgaatttcttctctattcttatttatttatttgtttgtttagttaattaagtatttaattaagtaattagttaaattacctaattatttaattatgctaattagttgaggttaatgagttatacttagtataattcatgaactaattaggattagcattgatgtttgggaacattgcttgttgttgtatgattgcattgcttgttagttagtctttaattagatgactagcattagccgaatcatgaggacctgtctgtatgatgtgcgtcacgtgtaactccgttccgttatggcatacgaaggctcgggctggatcgccgaccgaccgggcgctatgtctcttatagactttgtgtctaagagtatggaggcatgtccttgggagatcatggattcgtagaaggccttacctaggttgatagaagcatgcttgcattagttatcctctacatattaagaaattcgaatctgcatgcattttgcattgtgcattatattttgcttgtgttgtgtgttgcgtgttatcttttttatatcttgcttgttaggttgtattattgttacgtgttgtttgctgcttagggggtaaggaagggtattaggataacactgtctagatctggggttcactatgtaattgtatattacttatgatgctacttattcttttcaggataccatagttgccaaccttgtagaggatgctcgtgacttaggacgaaccaatgtaggttttacggctttttgtaaattcttactaagtatattatgtatggttttcaaaaaggatccgaaaactatatacgttttggtaagcatttctcgtatatatatatatgtataagacttggatttctaaaatttatatggttatactgactgatattagtcttgtcctacttacacaactcgaatccgcagtacgggttgaaaagccttaggccagggcgagaggctggactcttacggttggacgactcgggcgaacgaattcatttcggaaacctgcgttggccgattgcgggcatttaacgtgacgctcctattttgtttatatttttatagcgggatagaggtgttacaaggtggtatcagagcatggtttatgatgctatgggaaaccatggtttttaatgttttatcgagtaaatgtgttgcaaaaagctattaggaaattggttcagtcacttgctagagtttaggtagattggcctataggatttaccctttttgtttaggttggcttacccttgttgttagtataataggtggcttacccttttacttatatttctgtgtcttaacctttttttttgtattatagtatgccgctaaaaagatctcgtggtagggagtctgtggaggaggagggacggtccttggatctgccgtccagcggatatgaccttcgtgagagagtcaggggtaggtgggtgaggaaggatgtggtcgagtgttcctgaattat

SEQ ID NO: 31503 - DNA, 521 bp, Arabidopsis thaliana columbia
agctatacttctttcctcaaagtcatcctcccaactgttaggcaccatagatgaagaagcttgtcctggtgttacccactaagctcttgaaacattccttatccttaggatcctccaaaatcttgttcagtccatcgagatggacttgaaaggaagatgttgcatcccaatcgatgaatgaatatgtatcctcagcaggctcttccttgctaatgctaggtactattctattgttagctgtagtagaggttcccttttgtgttggatggagattttgctgatgatgataagcattcactttgacatctgtcacttccattgcagcatttctgaatcctccactgtcttggtgtataggtggaactcgagcagcagatgtccaaggattttcaacacctttacatgcttgagatgaaccttcatttgttatagaatttttcttctcctgagttgaagaagcggtcatgtgactcagagctgatgagtaagatgtaccagactgtgacactgatggttgagtc

SEQ ID NO: 31504 - DNA, 323 bp, Arabidopsis thaliana columbia
ggtttacaataacataatttcaaatctcattgccatccaaacagaaaaataatttttttactagtccaaaaaattaggaacagatgtagtaagctttgatatccctaaacccaagtaaaaaccccaacaaaaagatattagtagaagattgtttttacaacaaatcaaaaatatagttttcaaaaaaaaaaaaaaaaaaggttctttagaagccccttgaaagttcgaattgcaagcagttgttgaaaaaccaattaaggaaccaagggttccgaaaaaagccttgggacgttccaaaccaccggatttttaattgcggcaaa

SEQ ID NO: 31505 - DNA, 1072 bp, Arabidopsis thaliana columbia
aaaataaaatgaaaacgtgggaggtatgagtgacaattttattgagttagtgcattagtgtaaaattcccaaaagagaaactctgacaagaaaagattatgagagttaaagatgaaattcccagtattccactaaaggtttaccggggaaatatctctttccctaagaggaaagcacgaacttactctctaagcttcccttttgtagaatagtaactcgaaaacttgctccccaatttttctcttctctttaagacacccactcacgtgcttaagcatcatcttcatttcaccacctgaaaactaacagcaatggcgtcaaatctcttcacaaaaatcccttcactctctgcaattttctcggtttacacatctctatctgccttcacgatcctcttcaaaaccattctctatgagttcattcccgtcaatatccgtgactttatcatctccaaattcacagactacttttctttttatctcaactccaatttcacgttcatcatcgaggaacagagcgattacgttatgaatcagactttccgtgcagcccaagtttacttgccgactcttctctccagaatcaccaccagaagtctcctcgtcagttcgagcgacctcaagaatccgatggctaaaccgaaattcggaatcccagtcaaagccaaaatcatcgatgaattcgaagggattcgtcttgaatggacacttctctctgcaaaagataatgataatccttaccagagtaaacaaaaacgataactttcctctggatgtaaccctaataaacggtaaaaccctaaaatttgtcaacaaaaagggtacttgtcaacataaaaccctaaaatttgggatcttttcactcactctactaaacagagttctaaccccaaaatttgatttttttttttcttttcttgtgatcactcttctaaactgagtctacttacgtttatttgtcatcaattcgtatttttgacgttctattctcaatatagaaccctaaattttggggggttttgtcacctaagtctagttacgtgttctaatgtctatgctgtgttttgtttatg

SEQ ID NO: 31506 - DNA, 513 bp, Arabidopsis thaliana columbia
attcttgtctaacaacgctggtcaacacctaaaatctcaccgtaaattccggaaacaatattaaaactttcacttccaagttaattccacacgaatcgattttaatcactcttgacatagagatacatatacatctagttctggattgtggattgcacgcatgcattcgaatcaaaacttgcttataatcaaatagttacaaactccaattccaaacaagatacgcacaaacaccatgcgagattgaagaagaagaaaaacgaaaagtcaaactattcacaaagaaaaagtaaaactcgatcggggaagatgacaaatttcgcgaaaggatcaaagaaacttacatcaacaaaacaacaaatcagagagattttgattttagctctcgcttcgaattcgaactgttgcttacacgcattcacttaaaacggaatttttttaattaaaagatctcaaaagggagagcaaaaacggattacgaactaataacgttttttgggcaaagcgtatttt

SEQ ID NO: 31507 - DNA, 510 bp, Arabidopsis thaliana columbia
tacattgtaggctttgtgattcgtttgatatatacatacatatactgtatgtttaatggattaagaaaagcgcattggattgatgagaagttgggtggtgtttctgtttcacatatagtataatgttaacacaaaacttgtttgtataataaagagaagtaaaggtttttttttttgtttttggattaaattggaagccaaaaaagtcagaagaagggcgcaaaagtcttacccactcatcgttttctttaaataatcaaatccactcgtcgtcgtaagatattttcctttcgaatattaagaaagatgagacgcgtgattattaattaataaagaaactttcggtcagcggagagaaggttcctttgcctttggtctctttttctaatcgattgattatatcttcaaataaaaaggagaaaagaaaggttccttgtttttccagacaaagaaaacacaaattcattccctcctcctcttcatctcttttgcagatatggatggttatta

SEQ ID NO: 31508 - DNA, 994 bp, Arabidopsis thaliana columbia
  unsure (1)..(994): unsure at all n locations
atagatattttaaatataatgatataattaaactgttaaaaatagatgactgtgtatttgtgtttgaaagaagattataacatgaagatagcgtctttgagaggcaaaactcttttaactaagaaaaacatatggtgcttccccccaccgtttgttctatttcggtgggcctgctcttttctttgttcggtttaggcatgcgggcctctttcagattttggttttgtatgttttaggttcggggcctgcgtgtctttttttgggttttcgggccgtgtattgtctttgaaatattatgaataaaaaaattaaaaaaaaaaatgtatggtgcttcaaccgtggttaggtttcatctccgcttgtgattacatggtcatggtgtcttcaggcggatttgagacatttgtaaggctttcagactccatatttgttaagattagacacaaacctaggtttctcaaggtggcaattgatggaagcagctaccttatatccgcagcacaacacgtgtggtagttgttgtggcgaggcaacttgaaggtagaggatttacgctaaagagtaggtgtcgagatcggtgagatattagagactgtaagggacaatgtctctaactccctccactaactacagttctttgatttattggcaaaaactcttttaactatttggcgatcctattccttcaacgaagaaggcatccacgaggactagtgaacgcaatgtgacgaggtgtagtaagtttcttttctttcactcaagaatttggtgtttggccagatagtttttttccagcaatggtgagtcncactctaggttttccagtggaattttggtcggtacgatgtgacgggtaaattgttctgtagcgactgattttcgccaatttgaaccattttgtatgtttttgttaccggttatatacactaatcgaatcttttatatatatgggtaagtaatcctgaaaatatcttttgtattaattataatagaa

SEQ ID NO: 31509 - DNA, 519 bp, Arabidopsis thaliana columbia
gggagtcattaatgaaaggttgtgcttatctacattttcgttgatccaattaatgagtttaaggatatacagtaattacactttcgcctattggcttttctaatttccaaaaaaaatatttaacgattttatcattaggcatgagaattcaagccatcctctaaaatgcaaacatcaaagaagagtaacagttaaaaaatgtaaaccacatttgcataatagcattaagccaataactccgatttatcacaaagaaaaagttaaagaaatatggattcatcatagtacattgcttccagataaagcattcactttttaatcactaatcttttggaacatcattaagatacttccaatattatacgttgaacatcatctaaacaaaagccaaaaaccaaaacacattcttaaaaactaaaatggtcatataataccttcttaatcatatactaatcttatctttttttcgcattaaacccttagaaaatacacactaagctcaggtccccacttgacaca

SEQ ID NO: 31510 - DNA, 502 bp, Arabidopsis thaliana columbia
ttgcgatactaatcatcctatggaatacctcatgcttcaaaagcaaactcaaaaaacaaatgctctcttttcgattctcctaaagatttcctctccagaaatagcacttttcagtttccaaattagatgacgagaaaaatcaaaagtataaaattacaaaataaagaccgaaacgaagacttaagctcaagacttgtgaacagaagtcaacacgtgtagtgtggaaaaacaagcacaagacgtgtctttggagtttgtatataaccgttacagtaaaaaacctcttctttaagtaacaacagcaacaacaacacaattcctaaatctctctctctctcaccatcaatggctctctccatctccatctatttcctcctcatcttcctctctcacttcccatcctcacgtaagtatcttctagttcctcactacgacgtcgttcttcttttcttcatctaacctttttcctctcttcctctgttttttgttacgacagatgcag

SEQ ID NO: 31511 - DNA, 583 bp, Arabidopsis thaliana columbia
tatttatgtacactatcaacatgaaatagaaaatggtagatattttatttggtagcaaagattggccaaccgtttcaaagtgaactaaatatgcaacaaattactagaagaaaactgaatgaaaatgatgagaataagaaaatcctgcttaccgcggtgatgggaacctgttcgaatcttcaactcctcaaatggaggagggccatcaccagctttgctttcctgagatcgagccaaactagcgtattttttcttcatctgccattcttcagtgagtgattgcacataaccgcccaagacagtcacctcttttggagtcaaacatactagaccatcacgtatcacagccttattttctagacgtacctgccaacgagacagtacaaaatatcaacaatacaaaatgatttatgatttgcatatgacaccctctgatgcatgacaaacacatatgtgcactagctttctattgatttagatcttaatccaaactattatatttgcatgagactttcagaaacatagtaaaggagaatttgaattagattgatatggaaatggaactaccttagtaccaggagtg

SEQ ID NO: 31512 - DNA, 635 bp, Arabidopsis thaliana columbia
tagtaacgtcgacagtgtgcccaaaatgtttttccataatttgatgccccaagcaaatgtttcttttttcataagtgaggcacggccttattggttacgtggttaatattatagaacaagtcctttaaaatgtaaacaataaggtctatttatcttaataacaaaaaagtgtctatttagtatttatcttatccaacattctacaacaatattgttacactaactaacgccgtagcctccggctcgttcttcttcttgaatttgaaccaaatggccagaaggaacatgagggtggtcaagagggcagcagtcagttccaggagttttgatagtactgttggtcccaaaaggcttcctctagtttcatttttctttcttgtgcttggttaattatttgtgttttcacaaagctttggttttgatcttttaatctctaggaatatatctttgtctgcttatctatctctttccatcactaccggcaatgttgactctacaaaaaaaaataattgtgatattttgaaaaaaacgaagttgatacttgagagttgagatgaaactgcttcttcttctgtttattgttttgtcatttcttgatatgtccagtcaaaagtaaaccaaaactgattagaaaa

SEQ ID NO: 31513 - DNA, 562 bp, Arabidopsis thaliana
gaatcttccatctcctgaaaatgcagctcaaactcatatagtatatgtcaaattgaaacaagttttttcaattacgtttctaagaactcttgctaaccagaacaggattgtaccaagtaatttacatgattaaacctgaatttgtactgatttgagcttacggataaatggaaacaatgtgatagtagtatataaatttgggtatacgtagttgccttgtgggaagcaaatcttttaccagaggtttctagtatcatatagaatgtatgaccatggaaaactaaacatgagcttaatggtgtttagatgtctcctattatttcatttgcttaataattctgtgtttttttttatatatgatcgctcttttgcttccgatttcctaaaggccaaccattattctcagatagagaaaagaagaaagaatggtgggaagtggagctccacagagaggaagtgcagctgcaactgcaagcatgcgtaggaggaagccgccagcggtgctgctggaggaggtgctctggtggtgcaccggatcatgcttcagtctacaccgatgacg

SEQ ID NO: 31514 - DNA, 591 bp, Arabidopsis thaliana columbia
gccttgagaaagaaaggtgaagagaagatatataacaaaaagaaaaaaaggataagggttttggatggggttaacactttggttttgagatttataaccaatcctggcctctccttgtcgctaacgccaaatctcttttttctatctctatctcttattagaacgttacatgtgattttgatgttcacattaaagttttaataacaatactccaatcacagtctcatgcaattcgaccgagacgaggtgatggttcagattcgcccacgtggcaactatgagagtggtggtggggacactgacctctttgtccgactccgttttgtttgtttacgcttcttttaataacaatcaacggttcgaatcgtctgctcactgcagtgtgcttttagtggtcaccactcgaagtcaattgtcttttttttaacaaaccacacctacttaatgtctctatacacatgatgagcacgagttataacactccctttctccttcttacgatacttacaacgttaaacctttaaaaagttgtacaccagatttttgaaattgatcaattgtgaatgatgtcacacacagatatataccacc

SEQ ID NO: 31515 - DNA, 858 bp, Arabidopsis thaliana columbia
gatcatttaaggtaaactggagcagtttcacgaatacagagcctcgtaaaggagtccttaacccatgtaggcattatagagaaagttttttcatggggcatagatgcaagggaaatcagaggtttaagtgtctggagttggaggaaggcaatggtaatgaggagatggaggaacaaaatgacgaagaggaaggtaacgaacaaggagaggtagtggaggttcagggaatgcaaaggctgtctctaaggtccatgactggattcgatgggaagtcagtgcgtatgaaagcaagaatatgaaaagtggagttcattgtgttaatagattcaggagccaccactagcttcatcagcccaactctagctaagaagtgtggactgcctgtgattgacactaaaacttttggggtttacgtgggagatggacgagttaaaacgggacagggaagatgtcagaacattgtggtcttagtgcaaggtgtggagattgtggaagagtatttggtgtttgacttgggtacaactgatctggttttgggggtacacatggttagagaatctgggggataccaagattaattggaagaagaaggcgctgagtttcaaggttcacaatgagtgggtgacattggtgggagaccttagtttgcagaagacaccaatgaccttgaaatcattggagaagaatatgatggatgtagagatgatttgtttgatggaattgagcaccttgtttgaaggaactgaaccaccaccggaggagtcaaatgatgaagagccgaaaggtgttcttaaacagtactctgatgtcttccagatgcctaaagggttacccccaacaagaaacagagttcactcc

SEQ ID NO: 31516 - DNA, 497 bp, Arabidopsis thaliana columbia
aaaccattgggaaacaaccacattccaactccggttgcgttgatatgcttcaataaaggcacataagtctatggtacacatgggttggttcactccaagagtcttggtagtcttgatagtctggttagtgtctccttcatgctcattgaaacggtttcgacctcaaaactgtataactttgacattgtggtggtttggtgatgtgtaggctctactttgagcagataagataggattacgcctctgttctgctctggcgcgtggctcttcttccttgtagcttttacccatttggaaactttgatcctgtacacttttggtggtgatgcttcattattctcagcctggtttaacaacaagttctactattggttgagcttgtttatgtttgatctgcatagcacctcaaataatctcaaaactttggacaagaaacagatgcattatgacttcttaacagatatataaacttgttgaatcgaaatttttagcgctag

SEQ ID NO: 31517 - DNA, 523 bp, Arabidopsis thaliana columbia
tgttgatcggatccttctgtatactctcttagctgcttattgcttactttctcatcattgatttgttgttgttattgcagagttttgatctctaaaatcgttggaaagcaaacacaatctcttgtctcgaaccagaaagatagagtgtctcaatggggaagctatagaactgcttttacagctgctctaaggtcgcctcagctcagaacttactcttcatctggtaggattccgagtaatgtgtattgtacttttgcctttagagatctcaaaggaagttttttaagtaatcatctgtctcgaagttatactactgcccctgcaagaaatgtagttagtcatcatgcccaaattgcttggagaaggcttcattataagtattctgagcgtattagtaccattgctcaggcgtttagcttgtctcttacccgttcgcacttgttaatacctgggatcgttgctgtcacttgtggacaagtagcatgggcacaaagagctcctggttcggggataaatcactatg

SEQ ID NO: 31518 - DNA, 432 bp, Arabidopsis thaliana columbia
agttaagagaaagaaggagaatttaaaactgacagatggagagacaagagttgttgtagttattaaagaagtaaattgtgatttataatagtaatcggatgaaacagataatgttaattaaagggaaaaggagtccccatgcttaaatgcttttgggctttgggttactcgtataatcagagatcaaattaaaacacaaaccccaatcatagaaaattttaaaaaggaaacaagtatagaacagacaatattaaatggtacatgaagacaattccgtagataatttacacaaattaacagtctgagaggattttcgatttaaccggaagttgactaagcactatagtcaacaaagatattctagaaacaggctcacacaagacaaagaacgaccagatacttatatcagcttcgttagcttgtatgctaagc

SEQ ID NO: 31519 - DNA, 624 bp, Arabidopsis thaliana columbia
tttttaaccaatgaaaaaatagagaaaccttgaacaaaaagacaaaacagaaaaagaattctccgaccaaaaaatatcaaaatggtaaaccaaaagggcaaagaaagaaactgtagcgccaatctaaagatttcccgcgtcatcggcaggaaatgctcaccggacgggagagtttgctccggttgattggaaagcgccggcgatttctccccaatcgccaccttcttctctccgctcatactccggtattaatcttttgccctcaaatttccctcattttccccccaattgtatcaaagtaacatcctttatcccaaatttccactagaattcgttaaatctcgagttcaacgactatggcaatcttgtctcattagccggagatgattgtcgtttatcagaggatccgacttcttcagatgacccgagtaaattctctggtgggttttaacaattgttttgttgtctatttgctcatcttcttcattagggattttgaagttaacaaattgcctcaaacttccttcagatgatttgagtttatcacgaggaagaaacggagattaactcagaccactcttcttcagtcaagtttcttgtcagtgccaaaacaattagcagatg

SEQ ID NO: 31520 - DNA, 340 bp, Arabidopsis thaliana columbia
agagcctatataactctactctctagtgttaagcatattctccactatctcgtaatttattctagtatcaaataaaacctttactatagaatctcaccacctaccaagaacaggcgcgacattcgagtggttaattcgttttaaatctagatcaaagattgaatctccctactacttccttcgatcttctgtctcttgccatcctgattcctgaatgtttcccactgtttgtagcaagcatctttgactttctcctcactccacacctggtttaaaatcttgtgaaatattcaatggtctcaagcagaaaccaaacttagaatctttttactagtccact

SEQ ID NO: 31521 - DNA, 493 bp, Arabidopsis thaliana columbia
cctactggaaattaggatccatatatacttgaagcttattgtcacaatagcctaagttgagacaaacgaaactaacgaaacaaataattcagctctgtgggtattgtacataactggaaaaaaaaaaaaaacttaccttatcttgcatttcaatgttttcttcgcattctgagccttcttctccttcagaatcagccatctcttcacactcaaactcaacatgttcttcttccatcatctcatcgtcagagtcacttaattcctcctgctccatcactatacctagattagattgatcagccatctcttcaatgcatctactaatattatcacttggtggagctgatccaggtacttcagagccatcattaagttgagccatgcagatgtctggagcttctgaaatatttgctgctgagacactaccaccattatttaccttagaagagcttgtacttagatagatatctaagttcacatttttcccaggtgt

SEQ ID NO: 31522 - DNA, 561 bp, Arabidopsis thaliana columbia
  unsure (1)..(561): unsure at all n locations
ctgttcacgagtacatgcattgagaaatttcaccatgaatacactcactcacaaacgtagggcttcacatattgtaatctttgatgtaacagaggctttgatgcatttgatttgagaatgcgtcttcctgacgtggttagtacactgtccaaagctgctaacaaaatggagaagttacattcgtgcacactgcactgcactactggaatgggaaagggttgttttttggtatatgggcatgaaagcttattgattgtaactctgacactgaaagtaaagtgttaacattggatggtaacaggtgaatattagataaaatgtatgatgacttgctactaaacacataacgactgtaaaaccaaaggcccttagcccattattataatttctattcagcccatcaaataaaagagttctcggagagtgtctgttgatcaatagccttttattttaggttgaaaaagtttcactanattaaagatattctgcacatgctcgtgctcaaaagatgtcacgtggaatagatgttctacgataatattctgaaaaaagaagaattga

SEQ ID NO: 31523 - DNA, 360 bp, Arabidopsis thaliana columbia
agaaaagaaatgtgttaggtaagctgaagtgttggaggggaaaaaaacacaaaaataaaagaagcaaaacaaatgttagaaacgacttattaaagcataacacatcaacaattcccatcccaatatttttgtggaagctttgtttcagaccgctatgtaatttgttcatgatagttaattcgttttctccattttgctaaagactataaatacatgtgttttgtctcttaactccatctagttgatgatatacagctctctctttctgttacgtatcttaaatctgaattttgttcttttacattgtcagatcaagtcaattcacgtcacatgttggatatgggcttcgccaaccaacat

SEQ ID NO: 31524 - DNA, 306 bp, Arabidopsis thaliana columbia
ccacaaacttctattgtcgttactctaagcgttcatatgaagctttgatcaaagtccataactcactaataatcacaagtggggtctgaacatggcagcttgatgagaagagacgaagtacgacgagaatgtagcgttaatctttggcgtcaccgggcttgtgggtcgagagattgtttagacgctattcatgtctacaccaggatggagaatctacggcgtaggcgtaacccggagatcaattccatgacgaaggtgtacgtcttcatctcctagcgatctgcttcacgcatctgagactagaca

SEQ ID NO: 31525 - DNA, 593 bp, Arabidopsis thaliana columbia
atatactcattatagtattcactaattattcctgtttaaacaaaattaactacaagtgggcacctttgctcacaataatgaattaaatctgtaaccagatttatcattattagttttcatctcattgttactcactataaattagcatttgctcttcttttttgtgcacatgatgaaaaataaaaacactgatacattgtcggggcttttgtacatatgggtatatttggatccaaaaatttgaagaaaaacacattctacttggacttataagcctgggtacttcttgattcgagaaatgacgattttgccctcaaatgtgttgatgagaaatcaattcgtcttctccgtcgtgagaacaacaatcctcactgtctccaccttctgcaatcctctccgtcgtgataatcaaatttgtttattaacatggactccacactcaatcaaaatcattacttttgactccatcaatatcgtttccttttcctccgttgattcacacaacgtttctatgactctttttcgatgaatccaatggaattaattaaataagatttgatgcaagatatctaaaccctaagggatgatgttta

SEQ ID NO: 31526 - DNA, 475 bp, Arabidopsis thaliana columbia
aattcacatgtcattttcaagattacgtgtagtcgtgtaatattctctgatttgagtaataccattacccaactctttctttctagatgaagcccatttttgtatacaaatctttcttgaaatcgtaaaagttcacgagacttgaaattcgagcatatcatataaaaggagcgtaaaagtctagtggtggtggaattattgaagttagtttattagtcaaaattaatgtgttttgactagattagtaaacaaaacacaaatctctactacgtgagaaaataacaagaatataaaatagcaaagtgtgaatataataaaaatatctaaaggtaggagagatgacgagaggaagaaggagagccgcagaaaaagagtgggacccgcaagaccttgctgtaagaagcagagtgtgtccttttgatacgcagaataatgaaaacaaagcgacaagcgagattcatcaaatccgtatctt

SEQ ID NO: 31527 - DNA, 555 bp, Arabidopsis thaliana columbia
ggcagtcctagttgaatctaacaggcacaggagatacaattgaagcacagcgtctgattttgtctctattatcatagcatccaggtaaggaaaagaaactatatcatgcttttgggacttttttttaccttctgtgggctgagatgtgtaggttctgaaagttgtggttctactttgtgtgaatcggttcagggctaaaattatcatttatgtcggattaactattttgatttcctcactatctttaagaaggaaaaaatgtagctcttttctatatcagtatatgtgagttcagacataggtgagaaccagtaggaagataaaaagtattcttggctaacagttatttctttgattcgggaaggttggagccggagcggttttgcgtggtcctttgcagaatgcatcaactggtggcctgtaagttctgaaggttcgagcgatccttccacaaaagtatttttcgttttattattttgttttgttgtattgacctctaaaatctttatggttggtttattcaaagtacccaaagctttactgtcacgccaagat

SEQ ID NO: 31528 - DNA, 398 bp, Arabidopsis thaliana columbia
aaagtcttatgatgaagttattataaagaatacaccatcagtttcatagtttcgcacctttccagcagatacattgttcagcgtcttgataagctctatccgagtttcaatgtctggtgtctgatcgatatactgcattgcttgctgcaccatggattgcacagcctgcaagtggagaagttcacgaaaaaaaaaatccgtgatgtagacgtatcactttgtagcctaacttgtaactataattttgtacatggaaaggtgaagctaattctgtctgaagtaactagaccaagaaaacacgcaaagcaaaagtaaaaccaacgaaacactgaaaatcaaactaagttaagtaataaagtgaactaaatacgaacatcactatctgcaatgacccaatt

SEQ ID NO: 31529 - DNA, 456 bp, Arabidopsis thaliana columbia
cataattaactattttttttaattgaatgaaaaagtatccaaaatccccaaaacaactacttatacatcacgtgatgcatccatttgagtttttgaaaaggattagaggaaaataatgtttaattacttcttgatacaaaccatatttgaatgaattcatcgtacttgcgtccatgaaggtcactaatggaggagatatataagaaaagagggaattagtgactgcatgatgcaactgataaaagcaattgataaatgttgtgactggattgcgaccttttagtggttgaatggtgactaaaacagtataaagtcgctaatatgtcggtagtttgagattgattttaaatatgtgtggtttagtcgccaaattaggcgactaattagctactaaacatgtagacaccaaattaggtgactaattagctactgtttagagacaatgttatttgattt

SEQ ID NO: 31530 - DNA, 522 bp, Arabidopsis thaliana columbia
ccatattacttgaatccacgtcaaataaacaatggtcattcaatatggttaatgcaacactcgagtaactttattttcaaagaaatttgcacaaagtcatgttatgatatggtgtataatatttgtgtatatatccggccaaaaaacataacaagttttttataaaaaaaaaaattaattatatatctaaaatatagaatagctagtaataaaactagtgagaaacaaatttaaaacaaattaagcaactatgttatttgccaaattgacaattttaaatattatggcgtatttaaaaaaaattaggagccacttgtgatttatttgtatcaactagtaaattttaaacataaaaatcatttatacatatacataaatattatcatatttatgtagaaagagtctcatcagtctgatagtcaatcacttgtgcgcaaagaaatttgacgaaaggggttacaaaaaaatggccagcacagcatcatcatgtccccgaccttatattataagatttgtatattt

SEQ ID NO: 31531 - DNA, 472 bp, Arabidopsis thaliana columbia
gatgtatttcaatatggtttggtgtggttcatcttcaaatatattatacagacaatatagagattatttgaaaaataattcttcttagggatcaagcatgaagcaatataaaaaaaaaaatggctcttgttgaaaggtaaaccaagcatgagtttctcgagagtttataaatggttagttttaatagtttacacaataacttatttatatcaatgtggattcttgtattagaagagtaaattgttgcttaaaaagctagaaaaaataaatcaattttgtattttgttagtattatgataacaactaacaatgtaatggcttgagtattaatattaagttttatgtgtccagtccaacgggcaagaaatgtaaaagaacccagactctcactttattgggcttataggtccaattaataaaacttaatgggcttatcccacaacgagtttacgaggagactgtgagagtttgt

SEQ ID NO: 31532 - DNA, 530 bp, Arabidopsis thaliana columbia
  unsure (1)..(530): unsure at all n locations
cctcatctctggttttttaacacatccctagattgtaagaagggcttattatctttgcttttcatattgtagaaggtgagatgcttacctttaccgttgaattcagctgaattcaaaggccatttagagccttcgttttgcatctcacacaaaataagaaatctttttaccattcaagggtaaactagtaaacttatataaataaataaatcacattgaaattgtaaagccacaattgttttgaaacagagagagatgatatgataatcgagctacagaaacacttaaatcccttatatcatgatttagcaatttatcaccagccaaaagtaaacaacttgagcttgacgaaaccaatgaagaacatggcttcgttaaacaacttgcgtatgacgaaaccaatgaagaacatggcttcgttaaacaacttgcgcatgatgaagaacaaggaggattcgttaaacaacttgagcttgacganaccaatgaaaacaaggctccgttaaacacttgcgcatgacgaaccagtg

SEQ ID NO: 31533 - DNA, 1311 bp, Arabidopsis thaliana columbia
cttttgtgattggtgaaagagtgtccttgggaatttttagtgttaccagtacacaatttctttcttttatgaaaatccaatgaatatgagccacgtggaaactcaataaagatattttttttcctctcttcttgaactgtacgtttcagatattttttttgttataaaccaagaaccaatttggtttagtatggtttaagatttacgtaaccggtttaaaactaactaaaaagcgcaattgaaattctgtttttaaccgggttttagtctttcagtctttcttcttcctctatacctctccgttttccgatgatggtgttgattctaatccttcttgtgcttatggttgttttgttttgtttctaccattttcttataaaatttcgccgctttcggagttgaaatccggtgaaagctttgcggaagaattcttatcggcgctcttctttgaaactagctcctcaaagtcttgtgctcttctacggcggcgggtggtctcttcgggaaacggcggtcctttgtcggcgatttcatgtggtcctcaatttcacacgtggcagtttctttcaccttctacgtgttactagtactacacgtgggttcccgagttgtttatgtataattgtataccataaccatgtaatgggattgttgataataataacatcgtttgtagattgggcctaagtggactcttatatgggccatgtaacaaacccacccaacaatatcgaagctgtaatagataaaatggacagaaagttcttttcatttccaataggaagtcaaaacgattgaccttctgttttcccaatacgagtttaacaagttctttggtttccaataaaaaatggctattacattttcttgtaatgaagttgcatataaataagtctcatgccttctaagaaattcttgcacttatcgactatggttatttcatagagagcaacaaaatcagtgtgtatttgttaagacaaatgtttatataagtcgtccatgcgttgtacatttaatcttaactaatacgcattgagtttcgttgctttctcgggaaaaatctctttgtaactaaacttttatgtacctactaaaaatctcatgttgagattcttcaagaccgaccatagattgttccatcgaatcatcgggtacacaagaccattccacggtctagctaaaacccaaaacgctgagatcgctagaccaggtttggttgatcaagctcgcaccgtggcccgagtggctagatttaatggggatgctagctaaaaaaggttactttgaagaaagcttgattccattgatgag

SEQ ID NO: 31534 - DNA, 426 bp, Arabidopsis thaliana columbia
  unsure (1)..(426): unsure at all n locations
nnnnnnnnnnnnnataagactcgaaacccatatttacatgtttaggaacaccaaactcacagagaaatgtcggaatcggaattgtcgtcacgttgatcgttgaggactggttcaatttagtggttaattagtctttggtttaggattaaaattgggttgagtggggagaagatgagctgtgttttcatttaaaagcccaagcccaaatacacttgagaaagaaaaaaacgaatgatcatctcttgtctcccctttgtgacaccacaaacctataaaatccttttctattctacatatccctttctctttaatgaaatgtgcttagaccattttacccttatcattaataaagaaaattcaaaatgaaataagattanaaacagagaataaagaaagaaaaaaaattcgaaaacgtggaaaaaaaaa

SEQ ID NO: 31535 - DNA, 518 bp, Arabidopsis thaliana columbia
tttttttatttgtattgtaaatgaataagtttaccaatgttatatttaacgaataggtttaccagtattgtcatttatctagtatctaattaaagattagaaaagtcaatacaaattaactatataagtaatagtaataacaaccacactgcagccaccagcaaattccattaacaaaataaagatctcgaaaatttgaacaccaatttacgattttttaacgtcaacatgaatgatatattcataaaaatgtgttgagaacaaatttggtcaagtcaagctttagatccgtaagaataattgattcatggcttcttccgcataaacacataaatcaaattgtatatgtgaatttcggcattgacaattttggtaacatatgacgtggatgctgagaaagtaattcttattggttattaacacaggacgcggatcgtaaagataccaacatttctaaccgttgataagccaaacagatctaacggacaaaacacaatcacttcctctctacctttgag

SEQ ID NO: 31536 - DNA, 291 bp, Arabidopsis thaliana columbia
acttgtgttatctcttctaaaaatcatatatatttcataagcagcattatagtaaatacaatgaaagacaaactccataaggtcatgtgcaatggcaaatttattcaacatcctactttttcactttttaaccttccacatcatcttctctttctttcacatcatcattcaacacccacataattataaaccactacaatggttttatttaaaaaaaatcaacactctactctacaattataatataataattaaaaaaaacttatatcccttcgcggttatgattgtata

SEQ ID NO: 31537 - DNA, 252 bp, Arabidopsis thaliana columbia
tccagctgatacaaactatcttcacctgtcatcacttcaaatgatatggaggttgcactagattgcacgatatatccaagcgattggatattccagataactcaacttggagtttatagattaaatatttcctcttatacgtatattgaacgtttgagttatggtaaggtcacaccaccttgaattggtcgtatactaacacctggtatgctttgagagacagtggcgtgttcggataataggttgctagct

SEQ ID NO: 31538 - DNA, 568 bp, Arabidopsis thaliana columbia
gatttgtccgtatttttcatttttttgtgcgaatacgatttctaatttaaagtcatgaaaaagtaaaattttcaatgttttataagagtctagctcctagtaagcctttcgacaagtttcctaagaatatcaaagacgctcttgagattgaaggttatattagtgatgtgtcaatcttgacatatgatgctgggaatatatgttgtttgaagttagatctaattaatttatgtgtgtctcttgagttaaaagatgtttgatctaagtgaaatcatgagaagaggtcgtgatcttgttcctcctttttgtacgtgccatggccttggtcgtgattctgaatttttcttaggtacattgctgacaattgaaggtcaggatgtagcaaatcaatgtatcatgcgatttggattacttaagaagtaaaagagatatcagtctcagcgagcagataaaacttgtgctcaaaatgatccacagagcagacgtacgatttaatctttcaattaatcatcaaatacgtaggaatgagtaatcattagcagagattatcaaacctagggcattgatg

SEQ ID NO: 31539 - DNA, 479 bp, Arabidopsis thaliana columbia
tagttttgtttggtactcacagattgtaactatagttacaaaagtttaaaacataaccttcttagtcaattcttggaaagacaacagttagaaattcgataacacataataactcccacaaattgtagaatcttatgtgagtcattgcactcttacaaactctacatatgtttacatacatacataaatacaagtgaagataaaataaaagattatttagttagagattcttgtgagtataatcatttttatgtgtttatgttgttgcagaagaagtcttttcttggagagatatgacagactcgaaagcaccaactaaagccttaactttgctcttgcgagtctgtactagcttattagctgtatccttaataactttgttgaacaacaacactcttgattctctcttcttctctgtgtcttggtgtttcagaacaactctgggtttgcgttgttgttcttgtcgatgcttaagttgg

SEQ ID NO: 31540 - DNA, 587 bp, Arabidopsis thaliana columbia
tgttttgtacactttttaggaaaaaaaaactcacaacaaaaaaatgtttccgcttttgatttcttctactcagatctgagtattcactgttactccatcttcttcttcgctttgattttggttacaaagtatctctcttttcgattttgtatctctattttgttcggggaacgaaacggtttttgtgtgttttctggtatttgttcatatgaaatttaggttttttcccgctaaatcgacatgggttttggtttgtaatcttcaaaatctctgcttttgttcactttagttgatgggttctttggctttcgttacttttgattttcggctctctcttttgattcatgccacttttgctttaatcactgcaccgtcgatgtctgtgttcgtcttgtttgtaactgttaggtttaatctccctctctctctctctctgatttatgtcttgtgtgtgtttctagggtttctagttatggaatatgtttcagcattgtgtaaaattgatgcttccatgacttttgcgaccgtatatttgatgtgtgtacttgaaagtgcaggcttttttcgtttaagacgaaatgtgtgtt

SEQ ID NO: 31541 - DNA, 614 bp, Arabidopsis thaliana columbia
ctctagaactctagaggtaccgagctcaatttagagatcgaagaaagtaaaacaacgtttgaaagaaaccgagttgagtttggatgagatttctgcaaagcttgaggaaagacatcgacgactctttgataggcttgaggtaactaagaacgagttttttttgtgtctttcttttataaacactaattatattgaccctatgttatgtttggtagaaatcagtacaaaaattggaactaagtgaaacgaatttggaagagtgcttgaaaagctacgactatgccattacaaagttgaggaagtgtggatgaaggaatcgatgaggaagagtagtactgagagaatcatgaatcaaaacctttggaataataattaattagtaaaatgtttctagaagtcttgttacggttttaggttcctttgatcctattaggactaggtcttatttggatgattgatacaaggtaaaacgttacatcttccttccatcaccatttggtttaccaagcaaattcaattgcttcctttgaaaatgtcaatttatgtataacccactactgcaaaatgaatgcaacgaatcaaatataattatattaatgtatgcatataatata

SEQ ID NO: 31542 - DNA, 543 bp, Arabidopsis thaliana columbia
gttaaacccaacaaattagtgagtttctatgaaagttgacaaggaaactaaaattaaatatttaacttacagtacatagagaggatagaaagcagttatttacctgtccaacagatggtaacccatcagcatcgatacgaaaatgttctgctttgttagtactcctcctaaaacttttagaaccactatcaaatcggctattctgatctgaaagatcaatattttctgtctgggagatcatataaagacaagggttaggaaattaaaaaaaaataagaaatttgggtgatttgtataatgatactaaatctctcgctgcaactacaagatttttttatggggttcataaaggaacaagtgtaggggacattgacctaggggacattgaccaggattatgataaagctccagacccaaaggaacttattacatcaagcttaagcactatattcagctaatcagcaggactcttaataaagaaatgagaatgggaactcgaacctggtatatttgccatggacattcccgctcccagatgatttg

SEQ ID NO: 31543 - DNA, 518 bp, Arabidopsis thaliana columbia
tgttgttagtcattgcaatattacaccataattttcttaaaaagaatatataaatgttacttgtagtatttcttttttgtatagtggactttgagaatgtttctgcctgagcttttggcgaatataactatgagggtgtgagagaaaacatagatgaaggaataagcgatagatcgaataaaaggaccaatgttgtgagacaaagtaataacataaactaaaagagtaaacgctagtaatagagaaaccgatatggtctaaaaacagaacactccaaaacatacatagattaaccctaataaaaaccattaatcaatttcatacagccaaatctagctggtgaaaaaagattcaggtttttttttacgcactagagaagaacaaaacgaacagtacggcactgagtacagttgtgaacgaggtcggaatcaaagaagatccatcgttccctgaagaaggatttggagctagaaatccggctgtctcaggtccagcagcagctacttcctggagcaaga

SEQ ID NO: 31544 - DNA, 464 bp, Arabidopsis thaliana columbia
atcaatcgggaagatgctgttgaaaggataagagtatggttgattcaagacctcttatttgtgaagatgaaccattgagtgatataaatatgaaaaactgtttcttcttcgtaggaaataaccggtgggatgggtgttgatgttgctgttgaagccttgggaaagcctcaaactttcatgcagtgcacactaagtgtgcaagatggtggacaagctgtgatgattggactctcacaagctggttccgttggagaaattgacataaatcgacttgttcgtagaaaggtttggggttcttacactctctctctcggccttgttagaagaaagtctctggtactgagattgtcgtttaagatcatgatattgaatctctattagttctgtttgtccaatctcttgtgaagatagaagttataggatcttatggaggaagagcaagacaggagctacctaaagtagtg

SEQ ID NO: 31545 - DNA, 712 bp, Arabidopsis thaliana columbia
cggtgatcgcagaataaggagaaaaaaaaataaaaaaaaataacgagaaataataataattgaaatttgaaaggtagcaaaaaagattaatattgatataaaattggagtatatattattaaagttgtcaacgtcatggagatacaaatttagcaaaaagaaaaagacatgactcacattagatgctgttctatgaactctatttattagcctatatttattacacttatcttttttcattaaccctagatggggtcaacaaaccatggttaaaaaaaaatattcaaccaaaaaaaaaaaaacacataatgattatgaatctcaaccacacaacttggatttctcattatcaacagtcttcaacttctcatctctttcttcctccatgagagacttgagtaaataatacatagttttaaatttccccttttctaatcttatctctcccaaatacataaacccatcccaaagatttcgagtttacaatttaaaaacagttttgtttagtgcaatctttaccttatctttacttctatcatctattcttcttcttcctccatctctagaaaattataatacttcttgtttcttaaatcttatttgtattacaataaccaaaacccaagtttacaaaacatttcttcttcttgtttttcgaaaccctaaatgttttgagttgtcatggatgtaatagctactacaactactatag

SEQ ID NO: 31546 - DNA, 420 bp, Arabidopsis thaliana columbia
caatagatttgagttgaagttgggcaaaactgaaaatatggtaatgttaagggtgggatctgatgagttgctgggaagaacacatgcatgagttgtttgggctttaaaatcacttcaaataattgtctgttttgtagggcacaatgtctcctttgttaggtgtaatcaaacctccttccatagacagcttgtgtaaaaattataatgtcctaatatttagttcccataattcttgattgtaaatattaatacaaatagacgaaatatatatatatatatatatattcatattagtatatacaattttaaattattatatacatattcaccagcctcgctattattctctttcagacacaataatcgaggaatctccatagattctattctccgacgccggcgaactgctcccctgccgac

SEQ ID NO: 31547 - DNA, 319 bp, Arabidopsis thaliana columbia
cctatccagtgaagaccaggtcagcctgtgcatattacatcatcctcacaggctgtatcagttccgtatattcaaaagaacaagattctcacttctagatctactcaaccacagccaaatgcacctccaatgacgggctttgctacatctggacctccattttcttatccatatactgtgagcatcatgcttttatcttgtatttgttattcggataaattattatatatgatacgttttcacatagctggaatcatgttcctgccgtttgtaccatcatcttatcctcagaaacaaccaacatccttggtcaaaccaa

SEQ ID NO: 31548 - DNA, 576 bp, Arabidopsis thaliana columbia
tccgatgatgattacgaatcgatcatcatcaaccgtcatctagatcattaagtagaagaaaaccaaagaagctcgtctcttatccgccgtgatcatcatcatctacaccgacggtgctcacatctgcgaattcgatgaactaaatcggagagtttgtttaaccaaatcggaaatttatgtgaaactatgctccaatcgtttgataaagggtgaaagcaactaaataacaactaataaatgagttaattaacaaagtggcaataaaaaaacaaaattaaaagaggaaaattttatctagaaccaacttgtatactgcaactagtacattaacaattagatttgagttaagcaactaactaatcaatagtttctccatttattcattttttccctttttttccgtcaatttctccatttattcagtttagtgtttcataatgctctccccgttttcttgggacctatgtattagtggactttacttggataggccaataattgggcttttcccttagttttttattcagcgacaccgtttttaaagatggtttgcttagctccgcagcaagtgggaga

SEQ ID NO: 31549 - DNA, 472 bp, Arabidopsis thaliana columbia
ccttcttctttttctcccttttcccccacctatcttccctttcttgttgctactactttttcttatttcacatcatttatatatacatcagtataaaaccattgttctattttacaaataacgaatttcaactctggacgtttaacttttttcatatattttgtagatgaagaactaaaagaggtgtagaaattcactcacttacttggttaagtggcctcggaagacgtagaattactgcgatcaaatactgtctcttataatattactatatatacgctttataagaaaatatatttttatttttttactatgcagctcagtctatccaattgatgcgattattacgcacactacatggggctcctactaaaaggatttgcctatttgggcgagtctaaaggatcaattgtatttcatcataaacaaatggaaacaaatatgatatgccgaatcttctaaccttagaaat

SEQ ID NO: 31550 - DNA, 399 bp, Arabidopsis thaliana columbia
gaaagttgttctcatcactggtgcttcctctggtataggcgaggtttggtcataatgcctttattttaaaattgtagacttaataacctaattggtcactggtacaatagtactaagtttcacacatttaatcttaaatgattaatttatatcatcatgactttcagtgctacaattatcagtgtattttcagggtaaaacattaggtttttttctaacaaatatatatatgaataagaaaatataaatgataaaacaaaaaaatacaaaaaacatataaacgatatttttgtgaaacggatatatattttatatggtaaaatgattgatttgagtctatttgcgtatatgaaatatcagcaattggcatatgagtacgcatgtagaggtgcatgttta

SEQ ID NO: 31551 - DNA, 500 bp, Arabidopsis thaliana columbia
tgtgttgggtcaataacaagaagccgtgaacgtatgtcgtggtacgacggggtttgaaaagcatgagctaactcgtggctgaggttaaaagtggaggcaacacttccctctgtacaataaagtcaaagaagaactcagtcaggcattttgacagacatgtggtgggcagtttttggagtaacgaaacgcgtacctggggaaggatggggaagatggtcgtcgccgagagagccctctggagaagctggcttgaaggtaatacagtgcggcatcgaaaagctgaacttgattcatcaatggaaagctactgacatcataacgttgactttaaatggtagatcaattgaaagacttaattattgtctttttcgtctagtcatattagtaaaaccataacaaggactcaaagtctcaaagagctgttactgctacgagatcttgttgaaggatgagtgtcatgagtcaattgttgagagccgattcatgcacaattactgtta

SEQ ID NO: 31552 - DNA, 543 bp, Arabidopsis thaliana columbia
tctcttcataatgagtatttccttgagcttactaagagacagatttcttgtcatagatattatagtaagaatcaaaacgaaggttgaaacttgaaatgaagacaatactctgcttcatttctcgttgtggtctgttacaagccgttaaaatttctcacctgggctcttctctgtttgggcctaacaatctatttcagcccaaattgtaacctagtttagtagttttagctccactcggttagctctttaaaccagaaacgaatactaaaccagatggacttgaaccaatattctcacagcaagcaacaacagccaatgatcaggttgcaaatatgtagctttatctactacacacactaacacagatatataagtttgatgacttcagcggtaaatatttgttatatgattactgaaatatgtatacttatcctagtatatgagatttctatttgaaaggtaacaaaaaagattagaaaatgttaactcctccttgtgacaccattagcattttaacttcaagaattatgttctgtagccatg

SEQ ID NO: 31553 - DNA, 227 bp, Arabidopsis thaliana columbia
gtgttagttctcaacctccaaggacgatctggtaggagggcccttgagctcaacagagacctgacggccttcatggttcacgactgacggttttcctatgttcggaactgatggctcagcggaagacgggtctaatctataataaaagtaaccagtcaggcaaaacagaaaataggagtcaagaaagcaaaattcctcaaagtcaagatactaaaccagaattcacc

SEQ ID NO: 31554 - DNA, 378 bp, Arabidopsis thaliana columbia
atgacaaacagaaatttaaaaaaatatgtaattttagctttcaatttccaaaccatatatatatagagatcaaattaccaataaagccaaatcctaaatgaggacgaattttataatttcgaatcttttttttgggtttgtggggttatatttaaatatattagatattcatacgcatcaatatcacaattctaaatttgaatagacatttaaaacaacatgcaatggatcaattttgttttcttcagtaccaattggtaaggatttggcttttgattaacgctagctacattacgctagaggagaacatcgaatcaacattattaaactaataagtattatttatgttgatctagactatatgattctaaattgaat

SEQ ID NO: 31555 - DNA, 969 bp, Arabidopsis thaliana columbia
ctttacccatgactaatgctgcgagacatggaaatcttttcaatttcccttgtcttttgttaaccctcaatgattcttcaaaatgctgaaataaaggtggatcagataatagaatattgtatcagaaaaatatgccacatacatgcaaatatggacatatgtgagagatgcatattattctgcttactcaatagttattctccgactatgcaagagaagaaaagtacgaccttacctcagagtcaaaagagaacgcaatctgtccgccgaaattgacagtgacagcttcgttttggctatgcaaaacaattgtcgggtatacaggacgcctaaattgcctggggattgtccctacgatagtgcgtttttcctataatcaaagaagtagtcatagatgtcagcaagtagaacatacgcaggggcatgtcaaaagacattgtgacatgaagagatgaattgtgtatcttgatatctacttttccaattgtaatgaaacatgttcagatagggaaacagttattacttacgtgaaaaagaattcttgtgaaaccgagtctataccgcaaccaactaaatcacctgttgtataggtgtcactggctttagcaacagttcgatcaccatctccattttgagagcatatgagtccactgttaccaatgtaggcacagcttctgacagtatatctaacattacagagaaacatgaaacagtgaattggaatgcttaattactgaaaggtgaaaacatctaacaaagcaaatctcccattaacttgtaagataccagatctaacagccaacacaatcaaattgagcagcaaatcacataacctatttccaagtaacgaatccaaaccattgaaacagtgatttgaactactgatctaccattgtatctaaacctatttcccaatttgttctctcagtctcaggtaccaaatcaaacagaatcaatgattgtattgag

SEQ ID NO: 31556 - DNA, 462 bp, Arabidopsis thaliana columbia
tggatagacaaaatctgatatttattgtttaaaataaacttagtttctattttagaaaatccataaataactttattttttattttaataaataaacagttaataacaaatttttattatttatgtttttgattaataaacaaaacaatatgttaaacgaaaaagaaaattatactaattttgtatatcaaatatactccattaaatctgatataatttccacatcacaaaaaaagaatctaagataattttaaaagttaacggtggtttgttactccattatctcttacgaagacgttaaagttgtattgttatgtttgggtttaatcctacatcccatcgacctcacctactcgttgccgcttcttcgctacagcgacggtacatggatcaagacggagagaaaagtgtccgtgccagacaatctgactgcgaagttgactgcctaagagatttgccaga

SEQ ID NO: 31557 - DNA, 442 bp, Arabidopsis thaliana columbia
tagatgatgccgattccctcaatccaatgaatctcttgtttttactccacattggcaatccacaatagtagattaagagtttaaaagaagacattacatagacaactagacatgcattgccattactacaacacgttttcacatactaacttcgattccaaactaccacgaatgcaatttaccattgcttcttatttacaattttcttgagactccttcattttgaatccatgtcttctccttcctcgcatttatcagaacacattaaaagcctgtttttagaattgccgacaaggaaaaaaaaactattctacactaagccacaaaaataacttaaaaccaaaataaaaacaaaaggaaagtgatgcttagattgcgatgtggtagggactcggtgagggttttggaagagcatgacaaaagatccgtgccattgatctct

SEQ ID NO: 31558 - DNA, 750 bp, Arabidopsis thaliana columbia
cggattttccggtgccacggactccacgaagattacagataagcttgagtgtggtcaaggcgtcgtggtcccaagcaccttgtaaccactgctcgagagagtgtttaggcgtgcttggaacaacgtggaagaagaagtcgaggcaggggttgcctgaggcagaggtaagtggcggatttattctcggtgtagcccatcggaggagagttgacgttgttgactctagctgagttgttgaaatttgaaaccatagcgtccatgaaagggtcgctgggaccagaagttgtggtgggttttgggaggagagagttgggatctctgagctcaggtggaccaagcagaggagaaggagacatggtttgttgtttagaaattagaagtgatagatgacaaaaaatgatttagaagaagattgtgttattgaattgaggagactagaggctgcacctaatatagatgtgaaataagccgactaccttagctagggcttccgaaagttgtcacaaactaataaggataacatctattcacaaaagatatgagtatattaaagttatccttagaggttgtgtcggtctttatgcaattcacttacttggggatcaagttgtttggaaagactttcttttttttaggatggaaagacttttttaccttaaatttgtattataattgtcaaagttgattggttagagatcccttttttccgtggaggcgaaagaatcaacaagtttaaaagtctcatttatt

SEQ ID NO: 31559 - DNA, 593 bp, Arabidopsis thaliana columbia
ctgatccatctccaagataggtatgccactttatcttcaacaattgatatcttaaaagtttggaaatctacgggtttgctctaagatactatgctaaacacttcacatatgcagatccgttagttcaaatgaaaggggatcatatggttcaaaatcccatatacaacaggaagttacagatctctgtggcaaattgtcacctaccatagataggcttgcattactgaatgaggtaagcctaatcgattttcgagagttttcgattatttatgtgctgaaagtgaaaggtggtggtgacccgatttgtctatcccagggaaaagtaggacataacctgaaggtgttccagagactggcaacgactgtaaaagaaatggccatccaaaagtgtgtatgaaataagcttctcaagaaatgtatttttgtgtgtcaaatgtccaaatctaaatttgtagtatgagtctgtataacaaaatagtaaatccacatgatttcaaatgatactttctctgagactcttgagaaaaaactttaaaagctccagcttaattttaaagttatgaaagccacaagttttaccattcacactttta

SEQ ID NO: 31560 - DNA, 626 bp, Arabidopsis thaliana columbia
  unsure (1)..(626): unsure at all n locations
cggtttcatattattgcttttcatttcattatattccatttcggtatttatttttccataaattacgaaaaatgcttcatgtgtttttgaggactcaatgtatcatgtgtagggtaaatgatgacgcagataaacaaacagtggaatatctaactttaacatgttctttttctgaatcggactcaaaagaaagacctgattgcaacatatgagtcacacactcacatagagaaaaagattccaatcgtatcaaagagtgaaccgtattatggtttagtcaatttgacacaaaaccggatcaacccaatcgaaccagcctcaatgacaattttgggaccgacttttaaagacgtgtgtctctttattgtcgccgttcaattggtaagaggccacggcgtaatcgtaggacgacgacgaaacatatttttctttagtgtttattttatttttgtgttgggtttcagtttcaaagagtcccaccaatgaccanaaagtgctccaatgcatgattattacgttggacctcttcgatagagagatttttgctttctcaatttattattttttgtgcnctctctcgcctgatttggagtttttagggtttgattnttgtaatgtgagaaagg

SEQ ID NO: 31561 - DNA, 482 bp, Arabidopsis thaliana columbia
catccctgttcttgttctgcatttgagcttgttttaccgattggtaacttctttgttcatgatctcttactttctcatcatcagctttacaaaaaaaaacaaaaaaaaacaaaaacaacttgctgacgtgtcaacgaggtcaaccaattaaagtctcgaaatttatagcaatagagttccggttcgaattttccacctgaaataaaaattgtggaagaaagatcaaatctttgacgacatcaaggaggaggatttggtaagctacagataaaaacaaaagctatgatatgagataatgtagtccaccaccacaccaaattcccccttcaccgtctctcttcgtcggtgattcacattccgatttggtgtcttttttactcttaacaagtcctcaaaaaccctacttttactcgagattttgtctccgccgccgagtaccaagtgcctcccgatctacgccccaatccctaaatggctacgga

SEQ ID NO: 31562 - DNA, 852 bp, Arabidopsis thaliana columbia
caagtttctttcgaagctttaaggttttactattttgggtatgtcttcacttcttaaaatggaaagttagttactcatgtttcttattagttgatgttttggaaatgtttacacaaagatataaacacattatttgtgaacattaatacatttatctttatccttttgtcgttttcgatacaaacaaaagcctaaacagctaaaagattgaaaacgatttagaaagatagagatgtgacagaagaagagagcatattgaatatacaaagagcaatctgaccaaactcaaacaatttgtgattctcatcaccaataggagacgtccacgtcgtcacacctccaccaccaccgtcaccgtcgtctctttccctgaatccattctcacaagtcacggcggattccatggcggcgcttaccatcacattaaccgtacctaactctttccttgtaataaaaactctcactgcctcctccaatctatccgtcgcgtcctcgtaaagctcgaggcagtcacggaggcaagcactgcggaaactaccgtcgtcgtcgcttataagaagctgttgaatggtggaagctgttgcggtggcgttgtcgagagcttggagcattggaacaagggcaagagaagaaagattggtcggagaaggaagagctattggagagttgttgagagaggagacacagaagttgtaatcgaagatcgtggatttggctgccaagatttgcaggtttggtcgatcatatcggacgttgactttacttgtgagacaaggaagaataagaagataatgtagaagacttgagagagcttcattgtttttctagttatgagatcttcttaatcttttg

SEQ ID NO: 31563 - DNA, 454 bp, Arabidopsis thaliana columbia
caaaaaaaagaagataatcgaaccggatgataccgagtttggttcgtatcggttcagcagcgattgggacggttgagacgcaattttattatagtctgaaacatttttaccaaaacaattctgcaatttacaaacaccggtacatctctaacacctttaaaacatattttagcacattcaaacaaattcatatccaaaatcattaaaaaaaacaaacagaaaaactccaagtaggatactcttttgaaattggtttagtgataccaatcggagctgctgcttctcgcaactcttttccttgattgcgaatgtcctgcagataactcacaatattaacaattccaaaacaccacacaacataacaaatccacagatttttaaaattcattgatttatattagaactatgaacttgtatgtatcccacaccacatgtcgttgattctactacttat

SEQ ID NO: 31564 - DNA, 703 bp, Arabidopsis thaliana columbia
  unsure (1)..(703): unsure at all n locations
caaatcctgatccgagggacccaagacagttaattgaaaactgacgcatatatatacacaaacaaataaatgcaagtgacttatgtgtatatagattttcttgttagagacagacaaaaaatatcttccaagtgccaagaacagagtctgtagttgtcttattctcacttgtgaattgttattatttttctcccgtaactacatatcgatagattgttccacatatataataaatatatgatgccaagaaaacaaagaaaaaaaagaaagagaaaacagaaaaggaaggtccccacttttgtctaaaaagataaccacaaacctcagagacaatcaaagagacaaaagcagagtttaacttaaagagtcctgtcctcctcatcatcacgtctctcccgaacacaaattcaaaagaagacacaaatcgacgccggagactcatcggatgcatcgactgctactggaatcccacggcggcgggaacgagacgagcggaacggcngggggagatgggtacacgagggacatgaacttcgacgcaaacatggtgatcatacttgcggctcttctctgcgcgctgatactagcgcttgggctgaattcgattctccggtgcgcgatcgatgcggtttcgggttatcacctctgcggcggcggggaaggtggcgacagagctggattaaagaagagagactgaagaagt

SEQ ID NO: 31565 - DNA, 639 bp, Arabidopsis thaliana columbia
ttttggtagtttaatccaccaaccctacaagtacaaatacaagatactaaaacaaaaacagacaaaaaaaaattcaaccccatgaataaactaaaacaaactaagagtcccgcccacccgggcattgcggcgtcggggcaatagacatacacatggccgccaagggagtattatgggttgaatatgggccctggatttggatgtcaagtatttaagtgggcctcagacataacaaaaaaagaagagataatggcatgtgatgttatcattcactagattagtcatttatcacaataataaagtacacaatctagtcataagagtaataagatctcaccaaaacatcaacctcttggatggaaaatgagctagtacccaagaaacgtgggagttacaccaacctggttcgcttacataacttcttttatatataaagaaaccaataatggaaatgaggctgacgcaggcatatctgcgtatcatttgtaaatgtgagtgtagtgggcgttgttatgattcaccaaatagtttgttgccacttctgatgatttcatccttaaagattgtttcttctcagtgctctgttgttgtaatattcacctccttcttttcctttactttatattttacttcatttta

SEQ ID NO: 31566 - DNA, 557 bp, Arabidopsis thaliana
cccctagttacgtgtatatacacatattcgtataaggtcaaggtttctatacatgttttaccagaagtttgtgaaaaacaaattctacagtaaaaaaaaacttgttcaaggtctccctcacacaatcatatacgatgatatcaatttattgagaaaaccaaataaaaacagagaggttggagagttcatcatctttgtttcactcagtctataaacttgtccctattcaacaaatgctcaatccctgaaaccacaaaaagttcaccacattttttcatctctgactcaattaaaccaaaatacgatgcatagacacataaatatcatatagtaagaggttacctaaatcaggactcgggaacagtatatgctcataagactcaaaccctccagaatcatctccacacctccctctctcctcagttgttgtcacggccgcatcatccgcctgactcgaggtaattgtcgttgtcggaggttgctttcgtttggaccgagctcgtcggttttgaaaccaatggtatacatttttctccatgatttgtcatgtcagacag

SEQ ID NO: 31567 - DNA, 786 bp, Arabidopsis thaliana columbia
tgcaactccttttctctagatcgtaggtaggaggatattaggttaatttgactacgctagagatttaaattagtacgctttcgaacaagtcaaaagacaccatcgggttagccactaagaaagcaatcatcatatacatcaattaattataatactacttatatacctgtactatatacactcatgcataaaaagtaaaaacgattctctctttatcaaatttagattctggatcgttaaaaagtagtaaaaaatgagaaaacttttacaagataaatttgatgagtcaccctcatcatattatagttagaggctaataatttataaataatgtcaaaacaattttctctatgtacatattattacggagcgattacatatatcattcacaactttagtcattttgttaaccctaatataatgtgatatcaaaacggaatattaataacgttatacattacaatttttgtaataaattttgattttaatcactaatcagttacttgttgccattatattgatcggggatcccttattgataggcccaatatgaatgagctcagttatattttgggttttttctcatagcataaatggcccaatgaaagcctattaagtgatcgaaggtcagacgttggactccttgtatgaaaccaacagactaggcccaaattatcaactcaaaattgaccgtaacatatacgtgcgcgtttttgtagcctgagtgtgataaagtgagctgttaaatcttcacttaacccatttttaatccgaaattagagtggt

SEQ ID NO: 31568 - DNA, 504 bp, Arabidopsis thaliana columbia
tgttaaggctctaacttttactctattgctttaaaagaaatatgactttttttcttcaatgacataaatttgaggatttgggtcttcttttgtaactcggcccaaatgttttaaagaatttcttatggattggagaaaacttttgtggaaaaacagagaaagccctaaagttaagagacatggaagccactgaaacggttctttgcacgttgcttgccgtcgacctcacagattattgctatagagtttgttctcgctgccagagagttcttccttcagataacaatggctttgcttcttcttcattttgcaaattctgcaaatcaaaagaaccaaaacttctctatcggattctcgtaagaaccctttcatcttcttcttccttctaggtttttgttttctggtggaataatctgaaaattttgtgatgaattagggttttaggtttagcagctgttatttagaaatgggctttgtcctttgtagagaatcagttttgggggg

SEQ ID NO: 31569 - DNA, 1451 bp, Arabidopsis thaliana columbia
taaagaaatgagtataattttaaagctgtctgcaggtacttttggactcgtaatatgatatcttcttgattgaaatgtaatggctttttatttttgtgtgaatgaaatgtaatatgctttaaagaaagaactaaatacgaatttaagacttcattcttttattgatataacttaaaattctaatgaatagataaaaatctcaaataattattaatataacctagattcagtggaatgaaaaactaaattcatagacagatacgtgtgaaattaatcacatgcaaagacgcgaggtcatgtgccgacatgtgttaactgtttattaccctccttcatgcactctttactctctcgttaattcccaactccattgactgatccaattttttctctatcttatttataagtaatctcgatccatgtaattatactatataattaagcagttgcatggcccatctctattcttaatctccaacaggctttaaaatcacaactctaattacatgtctctaatttgtctccttgtgtctccccccaacgtgtccatgtggtcgtcttcctcattagtactatcttaaactctatttagctcatttaatcacattaattaactctgtttctcttttttcagacctctctctctctcctttttttcattatatattatctccatcatctataactctcacaaagtccaccactagctcgaactctctcctctcttaaacttatagacaagaatcaatcagtcacacgtctataccacgatttgctcacaaaatctttggcttccaccaaagattataagcagagatcattcacttactcgtatcaatagatcaaatcttcatcacaatagaagaaatggttttagagacggtttcaaagacggaaccaccaccgttgcttggacctcgtatctccttctcatctgatttatctgacggtggagatttcatctgcatcacccccgtaatgtgtaaggaagatgtcgtcaaagggtcagtgaaagtctccgactttgagttcttgtcgtcggaaaatgtgagtccacagagaatgcttaccgccgatgaactcttctccgaaggtaaattgcttcctttttggcaagtaaagcactcagagaagcttaaaaacattactttgaagacgaacgaagaggaagaagcagagaaacgtaaagtggaagtgaagaagaaagatcaggagattaacaatagagataacagagtgacttggtttatagacgaagatccgtctcctcgtcctcccaagtgtaccgttctttggaaagagcttttgagattgaacgaacagaggaatccgtcttcttcgccggtgaccgatggacagtgtcgtctttgtctccgtcgtcgtccacgtcatcatcaagttcacttgaggacgcagcgaagagagaggagaaagagaaagaagggaagaga

SEQ ID NO: 31570 - DNA, 564 bp, Arabidopsis thaliana columbia
caaaaaaaaacaattacagaaaaaactaacttagtcatgaaacttttttttgttatgtattgtttcctcctactatgtatttctatttaatgaaaactctttaacaaaataaacattgatgaggtcgaagtagcgggaagacatgttcgtttcaataaaccaaaccttaacctccaattagaattgactatgtctcaccgtggccaaaacattgactcatgtaatcatgtgtgaacacgaatcagtagtggtacgaatctagtttcttgtaatttgaaagtaaagattaatactatttaattccagtgtggtatcccaattatctttatcttgtcatgacaatgagatgatgtgattattaaatatcatgacatgttcatcaaaactaaacaaatgaaatggattaacttgagagcccaaaaatgccagtgagaaccaaattgctactaaataagtcgtaccaacttaatgttcaaatcactgaattgtacacttcttgcatgatatagacccatattggaactcttttatagtccatatatcaaaagagagtaagcgaggtat

SEQ ID NO: 31571 - DNA, 1091 bp, Arabidopsis thaliana columbia
aacttctattacctcggaaggatagtacgtcattgacaaggtcctagtgctctctggtttccacacagcataaggtatgtttgtctcatgccaaataagcgcaccttcattgccgaagtcattgaatttctcatgctccgaaagatacccccacataccctgacacacaaacacacaaaacggaaaaaccctaaaccacccagaagttgaaaaactctgattcgaagtttcgaaccaaaaagaaacgtttttttttttgttttggaagaagagagaaacgaatgaaattgcatatattaacgaataagcaagtaatcaacacaattaaccagaagattactatgggctcgccctctgaaatagattggacatgagatgagtaggcttggaaggatccgcaggtttttgtttgggagaaaagaacttagaagcaaagtaacagaagacggcgattcttatgattccggtaattgtctgcccaaacccaccagcttgtcgttgctgctgcccatctccgccctcaacaaccgctgctgtttcacctgccggcgacgccataatcgcaggaagatgccttcgtcagtgtgattcaagctgagattattgtaactttaccgtgtgagagatgtgtaaaagcagagtcgacgaaagatatatatatttatggaatttgttttttttcttctaattattcgaataagaatagaaatagtaaattttcatgtaaggacctaagtaaattaatatattcttttttagcccttcagttttaattaaatcggaatagtccatatatattcataattttcaattcactcaagacaaaaactgtcgcttgtatgtggaggagatggagactgagagacaccttcattgcttgataaattgaggagcttgataaagatattgctttttcagtttctctatgtctgttacatctcgacaacgcttatatctagagaaactgttcttgcatatcaggtgtttgtgaaaatgtctgacccaatgtaacgtagattttttgctaataaagggccgttgttgggatattcaggggaaagatgggccctttacggcaatttgttcagaat

SEQ ID NO: 31572 - DNA, 737 bp, Arabidopsis thaliana columbia
tctaaaactgcgtttcctgagaagatgttgtctgcgcaatcgaagtgacacgtgtataaattgccacgtgacgtctccgccaacgcgtttggataaattacgtccactttttttgcttgttgggataacaacaaaagtgacatgggccttacaagtggtaacggaactcccacgtgtcctataatcacgccccgttttagttactaatacggtacgccatgcctcacccaatttttacctcacctacactcaactccactgaagttagctcaacattctttttttcttttctgaaaacaaaaattccgatttgtttctttccgttaatttattccctacgtatttttcgggtagaatccaggtgttttattaaacgaatcttatcgatttatttgctatagattagcatgggaagagtgattaataaataattaagataagatcatgattcatgataagagataataaatttaaaaaaatctagaaaatttgataaatcttcaagaagattagtaccaaaaaaaaacgtaattaggcgtgtacgcgtttggtttaaggcgtgacccacacgactcgtggcgcgtagtaacacataagtcagctccacgggaaaggtatgcttctttttttaattgtttaatataagctaaaatctatttgcgggtttaccaatttgttacttttctggttattgactttgaaccggtctctcactctttgatgaccaaaacttatta

SEQ ID NO: 31573 - DNA, 760 bp, Arabidopsis thaliana
gctttcacgtattaatggacccttcttgcgtgcgactcacgtgtgaatactgcaagacacgtggcttctctattcaacgcgcaaatcagttacgtgtacaatttatccgcctccttcggatccgaatcagcttcctgatttatttcccgtcattacccaaattcgccggcaatgttgtaaaaatccctaatccaaaactatttcgtggattttagggaaaaaagagaattcgaacaaggtcgtcgtcgtcgtcggatttgtagatcatcatggagttctctttgatcgcagatacagtcacagtttgcacggctaagcaaggtatcgcgtttgggaaatctcttcttcaaaggttggatttggccaatcacatttctttcgccgattccgttgttgatcatcaatctcccggtggaggaatcgttcaagcatcggcgattattttccccgtcgatgcaattgctcctccaccggtcagatctagctcttataagacaattcgccggatccgtaaaaagcgacgaaccaggcgagtttcgtttggtggagatggagatgacgcaggagattttggtcgttttctgttagaaggtgatttcggtggtagcgacggtccatttggatttggaggcggaggaaacgatggaggcggaaagggatggaactacggcggctgcggcggtggtttcgggagggataattgggatgggtctcgttttcgcttggtcagatcgacgatggaatttgtgtatgaagtgat

SEQ ID NO: 31574 - DNA, 548 bp, Arabidopsis thaliana
aatcatcgtcgaaagattttcggttaatatgttgataatgaaactcaagcagttgatttgggatttgaaaccggagaagaagtacttgtagaggggaaacagttacttgaagcttctgatggtttggctactcaggttttggatctttgtgatgatgaagttgttgtggatagtgatgatgatgttactgatgtgttggagggcaacagtgatctctctgatagtgatgactcgggtagtaaagcggaaactgtgttatctagtgaagagaatagacaggatgctaatgaaaaggttaaatcagcagttgtctttgatgcttggtcgaacgaacatggagtttctggtgagtttcttaccaatattgcagagtttgttaatgaatattgaaattttaagttggctacttaggttcagtatagatttatcggatcacaatgtcttgacctaatcttagttgcttacagcctataagcatgagagatatcttcgttaatcagttgcttaccacctctaagtatgtttttgatatagtttgtacgccattg

SEQ ID NO: 31575 - DNA, 540 bp, Arabidopsis thaliana columbia
tcgttaatcagttgcttaccagcctctaagtatgtttttgtatatagtttgtaactccattgttaatgttcatgtaatcttttagaagatggagatcttaatctaattaggtagtcatattttcctgtgttctattaacaaaccattggtagttgcagacttgcagttattttaagacaatatctgccttgcattcttttcaagttccctctctcatttgcacttttccaatgacctttttttcttttaccaggaaaaaaggtggctaggttcgcttcagttcgttcagcagcttttcgtgcttctgctgtggcagctcgtgttgcaaaccaaaaatctgccaacactgactgttctacactaatcaactgtcattcttctgggaaaggaaccacacataattctggtctagaaaatagtgttggggaagtagggcatcagcaatctcttaccagtttatttgttgaagagaaaaaggacttaagaacatggcgtaaaacagctgaggaagcttttcgtagaggattccctgaagaaaat

SEQ ID NO: 31576 - DNA, 1032 bp, Arabidopsis thaliana columbia
tgtagtaaagaaaatggaaattgatgaacgcaaagataatgctgatatgacaagtgatcttacgggaacaattgaatctgctgattcagcaatcccaaatagtcccactgaagatgctgctccaggtgaagttgaaccgttggatcataatgctctttttgatccaacttctgatattaccaactttattgatttcagtggtgtatcatcttggtcaggaaatatacaagaccttaaaaccgaaaccgggaatgtatctttgaaagaggataagaaagttactgacatggcagaggacgttgtcacagcagatatagaaactgaatcgaatgaagcccgtgttggtgttggggcagaatctccagctgctgcaactgattgttcaaaagagacttctgatgcaactttgggatctgaagaaaaccaacaagataaggatcatcaatgcctcgacaagaaaacagcagatgtacaagatacaatgatagaggaagatgacattactcatgaagctccaagtttcgacccaaaccaaaaggaaaatgcagaaatggaagaaaatcacaacaattttgtttatgctgatgatgaagctggttctgatgttaagaccaatggtgtgaaacgaaaggctgatgtcctgagtgaggattcaccaggagaaggtaggaagactgtttcattcgccaaggtgtcttttgccgaaaggccgtcctttaaaattggtgcatgcatagccagggctgcaagtcagatggcaggatctccttcagttttgaagggtagtaactttggtgatgaaactctttctgttgagagttttgtatcccagcttcattgcgcagccacagaccctgttaaaggagaacgttgtatctgacattgctactggctttttcttggatttccgaaactcatcagcatcgcagcaagttaccacggaaaaggtaagcaagaaaagaggtagaccatccaattctaatgtagcaggaactgaagcatttgagtttgaggaaatgggcgacaggggat

SEQ ID NO: 31577 - DNA, 616 bp, Arabidopsis thaliana columbia
tgcatagtatgcgacaaaaaatgtaaaaacaaataggatctttaaaagatgagaatgtcggacaaaaagtgcgaacatcagattcaaattatcagattcaaaacaaaatacgtaaaacctgatatttattgagttattctgttgtaatttttctttttagttttgtaaaaaaatgtttttgaaataagaaaatatgtgatttaataaaatcacttgtttaaaataaaaccgagggtacattttaactcatggcaattttgttaattatgtggtaattcattaccatcttgttattctttgttaaataggtattatatattgcgtggcaactattgctatttatttgctattttgtttattattgagtaattcttttcagaaaaatgtttacataattgaccttaaaaagcaaagatttttaattttaatatatttttctccatttaaaaagcagataccagtcttttttttagggaaaaaaatatatttaaataataaaaaatatcactacaatatcgctttccttctataaataaacttcgaagtacactattctctaatcattaaacactatacaaatgacgaaaccaagaagaagaagatggtgaaactggag

SEQ ID NO: 31578 - DNA, 690 bp, Arabidopsis thaliana columbia
cgttgttgaatgtctcaaggagtggaacggagctccggtttcaatctgttgaaaatctttttcgatagatctacatccaagattcttaccaactttttaatctactttacatgatttgtgttttatatatttcttgatttccacgaaaatgaacattgtcaagatctgaaaacctataagttgtttgtttgtatgttgaatgcagtgtcgttttactattcttttgatccattatgataaaaagtcgcaatggagtgttgttgctaagaaggtgttggttggtatagtgccgattggaccaatttgagtctaagacacagtttttggtctggacacataatttgtgtatgcagtttcaaaacgtgttttaatctcatgcttggatacaaaaaattagagaagaaatcttcattttgggaaaaagagacgaatttggggactagttacttatttaataaagagtgttgttgggagcaaaaacagggagataaatagtttctcggcaccgcttctttgtatagcacagaagtgaagagcaagcagacgaaaaaaatggcgactctgtcttcctatctgttatcttctcctcctctatgcaaatcccgattctcggcaacaagtctcgtctcaggaattgatttcatctctttctctcctcgaacaactctctcctcgtcatccactgtcttg

SEQ ID NO: 31579 - DNA, 509 bp, Arabidopsis thaliana columbia
gatcaaatatcattattttaagaagtgtcatatacatatattaacttgacatgtatgtttttactttaccaaaacttgatacaaattaaataactactcaattatttgttttaaatagagagattggaacgtgcataaaggtgtttttggttcaccggtgccacaattattgaaataatgttttcctcctatactaaaaaataattatgaaacagaaatgggagcggtccgtccaatgattttagatgtcttaatattagtttacttgtgttacaagattctacaaaaaaaaaaagaacacattgacatttccacggagtccattggtcattttagattaattaactacgtagttggataatttaattgcataaacaataccaaacatggatgtcttgtccagctttctcgtttgttacaattcggtttggaatcttgtgtactaaatataggaatcgaatctattgtgatttggtttcgcttacaatttggcgtcaaagaatgaaagt

SEQ ID NO: 31580 - DNA, 793 bp, Arabidopsis thaliana columbia
aaaaaagaaaaagaatgtcaaatagtcatttaaatattaattttaatctttgtaaattcttaaaacttattattaatctttttattttttaacaatggggttttaataatttaaaaactttttagaaaactatttcgttaaaaatacaactctaaatcttattttcaagatactcggacccaaatcatacatacacttatatcatcattcattaatcactattgaatcctaaacagagataaacacaagagtgttggacttggttttaaagaactaatagtataattccatgaagtgtatagcgttccattaacatggcaaaacatctaataaaaaaaaaccgcccattacctcctttcctttgtctatacttaagggccaaaattgcccctttccttgacttaatccataattaattaaagaggcataatttaattaacggtggctaaatttttggtcaaaatctcacacgctccttttttttttttgcatgctcttggacacgtgctctcgtcactctctctcaaattagctggctccaaaaaaggttccttttaggaaactcccttctccaatttgtttcctcatccttctctctcctccactgcctataaaaccaattcatctctcccacttgatttttcatctccaacacaaaaaccaatccattagagagagaactcacaaaacatacttcgaattcccattgtttaaaagacgaagataatggatttctccggtttgtttctcactctctccgcggcggctctgtttctctgtttactccgattta

SEQ ID NO: 31581 - DNA, 907 bp, Arabidopsis thaliana columbia
tattgaacaattcaagcattgaccttatagctggttattcctttaataatagaaagataaagaaagctgcaagcaaagcttacaaaaatgtatatatgacatgtttttgaattataaataaagaaggaaatgaagttacttgacgcgatggctaacgagatgtataaagtgtaaacacatctgaaaacatctaccgatcacttcaataacaatccaatattcttcaccaaacttttactctttaaacaagaagatgaaactttttggtctctttcttagttttactctcttgtttctttgtccgttcatatctcaagccgatgtgccggaacttagccgccagccgcctcgtcccatcgtattcgtccataatgaccgctccaaatccgatccgcaacaggttcttttatttatctctctttctcaacagcttcttataatttttcatttaagtcaaaattgttcccttgtgtttttaattcctagtattatcatcttctgtttgttacggaatgtgaaatgtatggtccttaattaaggacaatgtatttgcatccttggttgtgaattcttaaatctatcacgtaatcatgttatatattttgctacttataataatgacataaaatccatttttttcttgactctatcatggcttgttttttttcttttcacaaatctacattatatatcactacttgttgtgaattttatttccttgtatatcatctttgtgccagaaaagaccgtactaatctttaagttttctattcagtcaaaacaattagtgattatttctaattaatctacaaatttgataaattaaaggtgcacatatcgttagcgggtaaggccacatgagagtacattcataacgggagacacaaggtggagtcggtagtggatc

SEQ ID NO: 31582 - DNA, 847 bp, Arabidopsis thaliana columbia
gctcgttgactttgtaaatattgaaaattaaaatattcttgtaagaaagaaactgagagttttctctgtgccatatgttacttatcctctattcactttgtaacagagatactctcaatttgacaaaaaaaccaatttggggcctggaactatataaattggggcttaaggaatccgtcttctacagataatataaatgggcttttttggggttgagcccaatgtactaatttattctgtccttgtgttacacatttttcccctattgtgtaacctcgacgtgtatactcgttcagtcgttcttatgcatattactgagtctccgtagaagaaagaggtcaagaatgacttggtctattttcagataatacatgacatttctatgcacatataattccacatggtgatagaatattttaaaaccaaaattaaatgattaaaccatataattagaaatatcatcacttttaaacgaccaacagaatcctaattatattttaaattagtactatagatcaagaagattccaaattcgaaagtaacaacaactgtcaaccaaacgccgcgttttaattaaatatcaaacaatcttctctcccatcacttgacagaaacattcgcatttaacttcatcgtcttctctctgtttctttcttctccaacaaatcaccaaaaatggagagattcaatttctttaatctgatgatcatagctttatgtttatcatccttcgttcacagtctcgaggttcttcttcttatacacacttctcttctaatgttttatgaatcttttaaaagtaacagagaaagttttttattttactcacagatgggagaacatgtag

SEQ ID NO: 31583 - DNA, 575 bp, Arabidopsis thaliana columbia
  unsure (1)..(575): unsure at all n locations
gatccccaattcaacatataaacaactatgtcttttagaaaccctaacaaccagaaagcacaataagtcaataacagaggataatctaaacctaaactaacaaaggtcagggcacaaaatgtcatttattcataatgaaaactctctcctactctgtaacctagatctttcactcaatttctcttaatctcctgtacaggtagcactatcctattacattaatcccaagctaggagtctggttcatccgttcttgttgcttcatccttcaccatggtccggttaatgtcttctcaagcattgccttttgctgccccacggtcgcttcgacgtttctttcagctgctaattttgaaaagaatactagtgaacaacacaatcaaaaaggctattcaaaacgaagcaagaccacgaaatgttcgaaagctatctcaggtttgagcttcagttggggacatacttgataaggaccacatacactatcagagctacaacttaagtttagtcttttgctgctgatgttggtcctatcaagtatggtcaagggtttcagaatgactcaatgannagaaaagt

SEQ ID NO: 31584 - DNA, 909 bp, Arabidopsis thaliana
ggaagtgctactacaggtaaaacttcgggcagtccgagcggaagtcctaaggccagcccatctggttcagttagtggcaaatcatcttcaaaaggaagcgcaagtgctcaaggaagcgcaagtgctcaaggaagtgcaagtgctcaaggaagcgcaagtgctcaaggaagtgcaagtgctcaaagaagagaaagtggggcaatggctatgtccaagagcagagaaacaaagacatcgagccaaagacaatccaaatcatcgagtgaaagttcatcttctagcacaaccaccacaacagtgaaacaagtcgagagtgagacttccaaagaagtaatgtcattcataatgcaactcgagaagaagtatgcagcaaaggcggaactcaaggtcttcttcgagtctctaaagtcttccatgcaagcttccgcaagcgttggttccaaaaccgcgaaagactatgtttctgcctcaaaagcagccactggtaaactctccgaagccatggcttcagtgagttccaaaaatgtcaaatcagcaaaggttcgtaaattcgaactcaaatttcttattcctttgataaaggttaaacaaaaaatcaaactatttctttgtgatatgatagatgaagagcaacttggacactagcaaagatgaaatgctgaagtgtgtcaaacaaattcaagatatcaacggtaaaatggtgagtggcaagaccgtgtcatcaacacaacagtcagagctcaagcagacaatcaccaagtgggaaaaggtcaccacccaatttgttgagaccgctgcttcttcaagttcatcgtcatcctcatcctcatcctcatcctcatcttctgctgcttctcagcagcagggcaatgcagcaatggtcaagactaattgagtttaaaggtgaag

SEQ ID NO: 31585 - DNA, 484 bp, Arabidopsis thaliana columbia
tcctcattcattgctccaatcgaaattctctgactactggtctgaaatctgacgaactcatgttctatttgttatcaagttccgttttatttatctttggaacaattcgcttcccttttgctttgctccatatcgtgaacgtccttttgctttgctcaacatcttgaacatcttttgatgccctattatttgcattgtatactttttgaattgtttctttggttgctctatcctttttcatgaaatcatattgaacaccgacagattattaacagataatattgtgataatacgtttagagaaacataaaactttcatgatcctataaacattcggaaaagtggtgcgattcatacgtgcttatgtaactttattatagtttaatatacgtaaacacttggcatttaaagaaaacttgctagtataggcagagatatctacatcccacgcctccacttctccacggccacttccaccaccacct

SEQ ID NO: 31586 - DNA, 846 bp, Arabidopsis thaliana columbia
attgtaatgcaatgttttttttctcaacatctttggaatgcaatgtttatgacttaacaagaaaaatgtttatgacttgattataataatctctggttttgtgcggagcttatacagcttcggttttcttcttatttgatttcttttggggagaacaaagagttttgtgtttggctagatggatctttatcatcattttggtcgccttttgaattttatttcataaagaaatcttatgtataagaaaataaaactaatatcgattctgaaatagcaaaaatacctcaatattttcactaaatcataaaacgaactacattcatcatacaacacattgtaacatttcaccattaatttcttaacccaagcaacaagccaataagtagatagtttttgtttgactaaacatacacacgtgttcggagtttgatgtacacgcgctgactgcgcgtggatgtaatataatcttaattcttaagtatattcgtcgacgttgccttgttccaaagttataaaccgtgtggaaccatcgagaagcgaagccagaataaattttcgaatcctccgacgatgacggaatcaacatccgtggttgctcctccgccggagatacctaatctgaaccctagcatgttttctgagtccgatttgttttctattccgccgctagatcctcttttcctatctgattctgatcagatttcaatggatgcgccaatctccgatctcgacttcttactcgacgatgagaacggagatttcgctgattttgatttctcgtttgataattctgatgatttcttcgatttcgatttatcggagcccgcggtggtgatccctgaggag

SEQ ID NO: 31587 - DNA, 799 bp, Arabidopsis thaliana columbia
tgcaatgattcttatgttgaagcgattacaaaatagcactgtctcaaacttgtgaagtaggattagtgcatcatgtggctagtggtcccatagctaaaaaatctctgaagcttgcaagttggagattcgatttcaaatagatcgaaaattttagagatgttctaaccaaattttattaacacaattttttattcaaaacccaggaggcaggaacaatggacagcctaaacgtctagaactgatacgacggcgtttaggaaggggtcaaacgatacgacgtcgtataattctggattgaataatgccaaggtcaattccgtaaatctcggcaacggtctttgtgagcggcttcgtctttttgctttatggtggtggtctgctgctgcagatagtttccattctcactctttctctctcaatggttagatctgtcttttacgtcgcttcgaagtcttctttcttcccttcacatacccaacgaatcctctcaaatccctaattatccaatttcacactcgagatctcgaattggagtctctcatcatcaccaatggcgtctccaaatccctacaccaagcgccgctctccgccgaatgtcgttgtaccgccacagcctcggtataaatccataggaggaggaggatttttctgtaagtctgttctattcgctctttttctcctcgccttgccgttgttcccttctcaagctcctgatttcgtcggtgagactgtgctcactaagttctgggaactgattcatctcctattcgtcggcattgctgttgcttatggtttgttt

SEQ ID NO: 31588 - DNA, 575 bp, Arabidopsis thaliana columbia
gaagaatgaatttacctcaattttgaatctgattacgagattttcacggcatcgattgataaaatcaaatcgcgattctcaatctctctctctctctatcaataagcgaaattgagtacttggggctctacaaatgttttgggtgtgattgaaaaacctagggatttgcagcgccggcgagagagatcgagagaggtataaataggagaggagagagagaggcttttttttttgaagggagtggaaatgatatcgaatctgaaaggagaggtgaggaggataaaaaaaccaagggtaagacgactggtttgccacacgtgccatcagaatcttttgcacgtgccacttatacccttttaatattttttttatgtttttgtattgactgactattgatcataagtataagctacaaacacattaatcaattcattaaacagagaacacataaattcatttttacgcaccagctaaatttaatcaaaaataaaatgaagtatttgactgccaaacatgatatgtcctccacttcctgataatcagatttatcctaccataaattgatattaagtttg

SEQ ID NO: 31589 - DNA, 790 bp, Arabidopsis thaliana columbia
attctggtgtattctatagataaaggagaatttgctattacagtttttagtatttagagaatgttccccttttcgggactctacatcgtatatttatagtcctagaaccgagttaacaataataaatggtcagcttgattccagccgcatatctcgtcttcattattgctccgtcttcataatctcgctcttcacatcccgaaatcagctcccctcattcattactgattctgccgttacttcgatcgaaggatctctaattcgaacccacattttggggccaccttcttcttaacgggcctcttacttttcatggggaagcccaaaacgtgcctaggcccaatagtttgtgagatcctactccaacagtttgccccccaagtacttcggcgctcgttactttggagcatttaagatgaccgttgaaattcctcgtatcaaaacaaatgattgcgaacccttgatccctgagatttctttccttggaaagtgtgcaaatgattttacatcctagggtttctcgttttacctcttcttcacactcattattacctatataaacgcgggacatgcccttataattcttcgcctttacgtactctctcaaaccgtcctctttagaagttaaaccctccagctttatgttcttcatttgctttttcttgctcgatttttgttttaggatagaacctagatccgccgtttagcttaggtatcggaacaatcgaacggaatcctcaataatttcactaggttttgatcgttgtttggagattagcaacgtgttcag

SEQ ID NO: 31590 - DNA, 535 bp, Arabidopsis thaliana columbia
gtaagctatagatttccttaggctaaaacattcttaaaaccaggaacaggatctccaaatattcatttacttcataatcttctgctactgatacatatttctgagcttcaacattcagagatcaatgtatatgtaactaaatgcatttgaacagaaagttaaaattcacctttacaatccattgaaccatgatggagcgtagacgagggatgagaccagtattgtccatcctggagcagtatgccttagcacagtcccgcatatatgcatgacttctttctctttccctcagccttagatagctctcttccacctcctcatcatcaaaccttagcaactaaaacgaaaatgtatacttaagattcattccagaacaaaatttcagaatcaaacacagagcagaacaagtctcatatcaaaaatagactagtaatcgaatgaaatttcaaccatataaccacatacatcttcaatctctaaccactagcaattattccaagagatatgaaatcattataccacttacttcagagtg

SEQ ID NO: 31591 - DNA, 721 bp, Arabidopsis thaliana columbia
ctgatgttcagagaaagagcgatctgataacagtgagaacaaatgatcagcgtgcggcggatgaggttatgacttgccaaaacaaggaagaaagtgttgaaattttgaagtctggggatcctaaggttgttttgttggaagaacagagtttgactaaatcccgaaccggctccaaacgtaaagcatgttgtgtcattaacgtcattgaagtaatggacacagaagataatggattcaaagcaggtttaagggattcgactgttcaaattcctaggaaagagggagttgttgaagtagtagatgtagaaaatagtgagaatgaagctaggattgaagcaaacagtagaggaggtgaattatatgaagtggctgttctatataagcagaatgatgtgttgatggaagagtcgggtaaagaagcaatggaaacaagctcaatagtgagaaaagcaaaactgcgcagaacatctaacacaacgaaagaaaatgtggaagtccgagtgaagcatataaaaaaatttgggagtgccaaaccgaagcatgcagcaatatcattgctctagagtaagctctgatcccttttgttgcctgtatttatattcatctttgaattagcttaatgattttcatgtttctctttggggttggaaaaataggaaaatgctaaaacagtgcaaagagaaagaccagcagaacaaagctgtttcagaaattgatgatg

SEQ ID NO: 31592 - DNA, 652 bp, Arabidopsis thaliana columbia
gccagtgtgctctaaaggtgaaagtacaaatggtacaaggcagatcgatacatactttgagaccagtatagagcattctatagtagacctgatgaagatgtgtttgagtatggcggtaatggtgaagttcatatggaggatgaggtccagaattgggctcaagctctcctatagtatacgcatactatagggatactcgaataatgcctatgccgtagagcttacaagaatgagccaaggtgcttgcctaggtacgtaccttgtagttcactgatcaagtcctcctaccctgaatgttggctatgaaacatgctacatccgtggtatgttaatatgtttacttggtcgacagccgcagctagtgagtgagaccgtgagctgcttactcagcacatattctgaacggcgggttccaagccaggatctgtgaaatttattgaggattcgtctctggctgagttgcaacgcagggaccaacatgaaccagtatttttgctgcattgccagtattgccaatgtactccagagcaaactccaaacagtgaggggtagccatgttgtcactgggcaacggcagggattgttccttggattctgatgtttgattgtcctaaaagtatgtgtccaggcactgatggttacagggcgatag

SEQ ID NO: 31593 - DNA, 600 bp, Arabidopsis thaliana columbia
atttcttcgatccacgatctcctcccttcctccgcggccaccgatgtagattgcggcggagaaaggaataatctttctccgtatgatcgtcaagaccacggatcgtcgtcgtcttcccttctaaggacggcgatgaggaaaggagcgagcgaggaggaggagacgacggaggagcggtgggtgagttattcagaggttgtggaggaagtgatgagtcggagcgggactccacgttgttgcggcggaggcgatggaaacgatggccggccttcgttggctctgaagcttgattatgagcagatcatggaggcttggtcggataaaggtacgctttatgtcgacggagaaccgccgcagacagtgccggacttgcatgcttccgctgatgtaagcaaaccatctctctatttgtctttttctctggtattatataatcataatcaatgcttaaattgactaattaatttgacatatgtaaaaccggtgaaatattgaatgagtcacgagttcttttgccactgtaatgatgataatcttattaatgtattgtttttcacttctgagatacttgtaatatttaagctttgactagaaagttgt

SEQ ID NO: 31594 - DNA, 658 bp, Arabidopsis thaliana columbia
tcaatctgcatctgtgattaagaaagtttagctttttcctccatttaattttctacaataaaatatactagtcaaagagaagaaaaaagctcatggaatgctgtaccaagtagaaaccaaagcacatggttgcttcctcgtcttctccaacggtcttctctcttctctttctttattcaattgcttctttcatttattgcagcattcatgtgcttccccctaaatgtcgttaaagaacctaaatttaataatgcaatttaatagccggactttaccgaccggtacaaccattagtcgataataacaaagccgggttgatgatatctcaatcggtttacgtatcattgaaattaggagagagattcaatcactgtccgaattaaatgaacaataatcagatacaaaaaccaaaattacgccatttcatacaatttttgtaaaccgaatttatagcagcaatctactaatcataatctagcagcaacaactcaaccgattttactgataaatggcggttaatattagaagtttacgagtacatcaaagctttgactaatgatactaggatttggcaatttgtggtggaccggtcctgttttgcaggagaataatgaatatgatatataattacacgtgtcaaatccaacattggggtggt

SEQ ID NO: 31595 - DNA, 1421 bp, Arabidopsis thaliana columbia
tgaccgataatgatggtgaaggtcactttaataaaacgaatctgaatttatgttcttggacagagagagcttaaagatcttgaaaaggaagaacacaggcgagttcgtggctttcgggaagtggtcgattttatttcttcttcacagaaacctgtcgtttcccagaattatcttagcggtaatctcacttttgtcctccttagtttccacacaaattagagtttccgctcttgctccattgataataatcttatgcttaacttgttgcagattttacttccattcatgctaaattccttggtcctctaccttcaaatgtggatgacttcagcagttcactgagctcagcatttcccaatgttgtggatctcagtcagttcatgaaagaaattagtcccttaagtaatataagtaatctacctgcagctatgtcctccttgaataggttctttgcacctgtggatgtagaagtagcaaatcaaggtcacagttctctttcaaagatgttgatttctgcttttatgcggtttggatgaatagatattgacttttgattgcatctcttattaggttgtccggtcaaattagacgaaggccatcagagtcacgggcagaatgctgtgatgatatctcagctctttgcaaaactgtgtaccatacagaaatcagatctatcaactatccaatcaaatgaagatttccaagctttggcttctgatgaacatgcaaattctgtcacctcttgctctaaaaacgcaggtgatgaaaatgttaaagtctggtcaaagaacagccggagagtaagctctgagaacttggtgttcatatgggggttagggaaaaagatgacagctgcaaagcgtgaagaatgtcctacaaaagtcacaccccgtcttcgcgagagagtttgatgttaagtacatagaccggagctctgctattttggtgttttgggagtcaggtccttcagagactttcctcagtgcggtcaacaatgaagagcaacttgatggttcattaagagagatggttgcagaagggctaagaggggcaggttacgagacttacaagagagcttgtagattaggcttctgggaggctgacttggcggaatctttagacaaagcattggaatcttcagataccgaccctgattcggacactaaaccatcagagattgattggtcaaacgaattagctattaattttgatgagctatgaatagttctggttcacttacagaaccaatgtataccgaaattgagaacgttgattcatttttgttcttccatgagttgatttggctaacatctgaagttacaaagcttttttgaatcctgtaaaaaaacaaaagaagcaaggattacagaaattgaaccaaaaattgacccaaaaacaattgaaccaaaccaaaccgaaat

SEQ ID NO: 31596 - DNA, 564 bp, Arabidopsis thaliana
actgttattgccacaattgtatcgtcgcaaccaccaccgtctacatcaccgttagtatcaccactaccattgtcgtcatcaccaccaccgctaccgtcaccactcaccaccaccaccaccgctactgtcaacgtcaccactacggtgtacctcggttgcttgggttgccaatattgtattttataggttatagtttttttggatcatatcggtttaactcaattctttgtctactgttcgttttatactatttagtttcattctatattattgtatttgtgtattttagacaaatattattcattattttaataatttgtatcagatttcaaaaatttaaatcatgttatacacacaaaaaaatctatgttttactaaaaattgttaaatgatttaatcagttatttttatgaaactaattcaacattcaaatcacttggggaaaatatcaattttgccatctcatcattattttctctcttcatgtcatcattattatctctcttcttccactcttatatattaaagaaactagggttcacccctaggggtaaacccctttat

SEQ ID NO: 31597 - DNA, 625 bp, Arabidopsis thaliana columbia
  unsure (1)..(625): unsure at all n locations
gaatccaccgatgcaaatgagaaaaacaatctgcaacaatacaaataaatcacactttgatttccattgcaactgaaatgcaaatgagaggatttttctaaaagtattgagttaaaattgtcgataccctaaaccgacttaggaccagtgacgccggcgattaganaaaagatctgcaacagaggaaaaattccttactcgaaagtcctattcgtaaacttcaatcgaaaagggaatttatcaaaaacaggattctaaatgtgtttacctataacgaatgtagagaagagaaactgccaccaccagaggagagaaaccgtcagacctgattgagagaaacacaattcgccgccgtttgtgtggccggagaagaagaacatgtagatctacaacaacccaaaaccaattttcatttgtcgagagtcgatttcacaatctttaatctgaaaagaggatgaatctaaagctgaattcacatctgattgactccgaatttacctatatcgaatccacatacaaaaagaacccaacagttttcggcggtgaatgggaagaaccctaaaccagcggacacgaacgcccaccgctgttcacagccgcagtgaaaccggagaagaagcgaact

SEQ ID NO: 31598 - DNA, 837 bp, Arabidopsis thaliana columbia
agtaacgaccgtcccgaatttgataataaaaataacgagaaggaatataaagagtatacaaagacatgtgttgacaatgatttgaatatgagaaatgagtttttttttttttggaaatagtaatttaaaaattttaaaaaccatcacattataattatactgaattttactcagaatgactctaattttgaaagaaataactattttgactcacgtcctagatggtttactacaatgactcacattttaagttaaatgactaattaaccttgtttagttgtaattccttgttttaattcaaaatgtttttattttaataataatattaaaaaactctcaatcccaaataacaaaaataaggaactcgtatcattaggttctccactcgccgcattaggctttgcatgtctcttcttcaccgatttttgatcgaaactccagcaaacctgtaattgaattcgccgttttagaaggcagctttccgagtagtaatcatctcttctccggtggtggcgttgctgcttcttctcactcaatcgagggatacttcttctccggtggtgactgcgttgtgggtttcggatacacaaacggctgtgaggagtttgcctcttttccagtttcacctgcggaggtggacagcggtgggcgttcatgtccgacggtttagggttcttcccattcatcgttaataactgttgggttctttttttaattggattcgatataggtaaattcagagtcaatcagatgtgaaatcagctttagattcatcccttttccaattgaagattgtgaaattgactctcgactaatgaaaattggttttggttttca

SEQ ID NO: 31599 - DNA, 472 bp, Arabidopsis thaliana columbia
tttttacatatactgtatgttctaaattatatatgaaaatccagacatgatcttttatttctgatataaatcaaatttacacataccaaatccagacagaagcttttatattctgagttaaaccaaattacacatcctagaaattataaatatccaattttcgaattggattaaatctccaaatatttttcccaagtatacatttcaagatttactacaaaacaaaaactttgttaatacaacaaattttgagtgacgtcaaaaactgggttccacttgtggactcccctgacacagatcggtcacaggttcacttttagctcgaaaacagtattttgatatgttataccagagcaagagaagaagcattaagatttactgtcactcttttgaccttaatctaccaccagttccagttagttaattcaggagatccaatttttcgttttgaccaagttagagagccaaattt

SEQ ID NO: 31600 - DNA, 1096 bp, Arabidopsis thaliana columbia
tatataatttttcgagttatccatcacaaacattagacgaacgatgtgaaaaaagcttaacccgataatatgcatctccgagtaaacatatataccaatgttggtacttgtatatctcattgggtcaaaacgtttgtatgtatataactatattattgtattgaagttgagaataaaggaaagatagattaagggagaagcaaacaatgacgttttgccagcgaagctttttgggagcaaagagaatccttttgcagctatcaaacgaccgcttctcccggacgacgacctttggccgcccatcacatctttctctatatttatctatttaacagatacttgatgaaaagaaaaaatcctgatcatatgtaatataagattttcttttgtcaacatttactatataagattttgatttgaaataaatttatagacgcattgttttcttgactgtaaaactaacatgatgatttcatgtttcagaaaataatatagactaagtcttgtgtgattcggttcattattgtatttcatgtctccaagctattggctattgtttattcactaattaatacgtgctttgtcatattgctttccgtgaaacaaaatattggttaattaagacctaatcggtccattaatgatcttatcataaacaacgacttggtgcatttcgatgacataatattagtattattatatttacaaaacaatctatcatgtgtaaaaaatttaaaaatcaattcgtatccaatgtgtgtatactgaaaaagaatacgcaaaatatatttagattggctcaaatgatcacatggagtcatggaggcatacatagatgttagagctgcgggaatcgcacgtgcccacatggtaagttctgactctatttggctagatttttacacgtggcgtcttcagagtgatcgaagcgtttagaaaagcacgtgatgcgtgttcgtattggctatctatcaaatcccttgccttcatgcccgtacttgcaggtaaaataagcacacggacactaattctatttttttattttttgttagatagtttattttaaagttattacaaattaatacgttataagata

SEQ ID NO: 31601 - DNA, 521 bp, Arabidopsis thaliana columbia
gccagtgtgctctaaaggttcccgatagaatatcactatgtcaaccaaggaatctggcggacttcatccatggtcgcatagcgggtactagttgagggtgcttcctgcctgctgtttgtactgcattgttgatacagtgttgggatggtctaattcacctttctagactgtatgtcaccatacttatgcttgagactcgtcatcagatagcttgtgcaagagatcgtgcagatggaatcagcactgtcgaccgtatggttgggtcgtcgctcatcattctgtcgtgtcgtcatgactgactgttaagcgatcgcccagattcgccctacaggtacagaaacgctccgtacggcaaactcgtcacggatcataaatccagcggcggagtcatgtatccatgggcttcccaagtcgaactgtcaaccggatcatcttcccgcatagttcaagatccatcgcatcgatgaccaaggataccatgaactcgattctcgaccctcagctgaggttttttttttttt

SEQ ID NO: 31602 - DNA, 943 bp, Arabidopsis thaliana columbia
tgcttcactcgggaattccatggactagtgctttcaccgggtgagtccaggattgaacccatggtttgatgcctagaagccatagcagcaggtaattcagtatttgaaccagcgtcaagctgagaaaaagattcaccatttgcaaccccagtactaccccattcttcagactcctgacttagtcttggcatttcgttttctgcatcagtaaaagcttcaacttctgtgtcatcaagcgcttctcccatcccctctttctccatatcatctgatgcctcagattcttctgaagcctttagctgcgcattatcagagctgataccagtgccatgactattaaaatttctcccgctttgctcctgttcaagatacagaggtacagaaacaccatcctctgacttcaattgagaaaagtctgtagccaactcagcagcttcagcagcaccttttctgaaaattttcggccttcgcaacttttcttcttcatttacagcttttgggcggatagagcttctcacctgggtgcggacaccattttttccaactcccgaggctggtttcatgccctcctttttgatctcggagaagttagggactgactgtgcaaaatgtttttctgattgccctctccgcctaacagcactgagagtagaaactttggctgccgagcgtgacgctgacgtagcagtggttcgagcaatcaataaattatttttattttgttgtagctttttattctgggtgctcctggaaccatcctcatcttcctcactctgaaatgaactaattggatgctgtcaagtcatcacattgttaaactgttaggaaaccaaggataatattacacccactcaatagttttagctaccacagaaggaaatgctctatacctgatcctttttggcactcaacttagaattgaagtatacaagcttctctgcac

SEQ ID NO: 31603 - DNA, 571 bp, Arabidopsis thaliana columbia
cttaaatattttagaaatctggatattgataaaattcaatattttgagatcttttttccttttccgtattgaggtcatattctagatgcatatgtctatttcaatttatatactagacggtcctaaccggtcccctgtccaaccctaactggactacttggatataaagccggtcctaacgtctcgcctaatgggaacaacccttagtaggatcagatcctccgtatcgagtgcaatcctttatagattgtccggtctagaatcttatcagaagtggggtaagttttgagatctaaccggaccggttatgctccacgtatgttgataattttggcactgcgtacggtaatatatagtggccaacaaaacctaagaatttgacctcgaaatatccgaattcacgtggtttttgtctctcctttggccaaatttagtaagctattgtacgagctctttaattgaacaacctaagacataacttatagttttgtcccatattatatttttgaatggtgacaaaatgggacgaaattaaacaatgctataacctaagcaagtcaccaaacataat

SEQ ID NO: 31604 - DNA, 592 bp, Arabidopsis thaliana columbia
atttggcattcatcgtgtacatatgatgttataaacatcttagtgtgggttgttgcattcttcatactcctattatttttacttctcttgactattataacagaaccgatagataaaaaaaaatatatagaataatgcattgagacatttgctcttatgttgatgatgtactttttccatttttcttagtactatttctcttttatgtctctcttgctctagttatgacatttccataaatccatacttgaaattggtcaaatgttaactttggtcatttgaaactcaatcaaaatcggcaaatttcagaacattgtgtaaaaataaacagaatattgtgtataaaaattatcagattttatatgaaaaaatagtttgcataaatgttagatgttgtatgtgatttcttgaacgcttttttccatagaaatgtgtatatatatgcttcttcaaatgtttttggaaaatgattgttgaaaatccctttaaggaaacctttggccgggaagtataaacgattttttggataataactgactaaaagaaaatgtggactttgggtaaaatgataactagaaatgtatattgttat

SEQ ID NO: 31605 - DNA, 549 bp, Arabidopsis thaliana columbia
cgctcatttcctttccatggccatgacagtcctttctttaccatccactcttcagtctttgaggtaagtttcttagggacaacagagtttctatcattttcatcattggattctccggaggcttttgaagaagacttatcatcgttacataagaacacaccaaaaggagactggatcaaattccccctaggtgtgctagcatcatttgtttctgcatcttccctctggtcagagaaagcagcatcgaagaaaccctgatcagactgatgactgcccccatttccaccctcagggtgtgaggcgttattatcacctgctcgcattttcgacctgaccttgttgcccaccttggatgcctaaaatttagactacacttgtcaaaagatgcaacaatataccaaaaggtcagaatatgtaacctacagttagactaaccaaatctgagatcttagatgctatagcagcttgaataggctgctgagaatcaaggccaagtttcgacacaacagcttctttggaatcaaaccaagcctagaagcaacaccatta

SEQ ID NO: 31606 - DNA, 435 bp, Arabidopsis thaliana columbia
taaaaaggttagtgttaccaaactctaactctattatagtaaagggaaatttgactctataaccaacaaaaaaactataattaagaaactagcacctcacaaaaaaaaccttgatattctttatattttatgtattaattccaatgttgtcctttttttttaaagatattattgaataaaggtttttaatagatttatgaaattaagtgttattcaattatgtctttataaaactactttaaaaaatctgcttttattggattaatgtttatttgatatattctaaaataaattaaaaataagtgttattcaatatttatttgatttgtttcatttaggatttgaatgtacttttattcataaaccatgaaaaaaataatccaaacattttatcaagtatttcaaaatccacgtaaaacattaaacattaaaatc

SEQ ID NO: 31607 - DNA, 684 bp, Arabidopsis thaliana columbia
tgattatagtatatttttaattatactaaaaaaagtaaaaacccttgtcaactcctcttccccattgacagtttctcacatcatccctacatagaaactgtatataacagaaattaattattcctgtgactctaataaccaattgttatcatatggttattggatcctttctattggtcggctacgtgagaaacaatggattagcagtaaaaagactaacaaatacaaaaaaaatgccggcctaataaatgtgattacaatatacacaactattcttagtagaatatactaacttactacgctacagaaccaactggtttatcatagtatctcgcatattaacttaggctagagagccaacctttttgaattaatgaaaaagttgagacacaaccactaaactttacggcattaataacggatctcatttatgaacctgcgtacaaatttggtctgaagttaagtggtactatcccggaaataacttaaatcttatcctaaactatattctttccattttatagtacgagatgttttggaaaaaaaaacaaatagtttcataataaagtaatattttcaagttcttatgcaatattttatgattagttattagttatattatgcattttctttatgtttggttgactttttaaaatatgtaatttttaatatccgtgtttttag

SEQ ID NO: 31608 - DNA, 746 bp, Arabidopsis thaliana columbia
caccatgatcaatgacgaattcgccctccgtgttgtggaagctgtcccggacaaagagagtaaagtgctcgtcgtgtgcggtgaaggactcaggtaccagctttatatgttgcattttggttaatcattgccagttttagtccagattttagagaaacttatcaaactaaataaactattaatcaatcgatttgatcatagaatcttttggtttggatagtataaattaaactgaactctttggttcggtttggttgttataaatggtgttgcttttcaatctcattctcaggtcgttggcggctgtatcaaagctccacggagaagggtacaaaagcttagggtggttaaccggagggtttaaccgagtatccgagggagattttccagagatcgaagggaccgaagagcttcggttcgccacgataggaggtgtatcattttatttactcaaactacttgtactgttaccgtcttttggccagaagagtcgttaaattggttttttggagccaagtgtgaagacattttttgtttttaaaattgtgtccggtttacacaattggtcactggtttattacttacagatgtctttcattagttgaaatattttgtccgaatcatttgcttcggacagctaatctccaaacctagtaacaatttacgtttacaccaaagccattaggacgagagcacattgttgagggtagcttcgtaatttacaagaatgttcatcctctcccagt

SEQ ID NO: 31609 - DNA, 591 bp, Arabidopsis thaliana columbia
caccaatgttcaaatagcttcagtgaaatgaaataaatagttgccacattcgatgaaatcatatatgcagagctggtaagattcaagaaaatattacaccatagtcactactttttttcttgtccaaaaaaaaaaaaaaagtattaaattgggagataaaattttaaattagattatctttattagattttatcatcgaaacaaaaatacaagaagtcgacgtacaatatgtaggtaaaagagaaaaaatatccagtaaaaaatccaatatttggaaatagttactatgtccgatttatacatctgtggatctatatctctattcagctactagcgaccaaccaaagcagccacaaaccggttactatgtgatattagctacattaggagtaaattgctgtactaaccaattttgaaacaaaattaattgaaataaccgtcggctcaattatcaaccgattgtgtagtcaatgattgttgttggtagtacaaaagttggcacaaatttgacataaactattaactaacgtgattttatggaattctataatcgcacatagaatcttatgttatattaatactgaaaaaagt

SEQ ID NO: 31610 - DNA, 610 bp, Arabidopsis thaliana columbia
agagtaagaggagaagccatttagggtttttggaaacagaggaatgagagaatatgaaaagggtttgcgatcgaagcaaatcggtgattggatatttggggttttacaggttttggacaagtgattgatcgtgttcatgttaattgctactacagacattgaagcttccttagttttgtctttggaaggaaagataagactaaaaactttagcaaccacaagaactcaaattgctgagtgttactgatttgtccgtataaaattagaagataatcatgaatttagggtttgaataaagtgattaatgaaaccaaagcaaaagcggggatagctcagttgggagagcgtcagactgaagatctgaaggtcgcgtgttcgatccacgctcaccgcatttttttaatattgtttatgttttattcaaagcccattggatctttattctcttttaaatatgtgtccatttagtgtgttctaccgagcgcgtttggcccgtatgaacgaaagatctgccacaacaactaaattatgaaatgataatgcagtagacttttacgaagtgactaagttaagaataacagatttacagaatattattaaggttgataat

SEQ ID NO: 31611 - DNA, 663 bp, Arabidopsis thaliana columbia
tcataatcaatgatctgcattcatgtcaattaaatttctcaattcaacaatatggtaaatatcaatctacatatactactttccctttacgaaagacttgtaataatgcaaaatcacatttataatagccaagatatttttctcttaaagttatgatccattgaatctttttttcgtgtgtagctcacgaaatttttacctattatctctataactactattttcactaccagcatttctcatcatcacatactgttatccatcacatattgttatcttttactaattcattacaaaaaaactcagttcagaagaatggcttccactttcgcatatcgtaaagatgtgagaccctacaagacttcctggagagtccaagtgaagatcattcacgtgtggaaacagtacaccgtgagtattcgtgaaacattggagttggtcatctttgatgagcaaataagaaaaaagtaaacttaccattttaattctttgcaatcgtaaattattatgtcttgctaatgcgtcaaatcatttttaaaaatgttggtaggagaagaaatacacgcatctatgtaaaaagagttggtgtctaagtttgtcaccaacttattgttgatgaatggatcttcattgagacgtttgtctcaattatgaaggtgccag

SEQ ID NO: 31612 - DNA, 600 bp, Arabidopsis thaliana columbia
cggattgtaacttattcttctttcttaaaaaaattgtttaggagcaaacaaagattttatttgttagtgtattcaactgattacatttttagttaaaaaaatggattctccttaataactaaagactgaaaaataagataagtttccttaatttttctttttgacttgagaaaaagctcctctagacctctagtaaataggagttatatattaatcaagtacataacataaaaatatatatattaagtgcaaatagattgaaaacaaatcaagaaattaattaagacacagtgattaagcttaaaaccccattttgacttgttctttctcaatgaatccctcactagcagcaagcttcttcgattttgctttgacaccaccaatcagtgttttcgaatctttcaggtttgtctcgatttcaaactagatcggagtcaagtgataaaattgactaacataattattcccgttctctcgtaagagttgggatttagcagtagatcggaaatcggaatttacgtttttgttaaaagattgatggtttaggtaataaaacatagttctggattcattgcttctagttgatctcgaattgtttga

SEQ ID NO: 31613 - DNA, 968 bp, Arabidopsis thaliana columbia
agcatcaactggaacatctggcatctggcaagtctttgcgtagttttcctactgctgttgaatgtgagaatgcacccaccatcatatcttcatgcatcatgcttctgaaagcattcacctgccaaaagaattgagttaattgcgatttttgttttctggatcataaatcaatttggaaagaaaaattcaccgttgtaagttctctggcatgtataggtcggcaagaacgcggtgttacgggctcttcaaactcgctgaatgtaaaccaactgttatactgaaagacaagtaaacaacaagaaacaagcagcattagctctagtgaaaaagagagagatttaaaataatagaaggcgaaatatggtatcataaaggggaaaactggggactaacttgatcgattacaatcaacactggtacatcttttacaactgagagttcttttctaagtcgcacaacgacattaacagctgcatgagtgctcttaattcccatttgcacaaggtcatacagagttgaatcctcgggaataggcatagcatctgctcctttcaagtatccaacacccgcaccctctccaagcacgataggatcatggattttgcaccgtaactctcttaagcgggattcattgaacttgacaaaatcctacagaagttaagtttattaagaaatgctgttaaataggaagaattccattccaaaagaggaggcatgtggaatcttgccttgagaatattctcagcttgtagaggagtgtcccaaaaccctgtatgtggattcttatagaagtagccaccgtgagtccagtcacgtccttttggtgcatataaaactaaccagccttcgtcacgtgcccagtgaacaagcatcgccagagcaatactctttccacacttaacagggccatccaagacaatctgcttctgaagtttgacccttttcagaaagaaagaggaagcaatgat

SEQ ID NO: 31614 - DNA, 502 bp, Arabidopsis thaliana columbia
ctatcgattataatctttattatcataagaaatatagaagatcaacggatgtttttttttgtttttctgtacttgttatatatgttcaacacaaatgtttcttaagaaactttcacatgtatacactatattgggccaaattggttttgggcccataagtttttttctgtcaaagggcccataagttcttttttgtcaaagggcccataagttaaaagtgaaaattaaaccttattagatccaaaatatcttcccccgccagtgccaatcactgccaaatcccttttgcccccaattgtctttcagaaagctgtgaagacgaagaagtttttgaatcaatggctcaagcagcgagattaagcctgagaatgcagaaagagctaaagcttctcctctccgatccacctcacggcgcttcgtttccacatctctcttccgccgccaatgggtccggcgatttctccactttctccaccatcgatgctcgtcagcttttcttcat

SEQ ID NO: 31615 - DNA, 550 bp, Arabidopsis thaliana columbia
cgccagtgtgctctgtgctctaaagcattgctttattcattcaaaacgcatgatttatttcgcaatatagtattctgatattaaattcaccccattcaggtaagaaatctccgtgtttgtggcaatttccgcggcgaacccctgggaagcgtgattggggcttttccctcgagcactcccgtctccgtttcgcaacctccgcaatctctcttccttcaaccgcgcgggctggccacgattccaaccagccacgccggcacggttgctgacgttacaagagtgtgctgatcagtgagtatcaatttgtttgccaaagttaaaatattctttccgaggtcattacaggagctaactgtacgcggcgcaggcatcacgactcttgtgccctgccttcgtcgcaatggctcggaatctccgttcatcatcgcacgcaaggtcaaatgattcccggcctcgacacctgtaccacacacagcgaacatggcttctccttttacagaatccactagaccccgcaagcaacggcgaactgggcgatctcccgggttgg

SEQ ID NO: 31616 - DNA, 589 bp, Arabidopsis thaliana
gatcagcgttatcaactttcactgactttatggctttgtggcccactttctcatcatcagaactgctgctactctccgtgtcacttgaactattcgtgcttggttttctatctggccgagctttctttttcccgcttcgtcctttactctttctttccccgcgtcggcctttgtgtcttgttgttgacttcctcttcctatgcttcccatcactggaagaactagactcataggaggaagatgaatatgcttctgattccgaatctgaatctgagtcggaacttgagctatatgaatctgacgaagagtatcttctttttcgttttatccttttctcgttagattcttttttgcgtgtctccttagcttcacggtcagatacgtcaccaggagaaaagttcttgtttgattttttcgatttccctaataaacattaaatatatctgcatcattattctagaaactccatcattattatagaaactccacattcaaagattaacttcattacctttttctctttcagcagcatcatgtgctcttatctgagacgtttcacacagtctattattttgactgggctagtagg

SEQ ID NO: 31617 - DNA, 868 bp, Arabidopsis thaliana columbia
gacggttgttgacggcgttcctcccactgtggtagttgaagctgaccctccagcgttactgccatgaccaaaccaaaactttaactaatatagtttataaatagaatgttcttgttcagtaattaaatatataaatgcactattcacgtccaaattttaatatgatgataaatgtaatgaatatatttagtgtttctagcttacctcttaaaacgaaggtaataatcttttcttacaatagacaatgacaatatttgaaataaaatttataatgtagatattgtttaaaaaaggattaaagtcagaattggaaatggagaaaagaaacaatttatcttcctaagtaaatgcaactcatcaacttgtatacgcttgttcgtcacgaaacctctaaagtagaacactactgcaacatgctttgttccttttctttttgccttttaatttattttcttttagttattacaaacttgtaccattctgaccagaaaaaggctagaccaacggacagaaacagaataatagaactaaagaggacatggatctctaccgttgaatgattactcgtaaagatcatccaacggttcagaaacattgaatgggatatgcatataataagtcatgcaaattagtacgacgcatgaaatataatagaatcacaacatcctcagtcaaatgaatgaaaaaatcgtgaggtggagttccttatcagttaaacatattgaaatcagaaacgaagagaaagttcgtaaatatattaatagaaaaatgaaacttaaatccagtttttactgtttacgagtaatatatgcaaaatatacagatagcataaaaaattacgtaccgcacagaatttggatacacgcat

SEQ ID NO: 31618 - DNA, 593 bp, Arabidopsis thaliana
cactccgccgtaacatgagaatcatcctctccgtctcaagcctccgtctctgattgtcaagcttagccttctccatctctctctctttcttgctcctatatctcatccacttcactctctgcttctccatctccactccttcccactcatacccaatcttcttctcctcaatctccaacatctttctccttatccactctttcttctcccacacactcttcccaacatcttccactacacttgccgcttcttccctcaacctcttcaccgccgtcgatatcctccgcttcttcctcgtctcttcttcctctgattcctccatctctgactccgaatcctccgccatatcagactctacttcctcctccacctccaccctctccgcaattctcgccattttccctgcttccgccgcgtgaaaacagttctgctgctgactcggaatcggaatcgaaataggattctgttgcggtggttgttggtcatgacaccaagatgaccacaactattatgataacacacatctctctaaagaaaagatgcttagaattaagcaacttcttgacttcatctttcaacttcggagtcaaatg

SEQ ID NO: 31619 - DNA, 586 bp, Arabidopsis thaliana columbia
tgggctcttacacattacacgaaggctctgcgagggctctgaaactccacaacccaagaataaaaatgtgccttttattatactttgaaatattcggataaaagttctgaaagagtaaccacaccacaatatgaataaaatcgacttattattgaaatccaagaacaatattaaaatgccaaggctacaatatcgttaattaaacctataattcccccaagtttaaacacccaatctccgatgatatatatgtcttgtgcgcattactcaaatcatactcctaatatgaataacaaattacttatgcgagattccgagtcttgaactctcttttctattctttaattctttgtttttcttgagaacaagtttcgatctaattctgggatggatgcatatcagcatggtcttcgtgttgggacttcctggtacacaactggtttatgattcaatatttttggttgtgatcatttttgcaagatggtgcaccgcccctgcaaaaaaaaacttttatgtcgtacaaagttctacgttgtcttccatgagatcaatacgctcattaggttacacttgtccattgtttgag

SEQ ID NO: 31620 - DNA, 511 bp, Arabidopsis thaliana columbia
ggtaaaagtttttacccaaaacaaacattaaaagttggttttagtaaattaataacatttatttttacacgtttttagtatattacgcagttttaattttaattttttggggttcaaagcactttatgttcttagaaacctgaaaatgtgtttttaccattaactacatatataatttctttttttagattaacaaattattttgtattatacgatatactctaatcagagccagccggtccaacgttatcaaaggtcctaatcataattattgtttgttgtcacttttgaatgtcataatcttataaacgaaaagaacatggatgaccaaaaaaaaaaaacgaaaagaacatgaaatggtaacgacaaagaaaaatgttaatcatcaaaaccagactacaaaagcaaatttttgaatccaaatctcatcatttcgcccatcaagaattaaaacaccaattctaactttcaatgatctataaaattttgggccataatccttggtttatgt

SEQ ID NO: 31621 - DNA, 632 bp, Arabidopsis thaliana columbia
tcatattttattataaaatcaagagaactttttaaaacccacacccggccggttcaaccggttcaccgggtcacgagttaattgcgagtttttgtgggttttttcggttttgaacttgttgggttttagcactaaacccaaaccggaaaagtgttcgggtcacgggttaaccggtcggaccggacggttcgggtcgggcgtgaaaacactgcttttatgtaaaaaataaactttcattttcactaatgattttttttcctattaaatcaaaacccaagaattaatatatgaaaataattaggggacgcaaaaaaatttaaaagaataaggacaacgatgtaataaatgatttttataataaatgatgtttttatataaaagaggtagattaaatgagattttatgatttcgtttgtaaaaaccttaaactacaaccaatatgaaatagagggagtatgttttactcggtagataggttactattcagtacatcagattcatgtcgcattaattggattacaaagatgtttgttgcttttataaagggtagtcatatatcttccttttgtctatgactttataacatttcaaaattttaatcatgaataggctttcaataacgttggaccggc

SEQ ID NO: 31622 - DNA, 577 bp, Arabidopsis thaliana columbia
attttgaactagaatcaaccagttagcagcacctgcaatcataaaacagagctttgaaatgaaaattcaatcaactcaaacaaaacctagtggagaaaacagaacatacaaagcaaagaccttgcaaattgttggggaataactataatgtctaggaaagtttcatatccttgagatcacaatcatttacaaattaacacaacgtaataactgaataaagtaaaacatatcctaaaccatcatcccagcgaattacaacttatccaactatgctacaaacagcacctgcaatatgacttttattcaagaagctaacacgactaatactattgcattgtcgataaacaggaacgcacatgctagagataccatttcaagtaaactttgaaaccaagaataccatagaaaacatcactacaagaaggcgcaaatatacctttatcaatgctcaaagtgcacgccaccaatgaattctcagttctacatatgttagactttcctacacaggtatctacactggcagactctgagctccccttatcatcctttcccttagcaggatctttagccaaaggag

SEQ ID NO: 31623 - DNA, 577 bp, Arabidopsis thaliana columbia
gattttgatttcaaagacgaagatgggtcagagatacgaccggaggatagagtattaccgtggtgaagttgtgaccactgaaattttagttgtaaagaaattttgatgtaatattttgttaacttctatggcctactcaatgtaccttaattttcagtagattgaagaaactagttattaaatgctgacttctttgatgatctcttttttttttttaatcaatcatatattgagatttgattagaatgaagaacctacaggtggcgatggatcattaataatataagagattaataatataagagatattattgtgaagaaaccacttcagccaatggattggttagctagacaaggttgactttgggtcaacctctcactggacttttatctgaggctcttcttgtcgtgaccacacaagctcttttttgcttcacagaaggtaaattcttgtctgcttgttttgctttgatccgtcgtttatactttgttgtggtgagtggaatttgcttcaaaataaatcctgaaattattacgagattctgaccgagttcgatttgatataatataataatat

SEQ ID NO: 31624 - DNA, 522 bp, Arabidopsis thaliana columbia
gtaagctatgagcagtacggcagggaggctcgtgacttcaaaatccgagcttgacctcgatcaccctaacatcgaagattaccttccttctggttcttccatcaatgaacctcgcggcaagctcagcctgtatgtaaaactctctccgaaatttccgttgaatttgaattcgatttgatccgctgattaagtattcacctttctttatgattcgcaggcgtgatttgctagacatctctccaacgctcactgaagctgctggtgccattgttgatgtaagatatttcagactaaaacccaaatctgtctcaccattactctatcaaaagacttcaaatttatcacataaaggatagatttttgagtataagatgttttgttttgtgggtttgattgttgcaggactcgttcacaagatgtttcaaatcaaatcctccagaaccttggaactggaatatttacttattcccactatactgctttggggttgttgttagatactgtatcctctttcccttgagg

SEQ ID NO: 31625 - DNA, 504 bp, Arabidopsis thaliana columbia
attggtcatggatgtcgtgagccatttttctttttgtttgttctgtttcgttcttagtaccaatgattacacaacatagttgcaaattgagaaaacaaaagtttgggtccgaagagtaagggcttcaaatctattgaaataaagttaggggttaaatattgaatagacaaaaggtttaagactatatcgcaatttatcaaaagtaacattggatgttagaaccctgctgccttaaccactctaaaaccctaaatcccgccatcaaaagctagaagaagaagaagaagagaaaatcaaaaccaaagcttttggagaatggtgaaggcttaccaaagatacgatgcagcgacctctttcggtgtgatttcatctgtagattcgaacatagcttacgattcgacggggaagtatgtgcttgctccggcgttggagaaggtcggaatatggcacgtccggcaaggtgtctgctccaaaaccctaactccttcctcctctcgcggtgga

SEQ ID NO: 31626 - DNA, 555 bp, Arabidopsis thaliana columbia
ataaatttagttagattcagcaatttagctaggttcctcaatcctcacttaccatttgaaacttgaatgtgtctctatatcaattaaggtttacattcttttcgggtttcattaggatttaaggtttcaatttgtggattcatcctaaaaggttttcctagcgacaataatacttgaccttccacaaattccggagaatttcaactcagtatcccttgttcttattagggctctttttcttatgacaaaagaactggcatgtggccaatacgatgtgaagagtgaacgagaacctatgtcgatcgataaatcaaattagtactgggccaatttataaaaagatagacaagaaccttagtgggcgtaaataccagattaaagcccattataaaaggagcaataattggagatggaagttatggtcacggacacgtaaacttttacagagctttattatactttatggtaataagactttaacctttttttagtacataaagaattgttacacggctctatgtaaatcttccaagtagtagtactccgacaatagta

SEQ ID NO: 31627 - DNA, 497 bp, Arabidopsis thaliana columbia
tttggttattaaaattcatatattgtcatttttaattatataaaaaattaacaaaatttatactataaacattcaaattatgaactaaatatctcatattaatcactgctattttttatgtttatatgaatttgcatatccatacatattatagtacataaaacatttatactatgaacatttatagcttttttgtacatatatgaatttcaatgaataggcttgttataattttgttatttttttctgaattgtttatggctttagggttaattatccaaaatttaacatttatttagaaattaaaataaaatttagcttacaaagaattaatttatcatattggaattgaaaaatagctagtggctcttgtagcttttaaaatcttaaggacataacgtatgacttctcacgatgtctaagaaacaaaaccttcccccggttcggcctaaaccgccatccatccaaattattctccacgctattccacgtgtggc

SEQ ID NO: 31628 - DNA, 604 bp, Arabidopsis thaliana columbia
tgtctttatcgaactaatcaaaccaattttttctaatctagtttgatttagttttaaaggagagaactcctcaatattcctaccaaaaaaaaaagagagactcatcaatataaataaattaaggaatcatgtatataaattgagtcatcaatagaaataaattaaggaatcatgtatataaattgagttggaaccagagtgttaaccgtctaaatggataggatttaggaaggaaaattatatgtatagatctctacaaaatatgaaaatacacataaataattgcatatacataaatgtacattattttatcagcgataacatatttttgatgcaagattggatcatttttctatttgatttttattactgatttttctatatctaaattcaagtttggatctactacattatagctacactatttatttatacgtagccaaaccacacaccaaaatatttatttcactgacataagaaaatttatatcagacaacacaaaaataaatatatctaaaaacagtaattaaaagaaaagtaaataataaagagaatatttcactgttcaagtgaacagcttcttgcactccaagatgccacagac

SEQ ID NO: 31629 - DNA, 602 bp, Arabidopsis thaliana columbia
cattatgaagcatcttatatcagacatacatgtgcttgaaagcaaaacggaaactcaaatattgtgactccaaccatatttaaacaagattaaaagatgtaaggaaaaaaaaaagacaacagtgagctaattcaaatcgagcacataccattttacacagcacaaaatgaaaaccaaagaaggttaaatttggttgtaatggaaacattttacacagtaccatgaacgcataatcagaaacgtttaacacccagcgaataagattgctacgtgcagtacaaatcatcacatgtgcctctgaagtagatgagtagtacctttgggatcttcccattaagcctttggtctgtaaaaggaagatcctttacaatcacaatacgccactttccaatgtgatcattctcatcgatcttatgaccctctgcttcttgtgttgtaagagtaacttcatcccaaaacgcaacatagcaaacctgcatccaaaaaactcattcaggattggatgcagcagagagagaatccgatttgtcaaactccgtactcgatatgcaagagaaacagtggacaggagaaaatcagagtgacaacccttttgacttgat

SEQ ID NO: 31630 - DNA, 600 bp, Arabidopsis thaliana columbia
gatcccccattttctgctcaaaataaaatgaagataactttgtcgcgtagaaaagcatcattaattcaaatgcaaattggggtagtatcgtggaaggctatctatcaaatttgtgcagatagccacgtttctattatgtgtattaacgaaatttgcttcttattattatatcagccatgagattcaatctttctaaataaaattgcattttcaatcataacactttttatggttataatataattaggccacgtgaagcatcaaagcgaagaagctcgtatacataccagaacaaaaactaatattaggtccactcctattttgattagtttaaaattagatatttcgttaaacctcacataagttggtcatataatattttgcaaagaggtttacttacgtaatcttatgcccaacataaatcattgatctattttatgttatgcttcgaccctcgataagtcaagtttagctgcaataatagttcgtgtatttcttgattctttgatttaatacttatgcaacgtaattgaccaaatgatgttactatactatgcaattattgaggagctaattgaaaacgagttgaagaggatgaga

SEQ ID NO: 31631 - DNA, 821 bp, Arabidopsis thaliana
tactcgggcttgaagcatatcatgtgcatgtcttttccacttactgtttgtataattggcccattaagcaatcgtatttgtttgttacacgaaaaccaatcagtctcaaattttcacaatagtattattataagaaagatacttaaaattcacaagttttaattttacaaaaggattaacaaagatcacttcttccagcttcgactacgaaacagaggatcttgaataccaccgacaacccaagtttcctttgcgatatcattagagagtttgtaatagtttgtgtcgtaattcatcactaccaaattcatcttcttctcttcctccattaatgatctcagatccttcttatttcccactctgtccttctcttcttcttcttcttctccgctctgttttactctgttatcaccttcctctgtttcttctttcttctcctctgaccaattcttaaccggtgcagatctacaccgcatcagcaacaacgcgttcggcggcgggaccgcagtttctacatccgaaaaaacgttttcctttccgtcgacacactcttcattgttttgcttttcgtgtaaaaccataagccatttagagaaaactgtccctgaactttcatcttcatcttcttcttcatcctcctcttcctcttcctcgtcttcttcttcatcatcagagattatatcaaccggaggaaacgcaccaaaacatcgaaaatcgaagtcgcggaggcaagtcaaaaatcccatgacatctctcttaatcccaaagaacttactctccgacttgcttctatgtatcttctctatctccgccatcaaaga

SEQ ID NO: 31632 - DNA, 481 bp, Arabidopsis thaliana columbia
aatctgccaaacaaaagagtaaagaatttcgtcagagaagtgctatcatttttattctgccacacttcctccgccatttatacaaataaaaatctcctaccattttaaaatcctttataaaatatattttcttataactttaatgcaaattaaatatttcgaagaaaggtaaattgtttttttctactacacttacacatttcagagagaacttaaaacgtgaatccgatagatagagagagactgagaagctcactgcttcgctgattttgaggagagagagagagaagagtacctcacaagacttgcacagatatatacgtaagacttctcattgtctgctttcttctccttctccttctcctgtcttcttcttcaacttttacctcagaagcaagaacaagtcctgaagaacccaggtctctctttttttcctctgaatttcttctactttgaatcttctttgtaatagcctgagaaa

SEQ ID NO: 31633 - DNA, 647 bp, Arabidopsis thaliana columbia
aacgcttaacccttgctgttttgtattaggataaggccttccagtagcaggaacatcatacgcaaccttcaccaagcttaggattcttaatgttccatcatcaaaggacaatagaacgcagctacagatatttgaaaccacatgtttaagcaggacttcaaaccattgatctaaagactgtataatcaactgaggatagaacagtgattgataccttggatcttgtaaccaatcaaggctgtaaataaaccttggtactgggtgcaaatcccacagaggacggaacggatcactgcagaaaaaacataggaagtaagcaagaagctatggagagccaaataaaagaataaacagtgcagtcttgttaattaattgcatgagcatcaaagtttaaagaaaattatgtaatagctgataaggttaatgaagtgtaccgtaagtcccaaaacttcagaccagcatgtccagcagttgctactatgtttgcactttcctgatcactggaaaactttcagaaattacttttgattaataagcgaatcctcttcacagtttgattttatgggtgtgattttacgtcactacatttcaccaggagcccatgcaactgccctaataggagctgtatctgcgctgaagaaaagtaa

SEQ ID NO: 31634 - DNA, 111 bp, Arabidopsis thaliana columbia
tagtacggccgccagtgtgctctacggttctgagctgaccgacgccagcgaccggccggagcgcgcgccgcccgcgcccctgtcggatcgcgccaaggccgtgctggaacg

SEQ ID NO: 31635 - DNA, 565 bp, Arabidopsis thaliana columbia
gttctaagataaaagaactagacgaccgcatggtaaaacaaggccaaattaacgatgagcttcgagaagcacgtcaagaattgattagggtattattatataataatatcatgttcatgatttttgtatttgttaacttgtgttgttggtttcacatgtctatttttatttctgcaagggattggaagattatacggttgaaggatctaccatgatcggattgaagaagttgggaggaacaaggaaggaagggaagcaacactaaaagaagtgattacttacataattcaacagaacaaaaaactcaaaaccattgttgacatcttttgttagtcagtgtttctcattttgtagtctccaatctaacattagaatgttctcttctgtgtttcttgaaaatactcctagtgtcttttgaaaatctggtacattaacaattatttattttagctcgttcaaacttcaaacttggatcggagtgtaggttggtagtggtaagggaagcttgggcttgggcttgggattgggcttgggcttgagagcatgataatggtgacaagagaag

SEQ ID NO: 31636 - DNA, 557 bp, Arabidopsis thaliana columbia
tatcatgcaaaagacataaacatatgaaaagaatcagctacttttttctaatggcattaattaagcttctttactttaggtgtcactattttgcattcaatcttgaacggataacaagaagaagcaaacttggatttatatttgagggaattaaagtcactcatgatatatggataagacaaacactgttggagaaacaaaaacctatctagaagcgatcaacgatcctgaggagagcttgagtcaacgccaagtatacatccatatggtaacggaaacttgaagggacttgaatgttgagtgcctcgagactgttgcggcacgataccggaggattcaccaccttcacgctgacgtcatacgcagccttgtcgtaatctccggttataagttgagtgtcggcctctcccacgccatgcttagccgttgagaacccaaaccgcactgcttcaacgctgctgcagtatttggattctggtagtgctgcgagccaaagtggaagcgttcttggtgagacaaggaggtgtgagttgatgcatttgaggatgatacgagcc

SEQ ID NO: 31637 - DNA, 588 bp, Arabidopsis thaliana columbia
ggtcttaatggggtaggtaagggattgagatgtctagttttctgatgaataaattaaaaaggtatgttttaatagctttgattttgcttggcgttgcagtttacaccacccaaaatttggccacagtcaattgcagaccccactaaaacccactcatcatcatcattaccataaccacttaatcttcattccatatgatcaattcccacatcataagcgagagtatctctcactcatcaagcaagtgatcaagaaagttgcagataaataaatcaaatctagcacaaagcatcttaacgacaaaggttcaacaagttctaccattattaaattctactgatgtacagattctcaagtatcgaagtcaaaggatttggtcatttggggttggggtgggttgatgtaattacagagatacaaccacagtcacttccttcccaacctaaccaaaagggcctcatgctttgcagctgctactgcttccgcagctttgtttgcagcttcacgcttcattgccctctttgcacgccttcctgttatggcactgctagtcttctcctttggctcacatgaggatgaagaggcggg

SEQ ID NO: 31638 - DNA, 548 bp, Arabidopsis thaliana columbia
cgaccatttgttgtttgtctttgaatacactaatgtacatattgtagtggtgatgacattgacacttccataaatgttggctttttttctttgctattattgttttttttagcctcactttacccaaaaggaaaggaaatgctacgatcaagatcactgtaatgcattgtttgattataagaaaattgaataatgtaaatccaacgacctaatattaatcaagcttatacatgtcaagatataactcaagatctttatccatctatatataaatgacccttttgtttgtgttcccttccactctccatgactccatggagttaacgtttaaatttgttcgcatggccatatacatagagaaaaaaagaataccataacaacaatttaattagatattgaatatgtttatcttaattaaaggatgatggttatcaaaaaaggatgatagggactacaaaaagacctagaaatggtggtggtggtgatgatcatcgttgatgggtcatgatgatgatgatgcagattcattccttccctttgattgctat

SEQ ID NO: 31639 - DNA, 531 bp, Arabidopsis thaliana columbia
ctttgcttagtttctatacatatattaattaggtctaattggtatatctaaactagacctaatctcactaatgtaagtgctgcggcacatgcttgtgctgcaaccaagtgacacctcaccaaaataatctaaaaagactctcagtggtcattggagataacgaagaaacctggagtcttagacatttggagtaatttttagccaaattgtagcattgtaattcgacagcttaacatgtatctttttcttttccttttttggcaaccacacaattaaagtatcaaatcactgcaacatatttgaatttaattcatccctgaaattgacgtggctgagaagacttgtcacaagcctaagagcccttcttcatctataaatatactcttgttcagtgatgaaaacttaatataatttggtttctcccaaattctccacttgttcacttaatctttctcactacctgatcgtggaaatggcgattggaccatcaagtgtgatcattattgttgggataatcttggcgttgactta

SEQ ID NO: 31640 - DNA, 642 bp, Arabidopsis thaliana columbia
cattcctcagcatatgaatgtgctaatgtcacgcagaatggcccatggagtttctcgaacggtttttatagtagacaggaatctgtagatgatgctccacagtcatttcagagcagtcagcttttctccccaagtgcaggaagatcatctgatgggcgtccaccacatgcacttgtcaattttggatttggcggaaagctcattcttatgaaggacgatagtggttctctccagaattcatcatttggaagtcaggtaatgaagtggtattttttatattatgcttactcgcttatttttcttatattatgcttatcggagaacttgtatgaaagatattctccaattagaactttaagtgaatcatgaaaatcttttcactgctaacctttttctatccgactcagaagggaactgggggaagctccatctctgtcttaaacttggcagaagttatttctgggagtgcctcttattcaagtctcggagaaaactctttgagttacttcagttgtctggatcaacaatctcttccaggacccttggttggaggaaatgttggaagtaaagacttacataagtggcttgatgagagaattttgaattgtgaatcttcctacatggacttttcaagagggaaac

SEQ ID NO: 31641 - DNA, 405 bp, Arabidopsis thaliana columbia
gggtgtcgggcccacgcgatctgaggcgactgttgaacccttcggagggccagccttcgaacccctgatcagtaatggggggctcggagcccggttccttcgcggagaaggatccctttcggggtatcccctttcccggtccctgttgcaagagatagagaaagaggaaaacggaaaaggatacgaaatcggacgacgtggcgtaccttttctgacgcggttattacggcgaaggtgaagcgtcgcgcgctcctcctgccagagggccgcgtgtcccgccgcggagttaatgcgacggggcgagtggttggcgaggcggccgttgcgcgcgtgcgatccgttcgaggaacgggtcacgggtgcaccgtctccacgccgtgagaggaggctctcttgctgtctcag

SEQ ID NO: 31642 - DNA, 1534 bp, Arabidopsis thaliana columbia
tagaggatccccggaggtatctatgatatgctcaaaacagaatcgcccggctagtatgatgataaccaaaaaccagaatgataaaaaaaaaatcacctgtatagcctctggacttgcatatgttcgaggatatttccagtgatccgctccaacaaggcacagtctggcagtatctgagtatgtatcaaagttcttatccgcaattaaatagcaaatatgggccgcaataatctgattcataacaatagttcaaatgtcatgataaagtttcataaagtaaaacaacacaacaagggagagaaccacctcgcccctttctttccacatgcaatctccaagatgagtaatcacaagctcatcatctgtggttctgttcgcagtaattatacccaaattctcttcccaactgtcaagcatgctactacatccaaactgcaattcagggaaacattaagacattattaacaagctcccatgacagagctgcataagaaaatatgccctttgaaatggagtgatctagtccctatggtagataaaatattttttgtcttgcagtatgtttgaatcggactcttcgaaggaacaaaagagtttacctatttagtatttaatactatgtagagttttcttattctacatcttttgtcaacacgtttctaaaattgtcttactgagacgcaatagatggtttatgcattacctgaggttgctgtggaggtaaatttacggaaccaggaaaagagatatcgcttgtacttccagtggagaacacttcagctggttgccctgcaaccagcaggcacagtgttcgtaaaggtgacccgggtaccagctggcgaagggccatttgtttcacagtgtctacatagaactgcatcaattaagacatcaccaagtcagtcaaccaagcactacagtggaacgtttagttctatagcaatcaagagaaacaaacctgttgcccaagttgtgctgcgataacaagcgctggtccccataaatgaccttcttgtgcacattgtagagcctccatttttctaccagaagccagaagattctgcacctctgaagcagttacctggacaattcttccaaatgagttaataagcaaaaccatgttaattttagaaacattctccttgaaagataaataccagatatgatgtctaatactcacttgcatttgtgattccggtggtaaatgctgtaagcattggctaataggagcataaccattttgtacgccatcttccttggcaattgcaaaaagcttagcgactgctgcttcagcagagtccgtttcctgtttgcagtgtatattcaagaatgagaaaattgtaatacatatcaatgtttcttacaaaacagaagtgataagacatctcatggattgctcaccttttgcaatgcatcggaaccaaaaggagaacggagtttcccataatactgacaagatattctgagcaaagaaagaagcatctttaaaagtttccctcttgaaaagtccatgtaggaagatcacaattcaaaa

SEQ ID NO: 31643 - DNA, 607 bp, Arabidopsis thaliana columbia
  unsure (1)..(607): unsure at all n locations
ggtggaattaagtttttttttctttttctcataagtattattttattgatatgtctccatttgaactttctgaataaagctacaaagggcataaaagcccataacagacagccatgaaataggcccattagagatacagttcaaggaacgtgtcagaatcataaagataagctgaggacacgtgttacttccacaatctctgctggatgagacttcaaatcacggtgaatcatagaacgtcgtcggaaaacgaagccgaacaacgaatcttcttttttctcaccgattatggcaatcacgagtatggaggacaaaacatcaatatactgagcttttaaccagctaacttaggcgcagaactgtcttgacaactaaatcgaaagagacatctagatccaacaaagctatcaacacataaccttgttagaggccaccggagcagaactattaatcctcgaaataattgaacaaaagtagagacataaccggatctactggatttataataaccaaacagcgaatattaaacgtgatacgaacctcatacaccggacgactagaaaatacgacgaagctggccaacgntccttatagaagccggatgatg

SEQ ID NO: 31644 - DNA, 569 bp, Arabidopsis thaliana columbia
catttacagtaggcactttaatattagtggttccaccaagaggaagaatttgaaacacttctccggcgttaatgaaaggtccaaccggcgcatccttggccggagtcaatgtgatctgagtctgacccgataatggccactggcagaggtaaaccataaccccattagtgctcacattgagcttccttaaaaaggaaagtgcattgactgagacatcaaaagccctccagctcatggggcctggactccgattgtcctgaaaatacaaagctacatagtactttgtggccggaagaggaaaaggtggccattgaagctctagaggcgtccctttacttgctgtgaaaccttccacaaaggcttcagcaggtggaatgttccagaagtttgacgggttaattctgcttcgagaagtcaccgtcagatgcttctggtccgaaaacggttgccataaacggttgtatttgtcatctggatagctaggtttcaacatgtaacataccatcaaaagtcaggcaagaaaaagtgcttttcagatcccaaactatggaacaaaaagggcactgatg

SEQ ID NO: 31645 - DNA, 1022 bp, Arabidopsis thaliana columbia
atgtagctaaacgaatagacaaaccgagattccttatcatccattcttgtactggccatatatacatcatccgggaggtctagcgagaatatgaaaacaggcatcccaagttcatattccatccttagatgagcatgtagatgaacaggtgaagacttgtttcttgagaacatttcttggcctgattctggtaacagaggatttctgtttgaaaatggattggacattttcttgatacggttaaaccagctcgttgagcttgaagtattagtagaagaagactcattgcttccctttgaagaaggcataaatgggaattgcattctagcagagagtgacttttgcaacctcggttccatgtttctctctgtaactaaaggcttagctaatcgttgttgttgttgttgttgtccccattcgtgttcaaccgtacaccgaaaaaaccaccagaagaatattgttccactgaaaacttttcagcatctgatattttccttcttcttctctccttggatccctgattgaagaaaccatgtctctccttcgccttgtttcccggttttggaggtttcttgcacgaggagttaagcgcccgataaaacaaaaactcgtcctcttccccagcctttttaaaatcgaagaaatctcgtagagtaggaagaacattttcagaactctgtgccatcttttgactgcttttgtatagattaactaatctctattaccatcagagaatgacaaaacttctgcaaaagatttgttcagggcaagaacctgtatcagtactgtaacataccaaataagcttaacaaacagataatgcaaatgaatatagaaaagatcacttaccaatcacagcaaaatctaacttcaacttcttgaggaaactatcactgattatgaacttttacacaaagagaagttaaaatagcaaactctagatagagaagtcaaaaattttagcctacgctcttacagatctaaagccacacaacaaaagtgacataggaatcaagtagttg

SEQ ID NO: 31646 - DNA, 557 bp, Arabidopsis thaliana columbia
atttcaggcttcttaggtctaaaactgaaaaccaagtttctcttgtttcagccttttattcttactttggtgcatatctatttgtccttttgatggtgaatgttacttatcttttgtttgctttcgttcttctgttgtattgaaaaaggtttatgagtcattatctccttaaagaattatgatgtgattacagtttcttggtgataaggagttatattaagcaagcttgtgagtatttaacatgttttagtatggttgtgtcactctgttttaatgcccatatggtggattagtgacatagaagttgaaattgtgaacatgttttcatttgtctcaagctttcctgatccatttgtagtcaaagctgtaatacgatctcgagtctaatcgactttatgaaagagatggttgatattatagcccctaacattgatctcatcttgaatgtggaataaagacaacaaaatccaaaataatcagaatggtttttgttacaaactcttttcactgtaacctctaacacttggccatttcaaaccgttcttagcattctgata

SEQ ID NO: 31647 - DNA, 610 bp, Arabidopsis thaliana columbia
gataaccatcttcaaagtagcagtgtgccttcactagattcgcgtggtcagtatagtgagcccacatactattcaattaatcttttggtgacaatcgattcaatttctgaagaaactaaaatttactctaaagaccaaaaacaaaaaaacgaaaaccattttaaaaactacaaacattcaaggtcttcaatttttagttctcttataatttagtgaatctacttttttttgggttggttctaatagcaacatctaaaactaaaatctcaaatccaaaaactaaattaaaaaacaacatacattcatgtagccttaccgccttaataagctatgaatgggcgttcgggtattcgattcggttccagttcggttctagtttggttccgattctttcggttctcgagtttaggagctttgtaggaaccaaaacaattttgctatgttcggttccggttttaaagtttagaatccattaggatattttatttcggatattttcgaatatttttcggatattttaatattttaatattatttttaagagtatattccggattttttcggatacatgaaatattttggttcggtttagttcgattctaattattat

SEQ ID NO: 31648 - DNA, 837 bp, Arabidopsis thaliana columbia
taaaatgtataagtataaaagtttgtcttcttctctaatatactactaactgattactgatggagtacttttctaaggcataatagcacaactatgaaaattatattagtttttaacatatcataccaaattgaaacgtaaagagtttcctatacgatacagacaaaaattaattaaccgattaaaatatacactactaattaataacaattaacgtatagtccttttacttttgctaaattgtttattaatctcatctctcttttagatctctctacttacttttcctttttgtcccatttatataaaaatccaccgctcaagcttaacgttcgcgtcttcttctttcttcttcttcttcgccttctctctgagtcgaactcgctccgatcgactgagccaactcgcccgccttctgtaatgatcatttcctctacattgtactaaaaaagagtgttgtaatgactcgttccgggagacgatggtcggagcgacggtgagagttacagttttctttccggcgaccaatactctcggcggcggagatgtttaagtcagcgagatggcgtagcgagaagaacaggatcaaagtcgttttcagattgaagtttcatgcgactcaggtactataaacactcgagttttgttttggcttcttcattgatttctcttagatactaaaactttgtgtgtgattttattgattttgctcgcattgcttagatttgaattttccagaaaaataagttaagaaatctcaatttggtatttgatgtgacacattttgattcgaggtttttgtttaatttgcgtaggcgcacagttcatacagaggga

SEQ ID NO: 31649 - DNA, 342 bp, Arabidopsis thaliana columbia
ttgttaatggaagaaaccggcattccagtcgttgttgctgaaaacacgtcactgagaagaaaagaggacctatggggatggtgcagaagatcgtgttgtggctcgaagaagttgttgcagaaaccgagctgcaagacgttggcctacaccgcctgcaacacgtcctccaagtcttcgtgcctctggttgttgtaacacctgattttaaaaatataagagtttagctcatcaatcaattttatgtgatgtaccagtctcagtgcacaagatcaatgaagtcacctgtagtattggttgcaagatagcaggatcaaagctttctgaagattgaagaaggcccca

SEQ ID NO: 31650 - DNA, 528 bp, Arabidopsis thaliana columbia
atatatgtgataagttttaactcatttttattggggttatgtgaacattaaaaaaaaattgtgtaacaaaatacgacaaatgtcaatttaaaaaggtcataaaaaaataatagaaatattgttatagcatgggacgaagtagtcactagtcagtccaatcgagactacgtagtaccttacctacaaattgatgttcatggttcatatacaatccacgtacggactctaaaccatataatatatcattttagaaataaatttagcaaatgcgtaaggatagtacatattagatgatttcatttttttattttattagatgatatcatgatgtacatattaaactaattttatgcaaccgatgattctagtagactagctagtagtagctaagtcactatcaatggaaaaataaaatccaatgatacatgcattcgaaccgacctcaattgacacaaatcgaatcaattcacctaaaaacgaaatgacttttcgcctaattcaaaacactcttctcaaattctatataga

SEQ ID NO: 31651 - DNA, 554 bp, Arabidopsis thaliana columbia
cacaatggcaaatctaaaaatgtagctttcacgagcatacttaggaacacctgtgcacagacagaaatgggatggacgcacatcagtaaagagaacttgcagagatcatagtcatccgcagaacacatttcatgtgcttgttcctttgtggtcaatagcacaaagtttaaaatgaacaagtaaagttttgcatactgtacctcgcattctgtgatgagagacgaactatacagtcttataatatgcgcaaccgaccgcagcactaaccggcgaaaataaggttcaaccatttctccctcgagctgagcagtaacaaaatcttataagtaagcgcattcgatatactttaatgctaatccaaattatattttagatcacatggacgcatacaatacaaaaggtaatgaggcatgattttacctctgaactggtccgaagcgatgtcatcagaagggaacagatttggtgacgcaaaacctgatgaataaataggcaaacttttacagttaggtcacacgctaatggaaggatgaaaacaagtgccaccaggaaat

SEQ ID NO: 31652 - DNA, 843 bp, Arabidopsis thaliana columbia
gggatttattatataattatatgactgcttgtaaatttttttcccaaatatcaaatttacctctctttttttttagtttttggaatatcccaagagtgcaaatttatgtggcatggttttagtttggcttcggttcagttttggaactggccgttttacttatcgttgtatcatatttgataagattttaattttctgggatttttttttggttttcattgatgtatctaataaatttatatatatattgattgggcatacaaaaacctcttgtcttcatgcttcttagattatgcgtttttcttttgatttaatcctttgttaatgtgtttctgtacgtatgactcattagtcatttagtagttatgaacaggttcagtgtagctaagctccgccgtgttagcacttaaataaacaatagtaaaatcaatttcttatgataccttaactatcttcggaaacatatgataatatcgaatataaacaactatttattccacatcaaaagcatgcactaggcgatttaaaactaatgatatactattatagcattagttaatttgtattaacgataaattaagataactcgaaagagtaatcttaggtttgttgatgataggcttgagatatgttagtggcgaattagaaaagattcagagggaattgtacggaaaacgagagagccgtgccgtcgcgtaaaaacagtgcaaagcaagaatagacgagcgatttgcgcagaggacccacgtgttagtgacgagtctcatgcgcgacatgtattcccgtggcttaagatgtgtccacttcacgtgtcgtaacgtctatggctgacgtacttataat

SEQ ID NO: 31653 - DNA, 496 bp, Arabidopsis thaliana columbia
atgttcctaattttttatttttttctagagttttgaaaaaaaaattgtttaattatttctatatttaaattttttcttggatgaaaggtgcttttctttgtaattacattggtaatgacagaataatactcaatagtcaatactaatttataaaaaaatattggaagaagaaacaaaatgccatctcattttggtctcacacacgacaacataaaaagtcgagcgcgtggctttcacttgttatcaatgtcgctatcgaaatcaattgagcatttagtggaaacaggtaaggaaggcgcacggaatctcatcgagtaatctcggtacgggaactcgtcgtcaaaatgtccggtttgatttccgtcatcgaaatttaacgagtagctcaactgatcgtaccggaatttaccctgatccgatgaccggttaggcattgcaccacctccgcatcctccgctgctgtttccgactctccctcctcctcctccacagcagt

SEQ ID NO: 31654 - DNA, 576 bp, Arabidopsis thaliana columbia
ccaatcgtgtcaacgactgcttagaatgaaagaggaagctatagagaaggcgaaacggaagtggatgaagctgagttgatgattccttcatttcatttaacgtagccacagttttgggatttactcaactttttgttttgtttctttgccttttatttcatttctcgtagcttttggttacatgtaaaaatatgcattgcatcaggaatcacagattgaaagaatgaaatgtatttgacgctaattcaaaatttagaactatatggattgtgtcattgtgtgtacatatctgttaatagtttagaaaattggcaaattcattttcgagatataaaaagataggagccaatgaagaagaataaataattaagagatgataacaaaaacaaaacaaaaaagaagcaatgactgtttgctttaataaataaagatattcaaaaattccatcacatgattgcaccgacgacagcgcaacgcagcgaacgagcgacacgtggagaaagcagaaatgagcgaggaggaagcagacgatttctgagagagaggaatggcccgaaggcgttttggtaagaggga

SEQ ID NO: 31655 - DNA, 477 bp, Arabidopsis thaliana
ctaactcatttgaaatctctgtaagtaaccaacgttttccccaacactcctcaaactatacactagatagatagacctctacaacaccccttgttcttgttgcagtattctcagaaacaattcattttccgggaaagtacctgaagaggtaacagaattgcaggagcttgagatcttggatttgtgtgacaacaactttggccaaccatttcccttcgctcgcaggctgcttcagatatctccccctccttctcaaccttctcctccatcgcctatggaggaagtccccattgattttcctttcttctttgcccctcctccgcagaatataggtgcaagccctcctactgaaacccaagttatcccaaacccgtctccagttccccctccaccagctcagcctccaccagctcagactccaccacctcagctttctgaagtgcctcatgctgtcaaccaaaaagaaatctcataaga

SEQ ID NO: 31656 - DNA, 591 bp, Arabidopsis thaliana columbia
tgtacaagattgtgaaataacaaataatattgtaaatttatcaaaaaaaaaggggattgtggatcaatgaatatgatggagaatgttcatagaagaggtaaataatagagggacccaaaataacattgttgaaatggaatataatcataaatgagtcacatcttcaaaatctgatcaaatcacttggaaaaaaaaagatcaagtcacatgcaaccagtaaccacaatcatattttggccggtctatcaccatacacattgtttacagctcacacttgtccctccttatatttgttcgtatccatttgttttcttctctctctactctaatctcatctttatgtttatccctttttgaattttgaagctactctgtcctttgggtccaccctccaccacctctaatttcaatcacgttaaaccggccatattactttaaaccgaccgttttctactaataggaaaatccgacccaaatttttgactaattataagacataccgccgctataccatgatattgtcaaagaaaaagtttctaaccaataaccactatagactaaaagatttcaaataatttgattgatactgca

SEQ ID NO: 31657 - DNA, 647 bp, Arabidopsis thaliana columbia
  unsure (1)..(647): unsure at all n locations
ctagtaacgcatcttgacttgaaatgttatgagaaacatcatcgcacaagcaaagtgaaaattggctttaacaactttaacaaactcatactctgtgccatgtctgccattgtggtcatcaagagcttcctgagcaaggctcttgagtaaatcctcagtagtatcaaactcatcgtcagcgaattgatcagaatggagaatagcaggatggtagttgaatacacagaggaaggaactgaaatctatatcaaacccctgaaaagtgatttgttattaggatcataaataaatagaataaaccaaaagtaattaggggaacaacacatacatcgctagcattgacttgtttggtcataagggcaagttcttcctctggtgtgagctcaggcttatcttcctccgtcctagtcatgcatgaaggtctaacatagccacggccccncaggtttccacagcaaatacgcaggttcgagccacgcaacccaacctgagacattgtaaattggaatcgatagagttaaattataaacgttaaaaacttaacatgtacgaaattcgaaatcgtacttccatcgatatcacacatcgtcgatcagcagatgaagaccctaaccctttttttattttttttggggaaggtgatttag

SEQ ID NO: 31658 - DNA, 470 bp, Arabidopsis thaliana columbia
tactatttatgtgatgttcgtttgttagtcgttggcgaccgcgaccaaatgttgttcgtatggaagtcgctggatatagcgacctgcgattataatttttggtcgctatttatctttacgactgattataaaacgcgatgtctgaattcagtaaactcggcgacggtattgttttacattcttttacattttaaaactctattatttacattctctattaattataatgatgctcactaatataaagttttaaaatgtgatcaattgtttcaaactgcatttgtcttaacaaaattcaaaaaaaaaatataaattttttgaaataaatgttttataaatatcaaaaggtaaagctacactaatcttttgcattgtattcgagtaatataaatcgaaatgaccaaagtctctaaagaatgaataaggatcaaatttcaaagaaaagtgaagagtaatcgtcaactacaaga

SEQ ID NO: 31659 - DNA, 187 bp, Arabidopsis thaliana columbia
cctagacaacaagttcatcaacagattaatgggatgagaaattatccgcgacgacatgtctttggctcgagagttcctcagggatcctatggtaattcgcgttgccctggcatttcagagacgtgagcatcgatatcatctttgatctattcttttaaatttgcatgcgtcctgacccgacgagttt

SEQ ID NO: 31660 - DNA, 803 bp, Arabidopsis thaliana columbia
caatcataatcaaagcattttacctcagagactggactatgcgacggatcagaaagatgaggcggtagagaaccagaattaaccgatgatctcggcggatgaagcggcgcacttctctcctttctactctttctaatcattggcgcacgtcctccacaactctaggtgaaggcatctcgttcatctcgcaaagcgtcgcagctaacttcctagctgaaacaggagcaggagctgatactttaccggttttgctcccgcagtgagacgacggagaagcagcagcgtgtaaagcaccggaagctcgtggagaaggagatcgacccataagtctccatgtaggtacaggagtagtggatcctcctcttttaccaacaactatcgctcttttgaatctataaccttcacggagaatcgaagaagtcgacgatgtcggcgaagaacaaccacgtttcctgattttgccaagtagaagtagattctctacgctttgattctgcctcggcatattcaaaacaattgtagatctttctctttacctggaaaaacaaaaagcagattcagaaaatttcaccgatctgttagaaaaaagcacaaagaccaaaattgaagtttttagagtgagtaagaacacttacagaaacttcaaagcatttctatggcttcttcttctacttcagaagataaagttggaatgggaattgggggaatttggaaagaaatggcggttgctgtgttttgaggttttttgatcagactagtgtacagagtgttatgttaaagtgaaaaggggaaagatgacagga

SEQ ID NO: 31661 - DNA, 611 bp, Arabidopsis thaliana columbia
caactgtacagctgtgtccccctttcaagtactacgacgccctcgagaaggagtagaagttggcagaagtttccaagagaagtagggtttgactcgcttgacggagggtgggaaggaacgcgagttagaattctaacgccggtaactccttgttgtcaccatcgaagtcgattaaaaccaagatcacctgatggaggccagaaataagaacaatggcgatggtgtagagaaaaaatggcacgcattggacaagaactggggtgggtaattgcgtttgcaatcgaatgaagaaatcagagagctatggtaggaaataagtgaagaagtaggtttagggtggagatttttattcgtagacagcacaaaagcaggtgagagacatattgaggaacagtgtgaatgatgatagcgagagagatgaaagagtaatttacaaagagagaaatactcaaatccgaaagacataagttggagtgcctatttccgaaagcacaattattttagtacttttttgtaaataactttagaaatagaaacattttggttaaaagtggtaaaattgaccacatttctttaataatattggactagataatattttacataataat

SEQ ID NO: 31662 - DNA, 495 bp, Arabidopsis thaliana columbia
gacttcttcttttaatatatttcagtaatgggccaaattgaacataaaggctaattgagtctaagaccaacacaattttggtgatgattaaagttcattaaaaacccatttgaattgtagacttgtatatgcgtagactttatcttcctactctgatggtaaagtactatgtcatagacagcacatcatagtacttgtacccatcaatctcgtgcaatcaccaatcataacattctttcttccatgaaaatggtgcgagaagttaaaagattgctaaatttgaggttatacttccacaaaggcctgcttccacatagcatgatttgagttagcggtaacttaggttgcataacatggtttgtagttctgcaagtgtttgatccgtttcattaaatgaattattgaagctcttgcattttcaggaatgcacaaacttgtacacgccaagttattattagttgtaggagtgattttcatttgttgatatagcgatat

SEQ ID NO: 31663 - DNA, 556 bp, Arabidopsis thaliana columbia
ataaattgaaatatttgttttgtttcttatggaaactcatatatccaaaatctagaatttatttgttcatctcactatttttgaagccaaacacattcctaaaatattccaagtttcaaataatttgtctaccttggtagctaaagacaaaaaagtgttttcctttttttttttattggcttatttaaaaagtgttaaaatttgaattttgaggcaaacaaagacacagtcacaaaaacacaaacgtcagaatgtatttgttacacaaagccatatacatacattgccatcaccgacgtcactggtacataaaaataagactaaactatcaaatgtttcccacgactaatcgcttcttctcgaattataccataaaaaatatttctagaaagcaaaaactagatgaatctccacaaaaatatctttgtttatttcaaatatcaaattggaataaatgcattattataattataactatgctttttgaggattggatcctcatcaggcgagtgagtgtatctatattggatgatgagggcttgtaatttggaaatgt

SEQ ID NO: 31664 - DNA, 458 bp, Arabidopsis thaliana columbia
gagaacaagtctccaccagattcttcgtcatctcgtcccgtctccgccgcgtcttccacatcggcgatacggagagataagtgttccgattcttctcgaaatcttcttcctctagcttccgtgcacgagcagcttgacgctggatctgctgaaacttcgaaactccgtgcattgaatcctccggtgcttcaggtggatcgtcatcagcagggttcgggtacgaattccggcgaacaggtccgccgcaaccgtgagagtacgggaatttcgagagaatggtaagagaactggtttgtaggagaaggaagaggttgttccagttagagagagaaagactgggtgaggagagagaaaggtgaacgccattggagacagagagactgagaaagcaagcagtgaaaggttttttcaaggggttaagagttgggtttttcaatttttgggttacaacgatgcgt

SEQ ID NO: 31665 - DNA, 1007 bp, Arabidopsis thaliana columbia
tcgatgatcttcccttttatggccagtcaacacgttttccctatatccttcaacgtgaggatcagttggacatgcgttatctctagtttgagttggcaaatatttggactagcttgtcctttggtgtttccatttccccaccttctagactagcatggtccgctatgtccaaatttaagtgaaaacttcaatttaccttccacttgggtcgggcccgtcctattctctccccgtttagaaaagaatatcttacgttttgtttagggaaatgtttaagataagtgaacgtacacaaaagttttcatttatagtttcgtaggaatatgctaagactcacgtagatatgactgtcactaatcatcccaagaaatatatacatccaaattgaacgttaaattaaaggcgaacaaaagtgttcctcgttataataagtcacggcttaacccattccttcgacaacatctttttttttccggctataaacgtctccaccgttgacctaaactcatcactgctcagatcatccatatcgcacaaccgtctcatactccggcgtaaatctccccgcacgtcaatcctctccgatttcgaccttctgtaaacctgatgatcagtagcagtactctcagtagtagctggaggcagaaaagtcatttcttgcttcctccttatagcatgagctgtctcccccacagaactgaccgcccgaaccatctctcgcctcaacggtcgagcctctccgacggttagactaacggaggtaagttccgtacccggcattccttctgaagtcttttcttcgctatcagatgccaaagattgtgatactacggcggaggaggagtaaacgtattgtaaatacagatcgtgttcggttagcttctggtggttagataaagagaagatcagggcaagtgtgaacgttcacgacgccaaatatgtatattccggcgccggtcataccactggaaataatacgccggagatacttaccggcgaagaaagtt

SEQ ID NO: 31666 - DNA, 657 bp, Arabidopsis thaliana columbia
  unsure (1)..(657): unsure at all n locations
tgcgggaccaggccacttgtcgattttggatggttagtatagtagttcccgacaattttggttggtcacatcttttgctaacttcgaatacgggttggtatacacttaggattttagacaaaaccatatcaaagactgatacacttaagattttagacaaaatccattatatgaaagactaaaccaatcgaattcggtatagtattcattggttacagaaaatggtaattgagtggatccgactttaacaattttgggtttggttaatgttttcatgaagagagagaagcaaaagcatgtgatagaggataaataatcacatttagggcaaagattccttcaaaagatggggtccacgtgggtatggaggggcacagtgtccggtgggttagggaacagtgcacaaaccccaacggacccactcgttgcctctttcatggaccggtctagttcggtacggttcggtttctgtccttagccaccacctttttctcacttctatatataactcctcttcatgtatcacttcttcatagtccataacatcatttatacgctctcttcacattcagttcanaacaaattcacattcttgatttgtgatcgtatagagaaatgaagcgaccggtcgagtgtaggagacnnaagagagatgtg

SEQ ID NO: 31667 - DNA, 572 bp, Arabidopsis thaliana columbia
catttacaaccttaattgaaataacaactctttagtcgatttcttttagaaaagactaaggaaagaaggtgccacgtgtaacatacgtgttagcacgcaagaaggagaagatgaaacggacggtgccgaccaaactgcacgagttgacacagctccgccgccggcttcgggaaaccaccaccactccctttctacagattacgtccatgcaaagcaaattgaaacccactggatccgtctgaaaaaggccacaagaagacatcatcaagtcttcaacttcttaacccaatctactcgttggaagctccgcctaagacctaaaaaggtcctcttcaagttaagcggcgaagatattactccgacaaaggagaagagtcaagttgacggggaaacatggagatcaatagatcgcaagaggagatcaatttgaatccctgtagaaagaggataaacaaaaaacagaatccaatcttagccgaagcaaagatggagattattatatccgattaaaccggagaaagatccggtacaacagaaaaacaaaatccgaccccgttgggaccggaatatat

SEQ ID NO: 31668 - DNA, 651 bp, Arabidopsis thaliana columbia
acttggatagtgtgagaaacctagctacagatttcaaaggcaacctcctaaatatctcgatctctaggtccagaggcagttgatcaaacttgtttttctcttttgacttttcttgattgttctcggttttggtctttttgctgcgtgtcttcatgatcaatcgctcttgtttcgaaaccctaaaaaaggctctccgtctaggcgtctactctttgctttgctcttttctagcaactagtaaaactatatatatataaccaatgggcttgttgagtcagattttacaagcccaagataaagtctcatcagaagcccacttaagtaagtagagattttgtgtcgagaacatcaatatatatatgaaattaatccacaaatcagctaaatcttggtgacagtttcttttcctcttttacatcttttgttcaacaaagcttcatatgacctatcttatttcttagcttatatatatctatcttattaagttattcaagatcatcaatcttcttgctttggatttgcttacagaattaaaccaggagtgtaaagacgttaactgaaacacctatataaccttacacacttgttatatattatacaagaattgatcagagtattgttcatgacggtaaacttggggggaaaaaaaaa

SEQ ID NO: 31669 - DNA, 653 bp, Arabidopsis thaliana columbia
tgacacatctgaatcttaaatctcacactggctgttccgatgctttagcggctgcctttatgagacaataggtgattcctccagtgattgatgaaaataaacccaacaagaacgcataaatatgatggtttcctttaaggttttcattctttccttctaatccaactgccaagaagagataagtaaaatcaacatgacatattcgtttcctcatgcataaaaggacagccaggagaagttttattaagagaataaatagagaactattttgttaactcacttctgtaccttggacagtaagtgttgggccaaaaataaaaagcacgccaaagaaactgcaagcaagacctggaccaaagcgcagtaaaagagaagtcatatatagacttgctttgtatgcatacaaaatcatatatagttaaggatgatgagaaaagctctgaacctccaatatcagttattttcaacttctcatgcataacaacacgtgctgcaatggaagccataattggattcaagaagcttagtacaatagcttgggacaacggcaacatttgaatgctgtggttccaatgtcgattaacagtgaaaaacagtgttagaagtcttactttgcgacgaatgacacattgattggtggggaatggacattg

SEQ ID NO: 31670 - DNA, 576 bp, Arabidopsis thaliana columbia
ctcagaaatgaaaaaatcaaaagaataaacacgtgtgaattaaccggtttaaccagtagcaccaaccgtttgtaccggtcagaaaaaagccccacatgctttaatcaagcaagcctttaaaaacaggaaaggcaaagagttaaataagcctctccaaaagtgtgtctgtaacattaccaaaacgaaaccttccttgtggattcccacttctttcttctgttttcttcttcctcttctttaaattggatgttttgggcaagaaacagagagaaacacgttaatttgagagtttgtcattgaatatttggtttgcaatggaaagagattttctgggtttgagcgacaagcagtatctaagtaataacgttaagcatgaggttaacgatgatgctgtcgaagaacgaggtttgtgttcttgtctcgagaatcttttattttaatgtttcaagaagagatcagttttcacttttaacatagccgtataaagttgtttatttaaatataatttttcagatccaaaacttgaaaaaaaaaagattccattaaatcttttataaaatgagattggatagatta

SEQ ID NO: 31671 - DNA, 840 bp, Arabidopsis thaliana columbia
ggtaccgatactagtgttagtgatgttttaagaaatagattgattggtgtcgtattatcggaccagtcactatcttatactgggtttatgggtagccgtacgtgcattctttgccttttaagtctttattaatccaaaataattctgtaatggattaacttctaatttagttggtgttgatttgttatgagtgatgatgacttatgacttatgaggcatattttcagcgtcgtatcgtattgtttaaaggttttgttcaaattttaaaacaaaacgaaatttgaagttctaattctcaatcattcacattcaagcctagttattaaaatacttacttaggagaatcaatttaattctacatagtgatggtctcaatcattcacattcaactgtgttttagttttagacatgtaataaatttgacgaattcgtattttagaattgtctgacgaaaaaaagattcccctcgtgactaataaaaataataaattttgttttgaaaaccaacatcttgtaaaatgattttttttttcttccgtatcccaacttgtaaaaaattaatttgatctatccccaacacctgatttgtaatgtccaacttttaacagaaccacacttatttattttgtcaggcggctgcgcacgtcaacctatctcttgcctccacacgtgtcggctcttacacatctattaaaactctcagggtcttagctagatttcatgttaatagtccagttcccaatggacttctgataagtgtgttaatacatacaaggcttgagtgttcatcatttggtgctgcagtaaaagtgccatgcgccatatatataggtaatatat

SEQ ID NO: 31672 - DNA, 576 bp, Arabidopsis thaliana columbia
gacacaaactattagcacatgaggaataatcggattataaagaataaattattgggttataattggttatttatatgtataagtgaatttgatgaaagagttttctacttcttggttaaaggttttcatttgtaaaccaagaaaatcgattcaaatacaaccttattctgaatgaagattcaaatacaaccttacacatgtccaacgagtgaaattacttaaaataataacgccttctcttctcttcacgagtgaaatattttctgaaatatatcgaaagcaattaatcaatgaatgaataaagctgtacgaaagaaattaaaaatatcaaagcacatatcagtagatgaaagcaaactacatacctcaaagcaagagagtacatattccacgtcgacgtctgagatttggtggtgtagaacaatcctgattctgtattaagagaccataaactccaagttaccattaattacatccaaattaaattccagttttatcttattctatgtggtattacatgatcataaaaatgtaatatatatatcatatgtacgcgtacctgaatgtagcttgggg

SEQ ID NO: 31673 - DNA, 506 bp, Arabidopsis thaliana columbia
gtgctaatcaaaactctaaaaatattgttcttctcttgtacttggatcatttttatcctgataaaagaacttgcaacgcctttaccagtttcaaaatttgttcctttgcacaagagtaaccaatatttgtctcatgtttgtgtaatctaaattactgaggtaaaaagaaactattcaaactaaggacgagtttatgatttatcactacagttttgtgtccagtatccctttgtattaatttcaaattacttgggttattcgtctctatgtacacaacaataccgagtcctatgattaaattaaaacccacttcactcaccaacttctgtacttgcgggaagtatcctctacaaactgttgcagggagagagaggatttggttgttaagactcgtcagccttaagtacacaaggcagctgctgagactgggtatttccactctttgcatctatacgcaatagtgtcaataagcttgtaaacatccaatattcactaccagttattta

SEQ ID NO: 31674 - DNA, 482 bp, Arabidopsis thaliana columbia
ggggatcgaggattactgtttctttttctcatattcttcgagaaggttcagacaagctagtctgtgttcacatttcacataattattatgtctctttcatgccaacacttttaatcagaatgagctatctttcttttccagtgaattcacgatgctttgacggtcaaagatgattagttaggtcaaaagacaacgaacagataattatctttgcattcctagagtgcaaattgtggaaatttcgaaaaaaatttctgcatattattgtctcgctcgaaagctgataatctagaacccgtttgtacgacaaacttctctcatttgggcttcgagcttcccacatttaccttatctttaattgggtttgaattttttggggttccaatataaattttaattgggcttaaaatcaaaatatggcccataagcaccttgtaatcttgtcacaaatctagttatttcacgtcgtttgtacttacagt

SEQ ID NO: 31675 - DNA, 566 bp, Arabidopsis thaliana columbia
aggaggatataataatttaccttctattttgtgttgactgtaaacgaagttctaaatctgtgtagttgtggtactatgtgaaactgcgtaggggaatagaggtcgttcactcaagtttataagatggcacaaatagaaagaaatcaatttagttgttctctcatttgaaaggaattcaagcaatatggttgttctcgtctttccaagatgcattgaatagtaaagcatctaattagtaaagttctcataatgctcagttgctcacattgatctttttaccccttttaattagagtacagtcttgtaaattacgttgttttagccaagtttggcctatgtaataatttatttgggctttaaaaagcctcttcaaattagagtattgctgctgcagaaaaagaaaagaatatttgcgtggagaaaataaaggaaaacaaatccataattagtagtcggtgtatacatacctaaaaaggcagagagacgttaagattcaaatttcaaaaaagaaaaaaaatatgagtggcaggttcgttattaatgataaacttaggggcaatattgga

SEQ ID NO: 31676 - DNA, 513 bp, Arabidopsis thaliana columbia
gaatactggttagtgaagcgtgttaaaacatttgatacgtggttttgtcattcgttatatgaacttcatgcttttgcagcttgagtcctgccattaacgcacttcaagataggcagaaggagaacaagatccgggtatgtgtctcctcataaataaagctctctcatggatgatgcttttttttggttgggtctaaaacctgttgtgtgttgtgcagttagcaatgctgatggatgaagctgaggttttggaggcacaaaaacttaaaggagcagagacaagccggagaccatctcatctggttcacggttctggcagccgaagcagaagaggatcgtagaaagacctgcaactaaagacacatgcccgtcttctttgtgtatatttgtatttggacatttgtttcttacattgtattattttgaccagactccatcgctttgttgttgcttagaacctgatccacttttggaagaacaaaaaagaagaatgagaagaacattatttttgtga

SEQ ID NO: 31677 - DNA, 610 bp, Arabidopsis thaliana columbia
ccctaacagagttagtcaacgtttacatttttattaagttctaaaaacgacgtcgttttgtctttacaaaaaagacaaaaatcaattcaagaaaagacaccattaggattcaaacccgagatatcgtaaacattacatcaattactaaaccaccaagcggaagtacacttacataatttaatacacagaaaaatatataacatacaccaatagttaaagatttaaccattgaatagaacggagcccgtcagattgttacgtactgagaattggaattggaattgttgcgttggcttgggatcgagatttacgcttctcaagcttgaagatcgagacgtatttaccatcactatcgattctcaagttctagatccacggtttctctgccaaaatggaaaaattgtttgtgtttttcatgctaaattctttagtttagttggttaaatagcatgtttttctttgagagttaagtatagttcgaatccaagctttgtagttcgaatatgagtaaattttatttaattcgtctgtctgtagaggatatatgtatttgtctgtgttgattgagcaataaaaacttcagcttgatggttgagtacacgttatatgt

SEQ ID NO: 31678 - DNA, 529 bp, Arabidopsis thaliana columbia
  unsure (1)..(529): unsure at all n locations
cggtacatctnnnnnnnnnnnnnnnnnnnnnnnctaaaggctcataagatgatgatgcctacatatacaagtttgtcaggtatgtacttgatattacggtaagaagatccactactcatattacataccggagctgctccaaaggtatcatacgatgcaactacagcaattgttggaagctggctggaatctccttctgctcttaatcctggcagccatccctacacacaaaccacatcgtcttagttgttctgtatgtcaagcatcgaatattaacaagtaaaagagggtgaaagagcacatgtccagatccaataagtaacagttactaatagtaactacaaggagtgggcagatcaatattaagatacagtaataatgttcaatctaggttcgacggtactaaacatgaaggaactatacaccaaattcctaattgctgaaaaacggtagatcttaaactgatctataaagatgatgcaagcgaaaacgattgctgcattgcacggggatgctcatatgcatgcta

SEQ ID NO: 31679 - DNA, 511 bp, Arabidopsis thaliana columbia
gtttagcgtctttgagttgacttcgggattagctcatgtttgtagaggatggagagctgcttgttgcgatccgattctttggaagacggtggatttgtcaaacatgagatctagtttcatcaagatcccattagagccttatgtctatgtggaacgccgatctgatgaggccctaacccgcatcctggaactctccatgaaccttagcggaggaagcacgaggaccttgatgtttcatttcaacttgttcttgagtgatgatcagcctacttacgccgcagacaggtatgtccttatcgtccttccacttatttgtcttccaaattgtttcatcatggccgtaaactacggttttttagtcaaaagttggctcagtttttggtttggttaagttcatgtacccactttcagtcaaaattgctggattacaattaagctgaatctcgcaaatgctaaaagttgacaaatctgttgtactgaatattttgcaggtgtccagggttgagacggg

SEQ ID NO: 31680 - DNA, 575 bp, Arabidopsis thaliana columbia
tgtttagtgttcgtacatcttgttggatgagttatacttgtttttcgtagtgaatgatacataattatttatagtaagttaagatatatgtgtggtgtgttatttgaatttcgcgggttttttttttaacttcttccaacggtatttaatatttctttttattccttatatattaattgagaagcattttaaaaaaataacccatacttttatgtatcattaaggaaaatgtcacgctgacatgtcgttctcacattgcttctcaatccatttaattaaacacccaacataatatttacgaatttgtcattagttttacttctatttatttttttaaattaatttatgcttttcattcaattattaaaatgaaaattcaattaaaatatatgattaagagatataaatctatacaaaatagagtatctaatattttatatctattaatataacaagatatacataataaatcatgataaacataatcattaatacataaataaatatttcactaattttgataattaattaatacaccattatttatctaataataatcaattatattgcgggta

SEQ ID NO: 31681 - DNA, 448 bp, Arabidopsis thaliana columbia
taaaactcaaaacaattttaaactctatgaacttgagaaagatgattatatgaaccaaatcaaatattataatatatagttttggtttcttgacaaatttatagaagatcaaattttaagagaatggtcaaagttttcacaaatatttatctaaattacactcaaatgtatgtattaaataattacagatttacattaaataaaagtttttgcaccatatggcaaatagcaacattagtttttggttaaattttgaatgaatttactatttatttatttgttatgtaatggtacatttaataggattttgagtttaaaatttaattctgttaatagtttatttaataaatacgacggcttacatacttccaaaatcttaaaaacgttttcatatgtttattggcatttatttgcataaaaaatgaacgacacaccaatattttatttc

SEQ ID NO: 31682 - DNA, 616 bp, Arabidopsis thaliana columbia
ccccaaaaaaacaatatctagtttaaacaaacacaatacgtacgttagtgatggagaatttccaaagtttgctggtttcaacatttgtttacgaagcaatgtggcggcgaagaaacatggcaactgatctcaatggtgtcctggaaaagtaacagcatcaaagtgagtgtaacttacaacttcaaatagcatagagatcagaatggataatagagatatatattaccatagagatcggcttttgtttcctggttgtgtaacctcctcttctctttgtgggtctgtatggacaagtctttggaatttttcagacagtgctttgtaagacagaatctctgttggttcgatttggctaatcgcagcttttaaatgtcgcatgcttatttcctccatttcaagactctcctgattgataaaaggatgtgagacacttgcaacaaatttcaggcttagtgctggaaacaaggactagtatatatctaacctcaagtgcagcaatagctgcttctctgcatatcaatgatatgtcagctcctgtatagcctttggtaatcggaccaattcctttaaacaaatatcagagctgcatgggatttacgcaaatggattttgagta

SEQ ID NO: 31683 - DNA, 201 bp, Arabidopsis thaliana columbia
gtggtttcccgtctggcgcgacatggaacgccgcgcgggccgcacgggctggcgttccggcggccgagcgagtttccacggccggcgacgctgccgatgcgcgtcgcgctgcccatctcgatgcgccgtggatgcccagcttctgccgcgcgctgatgctggagaacttcgtgcacgaccgcggcgtggacggaccggagc

SEQ ID NO: 31684 - DNA, 591 bp, Arabidopsis thaliana columbia
  unsure (1)..(591): unsure at all n locations
gtgaaatcaaggtgagcatactcaaactcattaaacgatacatcgacctcggcatctctcatcacattgtagtgtttcttcaccatagaggaacggatcaccttgtcgttccttcccgctactaaatccacaggcacatcgatgaacttgtaagactcccctagatcaagcggttcaggagagccataaacctccatgttagctgatctgcctccataatcatacatcctgaatttaccggtgtngttgatctgagcaagatgttgcgccacacggaaggagacagctggcatgtcgttcatgttgtagtgaggcaatcctaagactccgacccaattcgagctgtctccaccaactacataactcattagagtttggaccaatccaccaagagcaggatagttgtgaaagtcacgggctaacttgttcagaagcattctgaagaatcttgtcggtatgtagaaggcaggcacgatgcgagccaaaactggactaatgaaaaggaatatgtactcaactattgtgaaacctaagttcgagtcctcatgaaacccagcaggtgaaagtaggattagtcgtgagagtctgtgt

SEQ ID NO: 31685 - DNA, 238 bp, Arabidopsis thaliana columbia
aagctctgcggtaatgagtttcatttattcagttctatcgatagttcatctcgggcagctgtacgatgtgacggattagctcgaggtagctgaactagtgacggactagctctaggcatctggactattgatggacaaactgggcggttatgggcgaatatattcaactcttcggaaaggtgcactcttcggaagcttgcaactcgtcggtaatgtgcgttcgtctgaaatgtgcaag

SEQ ID NO: 31686 - DNA, 679 bp, Arabidopsis thaliana
ggatcccctgggtcatcatcgcaaccaccacggcaccaccatcatccccatgaaatcaccatcatccctatgtcatcaccatcacaaagctaggttaccaccaccatcacaacgtcagcaccgccaccatcaccaccacaaagtcaccgtcaccaccacaacgtcatcaccgccaccatcgtaaccactacgtcgtcactacctaaaaccaccacacgtccacaccgttgctttatcatggatatcgccgacaccacggcaccaccatcatccccttgtcatcaccatcacaaagtcaccaccaccatcacaacatcatcactgccaccatcgtaaccaccacgtcatcactactaaaatatcgtcaaatttttgacaacagaggttaaaatcgtcattgataaagtccatatattattcttttaatttcgcaagttatagtgctatatccttaaatattttatcataaatagttattgccttaattcaccctttattttattcttatttatttaacataaaataaaaataaagctttgaacaaaaatggcgatcattttggtaaccgtctaaaaaaaaaaggaagaagagaattttcaacaattgcactataaagaaaacaaagccacgtgattcgtttctacgcctgcttgactccattaaagaagagatcattcat

SEQ ID NO: 31687 - DNA, 467 bp, Arabidopsis thaliana columbia
atgagactacactcgaattcacgccatcggcaggcaaaaattcgaatcagattagacaagtcgaagagaaacatgcgatctgagattccaaggtctcactcaaattacggttaatcgcagaagaaatgtacgaaatcgagatcgaaatcgtacacggattcactcgagatctgaaaacacaaaagtggaggaaaggttccagaactcaccatagttacagattaagcgtagaaaggcttgtgagccccttgggatctcgtattatcgcttaaatctgcaaatcggagatcgaagaaccaacgacgtttagctcggtgtgatgagaaaaaacttaaaaatcagaaaatgggaaatttttgcttaagaacgacttgagtgagacatttacgaaattgccactagagtttgggcctctcaaagccttaattattaatcaattaaatcgatgacccaagcgattgaaaaga

SEQ ID NO: 31688 - DNA, 841 bp, Arabidopsis thaliana
tggactttgtcaatgacgattttaacctctgttgtcaaaaatttgacgacattttagtagtaatgacgtggtggttacgatggtggcagtgatgatgttgtgatggtggtggtgactttgtgatggtgatgacatggggatgatggtggtgccgtggtgtcggcgatatccatgataaagagtaacggtgtggacgtgtggtggttttaggtagtgacgacgtagtggttacgatggtggcggactggcggtgatgacgttgtggtggtgacggtgactttgtggtggtgatggtggtggtgctgacgttgtgatggtggtggtgacttagctttgtgatggtgatgacatagggatgatggtgatttcatggggatgatggtggtgccgtggtggttgcgatggtgatggtgagggactaagggcatgatgatggtggtgccgtggtgtcggtgatatccgtgataaatagtaacggtctggtggttttagtagtgacgacgtggtgattacgatggtggtgatgatgatggcggtgatggtggtagtgactttgtggtggtgacgacgttgtaatcggtaccggcgagttgattggttttatcttagggtcagttatgtctaaaatataggaaatacacacaatatcattggactatttattttggttagttacctaattataatatttttgtatgttataaatgcaaatttccataaaatgatccccttctatattagctgtgaagatatatctctttttttgtcaagttgagagctatactttatgagtttactttttttgtttaccactgaaaactgaaactgtataataaatata

SEQ ID NO: 31689 - DNA, 576 bp, Arabidopsis thaliana columbia
tgataccatgtaacgaacaatcttgcactcgtccatcaaaacattcaaaatgcgatttaacaagggatgattgattagtaattgtaagcttaataacctagcatttatctgaatcgatccttgtccctgagattcccctgatctatcatgatatataattcataatctatttgccaatttggtcaaggtgttttcatatactttgaagtattaacctaaaataaaaataaaattatgcctttgtactttcgagcaaaagaaatttcaaatatatcttcattcaggaatttatatacatgagaatagggataaggatataaaattccaaacagtcaggtgatgtatttttttaacgtaagtgtaccaatcccatttatgttcatgggaagcataaaagtgcttgttggtggtggtggccggcacaccagatattgtggacatgctttaaactatttttgtatgtatctacgtgattatatgtatagccaaactcataattcatatggttttatattatatatatagcctaactcatactacttcatatagctttatattatttaatgtttttggttg

SEQ ID NO: 31690 - DNA, 332 bp, Arabidopsis thaliana columbia
agaggatataagtctcatataggacgcggccctgtaagtcccactagtgggacctcccaaagacaatgcctatcaggaagcatgaacctgaaactctctggagttccaagatcttcgctcgggatgtgaagaccaacaactatggactgtgaaccaatttgtacagcaccagaaactgttgaatcatatataagtgaatcttcaccaatggagacaccaggtgcaatttcactagacaaaataacggaagatgctgcaatatcagaaaccgtagttgcagggatggaacataagtgtctccgaccaacaattcctgaagcatccccgcataa

SEQ ID NO: 31691 - DNA, 562 bp, Arabidopsis thaliana columbia
gttaatattttatcaatgaagttaatttaaatttacatttatttggtttttagtgcggaaaattcagctttttgttattgttttgtcaacgcattatgttttatctcttcaaatgatagtaaaaaataatattttaattaaaattaaaattaaaaatttggcttaaaaaagtttgttgagttttttggggtgaccacctgaaacctctctttgcacattgaccggaaaaaaagttttttgattgagtaacgagataaacttaatgagttgtcgaatttacccctaagacatagcgtaatttactaatcaagtactttaaccagactctttcactaatacaaaatctctatattttttttttctttctttaatttccaatttattttttgattacacatagtttctcttcattcatctctttctctccccgtcttttcttgttcctataatcatgtccgtccaataaaaccctaattttatctttccttgcgtcgtttcactccattacagagttgtagaatttagcttgcgaaaaagtgtgaagattagggtttgtctagat

SEQ ID NO: 31692 - DNA, 517 bp, Arabidopsis thaliana columbia
ctatctcttttagattaccggtgcatgggtcatatatactcatatgtgcgattgtggacctcgtggttgagtgtgaagagacgtgaaaaggaaaccatgtggccatgtgggggggggggggtcatacgaccacaataggcgtgtattacccacaccaaaaaaaaaaaaaaaattgctctaaaccccaaattatatggtgaaattcaagtttctgagtgaaaaaataacgtaaaaggtttcggagtgagaaaggtggatatattttgttgcacagaattaaaaatagcgagaggagttttgagcaattgctctttctagaaaatagaattcttccgaaggaaaacttggtcaaacttgtatatataaagatttcccttatattaattttattttgtcacaaaagatcgaccttgtttagattcagatattggtacttaaaatgtgtagtgtccgtgcgacatgtctattagtggacttcttcgaattagctatggcctatggactatggagtatgttg

SEQ ID NO: 31693 - DNA, 567 bp, Arabidopsis thaliana columbia
gagcaactgatgataagaggagacaaaatgtttaaaagagtgattgaaatatgcgaggcgagattaagccatcggtactgcggtctttctcctcatcgacttgtctctacttttgatggcaaaccttcttctctctattacaacgttgttgatgatgatcatgatccttcccactccaattgtagcactgagttttatagatagacgggtaaaacagaaccaaatcaagtggttcgattctgtatatacttattctcatgtaatgtatgttgttatttgatactctctcttcagtatagtaaatagtaatagatcctctgcaaaatccatgtagcatcgaaccggtactctcagtagactatacaataaaaagatctgttcaaataaataaccggtgggtcaacacaagtttaaacaatattcaaactcttggactgacatattcaacgcatataatataatgtaaaccaagttgtaattttaattcatagaagaagacattattgcaatggactaattcaactaaaccaagctagccaaacatgtcaagatcctgtgcaaaatatc

SEQ ID NO: 31694 - DNA, 341 bp, Arabidopsis thaliana columbia
ttacacgtctgtgtagagtagcaataatgaaaacaaccattattacgcacctacattaaaaatcatccaccaaagaagaaaccatcctcaagagggttcccatattggagaataatgaaaaatttaagaagagtagggtcgagatttcgacggacaagcattctgattgttacgtacatattttcgcaggaatttagcctgcttaattgtagtatatattatcacgactcatactgagatagctctctgtctcaatggtacgccggccagaagtgatcatcgtgattgtggttaccatcttggtaaggtcaatcgaggagtgtatctgtttcagacaccac

SEQ ID NO: 31695 - DNA, 518 bp, Arabidopsis thaliana columbia
cagatatttggctaagtataagactcttcgtaatcacaaaaagccagaaatgcgaaattgattttgagtcttcttcctcacaagttttctctaactttcagaggagtcgctggatcctgttaccgagaattattagaaaccgagagcagaggtttctagctaggacaggaaatatattattagaacatatcctagtcttccttgtcatggccagtccagtggtgcaagagaaacatacaattccaactcaagtatgtgatggacttgacttgcttaagccgtacggcatcctcggaaaaccaaaaccatgtcggaaaaaggaacttgacttccttgaggcttacggtttcctgggctcgaacccaactacccaagtcaagtgacagagagtcttgacatagattaggcacctccttactaaagccagacaactatacaagattattggttcaaatattagtcaatcctttcgcgttttctggcttgactcgtctcgtcatgcaagggttggcacgagt

SEQ ID NO: 31696 - DNA, 403 bp, Arabidopsis thaliana columbia
ctaagaatgacgaagacgaagaagagaacaaatggactcactttgggcttatgcagagtgttcaatgtgggacaaaaatgtttacaagtttaaaaaaaggcccatcggctaattctagttttggttatgagagtgtgttgcgaaacaaaacatgtacaaggagacatctattacagttaatcaatgaacaaacattacaaaagtaatctgtaatttctttttcttagtaataaccaagacaagtaaaaaagaatttctacacgtggactttttcaaaggattgcccaaaatttctttctgcaaaatagaacagtttctgtcttcttgtatttgtcttgaagctcatgtgcttcaacttcccaagggaacttaggacccaagtctcggactcttgagacgattg

SEQ ID NO: 31697 - DNA, 539 bp, Arabidopsis thaliana columbia
catcttctctgacttgagtaatagtcatatcgttggacccagaaacagcttcctttgtaatcactccacagaagcggcttgcttttcttgctaatgggtaatctccggtgaccaaacgaaagaggggaatgaagaacaaaagaagaagacctgggaggagaacaagaggttgcagaggaagaagaacaagtgttagtcgtgctaggaagcaaatgaggaggtatagagagatttatagaagaaagagtcgtcatgactcctttttattttgacagagaagcttaaattaataattatatatttgtgaggatttgggtgtcgtcgtcgttataatcggatttttaacaaccgtcagagagaatctgaagaagacgaaagagaggtatatcctctttgtgaggcagagacagataagcatcctaatactcgttttagcatatgctaaaatttatcttttattaatattacagaagttatagaaaaatcgttgttgttataatggtttatgcatacattaggggtttaacacttgagaaaca

SEQ ID NO: 31698 - DNA, 632 bp, Arabidopsis thaliana columbia
gatacacacaagagccgttgaaataccatttacataaacttttatgtgttgggttgtttttgtacaccaaatgaaccatgaagagatttttagcaaaaatagagtctatctcaaactattgtattatatttttataagatgaacttgttgatagaaatagaggttgcattttttggcaatcctacgtaaaactctaatccaaccgaaggtgaagttaaacctctaaccgttagttgagaaatgactctcttcttacctattttcacctttagcctagaaataaaggttacatttttcttcattttcacctattttcacctttaagctctgataattaagtttgcgaaaacgaataaagattactgataaaatattactacaaaaattaattcaagtggtctagtgattttaaagatttaatgtgtgatttaagaactatggtgggaatcttttaatcattgcgatatcagtgattgttggctagctagtatgaatgttcaaatgacaagaatatccctctttgcaaatcttagaatggccaaggctctcgatcacttgttgtcaatgaaaaacaaaaatcattatcaagaatgcatagaattaaacgagcacgtaaagtctagtagtgatgt

SEQ ID NO: 31699 - DNA, 615 bp, Arabidopsis thaliana columbia
attttgagctagagatttgccatatttgaattggcaacatggcactgcgccaatggggcagtaatattattttgttgacacggtataccgaaagttttccttttgtcgcggtcaatgggtctcgttcatactttcatgtttctttttgatacaaaaaaattcaaagtgtttggtgtagaccatcttccaaagtcttttcttaatcaacccgttataattgacaatcataatatatattgatgaataagacatgatgtcaacgttacatgtattggttagctagtccctttcaaagtgtttgggtgtagtttgaaagttgctatcaaacaatgacatttgtgaattgtgatacataaatttgaaaatcaatccatatgggttaacatcaatcaatattcattttgggccacattagcatacttcccttgggcctggccaacttcagatgtaatttgtttctatcatgaatggtcctcttcagcacgaattgcaatgtggattttatctctattctcattggctgagaagtgcataaaattagtcagaaaaaaatctatagtttcattttaacacatgttttggagtccacaaaatttgatattaattattgtatag

SEQ ID NO: 31700 - DNA, 578 bp, Arabidopsis thaliana columbia
tagaggatcccctgcttttctttggcccggctcgttacaagaagcttgtcctcaagtggccaggtataataatccgtgacttgtcatagagtctcttgtacttgttttggtagagagaattgcttgttagtgaactgttgcttaccgttgcaggatatgtctgataccgcggatcttcttgaaatcataagagcaggtttggtttcaacatctctctcacttttttttcctcggcttctctttactttttaaatcgataaacacaacaagttttcttcttgctctaattgtgcttgtatgattatggaacaggatactctcggtggataaatcgatttcccaccattatgaaacatcccgttgtgcaatagaaactattagatttggtctcaggctgtttcgagggagagaaatagtcaaaaaaggaaattttgttcagtttattagctccacgttgttgtattatatacacttgagattataattcatggtttctctatttatgatgcttcccaccaagaaatgagatacgatatatagatatttatgcaagtctaaaatttgcctctgtatataga

SEQ ID NO: 31701 - DNA, 601 bp, Arabidopsis thaliana columbia
tgattatatatattatctactgatgggtttcgcttactatcattatttttgtcctttaggttacatttcccttgtgaaagttacaagtcaaacactttggtaatagtcttagtcattttgattctctgctctcttttctttcccccaatctttcttctgtaatgttatttttttcattgttcacttgtactgtttcctctgtttttgttgttgttgttgtgaagatgacattaattctaaaataatcaaacatcgttacaaatgggacagtatcgcaacaataaatgaatacctgtcggtctcgagctattcaatcatttcattcggcttttggtgtgttgcctttcagatctatgatacagattgttgtctcaagtaatggagagaggggtagtccttacaataaaaaaaaaaagttattatatgcagtcatgaatgtggtaaaaagaattgcaatttttagtttgtaattttcagttaattaatcttcactatataactacactcctatgagttgctcagtgagttgcatgcttgtatgatttaaaattaatagtaactctttttattacacaacagtgagccactatgagaagtgggg

SEQ ID NO: 31702 - DNA, 470 bp, Arabidopsis thaliana columbia
atgttgctctgctcatacaaaatcttattatacgtatgcaatattttattttctctgctctccaatacaaatccttataggtagataaggttggcaactagtggaaaaaagaaaatttgaatagcaagctaacaagaaatatttatatttaagttttatgaaaggattggtacggatcttatattcggatatttatataagcatgtcgtatgtaacatatactaaaaagaactattggcatagatcagatcatatgaatattattgagttttaaattcaacttcatcaattgtccggggaaacacaggaaaatatcaacaaaaagtttcattgaaaatgatgaataatactgaccaaagccaatctgcgtctctctcaatatgtcctcttaaagactattttcagaatcagtcacgagaaagggtcatttggtcaaacacaacccatcctttacttccaaggcggagaga

SEQ ID NO: 31703 - DNA, 556 bp, Arabidopsis thaliana columbia
  unsure (1)..(556): unsure at all n locations
ctctatccccgtctgaatcctgtgacagacaccgacgccgttaaccgtcgtcgctgtcgctgtgtctctctttctcactctgttccatagatctgagcttctatcaatattctcggatcgctatcagtcaaatcttaagaatttcgtcgctttagctcaattcgggtacgtgtttcaattttctcgatagacccttttgagattcttgccttttttgttttttctcctttagatcagatttcggtttcctgatttattagtttattaccattgatgaagttttctagattcgtctcctttgtttatggtcttgatagggtctttatgttctgaaggaataaaaaatcttgtctttggatggataattattgtcttcaattgtatttgttgtttctaagaagaagttgtgtagttactgccaccaagtctgtgtgattgatcggatcattgttagtgtgtcagtgtttttatcttcaatttctttaattgtggcatttgctgattgantacttgaatttgttgaatttcgcaagacnttagattgtggaggaagttt

SEQ ID NO: 31704 - DNA, 503 bp, Arabidopsis thaliana columbia
ttctctgcgcgggtgtgcgtgagagattaaataatgcggattattgtgctgtgtatatagcatactacagtttattcagtcaattcattttcctcttgaagatatgtcgagtgaaatgcgtgaaagtcaaacatttaagttctgtatccatttccctttcaagctatgtagactgtaatgggtgacagtcatatatagtatatatagtaagctctgttcaatcaatgcacctcttcgttttcgattcatgaattgtttgttggatgttcctaaatctttggatccagctgattcaccgcgattgaggtggctttagttatcggtatccaccattccttactgctataggtcgatcgaatcaataacactacgacaattcgggctgcttagacagcgggtgcgatactagtttattcatactcctactcgtacaaaaatcaagaaaatttcatctccattcaaattaagaaaaaaaacagtaaacattcatataccatagccac

SEQ ID NO: 31705 - DNA, 468 bp, Arabidopsis thaliana columbia
aaatgtgaaaacaattttgttttgttttgagcatatcataatatatttctttgatattctatcatattaaatcttaaataaacacatggaaaaaagtgttggggaggaatcatattaaatctttaaaaaacaaacaagattaccagttgattcacaaagttcataattaagaattaaatttccatgaactctgattgagaaagaaatataggattaggacaatatgggcttagtcaggcctgaactaaattcaaggcccaatcacttgtttttaatttatgtagtacaaagacggttatgtccccaataaacctgataaataattatgaaaaattataaataccttctccttcgtcgtaaattgttcaattctaaatccctagatctaaaaattactttcgaggctggtcggaaaacctagcagtcgcttattgtcaaattaaccatggaagaatccgccgtcagagt

SEQ ID NO: 31706 - DNA, 535 bp, Arabidopsis thaliana columbia
tatataaatgacaacccaaaatatatttaatggtctataaatttataacaaatttgaggttgctgtctatttaagtccggatggtgacactaaactacatatcctatcattttatctcatcaagcatgaggcctatagataaggggaacatgaattatttagttgaatactggacttgattgttggatagtattatgttgcagtaatttacgtgagaaacgattatattgtacgatttcaaaatgatgattcatgtagtttatagtctgtgagaatataactggggacgtatatgcaaatatttgttgaggatggataagaacaattattatggatcacacaccataaatatttattttctttgaattattttaaactgatcattttatataatattgcacattcttttctgagaattttaaccatgtttatatttcagacgatactttagcgtcaatttgtcataagattttacttttaacattatttgtaagcgatctcacctacttgactaacattcatattgctaatgata

SEQ ID NO: 31707 - DNA, 541 bp, Arabidopsis thaliana columbia
tattttctgtttgttatctcaaaattgcttgctctaaagaaactgctgaattcttttagtttcaactggagaagccacaaatcctgcttctgatccacatgaagttgtaagtcttttcgagtatatgctgttcttttaaccagagatagtcaaggatgacaaacaaaatgaaaagcataagctctacttcctctgaaaagttgttgatatgctgtttgtctcaagagctatgcacgtgggtttatatgcagatagtatctcatgttttttctgtttctgcatatacaggaacccgagaatgcattcaggtgtaaactacacaaagcaaaagcccagaaaggtgacttttctaacgaggtgtcgtttttaaatttagaaacgggacgcagttgaatagcgaaaatagtaaacgagacatagttctgtttgtaatcagagtgcaaaccgatggcagccacaacaatttcgccggcgattaggaaacaaatgagcagcgttgccgtcgcaatgaaggtcgccgtaatcggcagcggaagtgggt

SEQ ID NO: 31708 - DNA, 1588 bp, Arabidopsis thaliana
cgcctcggaattatttgagaggagcttcttgatacttcagctcagaaagcatccaagagattgaaaaccgagacagtgatggagaagaacaaggaagagcatgagattgttgaaaacgaacaggatgcagaagattacgcggcatgaacacagatgagaaattctatgaaggcgtagtggaagaggacgaggaagagggtggttatgattttggactgtattaattaaactttatattatctaataattatatttttgagaacaaatttgtttaagccggactagttaaactttatattatctaataattatatttttgaaaagaaaaaaaaactcttcaaaattgtattgattattttcaccagatgtgaaacgagaagagtaacatgatgatagtcaaacatagtttcatttgtgctgtcagaacctactcatctcttccttggcggtttaaatttcatttggccttggtttatggtctaacgttgttgttgtttatgtttcacttttcattaataaaacgagatgacaaataaaattttacaatatcagtcgaaagaagatcgaagaagagcaactatagttgatgtgacttgttgttatgtacggttaaagactatttggtcttgtgctctttccaaagtctaatgccatagaccttaatagtaatactaaagaaagacgcgcgagagttgtattaactactctttgtctaataatacaaaatattttaaaataccaacaacctgccgctaatgtaataatatgtttgaatcaaaaatagagggggaagagaagtaaactttgaattctattggtaggttgttgtgtaagtctctctcaccgacgcttctttccttctccatgtcttgatcgtcttggagcttcgtcttcgtcttcactttcactctcttcgtttcttaaactgtttccaacctcgaactgctccatgtcatgtgatgcatcctgattttgttgatcccccgacactcctctctcatcgcttctctcaggtgtttttcggttgcttgggccaggtcgtgctgatgatgttgctggtggataatacatcggcctccctcctctaggagcgtttcccattcctcccatatgcgggcctcgtccgcctcccatcataccataaccgccatgtggaaactgttgcggaggcctaccaggaaacatcatcccaggtactggtcctctgaaatcaccaccgaacctcggtccatacggtccaaagggtcttggacccatgccaaatggatctggcataccattatatccaccaggcccatagggaaatgcatcgccagggcccattactccgagagggaacctcccattccaggcatcggtctgattccgcgtcctaaaggcatttgcggaggccacattattcctcttcctcttcctctgccttgaggaccccccgccatgctctcttcttcctcctcactttcatcttcttcctcttcctcttcttcattgtcttcaaacggcacaatgtctgggttctcagctctactctctggattcacaccctttgctttctcttcttctcgttttgcttctgcagctatggaga

SEQ ID NO: 31709 - DNA, 506 bp, Arabidopsis thaliana columbia
aatgtgctcatgtgtgactctcatccttgcacgtccctgtggtttatgaaaagccatattgctttcctctttagccaaattgcgtgttaatatccttcccgttgcatttgattctatatcttgtttctgtttgatttttatgcatctgtcacctccatgatagtttctcttggttaatggctgaaacaagtttagttttggatagagaatcaaagagtctcttcttgttcgtttgtatctttcctcttgcggtatatgttgaagaactttagggaaacaaagtgaatgaaagctaagagttttttttatgaccaaaggcaaaacaaaaagtgaagaatattcctttggaaagttttgaaagggaaatacatataggatattaactaggcgaatggaattttttcactcatacagagtcattttctgtatatataacttagtgattgtgagttctcatattgcttctatgtaacactccttgtaaagctaaatagcccttttgtgct

SEQ ID NO: 31710 - DNA, 398 bp, Arabidopsis thaliana columbia
tggacaataattttatttccctatacatagcagctaaagtcatcacaatgtcctgcttccacaaacaaattaaaatttccaagctctaagacagattggccaagcaaaccaacatatgttacagtgttttatacaatgtacattataactaaaatatagtcatcatcatctccatgtgtacttctaccaaactcttaaatgactgatcatgcacatgttatagtactttcaatggcttatcttcctctagttcgtctagagaatcaaattgcacatttctcaacatattcctggctatccgagaaaccatcaatatctcccgcgaaattttaaaaaattcccgcgttctcagtattaattctgaacaatctctgttcgcttttattcgtaattttgca

SEQ ID NO: 31711 - DNA, 548 bp, Arabidopsis thaliana columbia
caaaatgtaataaccaaataaatccttggtatgtcctttgatcttccaaatattgctccatcatgtaaccaacatcccatacaaactaaaaagaatatattttaaaaagccctaattaatcaacaagcattgggatatgtaagaaatcatacccattggaaagatcatgaacaacattttaagcttgtatatccttcagagaccaaaccagcttgcaatatgtccagtgctatatggcatccacttcctcctccgtttcatcttccttcgcaccaacactgtcaccactgaacaagccaccaccgccatcaaaagcttccacatctcaatatctacgaatatacaactagctaggagagataaatgactgcaaaatgtcggatggaatttggcaaagtcgtcggaatatatatatacgatggatacatttgtatcctttttgatccactaataaatagaaacaaaataatgataactgattggtcttgttcacaggacattattgcaaaagaaaaacaaaaccagactaatgaaaagaaacgcaaaaa

SEQ ID NO: 31712 - DNA, 458 bp, Arabidopsis thaliana columbia
ctctagaggactatgtttataaattgtgttctttttgttgaaaaactcagataatgattaaatcagtagcgaatggatggagaacacatgattttagattgcataccgtaaaacaaaaaaaatcatgatggatgtagaacattcaaatgggtcaaataaatacgtatgtgatcaaaagaaagtatgtgatcaaaagggttagcacgagtaccttgggaggaaattcttctaattatgaattatgcaagaattttcgtcaagggaaggtggggaagaggtagctaaagaatagagaatcatatgactaaggacgtggtggttgaaggaaatgagagaatagatgaagaagagaaacttctttgagtgagaaggaagtgcgctggctggagagaaaagagagaagagagtttcgagtgagagagagggcgttgagattgtgatcaacttaatgtaatatg

SEQ ID NO: 31713 - DNA, 604 bp, Arabidopsis thaliana columbia
  unsure (1)..(604): unsure at all n locations
tgacctcagcgccgcagctatgaagacaatgaacagtttcttgtgtttttcttccttcaattttactcttttattgttttggtttttcaatatatttcttctttctcatgggtgggttttgggtttgattcttcatattcttaaccacaaaatggtgtgttattgtaatgattgtttttttgtcaaacatgcgttcattttttgggtcaggacagttgtgtggtggtgggtagtaaattctttgatctggattgcacattattttgattgtgtaaaagaacagtgtctacatgtaaactcatgaaatttcaatatattggtgttggattcgtttgacaattgagacaccatttgattttgttgttctagttctatgtatgttgctagcaaagcttccatagtacatgaacatgacagatatgtgtgtcgaagtaaatgcagttaaattattgatcagaatcatgaaatgaccagaaaagaaaggaaattatagagcaacaacaaccatcatttatgtctgacctggtccccacaaatttggtaacanttcattttttgtactgtggacaacaaacaaggacacaattagttgggaacagaatgg

SEQ ID NO: 31714 - DNA, 554 bp, Arabidopsis thaliana columbia
ttcatatcaattcaaaagaactaaaaagatctatgtacaaagtacaatatacaatgattaataacgctctatcatgttataaacctcaaagtattgagaaagagaatggaaaaaaccacaaaaaagattggataaatcctacattaatatatatatgtgtaataagatttacctatgtgatatatctctgtggttaagaaaacaaatagaggagagagagagagtgtttagggaaactaattatctgattttcttctttcctcatcgtttgttgtgcaaagggtttgatcccgtcttaaccttccgtttatccggtagatttcaccggcgtcgacgaccggaaaagtaggttgtgaagggagaaactctctgttttcaccagaaggtttggatgagaagcgtcgtctttcgacgtggattcttgaagctttagatagaacaataacgaggaagagaaaaacaatgagacagagaagacgaggacgactcggattcatatttttatttttcataagaatacaagaaatcttttcttgaagatttttttttttttt

SEQ ID NO: 31715 - DNA, 553 bp, Arabidopsis thaliana columbia
caacggcgtccgtaagttaaatctccggcgttttccgctctttcatgtcgtaaacaacaccgagttcctatatccagacaggttcgagctgtgatcagccgtgaagaaaaagcggtggatcaagaagacggcaaaaaaagtacaaacaaaccactaataaactcttctcaatttccatggcaaagatctacgtatacgggatcgaagactgttactgcggatgtgaaaatcaggccgaagatcctcgagtcagctaacagagagatttgagcatcaattagagcttttcatgaaagctattggtcaatggatgttgattcagcttgtcagtgaagacatcgatcctggtaaattatctaacattcaagtttccttttttagattttgagaaatcagtttgttactattttgagctagagaacaaagctaaactgatcacttagattttgagttacggtaccaattttgttcgtttcttctttggattttattgtgttagatttagcttttgattcttgctagcattttttgtttcttgaactttcttgatttt

SEQ ID NO: 31716 - DNA, 258 bp, Arabidopsis thaliana columbia
ctggtttgtgtatgcactgtttcttttttcagattttcttgaagtctctctctctctctctctctctctctgctctataaacaaaactaaacagatttaatttttcccttgtacctacatgtcctgtaaatttgtttgttccaaaatcagagttcagattcatacgtattttgcaaccatgcatgacttgttacgtgggttataagaactcatcttacatccacaccaggtatttttaacggctattgttatgtgttt

SEQ ID NO: 31717 - DNA, 501 bp, Arabidopsis thaliana columbia
tttttaccattcatcaacacttgacaatttagtacaacatgtgaatgcaaaaactcgtttaacacattatcagtagacaaaggttaaatcaagatgcaagtgggcagagagaaatcccaaaaattatctatttcgatgtgatttctacttttatgtggtcatgcaatgtgccagcaaaatgataaaaataagagatttttttggagtgataaagagacagaatcattgttgagccccacacccattagtaatgcaaattccaacgatgaggacataagtggaggtttcaacatcaactgaagacacacatttatcaaaatgtcaaggaaaatcaagacatatcatcacattatcatcatcatttgtcgttttgggaccaatcttaacaagaaaaggcattgcttgaattggctctcttcaatgttcacccttttcaactatgttttgggaatttaatggactttatgagctgtgacaatgagtaatgcatagaatatgaca

SEQ ID NO: 31718 - DNA, 531 bp, Arabidopsis thaliana columbia
ggatggtaatgcaagaatgattttattttattttccgttaagaaatgacactgaaaactaatattagtattatactaatattttgttttgggtgattttccgttaccatataagaaaccgacatgtgtctttgccacatatgaaacgattcaagagagtcatctggaatcatcttcatcatgaattggacggtgtaagttcccatagaatagaatcccgggagacaagaggatgatgttttgaaccgggccagctatcaacttaggcgcaacctgagacaaagcaagaccaaaaaggcattctgtacccaacaattgtgccagccacaaatttcgcatgttactccaccaaaatatgacgttccatcttggcgacgatgtcaaccatcgatgttcagtcccatcaccacaaccagtagcacacggttcacaattatagcccttacacctataggatgacccgaccctctagttcggtactctaaatatcaagaagttgaggaggagagcttggttgcttgtggaccaagaa

SEQ ID NO: 31719 - DNA, 386 bp, Arabidopsis thaliana columbia
ggttctttgactgtttgctaacacgcgaacgtacaatctcgatcataaattggtataactttctatccgaaacaaattcataacatacttgtctactgtttcgttcactgtatgtcttttaggcgaatgttatgttattgttcatcaatttggaatttaaaaaatttagcctcttgtttggaatttagggatttggaattttaaaatttagggatttggacttttggaatttaggtatttagactcttgtatggaatttagggatttagaattttggaattaagggatttagcctcttgatttttaaaattttttacctcaattttgttcgctattctctttttttgttagcaaaagtttttatattattttaattggatatttta

SEQ ID NO: 31720 - DNA, 512 bp, Arabidopsis thaliana columbia
aaatgggaataataataatataatgctaatacaaaagtaaatatggttggtaagaatgaaatcctactatcttatttgggaagagattttctgatgattaatgcatgaatgttccattcttacccaaaagagagattatcatataccgtatacataactttattatatttgaccatccgatttaagtagcaaaaatctacggttactaatgaattatataaaagggagaattaacaacaaccaccaataaaatgtgtgcgccaaactagtctggggttccaatttggatttcattataatgacattgcaccaaaaagctatttatttttcatttgatcataatctcaaagcggtgaaggttttcttttgatcattatgatcatgacataaaacgtaacataaatcacatattctctcttacaagttacaatcgttgttttcccctatctcgtgtgtctgacaagttatcgaaacaaaacccataaatctttcaaaaatactcataattagat

SEQ ID NO: 31721 - DNA, 507 bp, Arabidopsis thaliana columbia
tgcaggagaaactcgcggtatcaatccctacacaagccgcagcattcgaatcaagaactaacctccttttcctatgttatctatttgcatcattgcatgcttttttctgttgttattatctttgtaaaacctctataaattaataataccgggggacaataatgtttcattttaagaaaatttatctctcgtttttgactaagcaatatcaatataactataagtcaaaaacgttaatgaagagctccgaaacgtgagcatcagggaggacattagacctcaagaagaaggggtcaatagagttgtgttaatatgaacatttcatgagttggcggaggagagaggcaatcaggcaaagctcatcgagaactaaagaacacaaacactatttttacaacttttttttttttgtcatccctatttttacaatttcttaatcaaatacgattttctattctaaaaataaggttattgcaatgaccatgtaagctgcgtttcatattatag

SEQ ID NO: 31722 - DNA, 434 bp, Arabidopsis thaliana columbia
ccatcatgttttcaaaaacgaaaaattcacgaatcaaatcaggaacactacgaaatatcaaacgagctagggatctggaacaaggtcatcaacaatcgtatccacaaatctgatagtatcaaattcgatatgtatattccagagattcgataagatcaaacagtgatttacttcgatcaattgtaaaatcaagagagattgaattcagatagaatcaatacgatcatcgaagaacataaaggtgaagagaaggataaatcttaccagaggaacaaatccgatgaagaagagtgcgtatcggcggcgaaggaacagagtcgctcctatcaaaatgatcccaattttttcagagaagcgagaaagagagagactttcgacaggggacgccgtttgttaacgctgttatgatgacggagctgctaggatttgccgtt

SEQ ID NO: 31723 - DNA, 679 bp, Arabidopsis thaliana columbia
tatatttatccatttatcaatttatagttgtatagacggcaatttgtttattaattttaaagttaaaactagttaataacatggataaaccggaaatttcgaaattaatttggtttaagtttcatataaaaaatatttaaatcgaacctagcgaaactgtgataaaaaaacgaaaaaaaaaaattgaacattcgaaaaaaatagtaaattttctcttttggggtggtctatgcatacataagccatgagtatgtttaagtttcaagtaaggagaaaatattgaccgaaatcaaaagtgaggagaaataaaaatcaagaagcagatacattgaacctggacatgcaaaagctacacaaagcgcctattaaagaaacataatcaaaccctaacactcaacaaatcaagaaacaaagttagaaccacaatcaaatccttttacacaaagaatcttaatggcgaaccgaggaggatgcgtgacggtggcggcggaagagatggatgagctaaggaggaggaacatagagctctcgagagaagtggcggagatgaagacagaaatgattaagttgtggcagcgaacggttgtggcggaggaggcggaagagcaactctgctcgcagctggcggacgtggaggtcgagtctttagaacaggcacgtgactatcacgatcgcatgc

SEQ ID NO: 31724 - DNA, 439 bp, Arabidopsis thaliana columbia
ggcccctgttaaatagccaccatcattcttggttaacaagatatacatgcatcaaagctatagtctatgttagaatcccctgtttaaactactaaaccctaactaaagacctaattagcacattggaaactgacctagaccgagaactgaagagcttgtgacaatgaatcaccagagagttcttactcttgttgtatcaccgagatcattgatttcttcaagaatgcaactggacaaaacgatccccttcgttaaaatattctctatttcttcgaaagtcttacactttgcacaacatttcagtggaaaagtaaaaaagacaaaaaacacaagtgaatttaatatcaccaaaaagtattacatggtcaaaagagaaaattaaaaatcaaacgaggacgtctttgtgaatatgcacacttaaataataaaattaggaaat

SEQ ID NO: 31725 - DNA, 569 bp, Arabidopsis thaliana columbia
ttggctacttcacaaatctatctatttgtttcaagaaaatccttgcaatgaaattcatcgaataaaaacatcatacctttacacctatttagtggataagtgtgatctacttctacagttgcactgccttcttttgttccttttcacgtcaaacacactcacatttgagcatacataaatagaaacaacaatatctctaaaacattacttaaaaaactttcaagtttgcttcgatttacctggcattcgtatcctttttatcccttcgtccaaaacatttttccaaatgtcgagtggctcgggaccaaatcccaaaacattttgtcattcttaacttttcaaataatctaaaaagttttatgggaaattaaggattatccgccaactacggattgtcttgactaggttcttccatattatatagtcaaaattcggaaaaaatcaagctttttcgaaagatttccggtgccgaaaaaacagttgataattaaagtccatgtttgtaaattcgaatgacattaaaaatgtataacttatcgtctcagcttttgcttcaaaatgggacaata

SEQ ID NO: 31726 - DNA, 345 bp, Arabidopsis thaliana columbia
catagtcatgtccgatgtacatgaaacaacaaatgacacgcgcaacgcacgacttgtcaaatgacacgctcaacgcacgacgaatctcgcatcccacgacgcaattgggaattgcgaattacaagtagcacgtggcgcaaggggtagaacggtgatcagtaaagttagacggcgttcagccatgactcgccactgtgactgtggtcgcatatagcgttgagtgtcgtctaacgtgtcaagcgtcacttcctcacaggtctgaggaggcgtaccgcgactccagatcccccaccttccccttttcaccctttacccttctctctcctctctcttttcttttgacgt

SEQ ID NO: 31727 - DNA, 395 bp, Arabidopsis thaliana columbia
aacacggagaagcaaccaaagtcttgaccacaggcaaataaaatcccttgacaatgcccgtagcaacaaacaccgatccgaaaagatggaccattgatgataccttggcttcctgttcttgctttgccttaagaacataaaaattctcgtcatagaaaggggcagccatggctgaatcctcaaccttgtcttgatcttcaacttctttcctcccaattctcaagtttttcagtttatcttgccactcttgctttttcccaacatgtgcagttctccacccctgagtcttcacttcattctcctcctgttcccagcattgccaatcagcgtaaaccaaaaaaaacatccccatagtcaacactcacaacacacttcatcatgaaacttcaaaagcc

SEQ ID NO: 31728 - DNA, 552 bp, Arabidopsis thaliana columbia
tatgctaatgaataattagaaagtgctataggagacaaaataaaaactagaaagtgataaaatactaaaagaagttattattcaaatgctcttattataaattatatgtattgtacaactctagtgttttattatttttgaagttaaccaatactcttatagcttagtgtgtttttgctttgaaagtgggtggtaaaatcgtttatctgtttttttagataaattgatagattttcttggctttgcaagaatgggacgaaaaaactaataatgtatagtggttgccaataagagggtcatcaaataatatccaagtagctgagtgctagctatgattagccactttgaaagatatgaaatagtatttttttgtttttataaaagttctaaatattttttttttaaaaggagaggaaatgaaagtcttacttcataaaagttagaacaggacattggatgatacatatgagctaaaaaagcattgtggagtctcttcaacttgagccacttattgaatggtgatccattttcttcactcattggtttaatttg

SEQ ID NO: 31729 - DNA, 535 bp, Arabidopsis thaliana columbia
tcatcaaaagctaatttgggaaaacacaaaacacaaaatcgcctactcatgatgatcaataagaactctaaaaccacaaaatctggttcgatacactatccaaaagacagacacaatccaaaaattctccaactctaatgtcgatagacacaggcaaagctcatcaaaaattaggatttagccatttggaatcaaatcgagtaacttaattcagcaattaggattcagccaagccctaattacttcaaacgagcttcgattaataggacatgagcttagaagcttggtaagaccttggagaaaaaagtgacatgaaaaggggcggcgaagagagacagaagatggtggaagagtaagcgaagtttaccgggggacgtagagagagaacccgccggagagatacagagagacgacgacggtggtggtggtggtggtgatgacaagcagagcagagagattgaaacctaattgaactgcgagagaatacagccaaatatctttgtggaagacacagatcggggaagaggaagatgga

SEQ ID NO: 31730 - DNA, 532 bp, Arabidopsis thaliana columbia
gatgctctctacttcagaagtgatgtcagtatcggtatcattgtcatgaggaatgacttgtttagggttttgattgaaacggtccaagagagtggcgtaaccatcgtagagatcttgacagagtgagagaaggagagggcttctctggtaaaaccattcagcacgttgagaaaatgtttcaccggtttggttatcatcaagagcagagacccgcattacttgcatccgagactcaagatctgtgtccatattcaccaacatatcaaacaaagtaagcacaaaaacaatatacaaagtttgaatttttaagtgtaccggagagagatggcaactgtggaagaggagactgagaggcatccatggattctgtcgattgctttgctggttaagagatggaagagaaactgccaaacaagggaagctcaatgaaaattcaaaaaccccattttcaaattatagggaaaaagaaaggcaaacgcatgaaatcagtgagagagattgatatatggcaattaatgggctttgaagaatt

SEQ ID NO: 31731 - DNA, 537 bp, Arabidopsis thaliana columbia
tgcctttttccgaggtaacaaaacaagagtcatctccacgtgataaccaatccaaaacacattgtcacagtttttcgagtttataataaagattccaactttttaaccaaaagtcactaactttaccacaatgttaatccttccttattcgagctttgtgatttttttttcttttaccactaaatttattgtttaaatgaaacaaaacagataaatagagtgacaaaatatgtctaaatatgcaacttaacagtaacgaccttctagtcctaaatgtctacgaaaattgtcaaagtaaaacaacaaatgaagtgtaaagtcgaaaacgttaccccggcggaggaaatggacatgtaatcaggtgatgggttaccgtgactggctgatagatgccacaccgctggaagagccaccagtgttaccgccacgccactgctactaccaccagtggagttgctgctaccactacactactatgagtggaagaggtcttgatccaagtgagtaaccggagttccgcaggttgaagagacgtag

SEQ ID NO: 31732 - DNA, 536 bp, Arabidopsis thaliana columbia
gatctctcacgttattaccctttcttatacaccagcagttcctgccggaaattattgttgggaatactacaacttggtctgcccaacctcattccagtacctccaccatatcatttggtactgcatcagatagcaaggttcctgttccgagttcttccagaatctcagatccgagctttagaccatttatgtctcaaactccaccaggtgcattcccaggcatgaaaggagcaacttatggtcaaacttcttcaccttttggaaacaacaaccatgctgaaattgctaagttaatccacaaagttctgcaaccgcgggctaaacaaaatctattgtggaaccaccttcaagagaatacatgagtaaagcaatgacatgccaaatatgtcaaggaactatcaatgaaatagaaaaggtgctaatctgtgatgcttgtgaaaagggatatcacttgaaatgtctacatgctcacaatataaaaggtgtccgaaatctgaatggcattgctcaagatgtgtgcaattatacaatggcaa

SEQ ID NO: 31733 - DNA, 472 bp, Arabidopsis thaliana columbia
tgtagtgagtcttctatgttttcttaatggcttgtcccatttcttttttagatacagatcaatttaactaatcttggttctaataataataattttaataaagttttcatgtgtttaactaataaaaaaaaacagcaagtctattgtgattaaaattatgcatagatttgctctggtttatttgttcacctatccatacataccaatccactacataagccatataatcctatgagttttgcatccgaaaatgctagtaaaacaacttacctgaaatgtgaggccaatgtcaataccagacgttgagtctatctatgacatgctcgtcaatatcaacctcaaaatattttttcctaaaaaaagcatattcctcaataagaagaatactgaaagattttggggctcaccaagtagaattcatgttgcggacgcgtaagaacatgtttcttgttatacagtttcattttatttt

SEQ ID NO: 31734 - DNA, 467 bp, Arabidopsis thaliana columbia
caattatacaatttcttaaccaaacaacacataattataagctatttaacatttcaaattgaaaaaaaaaatgtatgagaattttgtggatccatttttgtaattctttgttgggtaaattcacaaccaaaaaaatagaaaggcccaaaacgcgtaagggcaaattagtaaaagtagaaccacaaagagaaagcgaaaaccctagacacctcgtagctataagtaccctcgagtcgaccaggattagggtgcgctctcatatttctcacattttcgtagccgcaagactcctttcagattcttacttgcaggttagatattttctctctttagtgtctccgatcttcatcttcttatgattattgtagctgtttagggtttagattcttagttttagctctatattgactgtgattatcgcttattctttgctgttgttatactgcttttgattctctagctttaga

SEQ ID NO: 31735 - DNA, 616 bp, Arabidopsis thaliana columbia
gctagtccagaagggaaaccaagtattgcaattcaaagttaaaaaagtacatgatctgttactgctgggaaggagtgtactcacccataaccaatgtttggaggtatggatattttttcaatagccaattgttgcttattcctctctgatgcttcatatccctaataatacagaaagagggaaacagccctcgtcaattacttaatttcaaacatatatgtaatggaaagaatttttatgccctacttcagtgtttaaagattataacttgagtgcccaagagtttgaggtttgattacacaggaacagtaaaatagcaaatgtgagagcaatgtctacaaagagaaccactgctatagattcggtaaccccagtaccaagaacggacatgaggcatacctattatgtgatttcaatagcagtagtcctggttacaccatccttactttagtataaagctatgagacctaattaaccacgtttgaaaggatttttcctcttaccttaatatcgaaagcaaatttcttcttcccaaaattgactaataccctgccaaaatttcagaaaaatatgctttgtgtaagagagagtgagatacatgatggcaatggtattg

SEQ ID NO: 31736 - DNA, 533 bp, Arabidopsis thaliana columbia
gtcacattgattttacactatttttgttagttgttaactcttggaagtctttaccaccttgggatctgtgaaacataattatccttctctagagtgagagttttaaaaggaagtagaaaagagaagaccaagaaggaacgctaacttaaaactcacgcatcatatatctcaatcaaggatacccaagatatcaaccaggatttgagcatcaaatcatctaataactcggccataaatgcataagcaagagtatactgataatgaaaatgaccaataaaaagcccaaaaaattgaagcacaagacggtgaaaatctcatatcaggcactcacttagcaactagaaatgagtcttacaaaaattaatagttgaacgtgagcatcaaaatagactccagagtccagacatgaaccaatatgtggtaccatcaacatgaatttagacaactcggagcagaaaaagaaaaaaggatcatgacatacagagagatatgaagttaagaaaagtacctctgccattaataaatgataacag

SEQ ID NO: 31737 - DNA, 715 bp, Arabidopsis thaliana columbia
taaaatattaaaatattctaattgatcataaaatctacaactgaaaagaatcaaaactgagtggaaccgaaccgaatcttaacgcctaggactattcttcaatgaaaagtttaggtatttatttaaaaaataatatgtttatatttttggtcaaaattttattttaaaaaaaaattgtaattaataactaaaatacaaatatgatatcataatagagaacacattatgtgattcaaggatcttacgatacaacttctctaaactggtttcacaccactcgaaaacagagctctaaacaaaatcactacaatactctcgaaattactttttaaaagagagaaaatgctggagaattctatttgtgtgtaaaacgatcaagttcttaatctattaaagaagacgacttgaaatatgggttttaaatagaagtttgtgttaggtctgatgtggaatcaatcaaccacaatcccccacaaatccaagagaggtaggcaacattacgagagacgatatctccataaaacccgattcacaaagatcgtgaataacaaaggagaccgagtctcacgttcaacccgatccgacttctctcggagctccaatgtgagctaggccttaagcccatttctttttacacaatttatttatattaagtccaattagatagcttaagtaaaaagttggcccaacattggactgatcatttcttcataca

SEQ ID NO: 31738 - DNA, 541 bp, Arabidopsis thaliana columbia
tgcctattcaacagagtcaaaaacgcaaatctttataaaatcagtttaatagattttccgacacacgaagatcacaacatcttgcatgtaagagacctttccgttttttattaacctataagcaccaagatccaactaaattattacagacacacgtgctacagcgagggatcacgtgccaaagcagggcctagctagctgagggtggatccatgtgataattacatcatgggcacatgaggccatgactgacatcaacttaataacgtgatcaacttgtgtatgcatgtgtgcgtatgtctcatcagttttatttggtgcatatatatagagtaaacaaaaaaatgatggatagacagaagctagatggttaagattaaagaacaacactatatgtgaagaagacacgttacgtgaatgtataatattactaatttgtaaattgtagtcgtcgtaaagagagataaaaccagacaaaaaaaaaagcagcaaatttatattaactaagtacgtatgtgaaccaaatgttgatctgatatgt

SEQ ID NO: 31739 - DNA, 606 bp, Arabidopsis thaliana columbia
ctattaaacagaagatagaaattaccacattgatcgttcagttgaaacagaaagaatgtgatgcatatctcgagatctattagaatacattaacatgcaagtttaatttatcacattttagtctcaattaattaaaaaaatgaatgtttagtgaattaatgaattcctctaaattgtagatgctcgctaaaaacctttcatgcaaagtaatagacgatagtgacgatgctgatgttgaatgtttgataacgagatagagtacagaaagaaatgttgaaattataaagtgaaaactttagagagacaaggagacaacgtcggccacaagaattaaggcttcatgctgtctcgtgagtgtcacatgcgcgtggccacaagaattaaggctaaagagttaagattattttgttcaaaaacaaaaaagattatatattttaggtgaatactttaatgttcattatagccaattatatgtatattccgtgtattagtaatttgccgaacttactaactaaacgatttttttttggattattaactttataagatatcaaatgataaacaatctggtcaaaaaaaataaaagttatgtcagcaatgataata

SEQ ID NO: 31740 - DNA, 525 bp, Arabidopsis thaliana columbia
agagttccttagaagtcttggtttatcagacgaagatcttcataaggtgatgaagaaattcccggaagtacttggttgcagtcttgaagaggagatgaaaccaaacattgggattttggaaaaccaatgggggattacgggtaagcaactacgaaatctgttgcttcggaatccgaaagtgttgggatataatgtggattgtaaaggagattgtgttgctcaatgcactcggtgttgggttcggttttagtcctttactagttcgtctattcaccattctgaatgatcgttgatattttacatatttgagtgtagcttagaaatagagcaagagctgatttgtatctagtcctccatcttcttgtttcatcacagctacttgaataaacaatcgatcatgatttaaggaacgttgtgtaggtctcggtggaaactatcacatttgaaaatatcatacaaagaaaatcattccattaagaaagatagagactagagctaaagtgaaaagacaatgtaacaaaaaca

SEQ ID NO: 31741 - DNA, 498 bp, Arabidopsis thaliana columbia
tgtgaaattaataaatatagttatcacataatgtctgtccttttttctttattcctgataatgtaaaatttgttcaacaaaaaaaatacacttccttacgaaatagagatgtaacgtctataagtctgcaaagaattaccttaatgtatagttcttttcattaaggtaagcattctattctaccatatacaaatattcccattgataattcactaatcttttctctattagtattcatcatgatgtttattttatttttttgactaaatttgttagtatttttttgagaaaaaaagaaagaaaaaactaagtgtgacgagacacgaaaacactagacaaggaggggctttgacgagacccgaacaaacaaatgtgaatttaaaaaaacccattagaatgattaacaataatggaaatttaaaaatagaaaataatagtgtctctcgctttccttcatgcgttctctcgcagtcgcaggcgactatcaagtttcagaac

SEQ ID NO: 31742 - DNA, 531 bp, Arabidopsis thaliana columbia
ataccgggaataaacccgttgaaaacaatgccaaaagagtgaaaataatatacctgccattcattaacaactccagttactgtttttcttagcaacagcagtccaacgtatgcttcaaacacctgagttttagcaacaaattgttaagcccaataagttaaacagaaaacctcaagactattgtggaaaaagcaaagaggttctactatacaagccatctaagagatctcattacatcagataatctattaaatatattgactttcaaatatatacatagaaatgttcacagttgttaaaaagaaggaagacattaaacgctttaaaatgtttaagcataaacttgattcatatatttacacaaaaaaaaaagctcacctgtaatatgaatagcatacataagagccatagttgtccgccaacgccagctgtttctcccatacaacatacattctcttagcctgaattttaccacaaggccactttagagctattttcaaaagcgaatcaagtttggccgaagaatagaat

SEQ ID NO: 31743 - DNA, 525 bp, Arabidopsis thaliana columbia
gatctcctgaatataccactaagtgatgatttgatcttaaacgtaatcgtttataaactttaacaaaaatggtgttaaattgctggtaaaccaatgcaattcaatcatttaattgccaataaattttcctactaacattattatttcttaattactaattatactattaaactaactaaaggttaattatataaaataggaattcaagatattaaatgacattggcttttccataatatatacatctacatttcaaccagacattctataatcttaagagaaagtaccaaactattaacacactatgcaaaagtatattatcagactcaaaagggtccttagatctcctacttcccaccttaaacgcagaaatatctcgaaccttgttatactacgacatatgagatgaaggagacatgactatattttgagtagacccatcttttttgaagaagtctcaagctgttgtaaagtggataagacatcagccatatccggtctgagcttaggttcggtattgagaca

SEQ ID NO: 31744 - DNA, 498 bp, Arabidopsis thaliana columbia
  unsure (1)..(498): unsure at all n locations
cgaatctacaatcanggtatgtggaacccactcccacttatccttatgcttgtcataatccaaccaaattatattccatagaccttcatgattcgtcattagagccactctaatcacccctaatctcctctctaagcatcccatcatcacaccacaaggcttcttgctgatcacttcacttggtgctcttgacactaactcccatttctcaccatttgagcttatttcccaaacctctaaactcttcatcactttattcatctttgaattatcaattctgtctaatctaataaccactttgtactcatctccatgtatatgtaacaactgactctctagatcgttcctactgaatccaacactcgacgggcattgtctgatcgcgtcttggtttacctcggccgcaaaatcctcggaaaccggtttattatcgaaccatcgtcaacgctcatcacagtactctcgtgaggtcgatttgataagcttaagaataataca

SEQ ID NO: 31745 - DNA, 644 bp, Arabidopsis thaliana columbia
taggataactaattaggcttcgctaattcatagcaagcgacaaaaaaatattcactgccgcaagatattagggaataaatgtttgattatgccaggtttatagagatatcaaaaaactatggaaagatcaaatgttaatggcgaataacaaggttaggagataactgctaggtttatcgagagatcatcaagatatggaaggtttgaattaaagttgttatgattgcatataagttagcaaatgagttgaatttaaccgactattatggaaaggatttaaggtaataaagatgtgtattgttcatttgtgataaaacaggatccaaacaaattaataaaaaaacccatcaaatatttatccatggttcgaatacgataaaaccgggtgaatccagacccgaatgaattaaaaccgggtttaaggaaattaacttgaggtatttgccgtttgtcagtctaatccagattttccataaagtatagaaaaatgtgacaaacataaagaaattggtacgtatacatttactgatttatgtagttatttttttctcttttgtataattctagatattgactcgtgatacacgctagttgatatttccgttcaaaattaaagattgtattttagtaataattattatata

SEQ ID NO: 31746 - DNA, 523 bp, Arabidopsis thaliana columbia
aaattagcaaggtatcatccattctttatttattacatacatttttatcttttcaaacttttttttttgggtgtctagctattgaaccaaggtatcgttatagatatgactatttttatttttttacttttgattcatgattttgttttaatatattcgtcggtttttatttgttgaaatatgacattacattagcgttataggaggaccacaattttttgatttgaaagataaacgcaataataattcagcagtgtgaagaaatcttgatttggttcatataattacttttcaagaaagttgaaaatgtttagagatattgtttttgtgtttgtaaaataaagcacttttgagtgagcaaccaatgagaaaagagaatgctatttatatagttgtttgctataattgaatggtgtttagaatctccaaaattgcacgagatgaaaacgaactttttttgtcacaatatatgccaagtggtggatccggcgtgagttcacgcgccgccattgagattaggaca

SEQ ID NO: 31747 - DNA, 487 bp, Arabidopsis thaliana columbia
tggttcacatttaaggggagcttttcatgttctagattcaacgtctgttcttcgtttataaagcagaaatcagtttaaaaactatattctatataaaagctagcatctatcaaccttaaagaatcaaagaaagtaatgatctatcaaatattataagcataatacttcttatgtcataacacgcaccatttatttcacaactagttttcacaagatgcttagacaaaacacaaaagcaacaaaagagttgtgtaaaaaagcttgtagactcacggttcatcttcaaaacaaaaatacaataacaacgtcgaaatagcagacaagtacactcagctattaccatatttacatacacaacttgcaccaagtaagtaagtttgatcatacctggaaatacaccaaatgtgattcgtttcaccagatgagaaatatcccacacagattccaacaaaaaagaggatattcttcagaaatgcatcactttggt

SEQ ID NO: 31748 - DNA, 390 bp, Arabidopsis thaliana columbia
gagcttcggtaggagcccaacattgaaaaaatctctcaactattctatcaggctggttgttccaggtcttccatgtacctacacacctaatgcgaagacctacatcattgtggtaatcatcttgaaatgatactacaactgacatagaaaagcctgagataggtttttgcatccacggaactaagtctgtcattgcatttcgacctgcttgcaagcgaaaggaggatctctgccgtgtgtccataggaatacagatgatgacttcaggtgctttgatgagttcctgttcaagcaaaggccaaaattaattagttaacctgtgtgctgtgtgcatgagaattaatgaacgtgcgatagagagcgagagaaaggtaaaaaacctcttgtttt

SEQ ID NO: 31749 - DNA, 565 bp, Arabidopsis thaliana columbia
catgtaaaatcttaacaataaaaaacaattctatagtatggatggtaagagatttgttgaaggagaagaggacgtgggaaaaatacaaagaagctaaaaaaaaactcattgcaaccacaaacaaaatggtataaagagacaaaagagagtaatggacatggggaattacaaagaagcagaaaaccttgcaaccacatgaaataaacaaatgtctttgtcataagataatgaaatcacactgttgtctcaatgtttgtttagatctatctgatcatatatcgctgaaacaaccacacaaaaagcaaagccacattttatataaagacccatcatatatcaatcaatccccatctctcttcacatgcccatttgaatcgtatctcctctcatttcttcttttgttttgttggagttagataaaatcaaaggtctaataaaagtgtcaaaacccttatcgctataacctccactaccatcttaaacttctccttataactcacgcttctctgctttcttctctcagagtctaactgctcaaataagaaaatggtgagtaaaaagtttt

SEQ ID NO: 31750 - DNA, 499 bp, Arabidopsis thaliana columbia
tttttccaccgatcttcgtatccggggaatttgggaatgttagattgggatcttttgatctggcattagatcctatgaaatcgtataattttgctggtatttactgtttcagtagtgtaatagtggctacgaatgttgtcttgacagtcttaaaccttatggcttgtggattgcaagtatcatactcgaactaatttgatgcggatacatgataagtccattggcctattcaggctcaaatctaatgaacttgtagcatttagtgtgtagatgcccattagattgtataggaagcaattaatagaataagttaatggggagtgtctgatccagtggctactaatgaggctgttcagaagttatccattgtctgtggtgattactcatcgtatgcttatatgatctgggggacagtactctaggtctattaaatcgtcgccctcgtcacgactggctttgatgtgttattgccttaagtatattcaggaatgaattgatg

SEQ ID NO: 31751 - DNA, 567 bp, Arabidopsis thaliana columbia
acatatttccattttaaaaagatttaagtgcatacttccccatcatttattttgatacaggtgtgaaaattaacaataattaatattaatcataattgtcaataaattattttcacaaattataaaatattgttaaatcttattataaatagatgttatgataagttttggttaagtaatactcaaaatacagtagcaaactaatcacatcatcaataattggaggttttaaaaaaaactaagtagagcttatattttcaatactattatgaaagtaatttagctttttttagctctcccactataaattctaacacccttatatatgtcttacgtgtagagaaaatcaaagagacaacaacaaaaaatggacttattcgtaatggtagtaggagcatcaggaattggcgacggtggtgaacaaaaatacaactacaagttgagagcttggactaacgaagatgatccacgccaaacaaagattgtgacaacaaacgcagatcctgagttccgtgaggttttgcatcttcctcaaaacatggcttcatcttttctcaatttggagtt

SEQ ID NO: 31752 - DNA, 484 bp, Arabidopsis thaliana columbia
ccttctaaattaccaaaatgttgaacacattttaaaaaggggaaagtaagattgttaaactcatctagaaacggaagctttaatgtaataagattcttcaaatcatatgattttatattactgtatgttatatgaaccaatgcaagatcttacaaaaacatatgttaccattttcccaaggaggaaacacatgtgacatacttatcttataattaacacatgtcgtaaccttattattagacaacataacacaggtttattcatcaagtcttagggtttttattagcctatacaaattcgtgataagcaagacaaacaaaaacctctgtttgactcttccccaagtttttttttaaaacctcttcttcaagtaaattttgattattatataagtcaaccgattatactatagttcagaatagcccagatttaagaggtttttctctggatttcctcttctccacgttctcagagttagttcaca

SEQ ID NO: 31753 - DNA, 533 bp, Arabidopsis thaliana columbia
taatctatgattagatttatttttttaatgaattatttataaaagcgaaaaacaaaaactaaagtgaagcaagaaaaataaaagttttattgttgggatacataaaaaatatccatctcactaaattcgaatggaaaaatatatttagtgattaaaaactctataatacatcatacttcaaatattcaatattataccaaaatatttcctaaagaaatttttttttattaattttattttaaacaaaattaaataattcaaaaaatataaataaaataaaaaataaaaaattatgttaaaatgaatagaaaattaaaaaaaattatagtattttttgcattactatatgtcaatatataactatttaaatgattacttaacctaaaactacattaaacaatcgatagaaacaaacctatgtgtagcagcagctaataacctagttaaatcaaaatcctaattatatagagtcgactctctcccgagagcttttggcacctgagagtgttgctgacgtggcactaggtgactgg

SEQ ID NO: 31754 - DNA, 568 bp, Arabidopsis thaliana columbia
catgataggaaaaatttgaggccgaccattactgaacttatacaatattttacttgttcttcttacataaatagctataaacatacacaaatcagtccatttcatctacatgtaacattaataactttaataaataaacaagatatggacagtgtgaaattcacaataaatgtactagatagattttcaaaaatggaagaagagtgttgaaggaagctttcagcttgaggatggtgtctcaaaaggtacaataaggctctgtttctatgaaagtcccttacttattacttcacaacacatatacacacattatgatacatacatatatagagagatatgattgtgggtctctgaaacatgatgtcatcaaaagtgggtctctttctgattcttgtaaggaaagtgatctcaactgttgcttttttatttccttctcatgaatttgtggggattaagagatatgattctctcacacattggtggtccacaatagtcaaaatctaatactgctggtagttgattttggagagtttgttgagttaaaagtggagatatcacaatcatctat

SEQ ID NO: 31755 - DNA, 561 bp, Arabidopsis thaliana columbia
ggtgcaggtcgactatcccctattaactctacgaaaaaaataaaaaattgagagaaaaattaaatcaacaaattaattggctattaaaactactgtatataccggaaaataaatccaaagatgatatgaaaaccgacggttagtccggttaataccgaaatcaagttctttgaggtggtttggttttgttctttcgattgctgttggttatcgcgcgacattgtttttctaacacaaaactttaaaaggaggaggatcaaagcttttgttaggggttttggagctggacaagggagattcgagctcgagtatatatacacataaagtctggtaatatccacgagaatcagaagacgagatgctaggagaatgtggaaggcttttaaagacagagaaaccggtcgatttcgttccaattccttcgccaatcgattcaaatcccgccggattttgtctctccagctctctaatcgaaaagattttgtttctcctcatcgtggctccgttaactcccttcaggttctctcagatgtttcttgctcttcttatccgtgacttttg

SEQ ID NO: 31756 - DNA, 902 bp, Arabidopsis thaliana columbia
atccctgatgaagagtagaaactttgacttgtctgataaaatgatcacactcctttcatgaccatttcgattcaattgaggaattaggcactgttgagtgacagatcaaatgtcctaggatctataaacaattgacattccatggaatcagctttagggggttttgagcaatcatcatcaccaatcaggttattcgagggatccagtttgtatgtatttgaattcagcttaggggaacaaaagagttaagaatgtgaaaacaaatgacatgaatcacttgattcgatagcaaacacaaaagcaggactaatctctctcacacacacaatgtctcaacttaaacagagaaaactagtcaatgtcccaaaatgaaaatatagtagagtactagctaaaagagaggtagagagatcattcattcaatagggtttcttttgttgttgatggtggtcatgtcgtcaggaggtatgacagcaatcctgagaacaccaaattctgcatcccaagcgatggtgttgttcgaaattaaagcgggaaaaggactttggacgcttccgaggtaggttcgaccgctctcatcgtgttcatacacgtccttgatctcagctttgaatctgatttccttttcatcagcatacacttccacatcatccggactaacacctggcatgtccactgcaaagtgagcccctcctcccgcttttgtcaccccaattagtgctcccttgcgaccagacaccagacacggatgatcttcaagcgtattccggattgaccttaataaagaacagagagtactgtattacaacaaatgatgcagcaaaagagattgtgactttagagaagaggaatgagtcgaacgtgtaaaaggagcacagtgagagtcacttgttgttgttgtt

SEQ ID NO: 31757 - DNA, 588 bp, Arabidopsis thaliana columbia
gaatttggacaaatgtacttgtaatcatagatattgtaagagtaatcattcggtttaatcaaagtacatcaccaagtctaagttttgatacaaactcaaaccaaacgaagccaaaacattctcaacacaaacaccaaactttcatattcaaaagcacagttacaaacatcgaagcatagatcattttttctcacttattgtttcctttgcctcctcctcctccggaactagctgcagcagcggcttgagcagctttctttgcagtcttctcttgcaatgcttttgcatctctaaagcacaatgaaatcgatcaatccatagagattaacgttgtaatcagattcaagaacatatacaaatttggttacctttcacgacgttgctcaggagttaatccatcatctttgttctttcctttgcctccggttcgagctagagccctttcacggtcacgctctctttgacttcctcgtgcaaattcgcaatcataacaaaagcaagaattaaagaaaacaatgctaatttctttcagatcaaaatcgataaaagcacacaaaatttagcaaacccttcaagaactcgtgaaag

SEQ ID NO: 31758 - DNA, 497 bp, Arabidopsis thaliana columbia
gttattcaagactctttatctttattatagttcctgggagatcaagacagagcaatgcatattcctttgtgaagaaatctcttaaacgtttgttgttgataccttgtcttgttttgataatctcctgattactacaattttttgtcaaggccaccatttttatttgattcttttgtagcaaactaataatgactaggatacaaaataactcattggactttatgaatatactatattcccaaacagttagttgcgttatcctatcatatacccgattcattttcctagactgtgaaattagggtcgagtatgagtcatatggacaacgaaagcaagaccaatgggattgatcaactattaatggagtatttgtaaatcagtccatatcattcattagagaaaaaggtattacataagcgtaagtattaaaatataattataatgttggccggtcaataatcacgtaaggtagatagaaaaattgtctctgcgtatgg

SEQ ID NO: 31759 - DNA, 484 bp, Arabidopsis thaliana columbia
gtgagcttgtgtttatataacgccatatgtatcgttaattcgttatacgtggtatattactaataagcaatcactgtcaccactcttcaattaaattaatcccgcaatttggtcaattaggtaggctatgggatcttttataaaatcacattttaaccaaggctagtaagtgattttaattaagtaatggggaatcgactgtttgcttctgaaaatgatattttctcatatttgatgactcatgaaaatgattggttttcactgtttgcatgtgttgtatctttctgcacgtataaaagacattttgtaaaatcaatcttgttatcgtactttttgtgaaaaaaataacatgacacacaacaaaacaaaaaggcaaaagagtagacggcagatccacaaatacaatgaaccttaattacaaagttttgcttaagggtgttcaatttggataaaccgatatgaactgagctatgctttaatattg

SEQ ID NO: 31760 - DNA, 475 bp, Arabidopsis thaliana columbia
taaaaccatagatatataagtagctcaagttattggaatctaggataagctttccaaaaaaaacaaaacatgtttccttcaagctcattggattagtattgagtaaaggtttgttgatgtctgaaaattaaccacaccaattcattacaaagaatcaagttgtacaacacgtagctatagttaatatatatcaagtcgaaaacttcacaagaacttcgagaagtgaacaataactcgacagtatttccagattctgatttttagacaactttcttgaattgtttcttcaagacttgatcttgttcctaagttttgggattgttaggtctgcacctccaaacccatccattacacctttggccgatggaaactcacctcttgccgttaaacttcaagcaaaaagaatggtagagaaaatgagcaaatgaacaatgctccacagaagcacatttcaggctttagttctgtagaataa

SEQ ID NO: 31761 - DNA, 590 bp, Arabidopsis thaliana columbia
caatgttttgagttacctatatacaatgatccatttgatgagttagggcggtttacggatgaagatctaacaaatgtaatggcaaacatggacatggcttgatgtcgatgaaactaagttgttgcacgaacttgatctttcaataactaattgtggccccaacgaggagtttgatgggctgtcttctatcaatgatgggtttaccatcttgagacatgttcaaaccatcgaatgatgatctaaatgaaaacatcagcaatgagtgattaaaaaatctagttcatgcaacaacttagtttcatcagcaaccattggtaatgtagtaaagacatgaggaggcaagttttcgagaaatgtcatgtccatcaaattgggattaggggttgccatgacatttgataggtcttcatccgtaaatcgcccaactcatcaaattgattattgtacaaatcttcaccttctgtcaagggatgatcatcatacagatttatgtggatgacattgtctttggtgacccgttgacttcgacatgtcagactccttggtatgtgttcaagagtggatgattgcccagagcgaggttcatagat

SEQ ID NO: 31762 - DNA, 594 bp, Arabidopsis thaliana columbia
tagttcataaaacaagatcgaaaattgaataatcagattatgaaaagacaaaactttgattgattttggttcatatcaggctaagtgtatatcattgaattcaagaattcagaattgggcaacaaatacgaaattcagattgttactcagatcagatagatggaaatgcaaaacatcaaaattgaagcaaaaagagatagagattagagggaaagaaaacttacgatctcaacttcactgttcttctgattgaaaggtgaagagacgagacaactggatgtataagtgatgagtgattactattataataaccagaataaaataaaatgttaaatatgtagttaaatacatgaaatacccttaaaatgaaaatagttaaaatattaaataagaaaaaaatatagaattgtcttccatattagttgatgattttttcttatttatttctatctttcaactcttttcttttttggaatcagatttcattttttttctcagttatctattatttttaaaatttggtatttagtttatgactaacaaattttgttcccacaaaataatatacagacatctaattattttaaaaatata

SEQ ID NO: 31763 - DNA, 581 bp, Arabidopsis thaliana columbia
gatatcaacaaactccttgacacattgggaaaaggccccctttgagccatatgctctgccaaaaagtgtgagttaataggaaaagtttctgagagatatgcttgtcttcctgtaaatataatcttcttcattaagataactgtggttgttcttttgctaccttccgcagattaattatgctgttgtatgcccggatattgatcctttaactttgtgctgctactgatttcttccagcagcttggaactggtgagtcaacgagtttatcttttgtgaaagaggttatgctcaaacatgataggaactggtttctgttaaaaaatgctaacaagttctgataatgtctcatcattttcttctaatgtaccctttgttgcatagtttatgaaacgtgcaggctgggaacacatttgccacagagcctgggaaatcaaatggaaaaggacgttgggagattatcctcatctggatttgttctgcttgattgccctcaatcaatgaagattgaaagcaataacacatcgcttctgggatctctcagcgattattttctatctttatcaaatgggtggaatgtgaat

SEQ ID NO: 31764 - DNA, 587 bp, Arabidopsis thaliana columbia
gtgtagtggcaccacgtgtgttttactaatgaaccaatcaaccatttagttccaccgacttccaatagctctcgacttctaatttataattttgaaaaaaaaaaattatagtttcttaccaagaaatttttgttcactagtcaacatttttccctaatcagattcaaaattggtctttccaccaattgtattattgacgctagattctttttcttacaattttcgaccacaactctatcttacgcacaaaaaaagaaaaaaaaatactaatcttgtggaggagaaaaacagtgaagactgaagacaagaagcatgattgaattttgaaaagactcatacaaaactcgatcataaaaacagtgaagacaagtatgaagtatggtatgaataacaaaaagactaaaatgattttgtttgaaactgttgtaggtgagaaatttggacatgggacttgaccgtttggtagttggtgaacctactctcgtgagctgtgtccctcaaggcattgattttgcttctcttatacatatggacccaaaacttattttggaagttcaaagacccatacattcgttatattaaggtat

SEQ ID NO: 31765 - DNA, 564 bp, Arabidopsis thaliana columbia
taatataaattgactaaaacatagagacattggcgtttgtgtaaggctatcgacaaaaggtaagataaatcagccaatcaggcaaaggaagaaaattcaaacaatagatacgagagatatagtgatgcaaaaacatgttaatcttattgtagagttggtttgaatatgggaaaggtcttcaaagaaagctgaagcattcgaagaattttatttagggccagagtccagagataaaaatgaaagaataagattttcatataaatttgattatactttgaactattgtaatattccttgagtgattattatggttgacatacagaggccttaactatatatgggtcctatataagacaatttttcataaacaccaagacggaataggtcaaccgcatgtcttctccattgttataatttcttaatacacaaaattacgttaggtgaagaaaatcaagaattattcttgttttacaaattacaatatttaacttatctattttctcaaagaccttattattattttcaaattatcatggtgaactacatttatatttctagtaataa

SEQ ID NO: 31766 - DNA, 562 bp, Arabidopsis thaliana columbia
atgttatgtatagtggggttttttaacgggcaaacatcttttgggtatttgagtaatttacatatctaaaatcatatttcacgagcaagtattttaaaatactttgacttaggtattttggtacccataagcaatttttcacataagaactcaaatatgtgtgtgaactgaaagtaataactaaccaaggtcgtcgtttctagattcctaagtaaataactaatcaagatttcttttcaataagtccgctctgatctctttaatcgcgttgttacatagttacatgtctaactcatggcacagagagagatgccaaataaaagggataaatgttgaattggacttataagaagctaagaacatgattgggcatgtttgggcacatgcaaaaggagcattaggaaaacgggcaaatgtcacattcacaatttgatattctgaagaaagaaaaactgctgattcaaaatcttgaggtttttaacaaaagaatccaaaagagcgaaccatattctaaaatttagagcggacacattgcaaatattgaactttgagaatgaggata

SEQ ID NO: 31767 - DNA, 821 bp, Arabidopsis thaliana columbia
tatcagaatcggattcggttttttgagtagaaatgtttaagatcctataaggtgaatttgaattttccgattcgaattcaagtccaattttcggaataattacggttcgagtattcagtccgattttttgcccagttctatgggatttcaaattttcaatattatttattgattcttacgtatttaaattttgttggaactttttatttttccgttgaaatgctaatggttagttggtgtttaattgaaaattgctaatcacaaaaaaaaaaaaaaactatcatcttattatactgtttagtttatatacagtaaatgaaataacccaagcatttggagagttttacatcacaagctatgaactccgactacaatgtgtcaatttccctatcgaacgacgaggcccggctcaaaagagtgggcagaaatgtatagacggcccattaccattaacactaatgagtttgtttgcctctctattctaaatggaatgtgagtgtactcctaggctaaactggcctatcttatgcaatttagaagagatatgtttgattaatttagaatacgttaataaatgaaattgacgttgagaaaaccataaatgtaattatgaataaattcattataaatagatgaaactataacccaaaagtaaaaataaagggaagatacataagttgtgaattattgttgggtcatataaaatataaaaatgtctacatttgcgaattagcatatctaggacttgagtccactgaactgcatctgatatttgttggacgattttgttcaaatggtagaccggtattggaggatttgag

SEQ ID NO: 31768 - DNA, 508 bp, Arabidopsis thaliana columbia
ataggccatagcttagttaccatttttgtaaacgaccgtcttcgcaatcacttctttttctcgttgacctgacaaaagcttcaaattatagttattgtggattgacattattttacatagtgtaggttttgtatatcatcacaaattattttaacaatcaccatctctaatcttttacgccattaatattactatcttcataatatcttttagcagtcagatttataaattgtacctatttatggcgtgtcaaacagtaggtcaatgataataatattaacaatttacaccaaattatgtattaaaataacatgattatgttttttttgtcgtttttgttacgctgaaaaattacatacccaatttaaatctcacttccaatagacataaaaggattgtattttactttgtgaaaattacatattgacagtcctatttagatgggccataaaaatggcccaatagtaattagtttgggcagcggcatttcacctctgcgacggtcgga

SEQ ID NO: 31769 - DNA, 293 bp, Arabidopsis thaliana columbia
atgctcagtagtggtaaatatgctaggagcatgagaacgttctcattgttccgtgttcatggcatccaatggaccatggcctaaagtccgtacctctaccatcgtgatctgggacttctgccgacagtcgagcctggcaactggcactgagtactcagatgacatgcctgattccgagttgcaacctgatgctgcacgttacacgtgactgatcacggggctcgggactcacaagaagctggatactgtctacgcactgctctaggagatgcaagacaagggacacactccgg

SEQ ID NO: 31770 - DNA, 274 bp, Arabidopsis thaliana columbia
tactgaaagatgtcacgctatttacaaatgatcgacaatacgttatgtaaatggaagataaattaagctaaatggcgtattctctttaagaagttacgagcatgtccattggttacgctttctatgaaggaatccgtaacgttatataagactggctgatgatactgatgtagcttaggattgctgatgaatccttagagtatttcatgtccgatggtaggatcttgagatgagtgtcttatgaagtttgaaatgctagttttgagtatgatta

SEQ ID NO: 31771 - DNA, 582 bp, Arabidopsis thaliana columbia
gaccattaagtaaacgggctaaaggcaacttaataggccttatttttaaaacacattaaaagtgggcctcattttaaaccataacagattaaaagtgggcctttccattataaactgaaagtagaaaaagttggaagagaagagtaagtaggctacagtttcagtcagaggtgaaagaaaatctgaaagcaaagcagagagcagctcccttcccctcggcgaggaggaaggaagaagaaagccagagagagagagagagatcatcgcagcttctcctccgaccatttgactgcgactgtgattacaacacaccgttgatcctacgaaaaaggtcagtcagactctcttccttgtctgcgtgattccattttccggcgtctgtctagcctcgccgtcttttaatatctttcactcgccttcctgtctcttctgcacactagatttgattttttcgtaacttaaaaaaatgttgttgttgtcattcaaacgcgtccatggctcagctactccgcggctagggtttagttatcattttttaataatataattttgatggatcggcgtgcgtgcagaggtaatgga

SEQ ID NO: 31772 - DNA, 561 bp, Arabidopsis thaliana columbia
acgtgttacccatgaaggacataacgggatcaaagaggcttttggtatcaactgcaggtggccacatacttgaagctgcatctaaaaagaaagaacaaaaggatttttgttgtgaaaggtacaagaaactcaagacaaactagagaagaaaatgatttgtgctacagttaggtaaacacagaatacccctgaaatcatagccagaaaaagctgtcaccaagtaaacgcaaagatccaaaacaaagtgtttttttcaaattcagaataaaatgcaatgggtagaatctgaagcacactagctaagctagttctaagaaaaataagacagaatcccataacttgcaagattgtattattgcaacagcagattattgatctaaacatcctacataaagaagaagaagaaaaatggcaggtcctatcaacaaatgcgccttgagtaatcaaatcctatattcccagctgactaacagcagattattgggaaggatgataatattatgtgtattgattggaaaaaaagtgagaagaagagaacaccttcagcggcagaatcggact

SEQ ID NO: 31773 - DNA, 304 bp, Arabidopsis thaliana columbia
tgaataataaataagtaaggatgaataaaaacacttatatttagtcgattcaagataagtgattcaatcagacgctataggtgtagagatacgagatagatgtagaaatcaaccactcctctagaatagtgtgatggtcaacgttacaaagtatgggtaaacaggtacacttgttaaaacatcgggggtacgagtctggagactcttggggctcagacaatcagaagggtcacccgcggtgagctttccagaacaaatgaacgcctccagaacgtgagttctcgtccacgatcagcttgctatg

SEQ ID NO: 31774 - DNA, 432 bp, Arabidopsis thaliana columbia
ttcaaaacttatggtaatgtaatgaataattcgtattctctgtggattgatttgtgtaaacacagtttcatgttctatgtcaaactgtataacctctggtgtttcagattgcacaacctaaagcttaggtaaactgaatatggtttaagatcgtaaaaggttgatatattagtaatgttaagagggagaagaaacttctctttagtagataacgagaatgttgatgagcatgatgagagagttcttaaactagtctagcaaattctgtataagctcttgttgtagccatcttgaattcgagtctaatccttgcgaacaatatagaaagtggtagtgtgtaaagtttccctcatcatttgtggtttctgtttctcactttcttcggtgtagtaaaatttaagttgtatgtataatagtgctatcatatacctg

SEQ ID NO: 31775 - DNA, 245 bp, Arabidopsis thaliana columbia
catggtatttgttaaacaaggtttccttagcatgaatcagttctcagtttctttttatacccaatcagttcaaattttgatataacgattcaactgataatagagataaacaaaccactaatagtctgtcaaatacaccaaagaaaaatcgtggtaaaaccgagttttaggcttgtagcaactctggatagggcaaagagaaagtacatgaatacaatagtacttaattacttatcaactatgtg

SEQ ID NO: 31776 - DNA, 507 bp, Arabidopsis thaliana columbia
ccctgggtgctattataatgacaatagtatgttgggaaaaaaaaatatgttaaactatgctttaaaagtttttactactggtatgaaagtcgagatttggtgctacgagtttgatctctctgacaaattttttgcgtatacatattattttatttctcatttttaaaatggatcgatctacaaatatttgtgtttagccaatagtttaccatatacaaaaaatttactaatgttcgcggaaggaaataaacttagcaaatatattgttgaattcttaatgatatataacactattttaaatataaaaaatcgtcaaaatataaatctagtgatttataataatatagctgttatattgccattataattcaaaatctgcatatcaaaagaaagaaattttgaaatatgtcacccatactgaaccaatacttttcctaaaaaatataaaattgaagctatttcacaaacaaatctgcatctattaagaataaccaaaacaaataatac

SEQ ID NO: 31777 - DNA, 541 bp, Arabidopsis thaliana columbia
agatcatacatatccccaatctaccccgcaagttgcggtggcaattttcataaagtcaaaaaagtattcaacacgtgtcgttccactattcgtccaacactcacgccctcgtaatcctattggttcatatgcatcaccctcttggtcactcaattatattatcacccttcaactttatccataatcacgtgaatgccattacactaaaaacagtaatcaaacttttttatgttaataaaataagaaaatctaatgagagtataagaacaaaaagcgtctatcataagtacggtcgatcttctccttctattttataaagtccactgaagtaaataacaaaacaacgactcacttttggaataattacactcacaccattcaatcacgccgttgattttggtgactaatattaaactcagtggaccgcgttacacttgattgtggcttcaatatacgttataggaaaaagtgaatttaaaaggcaaaggaaaaaaaccattttgtgtcatcccgttcccacttccaaccaaaattaatttaa

SEQ ID NO: 31778 - DNA, 601 bp, Arabidopsis thaliana columbia
tgctttccttttttcttttggcttgtgattggaaattgaaggttggtataaaatgtacaattcagacatcttatatatctccagagtatcctttggtttggctgatatataaatgatttgcaatactgttatgatcattgtgtattgaaacttaggatgtgattggtaatcgtgggtttaataaagcaaaaatgaaaaaaatggaaaataaagaaaataaatatttaaaaatcagctcaaactaagtattctttggtttggctgatattagtatagtgagatgatgaattaatttaaaatatcatctcttttctgtttttttctaaagtcatcataaactattctcatgtagatttgaaaccagaagataattaacacaacacaaattctattacaaactactagatacattctaaaacattctacattagagaaaaatagttggtatataacactcaagcagtcaagctatttcaaaataattggtacaacaacatccatgattaaaaaataacaactatttgggtcctaaattttatctttacaatcaagctatttcgaaattttatgcaagtaatttcttaatagttaatagtaatat

SEQ ID NO: 31779 - DNA, 554 bp, Arabidopsis thaliana columbia
ggatttttctatgtcataaatagctataaacttctaaacttttgttgttgaatcaattatgattagataaggaagtaaattggtgtgaaaaagataaagatatggaaatgatagtaaagtagtgtatatatataaatggtgtgcaatctgtaacaaacagaatatagagaaattaattagtgaaaaaagtagaaagtgattgttacagggaatatttttccacatacgtaaaaataggtctaatatttttactttttaattccgatcttgtacttttctttttacaattgattaaagtggaaataagcttcctttattttcatcttcattgatgaaaataatgagtagagaaacattttactacctaaaatgagtagagaaatcattcctctattcagagaacaaatgtctaaaatgaactgtttttattattttgctcaataaatacataaatttggtagataaaaccaaataatcttttttaaatgctagttaattttttaaaaaagtatacatttttattggtaccttttattgtgaattaaatattatga

SEQ ID NO: 31780 - DNA, 293 bp, Arabidopsis thaliana columbia
ttttttttttttttggggtaattgggtaattttgaatttgataacaaagctgaaatgttcacttgaaaattagttcaaattataaagcaattcctagaaaagcttatagttctcttagctcgactaaacaaaaatactgttatttgttaacatatatgtttcgtatatgttgcaaactgtgtataagagtttgtgttataccactgtgaaggaacattacagaactggaatgtacaatggggtagtgttcgacgcgtatggagagagtcgaatgatgattagtaaagtgatgt

SEQ ID NO: 31781 - DNA, 513 bp, Arabidopsis thaliana columbia
acatcatattgttgtttttgtttaacaaagtcttgatttgctttgttttggggattgacagtctttcaggagctgatgatgtatgtgattctaaagccggggaagatcttttggacatatttcgtagaaaggtttgtcttttcttttcactctgtttcaaaaatgttgcattgaagcaatttctattgcatttcacttgtcttcttttgtttgaacatattcgttgaaattggagttccctgtatagaaatcaaagctaagttacatagttgcttcaagtggtttacctatctttgtgacttccaaagcaattctccatatatgattcttgttctgctttctataagttggtttgcacattgaatcaattcttagctatatagtagcatataaagattgatcttttgttgaaactgtaaagctactgtccacattttgtgtattgagatctatttcttgtcttcttctttctctaggaatcagtatcatctagatcaccccatttttccttgg

SEQ ID NO: 31782 - DNA, 573 bp, Arabidopsis thaliana columbia
aaacttctcattcaaaatattttatatttgttgagatttttcttaaatatatgtgttttagtcggatgtaatcctagattttatagccgttttggtactattgcattgtcaagtttaactgctgcgtgatcgtaccttttcgaaaccacaccaatacactatatatttctaattctatcaatgtgattactaattatatggtttaattataatacaagtgacatattatctttaaaacgatttgtatttaatgtaaaattaatttatcttaaacgcacaacatttattagagggaaaactatatgtgaagatatatgaattattttcgaaatgattattggaacgtttcaaaatgaaagaatggagaatattttaaaaatcagaggcttagtagggcgaggcccctctatgccgtgaacgctcacaggagccttacttattttatctctttgtttcaaatcttatcgacggaaaatttctataacccatttaacaatgaaacaaaaaattataacccacaaatgattgtataaatagtttcaaaccgataggtatatatgtagatatatatag

SEQ ID NO: 31783 - DNA, 529 bp, Arabidopsis thaliana columbia
aaaaaacaaattgatatatcaatgatatgaacaactcatctatactgaaaagaactatcatttttccttttcgttgatatcgtaaaatacgagaaatgaaaacgatcatatatcaaactgttataattgtacgccgaatatattccgcctgtccggaaaattggatggactataagtagctaggcgtgtcaacatagaaattggtatcaacgattctagtattatttgtatatcattaatatttattaaaatatagtctaaaagtgatccactctaatctgattcgctgacaaaccaatctgtattttcaacctggccgtttttcatcctacggcgtgttaaaccctcgtagacaaatccacaacgttttttcacatccttatatatatgtgtgtgtgtaaatattgcttcgtccaacaagaagagtattgtttgtagttttttaatcaatagaaaatgttatcatacaacccacaatgagctaactaacacatttcccaagtataaaaccctttagaaactatatatg

SEQ ID NO: 31784 - DNA, 310 bp, Arabidopsis thaliana columbia
acattagctctaagagggtatgtgtacgatataaaacattatatatattcttcctagtttcatcttttacatttccacacatatacaaaacatattgaaactttgttacatcaaacaagttcactattgatatttctaataaggattctttataaacaaacaatgagttaaattgaggtcaaaataaataatttgcgtcaaagtttactttgcaatccaaattaatacttattttgaaacaaaaagaaatgctagaaaaacatttgaattatgaacataggaaacgtagggagtatatggtatatatata

SEQ ID NO: 31785 - DNA, 271 bp, Arabidopsis thaliana columbia
  unsure (1)..(271): unsure at all n locations
caagcttaatttgtcgaacttcctgttcataacgttttttctcgatctcatcgagtttttctctttcgagttgcttctctttttgatgttctatatgtttttgtcttatctctatttttttcaacatagggacgacatgttcatcgtaatcagaaagtgtttcatagctatgcacatactctttttttgcaaataactttttgaaaaacgtctgtttttcttgatgattaacgggtagatcctcgccacgctctaagattnttgctgccgt

SEQ ID NO: 31786 - DNA, 329 bp, Arabidopsis thaliana columbia
  unsure (1)..(329): unsure at all n locations
ctgagtctgagcagcgcgngcatcctggagcggcacccccaccagcaccgcttcattcaccttcacgatcaccgccacggacgccaacgctgccccggctcacgttcctacaccctcgcttcatcttgtccgctcatcgccgtcacacccgcgacagagctcgcgccaccgtaggcacggcctactcacaaaccctgagcgccacgctggcctggccccgtatggttcatgggcaatcaccagcggcacactgcccgcaggtctggcactgaatgccagcaccggcgtcatcagcggcacaccgacgaccgcgaatggcgcgggcacca

SEQ ID NO: 31787 - DNA, 516 bp, Arabidopsis thaliana columbia
tgaaagaggatcatgatgcgggttttgaggtggactagtatctgcaaacacttgtgcttcatcttcatctctcacatctctaaacatcgaaagaaacgagttaagtccttctgacgaagccccgcctaaaatccatagaagcatcgagctgaacgagctcattgcgcctgcttgttgtgggttaggctctgcaggaacggtgtttgcttcattctcttcttgctgctcttgatattgtgccggattcccgacacctcctccatccgctgtaaaagatcttgtttccgtgttttggtttggggttgtgtggttaggaccagacggagttcggtttcttgttgttctgttcagccttgtgatgtgaagagttgatgctaggattgttgaggaagtgatgtgaaagtctgggtgttgctgaaggtgtgactgtcggctttgaaggaacctctgaagagctggtacctgtaattttgtgataaaaactttgaattgaagcttagcttctctggatttggc

SEQ ID NO: 31788 - DNA, 594 bp, Arabidopsis thaliana columbia
gtcaaaagaacaaaaaaactgcttttaaatttagtccccaccactattttgatttagttaattcggtttggttttttggattttactatgttagatgcaattttacatacgaaagaaatatattcagagagaaaatataggattccaacctttcttgatcacaaagagccaaacacaattgtacttgagctttttcaatccactgttgtcttaacagttttttcaaaaagaagattttggcggaagatcttaccatcattttcatagatttcaccagtaatgtcacattaataaagaatggtcaaatatcattgatcccaaactaaaaatgttcttcttgtctcgtcaagtggatgataacataatggtataatacattaataaaatgaccagataatattccaaatactcgaatggatttggtcatgtatatttaaagagcactcaaatggggatgtcttcatcttttgggggtcaatgattatcatattgaaacacaaaaacgtgagcggcaggattcgaacctgcgcgggcaaagccacatgatttctagtcatgcccgataacactccggacgccaacaagacgattata

SEQ ID NO: 31789 - DNA, 151 bp, Arabidopsis thaliana columbia
ccctatattttatatgacatttatgttgtataaaactcaattctgctattttgatattattgttaaattatcatattcagataagcaatgaaaagcatgtaacgtgaaagtgtttttgtctgctgcttggaattataacatacactttgtc

SEQ ID NO: 31790 - DNA, 617 bp, Arabidopsis thaliana columbia
actctctgccaacaatttatcatcaatgttttcttcttttccataaatctcacctttcttaattcaaactctgtgtttttcttcttctttcctttagtgttcttgagaacttttataattgattgggttggtgacttttagtcccattgctttatgaatagataactatgcatttcaaagccttgaaagcaaatacatggcttgttaacttatgattacaaactcaagttcatacatatagaaaaggaaatagttaagaatgagaaatcacatgatagaacaagcgttaggattctcatcactaaacttagaaccagtttggtggctgaagatagaggcatgaacagggtggtggcggtaagacgaatagtcattgctatcgtagccatgcttgtaataattgtaagacgaagtcgggactggtgcggcgtggttgattgggccgttgcagccctgagggttgtagaagtagccgccgttgctgctgcttccgcccatgtggtcagggttataaggaagctgccatagctcagctcgcctgccggtttttctcactttcttcagaaccttcttctgatcgcatagccagtcaccgtcactttctgctgcaccatgtc

SEQ ID NO: 31791 - DNA, 408 bp, Arabidopsis thaliana columbia
gacaataaaagcccaacctatccactgagcccactgtgcaatcaactgagaaaagattaacgtccagtgaacttgctgtctcttccgttcttcttcccaaatatcctccagagtacgctcctaagagtatcaccacaggtaataatacataaaagggttcttctcatctctaattgaatacacgcacactgaactactaacctcaatgtactcatgtctactattatcagtactactacttcctaacaagggttcacttaaagtttcagagtctgttggatcatagcgttcatacttcctcgcatctacatcaccgtgatgcagccgccttctcagagtcgcagatgccatcttgtatatcaacagatacaagcgaattagccgctgcattattccagagatgagatc

SEQ ID NO: 31792 - DNA, 527 bp, Arabidopsis thaliana columbia
actctagagcagattaaacattctttgaatcgtaatgttagcaatcctgctttcattgccgcacagtcgaagtttgaggaactaacttcatctactggttcaaacaaagcaatgacgctgtcttctaaagatgatgttttgggtgaagaaggcaaaacagatatagattcaccagacactacaaacactataaaggatcactctttggaagatgttactccagctgagcttagtggatccgagtgtggcaccgaactctctgtaacttcttctcttgacacacttgagaagaagtcagacgctgagggtgcagacccagggtagaagctaagcttttagaggatgacacttttaaaacagaccaagcagagttgatagaaattgatgttaaagacgcaacgtcaatgggtactgtagaggaccctaaggagaaagttgagaatgctaaggacgaagttgaaatttcagcgacacatcatgaaccggtcattagtacccagatccaaaaagagacgggctgaagatga

SEQ ID NO: 31793 - DNA, 860 bp, Arabidopsis thaliana columbia
tcgtaacccatcttgtccaccatttccttcaccacttgatacatggttggtcttgcctgcaacaagtaaccataaaacatcataaaatctctcttcaatcactcttaactaaattccaaacagagagacaaaacaaactagaaataaaagcatacaatttggacattggtcattgctgccataagtaacacactaggcatctccactgcaataacaaaacacaaatcaacatactcaaaaccttgtgagagtggcataagagaaacactttgagatcaccaaaactaagcaactcaaacacagattttcacgtacagacgataatcggaaggagaagaccagttccatcttccattttcaagacaatagcagggtgtggagcataatctggtaaatgccctccttgaggattgttatggacacatcgtagttgcctaccatccctcatcttcaccataaaaccatctgctccactttttacttcaactacaacattcaaaaacacccaaaaagacaccaactttgaaaaactaaaagaactaaatcaaaccaaacaaggaaactctactaatccccactaacttaccagcttccactacactagagttaacatattcctcatcattttcattgaaattttcagcagtgcttccattaccatcagagtgagagctgaaaacacacttgatactcttgttgcacaatctaagagtgattgttgtggtagtgccctgagacttgacaccttttgtccgattaccccaaaattggcttctaggtttcagaccagtgtagttgactagtgaagcacatgcacctacttgtcttggtcgaattgcaggacaaacaactggtgcttg

SEQ ID NO: 31794 - DNA, 546 bp, Arabidopsis thaliana columbia
tatccattttcttgaatgtcatcttactaaacactacgcatatgtgacgttttcttttttctttaactaatcagaaaattgaatttttcatgataccggtaaagagatttatccaattaaaccgaaccggctccacataagataagctctattaattattagtccactggtttttaggtttatgaaaacgacaaatatttgaatgaagacaacgacttcaacaacatgatcgagctggtttggtttccaagtgtgaattcaagactaagaagaaatccaacaatctccattatcaattttttttattaactttttgactaaaccagtagagagagagagagaaagacagcaaatttggttgactctaacaaaccaatatcatcaaagtcaagcagttgaaaattcttcaatttcatcatctccaattcttaatctctctgcttcttctttcttcacaacttgaaacagaacacaaaaccccttgatgagggaataaaaaaaggagatctcctttctcaatcaacaaaacaaaatgaagaaagacct

SEQ ID NO: 31795 - DNA, 417 bp, Arabidopsis thaliana columbia
ccctgttttgtagttgaatagttttgctataaatgttgaggcaccaagtaaaagtgttcccgtgatgtaaattagttactaaacagagccatatatcttcaatccataaacaacatagacactttaataaagccgtgagtgttaatttttcaatctagtttcatttcttacatgacattcacggctttattaaagtattacaccatatcccctaatacaatctcttaactcaatttgagttctatattgctaagtagccaacacttgatcgaagaggtaacaattactaaaaccactatccatcaacagtagcgcgactatagatcataacctatctatattagatctgatcttgttgcaaatgttgtgagcctaagtgtgtaatcacttgtaaatgtttctgtttgatactcttga

SEQ ID NO: 31796 - DNA, 493 bp, Arabidopsis thaliana columbia
gaggatctacgaggatccccttattctcaaaaaaaaaaccatacaatagctatatgaaaacatatacaatagcaaataaaaaaatgatctatacttctatcatatcactaaaatatttgttttcaaatatggtattatagcacatgtaaatgtaagaactaaataatttattgctttacagaagagctatagtataagcatatatgaacgcaaaattgaatagctattgtacaatgatgtacgataacaaaacacctggtgctatatgaaaatacatactagcgttttactttcgctatagtattcgtcaattgtgtagcaattttaaaaaagctatagtagggcttacccctacgatggatgccgatggcatagcttttgtgaattcgctatgttatatgtatgatagcagatattccgcactaataatgtcaacatttcttatagtgaaaagaagttgaacaagaagctgcataagaaactgaacgagagg

SEQ ID NO: 31797 - DNA, 614 bp, Arabidopsis thaliana columbia
  unsure (1)..(614): unsure at all n locations
ccgaatttcgtttggataaagaattggactttcctgctacgacagagttcaacggcgacattatcaggcttcacagtacggacgacgcgttcaacgatggaagcagattccggcgagatatgagaagtgcccacaagccaaatcgcttccggctcaacgaactctttgcgccaagctggaacaggaccgaaactctgtttctggagaagaatcagagtcccgttatcagcgaggtcaagcaactccgggtaagttttcgcgattgcggcgcgtgattccgacgcgatgtcgttgcggaaatcgaaatccggcggaggagtttgaacggagacggagactttgatgggtctgaaaatatgctttgaagtatagggagtgaagaaagggaacaaggttagtgatggattcggaaggagtttcatcgcaaggaattcaaatcaagaaaatcttgatttggatcgataattgtgaagaaaaaaaagattgaagtttttttattggtttagatttcattagcgatatacgaggatggcgagaaccacgttaatggcccaatggaacttttacgtntttgacatttggatgtatgaatcaccaacatgacaagtataata

SEQ ID NO: 31798 - DNA, 512 bp, Arabidopsis thaliana columbia
tctaacagttttgctagatattatatatttcatatctaatggctaattgtatatattgcctagttaaatatgaggttgactttacgctaaaattgtttacatgtcaagttaattgtcaactaaggtgatgatatttttatcagtattaatctctaaaattttaacaaccccatttctcatttttaataaaaaaattcgaaccaaaataatgatcatggccaagccttttttcaatggtaggctaattagtttttatccttttaatcaaaatttcgagaaatcttttaattcatcttaattatattgtgaaagttttaacctactactagttaacactcgagaatccgttttgcgatcaaataaaaacttgaagcatgtatatacagaatataactaagttatgcatataggtgttaataatcttaaattacaagctccatatagatttaagaaggaacccttgtttcaaagattaaaaagactccaacatgatatttcataaacccaacata

SEQ ID NO: 31799 - DNA, 556 bp, Arabidopsis thaliana columbia
cccaaacccaactctctccatgttccatccaaagacacagaaagtgcagaaaagagaaagataagccaatgaaatatcatcccaaatatccaaaattccaccactccactgaggatcactcaccggaaccatcccatccccaacccccgtggaagcagaggcaaacgaataccacctctctaaagtaaaccgacgattaacagacccttcttcacgttgcttcagttgattctcctcgtcttcattagaatcattataatctttcccaagtggacttagtatagtgtacaaacccgcaaccgcaggagctccaatggcagcagagatacatatagcaactccaatgggaggtctctctgatctcctgtatccaacattaagaccacaaagcgcgtactgagcaaaacaattcaagtgaagcaaaatgacaacaaccataatgtgcatccattcattaggcttataagtccatccttgcaataagctttcctaagcttagtaatatcatcatgcttccatctacaaagaagcactaagtgataaaccgtttgggatg

SEQ ID NO: 31800 - DNA, 649 bp, Arabidopsis thaliana columbia
gggagagacaagtggcagcaattcacggatacacagaactcagtaagtttttaaaatagtaccaaacacgcccccctttactaaacttcaaaaaaaaaaaaaaagattaaaaaaatttgaactttcaaataaactcagaagccatttcccatttcctcttttctccgtcgtctcgtctggttcgctcttctctctctctctctttcactcaatttcttctctaatcgtttaatttcttcttgggttccttctcttctcttagatctccccgtaatcccagagaatcgtctgcatttcttctcacgagttagatttctctaaatcttcctctgattttctcttacccagtgaatttccagacctagattcacctctccgtgctttttcctccgaatgaaatgttttcaccggagatgaacagtgagtgaaagatgaacagatttcgactcagcgacctcagttctcgagatcgattagcttcaacactgcccacttctcaccaaggtcacagcttttctctctcacgcttttttcttacacaaccgtttctgattggttgaagagaaacgccgatttgatgcgttttcgtttgtcctaacatagaactcgaatttggcaatttagagcaaattgtgtattttttgttggc

SEQ ID NO: 31801 - DNA, 577 bp, Arabidopsis thaliana columbia
catgaattaaccaactctatgtaacgagatgatttattcttgtctctctaagactcgagatgattcgctattgataaaacttctattattctaacatttttattgcaaaactattttttcaactattctctaccaaaagtacaataaacatacaaaattcaatccagaagcgtgtcatacctttgtgcctttgtgtcttttcttggattaagatactgcttttgttactcaagagtgtactccggagagtcaatgtcaccacctccctgagtgaacgtgaaccatatgatgtttttttagtctttcacacatgtttaatcaatccaaacgcattctgcaattctttgtttctcataatgtaagcactctttgagactcatgccaacacttcgtaacaagtgcttgagattggtctatgctatggtcagtctagcaaactcaagtgtcagtacctagaatatcaatcctaactgcatcaaaggaagactctttcttattttatctaggtcagagcacgcagcttttattcgttcctttacagatgatgagcttgatacatgagactacaaaccaaatg

SEQ ID NO: 31802 - DNA, 550 bp, Arabidopsis thaliana columbia
tgcaatcatttgcacatttgcactttatttatttttggtatgaatgaaagatttattcaccaaaagactgttttgtcatctatttgaaaggattagaagaaattgaaattatttgaaaggttataaccgaatgatcgtcagcgaggatgtgtttgtaaccaatatcgcagccctccgtcataagtaggtgagcctgtcaagtcgtgatatatttgatgaaattatagtcgatcaagtactcttgatctttattaccttggtggacagaacatgttttcttaaccgagattgactttgaagtaaaagtttggacggctacatattacgaaactgcaagtttctagccaagtatcgtttaagaagacaagtcacgtaccacgtgttcagagtatttttctatggattaggagttaggacttaggatagtatagcgtccttgcatactggtcattctcgaggccggtcatttctttggctttcttgagtatgtttctgacaatatgcatgcttgcatgttgtcccgtgtgagaatcctataggtggcagaaaa

SEQ ID NO: 31803 - DNA, 573 bp, Arabidopsis thaliana columbia
cataattatacgtaaatatagataatcttaacttaagcatatactattcccttctaggtttctttgaaactccacgacaacatctcaccagcaaaattcacttccagtctggtggtaacaaatcagttccataaaaaggagaaaagtatggataaaggccaaatcacttactttccaaagttagcttaaaaagagtggacacaaatgcatcttcaagtaaatgtacttggtggatcagactcaacccacttatcactaaacaacaaccttattaattactacttctcaataataaacaaatatagataacttcatatggttttaggcttctaggcatttatcatttataacttggataagaacacataaagaagaatgttggactttccacacagataacagatttcgatatgacaaagatttttgaaaagatgtaattgatagaacaaaaaaccaaaatggaaaaaaaagatgtggatgatcattcaaaagttttgaaactcttctatcacatacattctccggatgtggttgttactacttcaaaatataaaaatttacaaaacaattgtt

SEQ ID NO: 31804 - DNA, 516 bp, Arabidopsis thaliana columbia
tattattttgaaaaattattttatttacaatttctgtacttaaaaaatataaatggaaatgaataagtggataatcatctaaaattattttaattttgaaattttgtttaaaataaaatatcgactgtcgatctggtgaaacagagcttggactgtcttattgtgtagtccggttgttgcgctctatctctctccaaagaaacaaaaaacggtgggttggacttaataatccaagcaattaagcttgttgttcaaattttaatcaccacctttctcaaaagagagtgttaagcctttgacgaagtatgaatcgttaatttgcacaagagtaaagaattatatgcgtgtcaaagttttagtgtttgagaatgattataagctgtcttgatactcagttaatcatcatatatataaacaagaagagtgagttccaagtgtagattttatattatacttatttttggtcaaaccaaagtgtagatttttttttttgaagttggggacaaagagacggat

SEQ ID NO: 31805 - DNA, 559 bp, Arabidopsis thaliana columbia
ttaatttcattatcaggctgcttctcttttgcagatgtaaactcaatctcattatctggctgcttctccttttcagatgtaaactcaagctgtcttgatttgattacagctgttcttttagctcttaaccgatatggtggagacaaattgaaagcatttccatttaacccgagttcttcatcatcactgcaattatcagttgtctccagcaacaaactttttctcatatctttactttcttcttttcgatcaacttccttaactacaccattaacaacaacaacagcatctgttttcgctgccaaaacaacctttcgccttttcctaaaaatagaaggtgtgtttggaaaagtcctagcagcttctctcaagaaagattcaggacttctcgttgcagttaaaccactgtctttattacagggtgtagtcattaagctgactggtgatgcagcaccgggactgcaaccacattcatatccgtacatatgttgcagatccgcttctgatggaaagtaatagtcaagtgtgagacttatagtataattcccatgctttggag

SEQ ID NO: 31806 - DNA, 496 bp, Arabidopsis thaliana columbia
tgatgctcagcattttccgcttcccttcaccgaacttgagacctcttgacgcaaaaaaaagctgcttaggctttgtgtgtgtgtgtgtgtgtgtgtgtgttgtagcttggtaaaaagctaatctttatatgtacatgactgtctccaggtaagctttgattgaagaaggctttagttgttaaatatttaagaactttacatttcgaatcagagatcataaaaattgtaaccttgacagtattccaataactgtctcatattgataaaacatcagacgcaaaagccatagagtgatcagaagtagtacgaagctgccactccattgtttatatttggaaccgtcgttgctagtttgtttgggcctagtcaggagttattttgggcctaactaagagtcagtgaatctgagcttaaagtttggtaagatgtgtaacttgtaatgggccaatcaaattttgaaccaattttagtattttacaaccgacttcgaatagct

SEQ ID NO: 31807 - DNA, 683 bp, Arabidopsis thaliana columbia
aatagttgaaaaagcaatgagtcaaatagttgaagctgaagatgcagctattaatcaagcagttgatgctaactttcaaacacaagctcccacaggaaacgatgatgctgagagtgatgatccttcggaaccagtatctcactcagagactcttaatcctccagaactagagaaaaaagaagttatgaggaaagatgctactgagagatcctgttccgcagattgtcaagataaaaactcaaagatcatagcggaatcctcattacaagaggagatttcagcttctcagacagagaactcaccaacccagcctccttcgcaatctgacacagatcattcccaacagcagaagacgacaccaaatgtcgaagaggagaaatcagcttctcaggcagagaactcaccaacccagcctccttcgcaatccaacacagatcatttcccaacagcataacatgacaccaaatgtcgaagaggctactataccgaaaaatgtcacagaaaatccagaggacgacaaaagctgttaatggttcagacaaaagttacagggggcagctcctctgtcacaacagtcggtattcgactctatttggtctcaagtatatataagtaagtgatgaagctttgatttaccttttggggtaggttgaattctaaactatatctatgaagtcgtgtgt

SEQ ID NO: 31808 - DNA, 572 bp, Arabidopsis thaliana columbia
ccttcctcattttgttacaagaattggaacagattttgagttcctctgaaacttgtgtaaacaacgaaacgttacacaactttttaaacattctctgtaaatggttggcaaattctcaaatcttttctaaaatgacaagtttgtttcattactgaaaattatccccacaggttacaatgaaacacacaaaatatccaaaaagaaagttaaaacacagctctaaaggctatagctgaacctgaatatctgttttatacaaagctttcctaaataacccgcatgcctctgatccagatggaggggtttcatcatagcggagatgtctgattaagtccctgaaatgtgtgtattattggttatttacaggaatgtttcatttctctagcaaatcaggattgaatattcagtgtatggatctttacctctatgcttgaagaagaccggttatttcgatgtctagaccagaatcccttcttcaatgcagagtctttggacgagggtttatccacttggagctgatagaagcaaagtgccatttcaagaatgacttattagacgagctcttgctactg

SEQ ID NO: 31809 - DNA, 574 bp, Arabidopsis thaliana columbia
tgttgaaaaaacatgttgtgaatttggatgaactttccaacatcgctcgtcttcttaatcgtaacgattacattttctaacagttcgtcaaaccttttgtagtgatgggtgtaaaaactcactaaatcaatggggacataggtaaattttgggggaaaatgttggttctttttgacaatccacattgacaaaagttcacacttgatgtcataaaaatgtccgttggaccttagtgcccaacttgacaaaacttcatgattacaaaaatttataacaagtcggatactagcatcataccataacatgtaatacaatttttatacatatatatacgatatgtgtacatgtgtgtgccaaaaaattcgtcgtagttgacaaataattaaatactcgtgtagtaatgtaatgattatcaattatcagtattattatcttctctttctaataattattgcgacgtctaaatatgtgttctctcatgcacatgcatgatgcatattatcatcgcccaaagccacaagctttcgacgtgcttcattgtcactccacactcaagagctctggcatatatata

SEQ ID NO: 31810 - DNA, 468 bp, Arabidopsis thaliana columbia
catctgcttttttaagtttatttggtcgagtggaccttccaacatccgtctcttaggattctcaattattttgttttgtctcacattgtgttacgtgtaaatcttatggaaagaagcaaaggaaaataatagatttcattatttaattgatgtaacaaacaatattacttcttcacaaaaaacagacaatattacagagtctatacattttgtacagaaacaaaacaatacgactatacaagcaaataagtagcatccttttgttgtcttaacgataatacatatacatccatgaaggcaacattaagaactgaggcaacatacagaaagtaaaaacttctactttttttactttatatattgtagaaacattaactatatatgcctctttattaaagtatggatacatagtaatatttaaaacacgatccatgcatgccttgacataatataagcaactagagagtt

SEQ ID NO: 31811 - DNA, 998 bp, Arabidopsis thaliana columbia
  unsure (1)..(998): unsure at all n locations
tatccatataagcccgtaacgagagagtaacctaaaatttcgttagacaaaaagaaaaccctagccgattaatatccttataaatagataggtagtctccttaattttctccttagtcaaaatcttagagagagtccgagaaaccctagccaccgtcgttgccgtaactcgttcgcctgaggataatgatcaattgggtttatgctagagttaaatcgggtcttgaaaagagaaggaagttgcatgcgactcctttatctcctcagcaccctatccaactctaacttcaacccaatcgatcatttttctacagagctagagttttattgagatgctcggatctgatctcttcttctatgaaggtgataaaaggatactatatcaaaattcaataaagacacttgtacaagtcagtcactactcactaggaacaaatattttatttgattaccattagtactagacgtatagtatcactatgtcactatgatatgagttttactgaaatgaatttctataattttcgaaactttttgaaaagacttattttaaggaaatttaacattgattccttaaatttcatggttggccttgaatccatggacaacgaaaatggcagttgcactggttacgacatgtagcctgagtaccattccctttccacttctgcctacatttagattcacaatcttcgatgacacatttccctgtttgtttatgggtaagtagaggcctagaacaccatgtttggttcatttgtcttctttgttgtaaattcccgataactcctgttactagtaaatataaaacaaattatcagttcttgtaatgaaaaaaaaaattttattttgtttagtaaaacatagttgtgctacagatttttctgaatattaataacatatttacagtaacaatttttttcaattgtcattagttttgacgaatacataacattcttactanaaaaattatatacattaaattttaaatgtcatata

SEQ ID NO: 31812 - DNA, 588 bp, Arabidopsis thaliana columbia
gttgaatgttggtttcttgaggatccacccgcttttgaggtttgataggatatcgtctgactgcttgattttgtgtattgagagggattcaacgtattggttaagcccgtaagccatgatgagtcggtccacgaactttgtgtctgtgtttgtgacgtttcgccttctgcattagatggtttaacacaaatctttaaggttaatagaaacaaaagaatatgccaatgtgtgataaagccccacaacaaataatgagacaaactttatcttagaagatgagagatgacatttctagtccatggagctcaaaccaatcaccacctcaaattcttccatttaaaacatacttcaaactagaaaaggcatgtttacacaagcacatgagttcagtgttgtaccttttctcgatgttcgttgaggttttgggatttcactgacgattttttccttctgaggttgttgctttttcttaccaaagaatccaaagaatcctccttcttgttcattctgcttgacttcaggtggttgcttcttcttatcaggggcctgtgcatcattatgattctgctgcttgacttcaggttgtgc

SEQ ID NO: 31813 - DNA, 466 bp, Arabidopsis thaliana columbia
tgcaatcataatcgtgggcaacacgaaaacgagctcgaacgttggaaatattggagaaactcttaaagtccgtgagaggtttacatttgggagatgtgatgattggaaactgaatgtgggacaaaggtttaggatcttcaaaatcgcgattgagttaattggggacgtgaagctcgtataagtattctggataaactcatctttaacagaaaaataataatgaaaaactcttctgttttggatctgtctcacatattggagagatgctcacgttagcaaaaaatcacatgtcgagaagattaatctcaaattagtttcaccacaatgaagttgaggagatgctataaaaatatatcgaaaccgttaagtgaatatggatttatggaaaatggccagatacatcaagatcaaaccatccttctctaagagaccacttaggacctctaaagaatacaagattgataag

SEQ ID NO: 31814 - DNA, 551 bp, Arabidopsis thaliana columbia
tatgccctcagtacatgatactcactataattattgtttgatggatgcagggcaaaaatccttagtgttttgttggctcaagattccatccgcttatgctcttatgttgttcgaccagaaacttacctccttggtctcttggtatattttctttagctattgttctcttttggattgtttgtcttttcagctacgaggccgttcctgtttctttctatattagaatggagtgataattggttttcgtgatgtgcaataggttaagggaatgatggaagattttggtgatgagatggaatcgctgtttgtggacattattcaaaatgtattgggatgtggtggagctcaggtctctgataagaagacgaatatggtatttcccctttttatatgtaccattgtaagaaaatgtcatagtcaaataaggtctgatggttatagttgcacgtaacaattagcagaagaaaaataataaaaaatgtttctcgcagagtaagtttttcttgccttgtactgatagttcttcgatacatatctgctagaatggttgg

SEQ ID NO: 31815 - DNA, 475 bp, Arabidopsis thaliana columbia
tatccgacgattgcaaattaaattccacaaaatataaaatcttggtctcaactctcaagtccttctattacgataatttatagattaatccggattcaggacacagaattttctcagtacatacgcatcttgtaatttagacaatatataccatagtccatagccaaaatgagtataaagtgaaactaggccagtttggaataaatttttggttttacttcagaatttcagtttaagattggtttcatgacaaacctttaaacttaataatgttttaaaataaattaacttctgctcaatcctttttatcgattggtctgattgaatttctgtaaatatgaagaaaaaaaaataccgaatggtgatgagtctgattaaacatccttaaaataaaaatagaaaattagacctgataaaggtggaaaagtacaaccttatatttgttatacaagaacatgtttgggatggcttaact

SEQ ID NO: 31816 - DNA, 279 bp, Arabidopsis thaliana columbia
attgaatgacaaagaaaacgacatctgttcaatttagaggaaattagcatttatcgaaatactattcaaagcataaaaatagtaaataaaaacaaaaaaattatcatagatatgtcatgtaaaggtcctcttctcatgcacgaaacgaatgctaattacattagtatatgcacacgagacttaagtgagtcttaattgctaaatgaatgcctcgtataatgattattactctgcaccagtaaagaacgtgaaggacaaaatggtaactgaatatagtat

SEQ ID NO: 31817 - DNA, 503 bp, Arabidopsis thaliana columbia
gtgttggaatttcattttgttgaataatttgaggggaagcatgatgaagctacataacatatgtatgcaaatggaacaaaatgaagatattatctcgatataagtgagtttgtcgtttttgaattctatagattcttttttaaaggaaggaatgctcatatataagagtgtttatggtgtggaattcacctagatggatgtttagtgttaggcactaaatgaaaaatttgttcttggtggttagtggttaatctttgataacgatcattagtggttctgttatcagattttaacgtttattgtctatattggtctactcgatctacgcagtctgatgtctaaaataatatatcataaatttatatttaaaataggcataatttaaatattggaggatgagatgatacttcacccagtaatattttttaaggagccaatttgacattgataagaaattaaatttgcccagaaaagaagagagaaaattaaatatttaatatggg

SEQ ID NO: 31818 - DNA, 612 bp, Arabidopsis thaliana columbia
gtttcattatttgttctatgttaattgctttacaaatattacactgtgtccttgtacaaatatttaggtctaatgctaaaactaatttttcttttgattcgcaacactcaaaataaaaaactgatcgaaagctaaccttatgttatactctctgagttctgacacaaacaagagaagaaaagagaggaaagtgatttagatgctttgatcgatgatagaatgagaagacaaaagcttgactttatagctaaagatcaacgtctatgccataaagtcaagcataattcacacaatatataagttgaacatgctatcaaaataagcttactacattggtgaaattatgcatgtgtggatatctcaagaaatatgcatgagatgcattactcttcttttacgctttgtgatttaagatattgtatgccaaatctatgtgttgccaacattgatttctataccaattggttgatacaatgactggaatttatcctttgatttgccaacattgatttctataaaagttaaacaaactaaaaataaaaagggaaaaatatttaataaaaaatgtacaatattaaatttccataaaaattttatatggttaatgttttg

SEQ ID NO: 31819 - DNA, 599 bp, Arabidopsis thaliana columbia
attttcaaagctcacaaaattaaaatgtcaccaatcaaacaagtatgtatgtgaactaatccgatcaatgtaaccctttcaaattaaataattattcctacaaatatagatgcggtcgacaaaaaaaactatagccttccttccccttttgtgacaaaagaagaaactttagttggtagacattcttgtcctatcctgtcgttcgaaagattcctcttcatcattcctattatatgagctggagaaggcatatagtagtgtaaccgattcattgtatttgacgccaaaaaaaagaaaggattatctgtcatggaagatgaccaacctatatttcctctatgcatataatttaataatgaaattaggtattaattctttttttttttttaactattataggtactgagtaataatagttacatgttaagtaaagttgagtttataaaattagataaagcaaatcctcgactaatgagtatgtaccgtaatgaactgaattcatactttgacttcgtggacccaagcttcacatgaagcacgtttgaaatattataataacgcatattaaacacggaatgatttaataatttatatagatt

SEQ ID NO: 31820 - DNA, 553 bp, Arabidopsis thaliana columbia
atgattcatcggaacactaagaaataattgaaaaaaaaaaggaacacaagaaagcgtaaagaagagacaaacgtcgtcaaaaaagtcgagcttactgtcgcataagcatcatcaccgccattgaagcaaaaaaccaaacttggaaacagagaatttcacaatgattgaaacagagatatctaacactacccatctgatgatcgagtgagtgtatgtgtccatgagtttatgatttgattttttttgggtgaaactgaaatgttttgtcttcttccttcacgaactctccaccttcacctcacgcgcctacaaaacggtttttagcgattgtaacatagacacgcgcgtaaggtgcatgtgggggttgaaaaggagtgatcttatctgggccgagccataggcccaataattttgaaagatacgacaaaagtacttttcagttttgaaagttcaagacagaagtgagctgagctgttttcacttcaagagtggatattgccgttttaaggtgtcacttcaagagtggattttactacttttgtttttagggttt

SEQ ID NO: 31821 - DNA, 553 bp, Arabidopsis thaliana columbia
tcgactctccataatatgatctccaaatctacttacttctttagctcttaaattcagaccacgtgcgtcaatctcacgtgcatggcttcattaagagttcacgtgcatgccttcgtcaatagtctaagtgctttctgcgggaaaaacggtttatagttatactcctatttttccctgaaaggaaagttccatagctaaatgtccccgaatctggatttagtcggtttgatgcataaacccgagaccaaatcaattattgatagtaactaaaccaaaaaaaaaacgattgcttattgaacccgacccaatatgcgtttaaaccctaaaattcaaaatccccaaagagaacaagacaaaacatgttaattccacccatatatttacgtgaaaatcataaataaactcatggacatacacacgcactcaattcatccgatgggtagtgttagatatctctgtttcaatcattgtgaaattctctgtttccaagcttggttttttgcttcaatggtggtgatgatgcttatgtgacagtaagctcgactttttttta

SEQ ID NO: 31822 - DNA, 556 bp, Arabidopsis thaliana columbia
  unsure (1)..(556): unsure at all n locations
gaccacatcataaatacgccgacgttcaactcctacaatttcagataccaaccaaaattaaaacaaagccaaaatgatattgcgattttcttgtctttttattctagaatcaattggataacgcataatataatttatccaaaacccaatcgaacacaaaattaatgggaagacatgataaataaaattcacctaatttcgcggcggcatcatcgagcccaaatagatcaacatcgggacgattatacagtgtcaagaaactgaaagtaacataaatagagtaagtagatattaaattcaacggaaacgtgaatttgaaaaatcaaaatcaggagaatcgtaatagacagagagagagagatacttggcgacaagaacgccgagagatttgtccttgcggctgtaaacctggggagcgagacgnngagaatccataacctgggtggggtgggtggagacaacaaaagatattttctcggtgacctgcgagagaaagagagacaagacttgtgtatggatctgagctttgttgtgactcggaaacttttataattat

SEQ ID NO: 31823 - DNA, 609 bp, Arabidopsis thaliana columbia
cgccattttatagattaaggtgttctctctgacttcggaggagaaagaaagaaaaaaaatattcttgtttcaaacttcaatggcgttctcgagttccatcttctctgttactcagttttcttcttcgttagcttcgcgtccttcttctgcaatcagtaggcagactcgttttcccgctcaaattgcttctccagatctatcgcctgctttgttcgatgatcgccggaagttcgtcggaggtgtaatgtctctcttgacgaagaggttaggctctttcctatttcttatgcgtcgtgtctcgctcttagatctttcctttactagaattgatggagatttatagtcttcttgctccttctgctaaatcgatttgagtaatctttgcttcgtcttttatgttcagctactattaagcttgattcgactaaaaatctttgctctgtatgtgctcgaacgatccggcaaacggaactattatactagattctcgtttagagtagttgtattggtcgttatgaatcttgaacttaagagatttgagaaagcaaaggtagattaaatgtcgatttcgagattgaagtcttatggttctttagataattagataag

SEQ ID NO: 31824 - DNA, 577 bp, Arabidopsis thaliana columbia
ttgcaatacaattaggaacattgaaaggtttctcatccatagccaatcctactcttacattagcagaccctaaaattaaacccaacagcaatcagattccataaaccctaaagcttaaaacccttaattcgaattgaaatttcgaattgagagagaggaatcacctaagttgatgacaacgagattagctcctcgttcagacaaaatctgagtgggggcaacagttttcaagtaatcctgccacgagagatgagaattggattttggttttgccatgaaaatggtgagtgaacctggaaaaaaagagaaaaagattataccattggaagcacaattccttcgctaagttcttcgctggagcaatttgtagaattagggttttgttgtgatacataaaagcttggatcaaagagatagcaaacctaataatctaaaatagataaagtggatttcagattttgtggactgaagattgattggagcaagaagagagagcgggtaactcaaaggtttgaactgagaaagcccaaataacccgcgcgcggcccgtcgtagccttggaaatttcgtcggaggt

SEQ ID NO: 31825 - DNA, 522 bp, Arabidopsis thaliana columbia
taagattccttaggatctttattgtattgttttgggtacttgccattgaaaccaaagatttgatctttgtctatatattttgtcagaatttattttcagctttgattattgacgttgaagtctcttttagactgatttttttgaactgattttgcttctctcagggatggccatactacttaaatagaggaacgcatatgaatatatcttataacattttacctaaaggttctgcagttcggcttgtgatcactgaaggttagtaaaatattgttgttttgtcatatgctaattgctatgcttgcttgtttgtttatcattgttaatgaggcttggaaagagtttttaaaacatgaacataaagaaaaacctaaaagatcttctttgttgatgtgaacacgtaaccgataaaccctcgggaaaaccgaatatttaaataaacctgtttccctcgttgttttctaacaatcgagacttcatttgtgtatagtatatacttgaataggaacataactttgagtg

SEQ ID NO: 31826 - DNA, 599 bp, Arabidopsis thaliana columbia
ctactattagaaggcagcgcacctcataaagtggcgataccttaaaacagagcaacttggatggcttttgctatttgtggatccacgcacattcgaatcaacgatgtacatactttatacgttttattgttagtgttttttttgttaaatactttataagattatgtcttataatcttttcagattagacactagatttcgttaatcttttgttacaactgcaacgaaaaatcccggtctacctctacatatttataacattgctatatttgtaaatttgattaacattacagaaacaactataacattaacagtcatgtaacactaattgtaaaatacatgtaacatttgcatggaaatgaagagagcataaacttaggtaaataaacacaaaattatgtaggaaaaaagtagctaagaacattaatcatacatgctaaaaataccgtttcattgaaatatatgtgtaattctgcgattagtatagtatttacaatcttgtaattaatgtcacatgctctgcgaattagtaacactacataaaaattacgaaaaacagaaatacagacaaatatatcaaaaggtatatttatttatag

SEQ ID NO: 31827 - DNA, 595 bp, Arabidopsis thaliana columbia
tatctgatgatgaggtttacgtgacatctgtatggcaacttttcttgactctttcgccatttctattgatgcctgatacatggattttggttttcattgaaccgaatagcttaccaagaccggctaagtatctgaccggacctatgctctgttctaaacgaaagtaatcagttatttctagcgcctaaaaaactgtacacaaaccttcaaaatcagtaatacatagccattgcatgaaaattagaactaatgctagagaacacactaagatattagtagcgaccaaaacaatttctaagtaacacgcctattcaacaacaaatcaaagccaaatcgtaagtaaagatgttgatgtcaatttaataaaatatagcaaatgagtagaaacatgcttgatttgaaaaggaagagagttccaaggctttttgtcctcatctaactgtttaactgtatcatagattcattctcatatgcgtaacagtgttttttcccacttataaatatgaccctcgctttaccattttatatcactcataattaacaaatctacctagaacaaatcgttcaatataaagatgtgtagctacattgaaat

SEQ ID NO: 31828 - DNA, 135 bp, Arabidopsis thaliana columbia
ggttgtcttagctctaagtatatagagtgtcctttttgtagtaggccagagattcgcgctccagggcgttccagagggcgcggtgcagaagcgcagaaccccgcgtctgacaactctggccctgacagaccagca

SEQ ID NO: 31829 - DNA, 827 bp, Arabidopsis thaliana columbia
taatcatgtaatcataattttatagcaaaaagatttggttgtattgtcctttttatgatatccattcgataaggtttctttttacatgttgataatactttctatcattagtttttcaaaaaaaaatataacgtgtctctgtagctcacgtttttgttacttatttctatcattagttttttggaaaaaaaacttatgtgtctttataccttgagctttttgttacttatttgatatttccatcattcattgttcaaaaaaaaatattacgtgtgtctatagaacgcgctttttatttatacttaaaaaggattttatgatatgagtcacacatttattcatatgaacacgagattgatatatttcctcagaataaagattttagcaagtaaagcaatgaagcggaaaagtttctcattaacatgacgtatcaaattcatcgttattgatcagcggtttaaacttcaatggttaatatgcattaaaaatgtttagactttcaaccctttattagtgtacatgtaggactttcgtataaaatttaaccgttttatgtaaatgctttatctttctaaataatatatcgtgttcccgaagtttagataggatatttggctcttattgctcgaaagatgaactcacagagttagaatggtaagatctgttattgagccgttctagggtttcaccgtaagagcaatataagttgtcttgcatcaccctttatggtggaaacattttgcctatgatctttcaataagtcatgttgtcgaaacatggaaaacccgttcctcatgctaaattttatgtttgtgtaaacgttgatg

SEQ ID NO: 31830 - DNA, 511 bp, Arabidopsis thaliana columbia
ttccactcagtgtctgtccagattctcaaatgtgtcttcgtttcccgcgctctctacctttcgccggagaaagatcccgttgactccggcgtgttcttcgatagtcgacggagatgaagaaattgaagcaagaggtgatgatgagaatgagattagagagacattgatgttatcagtctctcctttgcctctcctcctcgttgcttctctccctggaggtaatttatacttctcagctccaatctttcaaacaaaaattgaatctttaagtaaccattagtgagaaacatcaattagttatttcattaactatgtcaatgatctgtggctttgtgacacttgttgaagtcaaaatatttctctgcctgtaaatgaattggatcaagtctgttgtgacaagaaccctgttttgtaagtttacatgagtatgctaattcatgtctctattggcagccgaaactgtaagatctgtgtttggacccgttgtggagattgtaaaatccttgaatcg

SEQ ID NO: 31831 - DNA, 432 bp, Arabidopsis thaliana columbia
cgtctctacttttatctttaatacgaaaagaaaaaagtgtatctcttatatgaaaagtttttctttctaacattaaagtaagatactaatttgtttttaaagtcgatatatgtttggttgtgattcataaaatattaacatgccattggagtgggttatttggtagagtcaagagtgttcaaatgcgtgagaggaagcatgtgagaggatcatgtgaacccaaaatgtctgagatctgtttttattgaggatgcaactttcttgctttgtgccaaaaacaacccataacatgatattttgttctcccattaaaatatttgaaaaaagtgtcttttatttcaatttcttttgttatcgagtctacctaaccacatatttcatgtagaatatgaagatctagatgaatattatataatatcatatcatgttatt

SEQ ID NO: 31832 - DNA, 536 bp, Arabidopsis thaliana columbia
cagcaattgtagatctttgagtaataatatagctgttgaaacaactggtcgtcgtatagcagtatctcaatgtgatgttggcgactccaacggcacgtcctgcaaaactggagctgctctcgtgaacttccacgcttactcaaaaactgaggatgtgagcaactgtgatctggtttttgagttatcattgaccattcttgggattggatttcatttatttttctacttcgtccaatcttcttcatgataactatatgttttacttgttgcagcgaaaaataaaaattgaaattgaaaatgaacacatagctttagactcctgttctcacgatgatgagtctgtgaaggtggaacttacttgcctatactatttacagcttcctgacgatgagaaatctaagggaaggtgcttttgttttcttagcaaaactttaggatgatcccagttcggatcagtctctataatgcatgatcccagttcggatcagtcctataattctcatctcacgcttaataacatttcttttgctttttga

SEQ ID NO: 31833 - DNA, 647 bp, Arabidopsis thaliana columbia
gttgttgcacacattagaaaaactaaattctataggattcaattgttctaaaattctaattatatatgtgaaaagatgaaaagctgtcagattatatttcccttactgtatgtgttactattaaaaacactccagattattttttttaaaagctttggaaatactgttttatttttttcatttttgggtaatttttaaaagctaattttaagattggttgcttcaattgtgcaagatcgatccaataacagttaaaaaggccccaccagcgattccttttccgtgtcatattttagaacttacatgtatattgggctgatccatgggcccatctgtcaccctcatacaaactatatataaattataacacacacacagtctcatatatatataacaagttgtcaatgaataaattgacaatacaatttgagattatgtcttactttaattaattattttatggtgcgtctatattgtatcatgatgttaatgtttggatatatatacaaacaagtaattttcacatcaattgcactcttcttttaatttgtttggtaccatgaaaataagacatctatttatttactatgaatggataattaggaggtaggtgagcactgagagtcagagcagttgtgatgggaaga

SEQ ID NO: 31834 - DNA, 537 bp, Arabidopsis thaliana columbia
agatttacagtggacaattaaagaaaaaaaatcacgaaattatcatggtttggctaattgagataaaattcatacgttttccatcaataatcgtacatcatccatttcacaacaataattattcctaaaatgtcgttattttcataacattggttagatgttctaataagctactattatatataacttcacgtcaatgtatgtttgattttggcatctaaaatttctgtaaaatttagatattcgcgtatactttttttgggattttcttcttagccgtattataactgcaactcatatcacatacgtggatgataaaatattcgagtttaatatctcctccgtatgtagatttgatatgatccataatattaaagatgaaaatgaacttgactgattattcagcgcattcattttattttcccttcgaggatagcgaaatccgccacgtggcattactacatccattgctttttttaacataaatacttaagtcgcaattcttctaaattttggaggcttatgatattggtaggg

SEQ ID NO: 31835 - DNA, 609 bp, Arabidopsis thaliana columbia
tttgttgacgctggactcaactacatgatctctggtttattagaaaaaccaaatgagatgcaatttagtttgggattaaaacaatgaagagaaacgtgtgctgggccataagtacactgcatgtatatcaaagtttgatcaagtgtcaaataaaatgatacaaacaagacacatacataaaaattggaatttaattgcgacgtcctggttaagtgcaccttgtggaatgtgtcagtttttgattgggtctcagccttcctttggggtcgactcacctcttcctcctttctctatcttgtaccaataatctcttcagaaactaatgcatgtataggaaacggggatatatatcaaaatagttgctcgtatatgatttgtcgtccacacaaaatgcgtctcatttattacaacatataaatgaaagaaacgcgtctaatacatgagagtatgattatagctaaaacaaactaagcttgtaatagtaattcttatataaaccatccctcgccatagaattttgaacctcgaatcactaattatccagccatttctgagctgtatttcaaaattgtggggtttatatattattaagatatatccaaattataa

SEQ ID NO: 31836 - DNA, 540 bp, Arabidopsis thaliana columbia
tcagactttggatccaatatcataatcaaggaagagtgtgtgaaaaaatgtttttccttcattagagtgaagtaaagaatctggtaacgaaaaaaatgtctgtgtatacaagatcaccgaaaatgtaaagaatctggtaatggaaaatatctaaaacattaaaccagaaatgtagcacttgattaaaaaccaattacaacaaccgaaataaaccgataataaacgccagctggccggtcttggaaatggataaacaaccgaaataaaccgatgtatgccaccaagcataattgcaacggtataatgcttcaaacaaataaatcaaactaaaaaggtatcacaacaacttttgattatgatcccactaataatagtattgttgtaaatctaaaatttcaaaggttttcaaaaagggatcatcttcataagataccggtttaatttgatttggttgcgatgaataaatccggttaagacaccagtcacgctcctttcgcttccattattaggaacaagaaatccaacggtcatcgtagagcg

SEQ ID NO: 31837 - DNA, 460 bp, Arabidopsis thaliana columbia
ttcaaagatatcttcgtttcataaaacaagaaaaaaacaaaaaaaaacaaattttcaaaaagaaaaaaatctatttgaggagaaaaatagctgtgagagagaaagctaaagaggcgacgtaccacccacctaaccacaaccagatccccaaaagacagagaactttctcgatacgaacgccaaagagaagaagacgaagacgaagatgatgggtgtgttgaagtcggcgattggggatatgttgatgaccttctcttgggttgtcctctccgctacctttggaattcagacggcggcgattatctccgccggtgattttcaggcaatcacttgggctccgttggtgattttgacgtcgttgattttcgtctacgtctcgatcttcaccgttatcttcggtagcgctacttcaatcctaccggaagcgctgccttttatgtcgccggtgtcccggagatac

SEQ ID NO: 31838 - DNA, 391 bp, Arabidopsis thaliana columbia
tttttcccttacatttggtaacccgataataaatttatcaagtcccgaataatacttgcattctaattttgttaaataaatagtatacgtttaattggtttataggaacttaataataagaaatgataagattctttgaacttaataagaatccccaataggactcttttagttttaactgtggctctttggacgaatcgagatgcattgatgttttatcttggctatgctaaaacttaaaaccattgactaagacttgttgtaatccagtactgcgtcacaaatcaaactaatatatcaagtaaatgccattttgaaattcatggaaattaattatattataaagttctgatgcaataaactccaagcatgcatagactacggacgactt

SEQ ID NO: 31839 - DNA, 600 bp, Arabidopsis thaliana
tgtctatataataaggaaagtgcattcaacaagagacaaaacatttatggatacgaaagaacgacctcaagtgtaggggttcaaggacgctgtgtgaagacagcaggccagtgcgtgttatagagaataagtcaagacggctgttggaaaacagcatgaaggagaactcaccaaatccaattgtctaataaaactcgaacataccatgacatgtccatgctcaacaaccaaacctagaagagctaataccataatagcagatataaagatctatcctaaaaggcgccacagagtagatatagcatcatagcttagtaatagcttctttctcttcagggtccagtttcacaccctgcagaaacgcaaacgaatatataccttatatcaaaatacttcaaatgttattcacatctacatagacaatgctgaagttgagtcatgcagattgagaaagtaaacctaaatccaagaagagaaaagaacttttacccattggcatatggcgaacgtcgaccatagggcgagtctctgcggcgaggagaatccggcgtgaccacgataaggaggggactgctgtagtcatccacggcgaggtggagt

SEQ ID NO: 31840 - DNA, 510 bp, Arabidopsis thaliana columbia
gaccaaagtgaacgacatacatattgttttatggtgttttcccaaatatgacatttccaccttattcatgtgtacgtacgagtaataaaaatgacagcatttgaatgtgctcaataattgtggtgttagtttagggttgggaattgggatcgtcataaaattttacggtctaatatgacagcaatacaaaactttgtacaatcaataatttttgttatatcgctaaagtttgactatttttttatatcctttcgttttatcgtaatttttcttaatatcagagttgatgatatatatagaatttatatcgcggtcgtaccatgtcacccaatcatatttataacaaggagaatatatattctactattgtctttaaagtctcaagaaatgaatacatcaaacttaagtttattttcagaataaagtaatgatatgatatcttaaaccgatcatagtaaagtacacactgtcggctccaatgtaaaatgatttgacgaaaaggaccttttt

SEQ ID NO: 31841 - DNA, 560 bp, Arabidopsis thaliana columbia
tcattctgcattcaaattcaaatgagcggataagggtttcacatatttcgaccaaaatagatcaattagtgaaactactcaccatattgagaacatcttcatccatgaacggatgttctgcatcatcaccatcatgctccccaaaatcatggaagtcgccattattggcttcatcatggttatccttgtcattgtcattgtaattgccgttagcaccacaaggttggtttcctccattcacaagcatctctcgaagctgacatccaaactatcagtttttttggtttgttgcatttcaatattctataaaaggtatagagaaacacagaccttctcgtaataagggatgtcttgtgatgcttgctcgtctttactagcacaaccgtgcattttccaaatttcaataagctctgaactgatgggaccgtttggtctagcgagagggaacatggaagtcatatggtccttggtaatgctccatccaatcttttttaaaatttttactgctcatggaataaagtagaacatgaactagaagtaagatgcaaatcgaaagatat

SEQ ID NO: 31842 - DNA, 431 bp, Arabidopsis thaliana columbia
tatctacgtaataaacaaatacaaatcattaaaaatcacttagttttgagatcacttagaccacctccaatgtaataaaaataaatgaaaacaagatattaggctaaggattgatcctaagcttagagttttaacatttgttaaagactttagttgtgttgctttgtgactgggctgagaaaaaactatataaaaaaaggattatgcattgttttaataatgcttaaatctagtcgttatttaagttttttgatttgtatattttctttttgcttttatatcatgatgtatgtatacaatttcaatatttgtagtaattattaagtatcaaaacccgacttttgtacttagcatgaacgattgaaatatgatttgattgagtatcagagtatatatatggcaaaattttggtccgaatcaagcttaaatat

SEQ ID NO: 31843 - DNA, 524 bp, Arabidopsis thaliana columbia
gtgaaaaaatgaattatacaagtgaaaataatttacagctgccaaaagtgtattctagcagttatttcagttttctttttaaataattattacaatcttgaaatttaattagtttttttttttgtagtcatggaatcttattatatagtacataattttctagccagtcttaaattaatttcaaaatgttgtttagttaatgattaaaatacttttttatttggaaagtaccaatttttcttcttcttcttctttgtcctaaatcgtactccaccgccaaactatacttttctttcttttgctttttttcttctcttcatttttttcgtttggatttctcaactaacttagttagggatatctccggtcatggatctcaggcggagacagtggttcttgtcggctattttgctgtcggcggcgttgctgattgacccgcaattctcgacggcggcgacggcttcggagaatttggtatttgaagttcgaagcaagttcgccggaaaaagagtaaaagatcttgg

SEQ ID NO: 31844 - DNA, 168 bp, Arabidopsis thaliana columbia
cctttcccgcttccagctggcgtgtcctggtcgccgaccgggagttcatctgtgcctagtggtaccgctttttgcggacaaagcggcatcaagcgggcggtgcgcgtgaagaataatacccggctcgacggtctacgagcatccgaatggttcgacgatattgtgccg

SEQ ID NO: 31845 - DNA, 536 bp, Arabidopsis thaliana columbia
tgaaatgctgtaagtttaacagataagcttaagaggattaccaaatatatcgaaatacacaagcagattgggacaaagaaggaaactaaacctggcaattgaagacaaaagcagtgtctttggaagcagaagcaatattagatgtcaatgtgtcaaagtctgagcttttgggggctttaccatcagttataggtacacgtgcatacttaataggaaaaccatcagcctctaaacatttgtaaacctcgaggggtgtttgaacagaatcagcatctacattttcccataagtcaaaaatctgtccatctttggtttcatgaatgaccattatcgcaccgtcatatcgcttagcttctctcagaatatcctcttttagacgagcctccatcccttcaactctatctcgatcaattccctacatagaggtatttatgtaagctttcagaccaatccataagagttgaagagaaactgagggtaacactcaaaggtattgcatctcaatagtatttgaaatatgttttaaacatagatta

SEQ ID NO: 31846 - DNA, 509 bp, Arabidopsis thaliana columbia
aaggcaatcaagcggaagtatctctccaagtattcagcgccacgtttcaaggcagcactccttactcgtggctcaacatgttgttggttgaaaaccttcctgtactgcagaacagcttcacgaatattttgcaatgcagaacatctatcaatcacagcatctaacgcctcacgtgattcaactccattatcgaataacctagtgattttccacagcaaaaggatgtcatccattccaaatgcacgaccttgttcctcctcagttcttcgtcctgaattacgaggtcttgcttcagcattattacttccagtttcttcaccaccacttgaggaatcttcatccacaatttcatgggtcagaacgtcataaagaaccttgataggtctcccataattaatgcggacttcactagacaggcaatgacagttccagtggttgttctactctccccatctgtaaatgtcgatatgaaaaatgaaatgctgtaagtttaacagataagcttaaga

SEQ ID NO: 31847 - DNA, 562 bp, Arabidopsis thaliana columbia
caaatagtaaattcaaatattaaatagagaaataaaaacattaaatcaattagccagtattaaaaccctaaatattttttccataaaaagcattcataacattcgtactctcgtaactcaagttaaacaactctcaaatatctcaccggagaatccttaagtactttttttattgagtagtctctagccctttttttgtttgtctcattgcaaattttagaatcaattttgattcttcagtttgatctagtttttcaaacaattgaaaacaggatttccttttttcaagattctttatccttactttgaatctttaggtttagacatgacttcggtgatattgaatcgttttattaaaaaagggcagcaacaagccccttattttgtttatgatttctgttctttctatacaaagaatcatacaaacgcttgattcacgcatgatagacttttgattcaaagaattttacaattttaagaaaatttccttttccattgtaaaattgcttgaaaggacttttttcaatataaaaagacttacgaagttgttccaacttattaa

SEQ ID NO: 31848 - DNA, 512 bp, Arabidopsis thaliana columbia
gctagtgatgaatgcgatattgaagccattttttgcgttgagttcttcaattacttgaatggatccactccaaacagatctttattctataacactgacagaaaccaaaaccaacacaaattagatcaaaagcaatcgtcgatcactgaatccacgagagattaaataaaattgaagaagaacacaaattggtcagatttgttccactgcccatttcgtgtctcagaaataaaacaagcaaatctctgaaacccatcaacaacaaaacaaaacccagctcaaagaattaaactttacctcaaatcacaaagacaaattcgaagatccaagacgaagaagaagagcagagtcagaaggaaatgaaggaggaaggaagagaaagcatcgaagagatcgtcgttttttgaaattgagagaagaaggaacaagtgttatgcgagtgagtgagcgtgagagagcgcgtggattttgtgtggaagtgtttcgatatttcttatgcagattgggaaaca

SEQ ID NO: 31849 - DNA, 595 bp, Arabidopsis thaliana columbia
cttttgtggtttgacatgcatgaatccgtaaaagtaaatagaaatacatagacacggcttctggtggttagtgaatggaggagaaagtatgatgatggtgacagaaaaacagcaaaagttatatccaaatttggataaagaatctctcaagcgcgtggggtaggtgggagaagaagaagaagaagcaaaggaaaaagcagagcagagagactcatctctcggctataaaaacagagcagggggtcacaacacagaatcactacaacagaaatacacagagcaagatattcaaaaacttataaattctttcaaaacaaaaatggggatcgtagcattcgaatgggcagagggaaaaaccaaccaactcacgctgctgatgaaccgagacaattgggaaaacaggcaagtttaacattttcattctacgttccattaggtttgaattttgttcatcagacattgttgttgaatactttttgatgtttactttttctttctatgagtgattgatagggtcataagtggggcatcttggagtcgaaacggtcagattttgagtggtcggtgcaaagctacaacggaacctggtttggta

SEQ ID NO: 31850 - DNA, 529 bp, Arabidopsis thaliana columbia
gctcgtaaaaacataaaaggaaactatattgataccattaacaatgttcttttaatctatctttttaactttttagtggtcgcatgttcttgtttttgttttcgttttttggttttaaagtgttcgcatgttcatgcgtgtcctcatcaacaagctctttgacctaattcgtttctttaatcttttctactttatattattcctcgtagttttctatataatatcttttttatttgattcctcctcaccctcatatctttatgtgttttcagttccttttgattttgtggtacgtaattaaaccgtctattaaaaaaaaacataagattgtaatgatttgtcactaaattaattgtgattggtatagcgactattcatcacagtatgaaaatgatacatacatgttagtgttcgttactaatgccatagtggcaatataaatagccatcaatagtataagctccttgtcactgattagtgattacgatagaaacttgttaacaacaatcaggacaacgataaatatgtt

SEQ ID NO: 31851 - DNA, 562 bp, Arabidopsis thaliana columbia
agagtctgtggttgctagtataacaagttctagtttgatgtttcaaacagaacttgatggattacattatagtcttaacttttttgctgtattctagagatttttcttatgcagtggcactctatgtttgcatctacctagtgatagagttaaaacttgttggttataactagaagcgaaagaattagattgaatagttgaattaaagtgcattttagattagcctatgttcttcagattttactgttgtatctttgatcaatttggagctttccaatatctgagtttgagatatttatccaatggagattttggatgtgaatgtttaatttgaaactcaaatatgcttaaagaagtgaatcacttcggattgattagaggaaaaacacatttcatgtcaatagttttgatctaactgaaacaatgattacttcctaattcaagtagagaaacatatttttctaactcggttacctcgttttagctttgtaacacactaaatatatgcgattataatactctgtttcattcgaataagatggaaatgccatgtttgattgga

SEQ ID NO: 31852 - DNA, 223 bp, Arabidopsis thaliana columbia
ttggtaaaaaaatagatttgtaactcattgctgttttttttttttaagaaacaaatagagaactatataaaaatataagaaaacgttggttttgtccaagagaaaaattgttgggtgttggtgggtggcaatagaagatgccatgaacgtagtgggaacaagtggccttacgcccataacatgtcggaacatcaccaatcaatatctgagttcaaaaatagca

SEQ ID NO: 31853 - DNA, 585 bp, Arabidopsis thaliana columbia
tgaaataacaaaaaaaaaagaaaaagaaacaaaggttaatacgttttgtcacgttacgtcgtttttgccctcgacaagacattatgaacgatcaattcattagccctaattctaaatgacgagtactctaccaaccattaattttgttaacatcatacgatataatgttgacgaatgacgataatatctagaaaaaattgaattctagagggtgacttttaaaatatgtcataccaaagaaatatatcatgtccactaaaacgtcttcactttaatcgatcgtaaaaacatcaagaatccgtttgctctccctctccaacatgagtatcctcatttttttttaacaaaaactttttaatatatactttaaaattagatttcaatattagcaaaaaaccattaatttctatatcgatgaataaaattttgatttggttataagaaaaaacattagcttaaataaaatttgttgaaacataaacgcttgatagagaaaatgtttagaaaaaaaacaaagagagaagaaagaaacggcgacgaggcgcgcgacaagttggatgaggaagtgggaacacgtgtgaatat

SEQ ID NO: 31854 - DNA, 649 bp, Arabidopsis thaliana columbia
  unsure (1)..(649): unsure at all n locations
caagcttattggagcggtgctatgatgctgtcatcgacacgtcagctccacaaatcacgccttcaatatgccaacacatgtctgcggccgcaacctgtgtcctctgtctaggagattttacggcgggcgattcggtttatctaaaccgtcccgaacatttggtgaatcaaaaccgtaccaagcaagactaagttagaccatcattattgatggttgcttagtctagtcttaggttagttcttaagaatatatatataattgattttgaaaattttgatgttaagagtttagttaagagattgaaattttagtaatatgcaattgtggaaacttagcttgaagttcttaagaagaaaaaaaaatatttaaaaaaaaaatattttaattttaaaaaacttaataattattacaacttatatacatacatgacattacaaaacacacaaattttgatagtttaacatagatgattaacaaattgaaaggcttatcattcataaagactaaccaaaatcttgttttcaatgccttatgggcatataactttttaaaaaagaaatggttgatagtttacatagatgatatacanaatcagacaaaatggttacttattgacattctaatcatttgtgagattgaatttgaatga

SEQ ID NO: 31855 - DNA, 633 bp, Arabidopsis thaliana columbia
catatgtccatactctcacttcagtttttacatagatgttttttaagtgtcctttacttgggatgtcttaagtatctcactccttatcaatgatattcggtttgtcatattttcaagtttcaattgcaccgcctcagttacaacgcgctatacaaatattcaagataagaatttgattagaagttctccgagaaagctataaattctatcttctgaaattcaggttatacctaacaccggtgccacacctcgtttctacacactggtaaatgactgaatcggattgaatcccaaccatgagaattcttgtcactataaacccaattatcccgaatacacaggttccagccaatcaccttgggaacgaaattccttatcaaattttgactcgggaaatttgaaagacaatttatgctaaaactcgatcatttcggatatatcggcattgagccaatcacctcagctgcgaaatttattatctactattgacttgggaattttgtaagtcaagcgccactcaaaagaagaaatgtctgaaaatgcttcattatattcattcaaaatatagataaagccatataggcataagtgtttcatcaacagggaaaaaaaaaacagaaacaagaagcaaag

SEQ ID NO: 31856 - DNA, 490 bp, Arabidopsis thaliana columbia
ggtcgactcatcccccagaaaagataactcttcccgaggcccccgccgacgtcaacttgaaattgattggagtgggggatagagaaagatatagacacatctgtaataagagagaccatgtgttgttacttgtttttgttgcagttgagtactgacccataactgcaaagtttgttgtccaaacaaatactattattttctaattaaaatatataataaatttaatacattgatatatatatccccccctatatgtatatatatattttccgttcatgttgaatttaatacagtaaaaggttaattatatgttttccaagtggtacttctttactcttttttttaattggcaataaatcttttcaagtgggagtatattttaaatttttgtttttttttcaaaacacgagtcgacttttttgtttgacaagttggtaaatgttaggaatctcggaattgaagtcatgacatgttctcgttcccagatggg

SEQ ID NO: 31857 - DNA, 480 bp, Arabidopsis thaliana columbia
ccaggaaaaataaaaaagaatttcagttgtttcatagtaatatgatctgtttatatgcatgctaacaataaaaacttgacatgttgtagtatttaaagtcactgaaactacctaacgctttttaaagtcattttcaattttatgttccaacatgcaaaataatacagactttctgttttgcgcatgtttttgaacttgaaacttagtggtagggtctccccaagaaccagttacactgttacaggcatataagcgtataattaattaatatatttagataaacaaaacaaattgaaatcaaaagttcttttcatatatatatataccagacaaggatcgcctatttagagcggtgtaccggaattttcaaatattcgaacgggtctaaacttcaaaatctgaaaaactcgaacccaaacccgaagaggtatccaaacatatttcaaatataagtatatatcagttatatttcatcttata

SEQ ID NO: 31858 - DNA, 360 bp, Arabidopsis thaliana columbia
aacagggacgatttgtgagaaggcccaacgcaaggaatttaagtggtctacgattataagaataagagccgaaagaacttaagcactttgattcgcacttagtttagttcgatcttttaatagcccaggttttaccattgtcataagggaatgggggaagaaattagttgattcgagacagctaagaattataacgaatacaactttatcttgtcttttggtaaaaactacatgttgagacttcagaattcatacatgtacactattaacgccaaggatgtagtggaaaatcgtacattcaactctctgtataattggtttgcatcctctctagaatttgtactttgtcaattccatgca

SEQ ID NO: 31859 - DNA, 496 bp, Arabidopsis thaliana columbia
caatctgtatattttaatgctgaaaagatagctaagaaactatatagattttaatttggtatgttagagttgaatatcttgtttaaaccttgactatacatagatgttcattatcttaagtttaatccaatctgtcatactaagccatgtatatcacaagaaagtctgaaaatgtgctatatgtcatagtaaaattattaagttaatgcttttttgatgtgagaatcagcattatagatttgatggtaaaatgcttccatcagtttctctactcttattaaaaggtagccaaatttagtttaattacttacttttaatatatattttcattatgttgatatgaaaataattttatttttattacctccaaagtgatgtatatgaaaataaataaaattgcaagcaatggaaaacaatagaaaacttaaaggtaaatattttattttaagagttgagataattatgtactataaggttactacataatgacactaat

SEQ ID NO: 31860 - DNA, 578 bp, Arabidopsis thaliana columbia
tacaggatgcctattatctttaaacacttgattttgtttaattcttaattcaatgctcacatgctattacgtagtttctcgttggcgtttaatgtacagatcgtaaccttaattaagcacataatcggagacttgacgttaaataagtttttaattcgactatcaacaatatatatgaccacgtttggtgcgttcgtttcacggtaaattcggaacgcaccaacattattcacaaactcgtgtttgatatctgtactttatacatacactgatgactgaacaaaccattttttcaatgaaagtatgggtaaacgcacttaggcgagcaatttgagaaatgttgactactatcataatgtggttattggaaatttatgaatatgttgagtagtattcaggttttatattgcgcactagtaatgttttggtttctcttatcagtaatttatttttaatgcataaagtgttaaaaatgaacaatcaaattacatttgcccaaaaaaaaaaacaatcaatttattaatttaccgtgatctattagctagtgggtaagttgaagataagaattgaagaataag

SEQ ID NO: 31861 - DNA, 753 bp, Arabidopsis thaliana columbia
tccccaacttccaaactatcattactaaaagaagtcattgcttttctacactaaacaagacttccaactaataattattcacaagtaatataaaataacacaaagcaaaatcctagaagatgaaattggcttttcctaattgggcattgttgttctcaaaaattttaattgaaagacgaagaggataataattaaagaatgagagtagaaaaggaactgactttgatgagaaggatgaggagagcggccgatgccttgaagttctttagcgggcaaagatggcaacaaagcagcttccaaaatcgtcgtcacgcaagccataatattctattgtgataatgttttccaaagcttgactataatcatcttctatatacaatccattgaagcaaaaattattagttagctaaaccttcttttttgtgatattcagcatcgtttacaaatagatgtacaaaagctaaaagtttatgtttttttctctttatgactagacttgaatcattgttttcacaatcatctctacaaatagatggacgactattaattttgtctgcatactacaattctctcggtatatcaagtgaaaaaaccaaatccgcaaatacaagaaataatatatattccccatcctctcctcctttttatcggtgcatagcaccgggtataatactagtatgttaataattgtaaaacaatttaatacacaataaattacattactcaaaaactaaaacaccctaacaaaagaat

SEQ ID NO: 31862 - DNA, 551 bp, Arabidopsis thaliana columbia
cccctactatatggatgtttaacactcttgttgtttcaattgtattgtaagtttagaagttaaaacagagtttttcatggttcttgtttggtttaagaaactgtttgatcttaatctatttcagttttctttttttgtcttggaacagtatttgtccggttccattggtttgtttctttctttcaccacgaccaagtcttgaactttaaaacaatttcagaaaactgttttattatcctcatagtgatcaatcaatattagtaaccttagtagtggacgcacaagacaaacatttccgtactagtctgaaaacaaacgtcctacacgaccatgttttgttattccgcatagcgttcttggccgccttctttctccctcctcctcctcgaaaacaactctgattgtgtctccgggtaactgcttcgccatcacctccatcaccgtcttcttcgttctcttctgttgaaaatgtgtagcttctaaggtacatctgcctacaagatatgctgtcaacaccgtggtgcgatgctggcttccgtcgtggttgattg

SEQ ID NO: 31863 - DNA, 533 bp, Arabidopsis thaliana columbia
gtaatctcaaataatgggttatgtgatcatatcatttggataggaggcttggaagcccatagaccatagtacgtttactatatatgcaccacaaattcgtcagcagctcgaatacaatttcttcatttggtttttggtttatatcagaatatgactttttaaaagtgatcagataaaaccgcgtgactcaaaaatgtctttagatgtacgaattaatgaagactggaatgataacgtgtaaagtgtgttggactgggagcgcataccaataagcaaacatgaatttggctttgaactttccttttatacacacacagaacatgttcttcacattatactacttagattctgatataacttggaccacttcagccggaccaaatcaatctctcaaactataattgatttaacaaaaaacaataatgcaataagaacttattgctgttatacattcgttcttaattactcaaaaaagttctaaaatcaaaaacaaataaaaagtggagattataactaagtaatcagccagattt

SEQ ID NO: 31864 - DNA, 506 bp, Arabidopsis thaliana columbia
gttttcaaacaattttagaaaatgagtaaatgttaaaaaatacattctaaattttctagaagaaagaacaaagaatcgaatatgtattctaaatttcgtagaaatagcattttaaatactatagaacataaatgaattctaaatttaatagaacatgtagagttcatagaatacgatatctatttgtgtgatcaaaagacagcttgagaatgtatttcacaaaaaaaaccggatggcggctagggttctgcgtctagaggcgaacggcgagattttcttagatctatcttcttagaaccctagatttcagtcagagattgaagatttttcgatctgctgtgtcattaagctggtgtggcttctgtttatggatttgttttagtgttgaagttggagtgaacggtatttctctaacgacaatgaatcgtcctcggaagaagaaaaagatgtctcgtatggacgatctgaaagagctagatctgctaggggaaggagatgtggtggaa

SEQ ID NO: 31865 - DNA, 495 bp, Arabidopsis thaliana
agtaacaggaggaggagtgggaagaggaggacgaggctgaaatgggtttggagggaatatcgatggaggaggagtgggaggaggctgaggaggatgaggctgaaatgggtttggagggaagaacgacggaggaggagaagctggagctggaggaggctgatgaaatattggagggaagaacgacggaggagttgtgggaggaagctgaggaggatgaggctgaaatgggtttggagggaatatcgatggaggagcaggaggtggctgaagatgacgaggctgaaatgggtttggagggaatatcgatggaggttcgggaggtggcggaggaggacgaggctgaaacgggtttggagggaatattgagggaggaggagcaggaggtggatgaggaaataatggaggaaatattgatggaggacgagagggaggtggcttaggaaataatggaggaaatatcgatggtggcggaggacgaggctgaaatgggtttgg

SEQ ID NO: 31866 - DNA, 610 bp, Arabidopsis thaliana columbia
ctggagatccaatatcaatagacgcgatcttacatcccgttaatgcatcaaattctgcaaaaaccaataagtttcaatatcaaacagtcacaaactatgaaaccaatcgataagaatttgcggagagtattatacccatgatgtgagagccaacggagacagcgataacggcttgagaaggatgaaacgccgccgtatgaggttgtagtggcttgctcacaccgcgacctacatgacgcagatccagatgctgcaccgttgcccactccataacttctgaaagacaaaatacggctgatcattgtcacaatttcgattcagatcgatcaagagaacgagagaagctgataataagattactgatctgatcttcgaaagaaaataaaatttcaaaaaaaaatggaaaattcgttgatagctttgtagtgttcatttttggttttactgctcttagatccgtgtgagattactagttcatcaatttgcttcaaatccaatgcagagaatacgaaggtacacgaaggtttttgggaaacagagtgagatcgaacgggaagatcagaaaaatcaatagaggaagaagaagacatcgaaccaaaaatgtcaaata

SEQ ID NO: 31867 - DNA, 532 bp, Arabidopsis thaliana columbia
gtttcaggaaaatttctgaagattttctcagaaccacgctccatgtttcgattccctttggattgctcagcaccttaagtgagaaatgggggcttcaccatttaaaccaacagatggagtagacaaaaaacatccacgctgcaccagccaactcattctccccaaatctcttaatacaaagaacaaaaattggcccggagcctcacagaagaaacaaattgaaatcaccctggtcagctcagaagagttacaaagcaagaccatttacagatacagcgaatttaggaggtacattctggttgctagagccctgccaggtcaagcaagagaaaaggttaagaaaaaccagtatcatctccaatgcagcatctacaccgaaaagtttcaaatgaattgaggaaccttatttgctgggtcaatattttcggtatcaactctaatacagatgaaagctctaaaattcaaaatctagcaaactggactttgcgactcactcctttcctctgatgagcaaacaataagttgcaagtaa

SEQ ID NO: 31868 - DNA, 592 bp, Arabidopsis thaliana columbia
taacgtgattacttgactcacaagtctctgtgttttctctacttagaaattcctcgtttgtaattcaagtgctttgttctcgtcgtcttgactgggacactgatgaaaaggatactgagagagccattttctggatatatcaagaatctaagagcatctctatcggcaaaagtggtagagagtatcttaaaaaataaataaattaatattttaatcaaattaatatattttaattagtttaaagtaaatgaaccattagtttaatgacaactctcaataaatgctgagaatcgtctctcctgccagaaacgtttctccacttttctctccttcttccttctctcctactttttctctttttaattattatttaattgatgagtatctcaatcagatattccgatggagatggtctaagtgtgtgtatagattgtcattcagttggcaagctaaaacctcagctgtatgataatgttaacaaaatcactctgttttgcttaatctctaaaccaaaatttcatattgctcatatagtaaaccagatcaacaggttttcgtcaaatctgatgtgattacttcagaagatgttagt

SEQ ID NO: 31869 - DNA, 442 bp, Arabidopsis thaliana columbia
aaattgggtaccacgggtagtttacatgatatatttacataccagcttagtttataagcaaaatatagatataaaatatatatacacaaaaaaaaaaaaagtagttaaacataaacactaaacaaaaaagacagaaatcaagttggatacccacgaatagtatcagaacaatcgggtttccctcgtgcttcaaggagtactcaaaaacccatttaggttttctaaagttgggtttttggtggacgggtttattttgaattcaggtcaggctgggattttttatagagcacaacatctttaagcgctgttaaaataatgaagagtagagattaaaaaaaatcactatgtcagtacaattaatcttatcttatcttatgttagtcacaataaacgactaaaaaaatgaagcgtgagatttggttatataagtttaacgactaaa

SEQ ID NO: 31870 - DNA, 536 bp, Arabidopsis thaliana columbia
gctatttcaatggagctgttctcataaaatcttgattctctcatctctaaccaaagtctcgtttaaaacacaactctaattgaaacaaagcgtgtggctttgcatactatggatttgcataggaacatgtcgcacaaattatgttcactaataatcataccatccatggattcgaacaaatggatgacttaaagaaccaccagcttgaaaaaaacataaataaaagtaggttttgggtaattgtatgtgcttggtgaagatcatatgtattatcggctaattgaaaatcatcaagacttattgcaggcttacggaaccatcacaatcggctgcaccataatagaattaaggttctctaaaccctttcagatcatccacttagatttggccataaacagttgtccattttaccaaaagcacttgttcatcatagtacttacgaaagttaccaaaacacatgaaaaaattatgtctagaaacaacaagatcatgctacgtgtacacccgtcccgccatatagactaagacggcatgtt

SEQ ID NO: 31871 - DNA, 539 bp, Arabidopsis thaliana
actctagaggatccccgacaagtaaggtgtccatcaaagattatatgtttttgaatccagtagactagtacatggacggtatgaacttgttgaaacgaacaattgttcacaatgtcatggatagtatggttatcaacataatttgcgcgacacgttcgtatgcaaatccataatatgcaaagccacacgctctttttcaattagggttgtgtttaaaacgagactttggttagagatgagagaatccagatcttatgagaacaactccattgaagtagcttacaaagcttatgaaatgaattcttgaaagaatccagatcgaatagtttaagaagcttctcccatccgtttgctgaatcgataccaccgatttctggtgagccaccgctatcatcgagaagaggaattgatccaataagtgctggagagatggagagaggaaggcggtaaaaatcatggagagagagagagagagagagagagagagagagagagagagagagagagagagagagagagagagagagagagagagagag

SEQ ID NO: 31872 - DNA, 583 bp, Arabidopsis thaliana columbia
agtgtccctacaaagagccgcaagtaaaacaagaggcacattgccaatgttgcctgaaacaaacaaggcacataaagtgagactagtgtcagagcagaaaagcgagggtagggaaaaaaaggggtctaaccaactccaatttgtatgattgtaaacttgaagtaagggtaaggcggacgaacgatggaagcaacgatgaaaccgattatggagccagagatggtgccaagaacgacgttaacgggaatgaaccacctgaaagatggaaaagaatatgatgatctatataaggactagagagagactaggggggacaaagaaggaaacaaataccactgaagcattttttggagagtgacggcttgtccgagctgggaaaagatcaagcagggaagcaaaagcgagaagaccaactgtgtgaaaaggagagacagtttcattcaaagtttgctttttttggatttatagagaaagtgaaaaagtctagtgtggagaattaattaccccgttcaagagtttgcggccagagggaggcaagatgttacgtacttggaggcgatgagaagcccaagaagccatggtg

SEQ ID NO: 31873 - DNA, 679 bp, Arabidopsis thaliana columbia
atctacagtatatggacactaatcatataagttggaatctacaatcaaacatttttaaaattggatatggatgtggtattgtatggaaaccatcttccaagtaattggacatttggaatactaacatttacttggcatatgaaacaatttaacgtcccttgacatttgtaacaatttcacgtacgaacgattgcaacgactttgttatgtgtcaaacgcttttctaatatggaagttgacacgactttgagaattaatttgtaagaacattaaacaaataatcttccagttttgtagtcttctattgatgtacacttcaaagaatcttctagttcataatcccatgaccggaaacggagtccaattttgccatacaacacggtcgcgatggcaaattggcaacaccgcatggtccgcatgccgatgaaggtgtcggcatcctattgacgatctctatatttaatacactttgatttttttttaaaataagtaaatgaattagttctaaagacatcgggctgtcgtgtgagccaagtaaattaaagtatttcataaattattctattttagttatttacaaacacacgcgtgtgcacatgtatttggcaaattatttgagtcaaacaacatcttcctatcacaattctgaacttctttatactcgtgattaattgcttat

SEQ ID NO: 31874 - DNA, 517 bp, Arabidopsis thaliana columbia
tatacattttctgcagtgatatgattaacaaatcaactagtggtacctttaagtcacttgctttccacacaccatctttttatcaattaggagtaaaaaagggttcccaatgaaaagaaagttctacagagtagatgctaacctggaaagatatcattctatttcttggtaggctaagattttgtccaaaatggctggctccacctcccggaaagatgtgatctgaccaactcgtttagctaattccccagtgactcggtccatgtaaaggagatacaacccatttctttcttccaaggcctttactgctttcctcgcatgtactactgatgctatccactcctcaaacataactgcatagaataaaatacaaccaatctcagcaatttttgtgattctttttgtcgcctatgattgtaattctgtatatagctaaggtaggaaacgactattattctagaaaacgagcttaagaaaagaaaaaatgatgtcaaaaataaagagaaaaaaaaagaaa

SEQ ID NO: 31875 - DNA, 944 bp, Arabidopsis thaliana columbia
aaaaaaaaaaacccaataataaataacagaaaccaaaacaagatgagaaagggaaaattgcataaaagccatatcgttataagtgtaaggtgatttactactctctaccaaaaaaaaagtttaaggtgatttacaagtatgtaattctgttgttgggcaggcgaagatattagggtccgtctcataattgaagacccagtatattttgttgtctcgccgagctcggcccttaaactgataaaaaaacaaaacaaaaaaacacgaaacattttatcagagccaggtttcgatcctgggacctgtgggttatgggcccaccacgcttccgctgcgccactctgattgttttgaatgttttatatccaagttttatataagcgttaaataaaccttgggtcgtttgtttttgttgatgggcttttggtctgtcaccaattgatctctgattagtattcttcgtattttttttatttttgagaaattttcaaaggactgtttctattaagtgactctacattaaaaccgcgtagaaaagttcccaatcataagttgcataacgacagcttttaagataatcgttgaagcgttttttggcagttgaattgactaagtagacaaaactgttatgagtaacgacgacccacttcataatacaacaacaaactcgaagacttatgacttactccactttctttcattctttttttatctccgtcaacgacccccaattgttatttaacacattactttactctcattcagtttcttctgttttttgttttttaactcaacatttttgtgttttggttggtggactactgactagtgggcaagtcttacacacacaatcctatgtacattcttttatcaagtgagcttttattatttctaaaataaaaggcgaaccaatcgaattcgaaggtaaacaagtagtataggatagt

SEQ ID NO: 31876 - DNA, 311 bp, Arabidopsis thaliana columbia
agtagcttcccttggaatgaaacaagagacaaaaactcaaaagttttcgagctaattcataggtccgaaatgatgtcatggatcttagataagagaattccggcattgattacttggactaattattaacaatcagattcaatcagtaaatctctcaattctgcttccaaagtggcagtgatgaccgctcgtatcgctagtccttacgccatgagaggggatgccacattttcacgcattgctgagtggtgagtcgaaagtccagtggtcaaataggtccagccacaattttattttttaaaattataggc

SEQ ID NO: 31877 - DNA, 776 bp, Arabidopsis thaliana columbia
gggtaccgagcgcgctctaattctctttgattgaatttgtatcctagtatctaaccaatatacaatgtttatatgtggagattctagaagatagttgaaacgattttgttgtagtttctattgtgatcatcagttgtattttaggatcactgagatttggtaacttagagaaatcagaaaagattgatgatgtggtttgggttggtacaactatgttattgttcaatgtttgtgttattgatagatttgtagaaacatcaagtagttttgtctgtgtgtgtgtgtaactgatgaatttgatgcgtttttcagggcagctgagtccataaaaccaaaggaaatagaggtaaaggttccgaagaaggacattccaaaagagaaggattagtgtgtttctatgtatacacgaagaagggtctttgtaagagtcggatttatgactttggtttcaacacttaactatttttagctgagagttttggttatatgtttaaagggttttagttctcaatctcacctcttaacatttaagcattcttgcgagtgaaaacataataatataatctctatcttctttcgcagttacatataattttcataaggttttgttctcttaaatcggaattctaattggacatcataatattcagctcttgaactgaaccaaaacaatccaagccgttaaaaggaaaacaaaattgcctcaaaagcccaattaaggcccattctactcatcccttacgatttattaaactcaccggagattccgcaacgtt

SEQ ID NO: 31878 - DNA, 746 bp, Arabidopsis thaliana columbia
catgtacccgcagtaggttgcagattaccaaggaaacgtcgggtgtgaaaagaaaacgtcccatgtcgtcgtctcttgttattctatggtcactatagaaaccatttgttttggcaagttatatcttttcttggttatgttttctccttcaaatccgaggaaaatcgggtttagataattggaccaaagcgatttgattaataaaccggaattgttttcctgttttgacccaatagaaaatttgacattttaatcccagaccatataagcctgtcaaatatagaagcaataaagttattcaaaaatagttattttgctttggaaataaatcgctctcttggtctcaggaagtgagtcgatagattgaggaaaatctggtttagataattggaccaaagggatttgattcattaaccggaatcttaagccttgtcaaattctgttcacatatataagcaataaagttttttttaaagtagtgattgatttggaaataaatcgctctctcggtctcagagattgagattccgatacggcggagaaagcaatttaataaacctagggttcagattatgacggcggcggaatcaatcgccgcatcgattaatcaaattgatgagaagaaacaaaaattgaagaaagctttcgatgatcttcaagctcatcgatctctcctttcaccatcttttaacctctcatggtctgagattgactctcacttttcttctctccagtcttcattgttt

SEQ ID NO: 31879 - DNA, 511 bp, Arabidopsis thaliana columbia
aatgaatctcaattaatatataaaggatatatattggatttggggaaacatcctaaacttttcattggtgaagaaacttaaaaaaaaaaatcactacattaagaaaaagaaataaaaataagaggagtcttgttttgtacatagcataaccaataaagttaccagaaccgatctttattgacactaagataaccggacatgactttcccaccagtattcctcataccatcgatgaggaaacaccaagtggaacccaaagctccaacgaaaaaatcagcttctgacgccattaagaagttaacaagaggatagttcgtgcttgtctctctcccaaggctagcttcatactcagcaatcgacttattaccaacttgtctcgccacttccgtgtaatagaatctccaatgatcataatctttacttttgtccacaacttccttcatctctgtagacaaccagatcttgttaagctccggaaatcgatctttgatccgatcagctaaatgcatgt

SEQ ID NO: 31880 - DNA, 517 bp, Arabidopsis thaliana columbia
gaggactagaggtggaaatgatgctcctggaaattgccaactctttgtgcaacagatgaagaaaaaaggagaggagtcttattatgtacatagtgtggaactcgcaaagttaccagaaccgatctttattgacactgagataaccagacatgactttcccacccgtattcctcataccatcgatgaggaaacaccaagtggaacccaatgctccgacgaagaaatcagcttctgacgccattaagaagttaaccagaggatagtttgtgctcatctctctcccgaggctcgcttcatactcagccatcgacttattaccgacttgtcttgccacttccgtgtaatagaatctccagtgagcataatctttacttctgtccaccacttccttcatctctgtagagagccagatcctgttgagctctggaaaccgatctctgatccgatcagctaaatgcatgtactcttctaaagctgcgactctcatctcgcatgctttgtctccatccgtacgtga

SEQ ID NO: 31881 - DNA, 652 bp, Arabidopsis thaliana columbia
cccctgtcaggtttttgaatcctgaattctccaatatcgtccttgacagcctgttatacatggcagcaacacaaattagatttaaactcatcggtaagcctctatacatagatcaatcccacttcctacaaatattgctattaaaggaactttgagaaaatttcaagaggcaaataccagactgatgaaggagttagtgtgctatgtatctctatcaacagttacaacttaagcaaaagagaggacccgaaaacactgagaatacgacatacctcaccaacaattgttagcggtattccagttggaagaacacgctcaatgcgcttaactccaagcatctgaaacaaaacaatggccgcttaagcaaatagagaagccaacaaacaaagaaccggaaagaaaagtaaaaaccttaagtccttgaagataatcaagtgttcctcgtacaagcgagcgtcctgactcttcaaaaacttcactaccaacagtcaaggcaaaacccgtcgcaccacgagctcccattacatggacacggcttgtcccatcgtcctatcccaaacagttttggaaatggtattaagaatacatccaatcacagttgtttcaacactatgctactagactagacttaccagaaccaaggaacctcttt

SEQ ID NO: 31882 - DNA, 1925 bp, Arabidopsis thaliana columbia
aaaaccaagagaatccagaaagcgttttgcatcgtcgtcatcaggatcatcttcatcttctctcgactgtgttgagtgattttggtgggaagaggaaaacttcacatcaactatataaacgatatttatcgtaattacattaacacccatctaagttggtgaatagaggttagacaaacaggggcaaatacgttacttcgaaccaattggggagagaggggtaaataagtcatttcgtttaaccaagtaaaccgactatagtgggtacaaatattaaaccaacacaaatctaattttttctttttcggttttctttttatatcgtcttcttcggaaattagaaaggagaagaaaatctgaatttctgattgccggcgatggaaggaagagatgacggcggagggaaagttattgggttgatagagaaagcgacgaaatcaactgctcaagaggttgacccgaggcttctcaaggcgatcaaatccattgttcgctattctgattcggaggtccgacttagttcgcaaaccctaatggagctcatgagacataaccactctcaggtttttttcacattatttgaacaatttctgatccgttcaattcattgaaacttgctcttttaaggactagtcaatgttgattgatcaggtttgttggtcaaataacgcggtgataattttctttgacaggttcgatatctgacgcttttcataatcgacgagctattcatgagatcaaagctctttagaactttgataattgagaatcttgatcagcttttgagtttaagtattgggtttagaagcaatctgcctcttcctgcaccacctgctgttgccactacgttgcgttcaaaggctattgagttcttggagaagtggaatttgtcttttgggtttcattacaaggagcttagacttgggtttgattaccttaagaataccctcaagttaaagttccctgatttacaggctaatgctgcacggattcaacgagagagacaggagagggagatgaagacaaaagagattttgcggaacaagtttgattccttgagagttagttttggactcttcaagtatgagattgaggtaacgataaaggaaatcaaggagtgtatggaaattgttcagtggagaggggatgatggtgttccacttgcgatcttagatgaggaagattttgaggagatccgttgttctcatctgaggcaaattcgtcttgattcactgaaacaatcagaaaaggttgaagaaactggtgaaaacagaattgtatttgatgtgttgagggaacagtgcaagcttctagtgacaaagcatctgatctcggttcaagaagggatctctcttctcattagggttgacgtaagtgataacagaacgagagattccatgttgaaggacttgattgatatcaggaataacatattggcagctaaaaagaaatgggaagaagctggttttacaatgtcaagaatgactgatattcacggtaatgaagaaacaaacgaggaagaagaagatatctgggaggaggatgatggcaaggttaaaactgattcagtcaagaacgtggctcatgtgatgagaactcagcagagtgagaattcatctttaccatcatcaggtgaagcaaagaagtctacatcagaagctaggtccaataaagtgtcgaacactaaaaaagttggaagcagtggaaactctcttagagacaagctaatttctgaagcgcctgtgatgaattggggatcacagttgactaattgggaatcaactacggaagttcgagctaattaccggggtttagagatcgagagccactggggcagggtggatcaagatgctataattccagcagataacatagcagaattgaatcttcaggcaaccgtgtatagagaagagagaacagagaca

SEQ ID NO: 31883 - DNA, 1168 bp, Arabidopsis thaliana columbia
tatcgtttgaactttgcttttacaatattttgtactgttgcttttaggtgatgaataattgtgagagaaatatgcaattgcattgcattgcatggattatcttttgtcgttttctgcttcgttgtatgtttcctctggactgtggggtaatatcgcagtaatatagtatattatgggtgttatatatgaatcatgaagtctataatctgttacatgtgtttatttggaattctcgattaataattgatagatattggtactggatatgattttcttttgaatgtgtatctcaactgtcaactttcattattattttttaatttgtctaaactaatttttaattatagtcgatttgaatattttgattttaaataatcgcgatttgaaattaaggaagatatttagaatgttaacaatacttctaaatctaaacgttttttttattcattctaatatgtcgcaaattcaaaattgatttttgtataacctctaatttctaaatatataaatcaaaattgtggataattctccaacttcaaaatatttatcatctctctatatatatcccataaatatgattaaattattgactaaataaattaaactgtaaatcatgtatacttgaatatatttcatatttaattgagaatggaaagataagtcagctcacaaattaccgaccctttcttcgcctaaaattatgaacatgtacgcatgtttttaactaccaaattcacaattcttgagtcaaatcttttgaaagttcaccaattgataacaccacatcgtgtcatcgttcataaactcaaataaataagatcgtgtttcaaccaaaaataaaataaaccgaatataacgtcgattttgtcagaccggttataccgatttggtctaagaacctatgagtattttactaatttaccccttcgtacatcctccacaacggacagaattatcaacccgagagcggagaagaaaagagagagacaaaaagaaagggaagggacaaaaaaataaatggtgactcaggcgacccacaagcccttccatggctgcttcttcttcttcctctcacccagagacacgaattgcagaaatttgaattgtaccaccaattttctacactcacatttatgattttcccgtcttgttggatcctcgagatttt

SEQ ID NO: 31884 - DNA, 551 bp, Arabidopsis thaliana columbia
gtccagacgagtttcttcaacacggtcatcctcgtcagagtaatcgaatacatcaatcggtttccgcttactgcgggattgaactgaccggagagtcatcggcgccagaataatactgagttacagttccgacgggctcgagaaggttcgaagcgtattctgtatcaaagaaacgaaattttgaattctgtctggttaggttgacttttgggaaatgaccacagattttcaaaattcaatagtttgtcaatccggttcgaccggtcagatccgtcaaaccattaattgttcgtctttccggaaattcggataatgatcataaaatcgttttgttttatttgatgttttggagattattttatatatcatatctttctataaattggtatggtatgtgtaattggtatactttacggtggtaattggtatgtgtaattgtgcatttctaagcttagaattgatatgtaaaagtttggttatagacttaacatgtgtacgtattagagttagatggttttgattgttgactaactttaataaaagtccttgaa

SEQ ID NO: 31885 - DNA, 606 bp, Arabidopsis thaliana columbia
atcatctcaaactatattcgaagatggcttttttggatttttgtcctttttatctaggtgttttttttgggtcttttagctcaatatactgagtgttagtgttaacattacgagtttgttttagattgtgctgattttcatcccttatatagttcctttttgtttgaacggatgatatttgtttttggcaagttttctttcccacttgtaagatcggaacaaaccagtcaatgacataacgaaagtcatataaactcgtaagatcggaagtcggaacacaccaattatatatataacgaaagaatgtagtaaacagacagtgacatgaatatatctcacataatcaattcagaaataatatataactttgacccaattggtcctctaggtagactgcagtgacgtacctatgagccacgataagaagccaagccatgttcctctgctgagctctctgaagaatactcaactagctttttccgtagctcaatatgttcatggcgaagttgtgcaagaggcaaataggaggaggctcctggtctccgcacagagctggacatccactccggttgtactagagattcaaccaaacagttgtctatgtga

SEQ ID NO: 31886 - DNA, 669 bp, Arabidopsis thaliana columbia
atctactgcccttttcagattatttctcaaggtatttattgacatagtaaattgttttctttataacttattgtcaaagtgttgaaatatcttacgttttttcagctcatcgaactcacttatatattcgagaggatactccacaatggtcatccatcaatgcaagagttgatcaatttgttttttgtttttggagcaaacaatcaaatttattttcaaattgattttagatatttattttatttttgttaaataatttgatagtataaatattactccctctgttcctttttttttattgtttagaaaaatacacatattaaaaaaacatattaaagttaattttaaatgtattgttttttgtgtgtttacaattttctataactttaaaccaataatattcaaccatctttgttaaagtttacaattcattaataataactaataaatattacattgaaaacctaaaaaatcaatcttttgaaacatatattttttttagaaaatcaaacaaaaatgaacagatggagtattattcagattaatagataatgactatttataattttgaatttaattttcgtaattaatatattattgaaagcaatttaattatatacatttttaattaattagagattcatagggaacaattagtaagaaatattt

SEQ ID NO: 31887 - DNA, 758 bp, Arabidopsis thaliana columbia
agatccccgtgtcgtttgacttatattcttggacagttcctctgactaacagagattagtcacatagcacagctgttttggttggaatctctagttacaaccgaagatagaggtccagctctgtgacggagaccagtgagcctcctcctatttgcctcttgtacaacctcgccatgaacatattgagctatggaaaaagctagttgagtattcttcagagagatcagcagaggaacatggtttggcttcttatcgtgtctagctcataggtatgtcactgcagtctataccaaatcttaagttgtacatgaatatatctcacatgttccaactgtctgtttactacattctttttcgttatacatataattggtgacttccgatcttacgagtttatatgactttcgttatgtcattgactggtttgttccgatcttacgaggattacttatatgaaaaaaggcaagcgggaaagaaaacttgccaaaaacaaacatcatccgttcaaacaaaaaggaactatataaggaatgaaaatcagcacaagaacgttacactaacactcagaatattgagctaaaagaccaaaaaaaaaataactcctagataaaaaggacaaaaatccaaaaagcagtgtctgaaaaaaaaaaatacttgcatggcaaacttcggcaatagaactagaatccacaagaccacacctaaaacaccaagaacaagtgagatgagagaatcaagtcacatagaagagctgtttt

SEQ ID NO: 31888 - DNA, 507 bp, Arabidopsis thaliana columbia
tgtgctatattcaatgatgggtgaatttatgcttagaaactcgtggatgaaaatatgaattttattgatatatacgaatttcaaagaacaatagccgcatggtttgtgtctcttgctataatccaaataaggattttgttttggcaaaaaccttaagaaatttttacaaatacatggtcaagttgcccattcccaatccatatcagttcttcaactttcgagccctaagccatcgtttcattgacttgtaatgtgggtcggacctgattatgttggaaacccaaacttgaaatttttgcaagtgggcttaaagttttgaagttttttagcgatatgggtaagtagggattttatggatcgcatagtggatatctttaaagttagaattggtcgcatgatgcccaatgagtgaattatgtcattatgttaccttgatttctccctggtcgaagagaacttattcgtaggtttatcgaatttgacataatatcatatgttccgagaatg

SEQ ID NO: 31889 - DNA, 641 bp, Arabidopsis thaliana
agtagtcaatatcttccaatatcaaaaaagcacataaatacgaaaattgaaatgagtagcaatacaaggggttccaatgaaaaaccatcgtattgcttccagtttcataattcgtccatcttgctcttcaacttgttcgtgtaacagcttattaactgtagtttttgaggaatgaatccttgataaagtcccccctttccccatataatatagcgtctctttacttaaccgaaaagcctataacattcaccacgagaggttcggatgacttggttaagtcctaccaatggtatgcgtttcttggtcaaatgaaatagtgtttttgaaaggcacaaacgatttgccattgacattttcaatttctgactaattctttatcaatttctttctccagtagtgcaagaaacaagttttctctcatctttacagaattcaaagctctggtgtagttgaagtcatataagacatggatcagaatcagggtattacagtccttccaggtgatgcccttgtggattccatcaaagagaacttggaatctttgtcttctctttcaaccaactggttgtatctataaggcacgtgagaggctgcgcagattgaacccgatgcttattcgcctcgggttgtgtcgattggac

SEQ ID NO: 31890 - DNA, 774 bp, Arabidopsis thaliana columbia
taattaacaagctgaggagattatcggtgtatgctcgaaatttcttagttgaagaaattaagaacaatatatgtgtatgccaaataaataagttatacttggaagtatgtcaatacaattttatcaaaaaaaataaaatggtatgtatatacaatttaaaaacgtggagaagttgtgtctgaatttaaattgtttaaaatatgatagaaacagacgaagacctcgatgttttcgaagtcgtttagtttggattatctgttttttaatgttatctgtagtatatggtatggtcgtgccattttatttaaatcctcttgcatgtgatcattaatgtgttatcttcgtcgtgtatattataacacgtattgactcgataattacggtattagtgtggtgttattaatggagtagataatttatgattacgtgttaaaagtaaaatgtattgggatataaggttacataccttttctttgaacagagaaattcttgcgcctgaaagttaaatataatcatgtactgtatcagttcccgttttttttcggtcattgattttttttttcgggcaacacattagttgtttttatttatgagcaccaaagactaagtagaattttaaaaacatgatgaaatattaattatgacttgaagacatttgaaagtgtgatacatgtttaggagctggtaacacgtttttaatgataatctctcaatttagtatagaataaaatatacatattttgtattattctgacaaatcaaaatagttttgag

SEQ ID NO: 31891 - DNA, 1000 bp, Arabidopsis thaliana columbia
ctacggccaatggtcggcgcggattggctgctccggccaatgtttgaaatggtcaggcagactttggtcaatggttggcacggtctggcggacttcagccaaaggttagcgcgcattggcgtgctccagccaaggtttgttgcggccgggacaacttcatcctgcggtgccagttactcgggcaagtagctgggccggttgtcacaaccttctcttcttttttgggttttctacttctatttttctattttttttatatgtttttttataaaaatctgaaacaaatacttaaaaggtcaaaagcaaaagcaaaataaaattctaagggaaaatgtagctatctagtgggttgcctcccacttagtgcgcttatttaacgtcgttggctcgacgtttgggtcttactaggtgtagtaacacgagtttcttcgccctaggcgagctctcttggatacagattcgtccggaggtttcttcaggttgtctctcttcttcttgaagattgatcttctcgtcctttcaaacgtttctcgcactcgttctttagagatgtagctttccatgaagagtcttttaattggaaatttctcccatgcttcgtcgaaagaggtgtcaagtcggatgactcttaccaagtttcgaaaggtgcatcgcataccattttcgtgagtggtgcagatcatctcttcgatctccaaagcttctatctcttcgatttccaaagcttccatctcttcctctcctgaatctgggtaggattgttcgccctcggaactcggggcgttgtaatcttctccttctgatccggaggtatcctctccttcctcttataagtctccgccaggccatggtactacggctttacaaggaaagatgggctttgggtcttgctcatggccttgtggtttggtttcgtctcgaccctttttggactctcttcatgagttctcttttatgcgtttctcgcagatggtagcacgtaggagtaacgagttgtact

SEQ ID NO: 31892 - DNA, 700 bp, Arabidopsis thaliana columbia
ctgcaaagtcaggtaatagctcgaggatgtttctgccattacttattcactttataatcacatttcgctttcattttttccttttctgtcattctctttatattttctgtctttccactttcattttattttagctttttcttgttccattgctctttttgttttctctagcttttgccttttgagaacacatcaaataatgcatgttaaataagatgttaattgtactcgtgtaaaaacctcttacataaaaaatgccaactttttatatgttttccatgtacaaaatcccatcatcttatttaactttattatataaaattggacacatgaaaaaccaagagtagaatttagttattcagtgtggaggtaaattcacacacgtgaatagtattatctcatcccaacaaaaaaaaatgaatatccaaataaactcaggatttaaattttaaaatgaaagaaaaaaattaattgggaaaatgaagaagggcgtggaatagcaccgacggcgcacgggggagagtgatgaagattgatgagagtcacgtcggtgagtcacgagttacttaaccagactggtgtaaaccacacatatatcgattttgggcttagcttcggcccattttcttgagatagatgactcatgtcttcatatggtcggatatattaggctaaaagtttcataagaaaatgggcgatc

SEQ ID NO: 31893 - DNA, 730 bp, Arabidopsis thaliana columbia
gaattgattactaatttcttgctgacacaagtattaaaattgtgaaagagtctgtgttgtcgatcgttgtttcagtctctaccactagacatttgatgtttctcaaaccccaaattgttaggtcccttttcttttgcttttgtctaaagattttgctgagaatttgggcttcgtatacaatctcaactttacatgcttttcctggctaagctagttagccagtcaatctcttgcttaacttttctctgccacttgcaattgacacttttgtagctaattcctgaagtttcctagaaaaaaagtattcatgaagttaagactataaattttaaaaagaactccatgttggcttgtgttaggagatgaatctgcttccttttgttcttttgatttctttcaaccaaaaaagaaccaacatagcaatctactgtcagatcctttttcttttagattgtatcttgtggatcaaatatggatcggatcagatttagtaatcttgaagcaaacatgaataagtgataagaacatgtggccgtataagaattatctctttgactcatttaattacaccaaccttactagatatgtcttaacaatatacaacaaaaatcttatcttggctcttgcatagagtctgttgaatcttgattcgtttttgtacacttgtgagtgggcaaaagaagatctatgcttgaagacacaagggtaaagatagagctttgaagatgac

SEQ ID NO: 31894 - DNA, 417 bp, Arabidopsis thaliana columbia
acactcaatctcaaaacacaccaacgtacattcctaattaactcatgcaatcaacactatgtcaccccaaaacccaaaccaaacgacgtgaaaaaacatgtaacacacgaaccaaatcacattttactcttgttaacattaacgaatcaactacacctacaaaaatctaatgtaacaagcatgggttaaaaaaaacaatactgcagcgatcattactcttgttttggtcggaactaaaagttgatgtttcatttcatgtattgtattgtctcctttgaaaaccaaagcattgaccaaaagcagtacgtaccggcagaaaaagaaaaaaaaaaaacgggaaacttacttagccggtataccactgccaaaaaaggaccaactaacaatatgttaaaattttattataaagttattgta

SEQ ID NO: 31895 - DNA, 548 bp, Arabidopsis thaliana columbia
tgttatctacttggtttttacttaaacatttattcgtcttattttcctgcagaaatcttttactccagctccattaagcaatgctcagccatcaagaagtattactttttttcctttgaatcctcctcgagaactaaagaacgcggaccaatatcagcaaccaaccatggattatcattcatttaatgtatatgattcacttccatctccattgtatttagtttacattgtccacattttagcttttgactaaccaaaaaacctctgtctccagcgatccgctggcccagcttacaatgctccacccggtcctggttcatatcgatccatccattcacaagttggtccatatataaactccaagattccccaaactgttgctcctccagtccgacctatgactccaacacaccaggtagcggtgcaaccagaacctgtagctccacgaccaactgttcagactgcagatacttccaatgtaccaggtattgacattgtataactattagagcagagaacgcacttttcgtcagcagcactagatgtgg

SEQ ID NO: 31896 - DNA, 1751 bp, Arabidopsis thaliana columbia
ctggcaacaaaaagttcagcgcatctctgtgaaactctttgagagttatgctgagatactggccagccaagggcttcttacaacggcaatgaagtacttgaaagttctggattctggtggcttgtcacctgaactttcaatattacgtgatcgtatttctctatctgcagaacctggtgcgtatgcagttgtgtttttgattaatatttaagagagttttgatgataaatttagcttaacattttatacgcagagactaacactacagcttcaggaaacactcagcctcaaagcaccatgccatataatcaggtatttgagttctgcaaatcgttttatattttacttagaatccatgtagctttcacggataacatacttagtctttactcttctatggcttaggagccaactcaggcgcaaccaaacgttcttgctaacccatatgataatcagtatcagcaaccgtacactgattcttattatgtccctcaagtttcacatccacccatgcagcaaccaaccatgtttatgccacaccaagctcagccagctccgcaggtttctaaagttttggttttgttgcattttcttttcttattcttccttgcaccatcatgcattaatgaccatccttatctagcagttctcagatgtctagatcaggaaagtgtccgtttctttatgtttttgtctaagggattggtcaagcttttgagatatgatgacatctgaaatatgtatgtggtgctcaaatgcatagtctcttcgtttgtgtgatttttttagtcagaatagtagatggattataataggtatgtggttctttgacctaaaacaaaactccccaaaactgaacattttcagcctctaaacccatgtcctagagaaacggataatctagacctttacttttattcactgctgtagaatctatatcctagagaggtcgtgagaaaattttgtcgtgggaaagtgttttgtttgctatgtacaggtttcttgggccaacttgttgactatagtgtgtttatgcagccatcttttactccagctcctacaagcaatgctcagccatccatgagaactacatttgttccttcaactccccctgcactgaagaatgcagatcaatatcagcagccaaccatgagttctcattcattcacggtatgagaaattttgcctccagtgtgtttgatgttacccgcagttttagtttaatgaagctaacttctaaattttcatcagggaccatctaacaatgcataccctgttcccccgggtcctggtcaatatgcaccttctggcccttcacaacttgggcaatatcctaaccctaagatgccccaagttgttgctccagcagctggacccataggatttacgcccatggcaactccaggagttgctccaagatctgtgcaaccagcaagtcctccaacacagcaggcagctgcacaggcagcccctgcgcctgcaactccgccaccaactgttcagactgcagatacttccaacgttccaggtatcgtacgacgtttcattagcaccttatctctgttttgtttctgagtaaagtcatataatgatcacctcttgtaaactgatccagcccaccagaaacctgtgatagcaacgttgacaaggcttttcaatgagacatcggaagcactgggaggcgcacgtgcgaatactactaagaagcgtgagatagaagacactcgagaaaattaggtgctctgtttgtg

SEQ ID NO: 31897 - DNA, 821 bp, Arabidopsis thaliana columbia
atagtatatctactgcgtgcgtgattagttaaataccgtaattaatacgtaacacagaatgacagctatgtaaccgagtacaaatccctgattaaattttctatgtttgcgtgtttgtgtctcggtcataatcaatcagggcctttgccatcattttcaaatttgtgcgtttaaaatgctttaaagcacgtgtaattaactaactaattacaataatgtatatttgatatgtttagtaacgaatcttgtattggagaaataagggcctgggttgtcgccaacaaaagaaggtagagccttagtgaggattagctgtgattaaattatatacttatacatgctatgatagtatttgattaataatgtcagtaatcatgaatattaataaacactccaccacgcaccaccagctcatatgacttggaagattccccgcggacgggttccctcatctgtctcgattgtttcaaagtcatttataaatattaaataatagtacagttatatgagtgtggttaaaataaaataatagacggtccaaaaaacaagcatatgggtaataaattagtgagtttaagcccatttatattattattatccattttaggcccattaacccactaaagctcactgaactctgaaggcatcagtgtagtagcaaattagctcaagatccttttcacttcttcttcttcttccttgtgcgctcgataatggctgcttccgatgattcctctcactatttcaccgagtttaccttgtctgaggttatctatgctttctatcattcgttttcttagattagagattcatgctttgtg

SEQ ID NO: 31898 - DNA, 832 bp, Arabidopsis thaliana columbia
acaactatcaatgcggtttcaggcaaatccgtcatggtccatgatgatgaactagcctgatctggctcttaacgaatctcaattttggtcccaggattgtaaatgtcatgaaattgaatagaatatgcacgacaagttcacttgtattcatcctaaatcctgtcaaatatctcaacatgtgattagggaaaatagctcgtgtggaagtcattcatgcctcaacaacaagtgctttctacatattttatttctcaggtatacaaaatcataaagtgagtgtgttcaacaaatttgtaacctcctagtagtgataaaagggtaaaaacaaataaaaatggttaaggcagaagaaaccgtagaagaaacctagttttcttcagtcaaaagcaggaggaagacctttgttattatactttgtacagtcaaatggtcctacaacttggttgctcttcttgacctgaccatcacaaaagacaaaatggttttgctcgagttagttttcttgaactgattatgacatataattagcttgtgaatgaagcatcagttaatgaagattatacaaaaattaagagttgaattctttccataatgttgttaggtagaaaaacaaccaaattaatcaagttccaatttttcaacttgttgtttccttttatcaacaccaaatggtaatgagagagggagagaaggattataccggagaccatggacctggttcaggagcagatttctcggttggtgaatgttgcacacgtccacttttcagtgttaaaatttcctgcatatttaacagaagagttctgctgaggcattgcagatatacttatat

SEQ ID NO: 31899 - DNA, 742 bp, Arabidopsis thaliana columbia
ccatccgcaatatacatacaattgatgcattcatacatatagatgcgtagacatgtagcatgtaatgtatgttagaagaatatatgatgtgtgtgtttttgtaaaaaagaacaaaatgagtggacaggctgactaagtgacagctgggaacacacaagttggcatgtgggagagtggaagacctttaagtttatattgccttatcactaacaattgcatatttaagacaataaactaattaattggttcattaccaacaccatgaaatcccgtacatgaattcaacatagaaaatgtgtatacatttgttctagaatgcatgcatgacgtctctccctttcgttgatgtgaaaacggcacgcagttggagaacaaaagtaatgaaattccaacctgagttgcatgggctatatcgggcttagacactgcttttgtagatggcttataatgggcttaattctaaatcgggcccacacatattgagaatcttgaggtttttttttttgtttagttgggtctgaaaggaaatcttgagaattaaaaggccttatctcaaaattaagtttaatgaaagacgcataaaaaaacccataataacacaaaactctaaaataatgaattgggaaaataaatattatgtattttttgtccttgctaatatttgtttacaaaacagaggaagacagaccaaatttagaaacaaggatccaagtggaagcatccgagcagcatgcagccatac

SEQ ID NO: 31900 - DNA, 517 bp, Arabidopsis thaliana columbia
tctctcgcaatgaccaaaactctcctacttagacatacaacaacctcctcacacatcatcgtttatatattttaatatcttttttacataaactattgcagctaatttctgttttcaaaatatcaagctatacttttggtttgtttcacaaagctatacactctttggggaaaaactagtgtataatgaattacaattaaatccataaatagcgaattagcgatggacgtcaaaccaagttgtttccagcttactaacttaatcataatcgagtaattaagaacctaaagaaaattgaattttaaagtttccaccattccattttgatacgttgcgtttatataaatataacaaataattcaagaaaaaatggattcccaaataaacacttctttaaaaaaataaaagaaattaacttccaagattttaacttctagaacgttagtaaaaaatagtacatcacaatgttttattcattgctctattaggttacacaaaattttgcttatagctcaca

SEQ ID NO: 31901 - DNA, 712 bp, Arabidopsis thaliana columbia
atttaaattgatattgttgatcggcaaaattggtgatcacttctgccatcacaagattcacaatcaatggatttgacatctggtctttatattacaaatatagaaattaaatgaaacactaggaagaaattactgttaccaaactgtacgtgataaaggaagagatcacaagttaatttcttagtaatgtcttggtattcatgacttttccccaaagtgaaaaggtttgaataaacgtaaagagacaacaataaattaacgtaaatgcttttggttttctccgacaaactttacctatcttctattggtcgtcatttttaccaattggcatcatttgacatgtctcttgtctcctcagtcctcacccgtccccaacttccatcgtggttcgagatgaccggattatgattttggtttcagtaatagaagacaatgccaattcggtggatttgctttatgacattttttggtcccaaactaagtgattttgtgaaggttatacggatatcatcatgcgattaattagcctttaatttgttcgtgtacgtatatcatcatgcgatacatcattttcagaatgatcatacgtatatgcaaccatttgacgtatcttaatttatatagctagcaactcttttttcgtcaaataattgtttagacgtaattttaatttaatgtttatgaccgacatgaaacatacagcttagtatac

SEQ ID NO: 31902 - DNA, 589 bp, Arabidopsis thaliana columbia
ctcttcttaacaaaaataataataataataataatctaaaacactacttaatagatatgagataaatacgaagagagtgataattgaaccatgataatatatctatagatggtagttaaatacttaaatataatcggtatcttcagatgatccaaaaataacatgttcatcatccttatctcatgtgacttgtacacatagtagtagttagtgaaactctactaccaaatgaatattattaatctaatgatacttatgatagtgacaagagtgatgtttaccaagtaaataacaagcaataaattaacattaatggtatgctagagaaaatataacgtgtaccattgttaattaacttaattttaaccaaggacactcctcgcaataggagatttcttcatttgcatgaagaaagagtttactacctggccttctaactctaatgttatcgcatgtttaccatcatttgtacattagaagttacgataactttataagcgtaagtaaatattagccgatgaaagataaatcagatatatattatattaactaatatatattcagtatgcagtcgagtggtgtgatggtg

SEQ ID NO: 31903 - DNA, 569 bp, Arabidopsis thaliana columbia
tcgttatctatctctcaaacatttctctttacatatccaaaatttttcaaaatttttatttctctataacttgatggatcgtgtgaaatctaatatttgttcgcatattcctcttattgggtgtgtcatggacgttctttttctactttttacatcagattcttcgagtgacgcaggcaaagaaattgttgatacaggtaatcttgaagctcagaagaacttcagacaactacagtgtattaagctcggttaattgctctctacgataaaattatttacatagtctctatgtttttggtgtaattctaaatattataaattagtgcaatagcttgaaatatataataacgtgatagttctgcttttgtctcaaaatgctctacaagaactcaaatgattctatgtgatgatcaaaaaagaatcgaagatttgaatactatgtttgctctgcgatagataaattgtgtcaaaatgctctagaatataaaaacctcaaatgaatcatcggaaaaatcgaagagtccatcattatgtttgatcagtagtacactgatcatatacaattttgt

SEQ ID NO: 31904 - DNA, 642 bp, Arabidopsis thaliana columbia
aactcttctaaactctctgacccaagattcttcctctggtaacccaaaacgtcgtcgtataactctcgcttcatcttgatcattttctcgtcgtttgattttttctgcgagaaatcaatcttctcgtactcgcaaacttccgctggagaaaccatcaccggaaaattctccgatttgagaaaagaggcagagtcttggtaatggcttacgacgtgaggggtaacaatgtaactacgcatgttatgggcccatttagtggcccaagtgaagtctggcttggcccttaagtcaatggaaggactcatgtagtagagaagtccggtggcgtagacggcaaatgcgaactgaagacacgtcagtgccgtcacgaacttggccgagttaagtttccggctaggttttgtttcccggcggaatattcgccgaaaatgctttctatataatcgccgcttctcaccggcggtggccgtataaaacccatttttgcagaacccaaacccttggttataataagaagatgaaaagagagaaataagaatgtagaagttggtgcttttttctttctataaactgtttagagcaatgcttatatatagatgaagaagacaacatataagtatatataaagtgagatttgtgggt

SEQ ID NO: 31905 - DNA, 749 bp, Arabidopsis thaliana columbia
ttctttggatttttaaactctattttacttcagttttgtattattcaaggagaatctgtactataatataatatatattgtggatcgattgttgaagaagaaaaggcttgactctcacaataggcttgatcatgtacacaaaggtattatactttatgttctccttctcgattaggctgcataaatcttaaaattctcatataattatacaaatgaatatagtacatgaaaactgattttgtttccactcctagtaacattaatgttagtcaagcttttgccttttgacaaatagaagtttagtgaatgccactaaactttgtcctctctagttcatattgataaaattgaaatataacttttaaaaacaaaccttgttaggaacaatatgattgaagtattgtatttggcaaaaaaaaaaaaaaaatagcatatggaagtgttaaatgcaagggtaacccttttatacgccaatgaacccggcttttcccgttgagtattgtcctaattatatctttttaaatatatataatcatcattagtttctataataataaaacacttttaataagttatacaatctaacggtatcgtgtaacctttttcatacaattcaaccaatgaaattaaacaaactcttgttatttttattcacactttactttattcttaatgaacgtttccccatgtgatatccccttatgtaatgttcttcaccacaaatctcactttatatatacttatatgtt

SEQ ID NO: 31906 - DNA, 728 bp, Arabidopsis thaliana columbia
cttccaaatgacagttgaatattagcaggtgatcggagctgtggggtcatgaaccagaggctggaaattccaaaggacattgatcctgattggatctcactaatagagagctgttggcacaggtacattaacgttctgaacattgcacaatcattgaatataaccttttattgtaatggttctccttgctttaggtgttctacatgtttcacagctgatgctgacattaatttttgtttctattttggtttgtctcacctgcagggatgcaaagctgagacccacattccaagaactgatggagagactaagagacctgcaaagaaagtatacaatacagttccaagcgactcgtgctgcgttatctgacaagtgacaactctcttctcaaggacaactaaaccaaacaaaagttgacccttttcacttatggcttcttgttcctcaacgccgcatcgcttcaagatccaactattgttcacagaaacaaagaaagagagaaagagagagttggtctttttgaacaacaacaattggtggaaacatgctgtgctggtgtgccaatgtcttccaccattgaacaaggttatggcattgaaaatatcatgaaggttggttgactatggttcgaacggagtcttcccaggtactgaaacaaaatcattgaggttggtcatatgtgctcatatttctatgtttttacccaatgttgaaactataactagtga

SEQ ID NO: 31907 - DNA, 774 bp, Arabidopsis thaliana columbia
tgctgataagcaattccagcaacttcagcaggctaaggtaatggctatggagattcctgcgatgttgtatgatacacggaataattgggagatagacttcggtctagaaaggggactctgtgcactgcttataggcaaagttgatgaatgccgtatgtggttgggcttagacagtgaggattcacaatataggaatccagctattgtggagtttgttttggagaattcaaatcgtgatgacaatgatgatctccctggactatgcaaattgttggaaacctggttggcaggggttgtctttcctaggttcagagacaccaaagataaaaaatttaaactcggggactactatgatgatcctatggttttgagttacttggaaagagtggaggtagttcagggttctcctttagctgctgctgcagctatggcaaggattggagccgagcatgtgaaagctagtgctatgcaggcactgcagaaagtttttccttcccgctatacagatagaaactcggctgaacccaaggatgtgcaagagacagtgtttagtgtagatcctgttggtaacaatgtaggccgtgatggtgagcctggtgtctttattgcagaagctgtaagaccctctgaaaactttgaaactaatgattatgcaattcgagctggggtctcagagagtagcgttgatgaaactactgttgaaatgtccgttgctgatatgttaaaggaggcaagtgtgaagatcctagctgctggtgtggcaattggactgat

SEQ ID NO: 31908 - DNA, 733 bp, Arabidopsis thaliana columbia
ccccttatcttactattgggctttaggccaaattattttgtatagatggtcccgcgggaacaagttttaggattttatttatgttttgatctagcaaacataattcgacgaaaactttggaatactagtgaccaaatatttcaagagttgaaaatttgaacgtttagttcattgatacattcagtggcaagtttagctagctaaattaaaattaaacactagtaaacttttctagttttttcttctaaccaaggatgaaaacttcgttgtgaaattagaacgttgtcagcacacttttgaaccaacaataacaaaacgaatatttctttatcacttatggatgtttattgtggacaacagcaaatagaacaaacaataactttttgttctaaagcttcaatatatatatatcaccaaatgaaataaaagaaacacaggatagaatcgggtgattttattaccgaatgattcacaagctagagagtctaatgttgccctaatcagacataattacagaatatttgattgaaataaattgacataatcaactccttgattgtctccttaacaaggaacccggtagtaataaaaatttcttgtgttgtatggtttgtcaattgaattatttattttttcaaatacatgtcgactaattagattaatgaaaatagtacgagtggatggcaatgagatatttaagaagataagatgatctcaatctcatgatagtaat

SEQ ID NO: 31909 - DNA, 484 bp, Arabidopsis thaliana columbia
gcaccattcaaagaattgatggagttttgaacctctcgggaagagctgagtgtcacaaacccagtagatcagatttgatatcgagaaagtttctaaagggacctcatacagtagtaagaaaatgacgaatgtagtgatacaataggctgggatgcttacgaacgatttatgttgtttactctggagatgcttggcggacaattcaaagatttggcaaacaacatcgcataatgtacaagaaaaggcatattcaccccatctaatacacgtctcccgaagcttcctctgttcattaaccgtagacgagaccttcctgaacccgttgcatctgtgtgggaaacaaaaagaagaaggagaaaaacttgttgtgctggtaaattatttcacctgtgagtgagaggacaaaacacaccttctcgtaagtcttctggccagagcaccgtgctggaaattttggaggaaatggacatgcctgaaaagttgt

SEQ ID NO: 31910 - DNA, 658 bp, Arabidopsis thaliana columbia
taaagttcctggcaggaacaagataaaatgcttggactattaccgagccgattcgaagaaacaactgatgttgtgttcttgcttaaggaggcaaaaactctgttgcggtataaagaaagaaaacaaagaataaattataagatccaggttcttctgtatactttgatccatcacataaattatatatatataaaaatataaaaagtcagcagaagcaatggttcaacccgatttttgaagatgctttgtttccttgtattatacaaaatacctacaatttgtaatttactccgtaacttgattcttttttcctttttgttcactcaatttttcgtagaatgcagtagtaatagttagctatatggtcacatactgttgtggccgctattttgtaattgcacttttgaaacaatggatcaaaagtttctccatccatcgctaatctttgatacaccggtgattcggtgaccggtggcttttgacaaagtcttttagacaaggataattcatcgatggctttgtcaactttcgtgtctcatgttaacttcctttttattagacaacaaaatttttgcaatgatttgatttggtcgaactagaccaaatattagtcaaacttaatcctttttacagggatggtacgggatggtaagtttga

SEQ ID NO: 31911 - DNA, 545 bp, Arabidopsis thaliana columbia
tttttttagtactttatgtattgcaattcctaaagtattttgaactttgatcttaagagtcttaaaatcaaacaaaccaagcagttgaaacagaccttggatcaaagttagtgttaccaattaccatccataagctgtcctttcgtttcccaagtagctggaggagtagaaaccaaggtaggacatgatctaatgacttaagataatatgatttttcattgatcgatgagataaaagaacactgatcacaccaaaaaacaaagaaagtgagttttataatgaagcagattaaaatatgagatgataaaggattatatacaagatgctaacacaatgcgagttgtgctatatgatgatactaatatggaagtgtgaagaaaactaacaaatcttctaagacctgttttcatttatactctgaactttaaattccctatttcacagcattgctgatcattatcttcttctccttcatgacaacaaaaaataatctggaagagagaagcaaaatccagtacatgtcctgggacaaaaccgtcttgaga

SEQ ID NO: 31912 - DNA, 724 bp, Arabidopsis thaliana
cgtatctgtaggttaactcatacttccatttgaatttataactttgagtgtgtaggaacaatagaagaaaaaaattcgtgcatttttagaattctaagcaattgttttgtataatatcatttgtacgattgtatatttgacataatctacaacaaaacccgcctggttaacagaacctaagcaatttttgttgggctggttttgcatgattgatcaaaggtgaaagtagaagaatggaaagcttactagcgaaagcaggagtggaagtgccactgggagcaccattgagagagcaaaagacaaccccattgatattgacgagattgagaataccccctacaagaccaccaaccagaccaccgagacccccaacaagacccccaataagaccaccaagaccaccactaccaccaagaccaagctgagcctcagccattggagacaccacaacgagacacaccaagatcaatgagacggtcatgtgtttgttctttaacattgccatgcttgagttaaaagtaaatgcttttttttttttttttggtgtgtgtgtttgtgttgcttttggttttggatgtgataaagtgtcttcccccatgcagctctatttatagaagaagttttattgatcttgcccctcctatttattttgcacttttctatatatttaaagtcgctaataatgcgtttactttattctacaatttgaattgtccctaggttt

SEQ ID NO: 31913 - DNA, 1055 bp, Arabidopsis thaliana columbia
cacacgacaagatccagcgcgtgccaatggggcagctaacaactactttggatgatgaggatgatgattatgttgatggtgattacgactatgatgacttcttccacccgcattgtggacatgctatgaatgatcgtaatcctgaagagcccttcgaccccttcttcgacttgccagatggtaatgtgtccttccaaatctctctaaaactcttgaatcctatatatttcacaactgaaagcactctctgtttatctgtaggtgtgctctttaccccccagatgttgtcttccaagagtcgtcagcaattgtacttgccggattcagatgattcagatgataatgcgacaacacaaaatgctcctgctgcagatgagaattgcccatactttgggaagtatggaaagtacactataatgtacgactccgacggctatgaactcgaggatttcacgaaccctttccatcctgactatcctcacttctgaggtttggtttggaaccaaagttcgtatttttctttcttttttcaaggtccaaacccttttgctatatgctctttactctttaatcgttttttgaggttcatgtttctatgacgtattgttctatataagactgtttgggtaatctttgaatttgaagacacctcgggattaaagttttttttttttccaaaaggtgtctttgtatatataacatctaaacaacagcatcatccatcaatggagaatccatgttggagaggcaagtacaagatacaacaacaacatttacaaacaacgaaatacaagtaaagtacaacacattctgccacaaaagagaaagttgtcaaatggtagcttgttaagagcaacatcataactaatctcaataagaccaaacatcaaaactcaaaaggtttggagttgatcttatagcttccatcatatgcttgtagtatgattgctttgtgctcaccatcttaacatccgaacagggtgatatcttctactctgattataagaaaactaaacagataaaagcataaaactaaaacaatctagactagaagc

SEQ ID NO: 31914 - DNA, 733 bp, Arabidopsis thaliana columbia
tgaggagctgccgctgctgcttctgctgcttgttgcatttgtctgttgtattgtctcactgatgatatgagattcaagaagagaggaacaaatgtcccacaaccaccttccttaaataggatcttgaaactgtgtgttgaatatagagctctatgctcattttctggcaccacctggaaattttgttacatgccaataagtaaatatgtatagtttccttacaaggaaagaaactataaattctccatgaaagtttgtacttacaggctccacttgtccagcaatattgttgcagtgaaatattggctgattaaatttctcggcatggatgtaaagctacagagtaacatataatccataagctaatatgtagcatgtagttccataaccaaatttaacagagctacacttgtgccatgtattaactaaatcagagacaaaaataagataaagttactgtaccaggggcatgtcaaaagcaacaaagttgtcaacaggcttgcttgaaacaaagaccatccgtatattagacaagtaaatcacccccttggccttaacatgacctccatgccctctggatcatacaacaagaaagaacatcagggaagtgtttaaagcccagagctcatatgtctgttcacttctgagacttatcttatttacaagtaaacttaatggttcatatgctagatgagtggatctaaaccgactcacaacggtactaaaatggaga

SEQ ID NO: 31915 - DNA, 1279 bp, Arabidopsis thaliana columbia
aacagacagttctaccagtgcgagaagagagatgtatgcccattaacccccatttttcatttctatctccacacgtataaaacctgcttttgctatctttttcaaggcccgacctgggcgtcatcttgtcaaatggttggacgagtcattggtggacaagattgcagcgctcaagtgctctgtcagggaacaggatgaacacattaagttcgtagttaccgggtctaatggtgaacgcattgatcctccgtacatgtgggatcgcctagacctctaccagcaagaaatcaaatctcttcagcatcaagttggtcttctcgaacgctcccctcgtaccatcatcgaccaagtccattcttgtcccccgcatataattctcgtcctcgtgatccttgtccccattgtcgctttcgtccttggcacttatatgtagcgataatttcattgctagagctctattaaatctttttctttccacagaactattgttttatctttgattattttgtccactaattatgtaaccgtactgtaagatgtggaccatatgagtatgtgtccatttttttcggatttgataagttttttatatatttcgttttatgatttttcaatatttagtctatatatttacttttccatgtccccatttgcctaataatggctaattgtcttgtcacttcatcattcatttagttttcatatttatggtcctcaactaatattctaaattctataaaccgtttaattaaattttgtactttgcagagtttgctttgtcctaatggtgtagcttttatagctttttgtcacatctaatattcattgtccatacctactaattgcatccattttattttctcctttaatcccaactatatatatagttcttctttctgtgtgaaatccaaactaaaccatacttcaaacatcacaatttggtaaactggcaatcgcttcctcaacatcttagggtttcaattgtccttcttgttggaaagttatcttaccaacacttaggtcccctcattgtctctggcaacgctggcttgcgtctagcacttgatccatccgtttcgcgggagacatcctggccctcattgaagcgcattctcaattagtctccagtggttcaccatttacttgttctgttacgatgtgtaaaggctggtaatcgggttgcttgctacttagagagcattaggctggcttcatttgaaaggttaatcaaagaagcaatggacatgatcgcgtatatacccgatcgtccccaaaatac

SEQ ID NO: 31916 - DNA, 668 bp, Arabidopsis thaliana columbia
tgttcgcagcgcatgattttcgacctagaggagcatttggagggatatcagcgagccttgctgctgttaggacgagagatcgtttgcattggccagacgttatcgactcatttgattttgtaagttcattgaaaatcttgttcgttagtccgattgtcttgatacgtttttttatggagactgaattgcagattcgccgtcaagttcagagatgggaaaagctagtcgccagattccgatttacgtcgatacgttcggagaagatagttcggtagagacggatgtcaatgtatccgccgttgtaaccgaacaacaacaggtggtgacaaaggtttcagagagtggtgtgatcgagactaaccgccgggctgctagcgaggataggatgacgcgactttcagatgctcaagctaggaagaaagcttcaggttctgttagtgaggatagggcgaggcagctttagaacgttcgtgccgggaagaaagcttcgggttctgttagtaaagatagagctattttccgtgagccatcgagtgttgacgtttcctcgcggaggctctactcaagatattcgggaggtcgatcactccttttctgtcaattatgatagacacggttatccatttccagacagccgaagttattgcggcgagtttgctagaaaagtt

SEQ ID NO: 31917 - DNA, 704 bp, Arabidopsis thaliana columbia
ttacgagattagtcaactaagtatgtaacatttcgttggtgatgtatttaggaacattcgtttggttaaagaaaagtaaatcctcgaatcatcaaaacgctatatctaatttgtaaagcaaataatttcttaaaagcgagtgtttatctgcatagatatattttagattaattaatatccatcacgattatcgttaggagatatatacagtatgataatgttttaaaataagaatctatgtttggtgccacatagaacgcgcgctttcggttagagatgaactaatataattttacttaactttaattagaatgacttaagatcgctcatgggccatggctgcgccatcttaatcccccactaccaacgacacgccacgtcatatatcacattatttattcattctttaaaaaccggccggttcaggtattatttggccgacaccgttggaattaggaactgaaacaaaattaactagtcataaaaatattgttacgcattgcttaatattctgtcatgtagatatacaatcataattatgaatatccgaatgttttgattgtttgtgtggacatatcgatatatgcaagaacttgtgacaaaatttcaagaaattgtggttactctcactctctcagctttggtagttagctatatacatagtagtattagagatatatttatgtcggggaaaaaatgtttga

SEQ ID NO: 31918 - DNA, 544 bp, Arabidopsis thaliana columbia
caatgaatatagatcaagctgtgacaataatgtatatatgtttgaaactactttaaatacaatttgcatcagctaaagaaatcagaacatcagagtagaagaatattaatgatgaaaaatcaagttgatgtttaaaagtagcttacaaagttacaagttacaacaaccatggaacacatacaaagaagaatcctaaacaaaccctaaaattcacacacataacaataaaagcttctaaaaaaccagcaaaacaaatctatgagataatttggggattggattcaaattttaaacgcctgctattgcgttgaaatcttgataacgagacattgcgcctttgaactcgtgttcttctggtttgtgagagctcaagctatgcggaatgtatgctctgaaaatctcctctaggtctggactctgcttcagctcacggcaagctacctcgagagctgtgtgttcgaacctccgtagaatttctggcggcacacatatccgaagatgagagaggtgataatgagagggacacaagggcggtgtagaagaa

SEQ ID NO: 31919 - DNA, 665 bp, Arabidopsis thaliana columbia
tcaaaaagttgatttggtcgcattaagagtcaaacagaacaaatacacacccatgtgggagtatagataagctctgaatcaccctgtttccctcgaggttttgagattacactggcaatgagggaatatatggcatgaaaaacttcatatgtatcaatccttatcaaatgggatttctttttttttccagtacaatgaagtctcacccattgtagggtaattatttttgggagggtctttacagaaaaacgtccagctcctacatgcttcgtcaacgagaggttgctggtggaattctggtccgagctcccatgggagaacagagaatatagtttcaggagttgttggaattcctacacctgttccacccctttgttcagtgtaggaaggcgatacataaactaatgcataataagtatatgaataagctttataatagatcgaattgttgggaaaaaaacctaacttatttatacaatactgaaatcatggtcgaattaataaaatcttttaatatattatacagtttttaaggaaaatatttcatttagataaagctttgatatcacaaatgacatttttttttctatatcaccaatgacatatacactattgaatgtacaattggcgtggatggtatttgctatttgcatagagtagtgtgt

SEQ ID NO: 31920 - DNA, 692 bp, Arabidopsis thaliana columbia
acaaagaaagacatcagggttgattcttgaaaggaggcatgtcagccaggtgtgtttttattgaaatctcgcgcatgtgacaatgagacaaatataccctttaaaccattttatttatttaatcattttgttttctttctccaatcattcgtattcctctccttgttgctgctgcatctctctcgcatcagccatggcggtttctatgtttatccctccaaaacctcctttcttctaccctctctagaccttcctctctcttgattcctttcttcgtatctctttcagtcgaagccaaaccccttgaatttccccgatttcaaatggcaattgtgacaggagatcgctatgttgagaagctacaaaagttttttagaagacgaagctgagtctcttctagaagaaaccatgattctcaagcttaatcctgctggtcttcactatcttcatctccgtcttgactctctccgtgaactcgaacgcatgctctccaatgctcctgttgattaccttcgcgcctacgtttccgacctcggcgattaccgcgcactcgaacagctccgtcgtattctccgaatcctcacttctcttaaggtcgtttccactcttccttctccggctcgtgatcccacgcctctctctctttttccctttggtagccttaaggttttggaactccgtcgctgtgattt

SEQ ID NO: 31921 - DNA, 586 bp, Arabidopsis thaliana columbia
catttgtatatgttttcacattcaaaaataaaagtataatcctctgtaacaacaagacttgagttatgactttcggaatctgtgtgtttcattatgaaactcatcacacaagttcatgttttcatagacagcctttaacagtggtgaaaaatccgacttttggaaactgttagaatcagactccaatttcaattgagagagaaaagcgttgaagttgggagatacgtataatagttggctaagcccaattcaacgaaaagagagaaaaacagatagagaatgagatagatacctgtaatcactaattagtctgcgtcacgacgcgacagctacccacccggcgttggtccggcggaacgatccaccgtctcaattatggaattagtattattttttggtcaaagaattatataattaatataaatgaaggtttattattattatcactgagacactggtcagtcatcacactatactgtaagtgggaggatcctgtaaagcagaagtgtatcttgaagttgatcctaataaattctgcattggacaaatagtttattttaaaaaaaaattactctatatttctcta

SEQ ID NO: 31922 - DNA, 589 bp, Arabidopsis thaliana columbia
tgctctactgattgatctcaatgaaacctacgataacgggatctcacttgaggacaacaacacatcaagaccaccaaaaccgtgtagtagcaacgcaaggagggaagaacattttcctatgggaagacagcagaactctcatgacttcttcccaataagtcagccttatgtgccttctccgtttgggatctttcctcctacccaagaaaaccgagccagctccatccggttttctggtcacaactgtcagtggcttgggaatttgccaactgtgggtaatcagaacccttctccatcctcatttcgggtattacgtgcttgtgatacttgccagagtgttcctaatcaatacagagaagcttctcatccaatttggccatcttccatgatagcaccacagagtcaatacaagccagtttctttaaatattaatcagtcaacaaatccgggtacgctttcacaggcatctaacaatgaaaatacatggaacctcaactttgttgctgccaacgggaagcaaaaatgtgggcctaatccagaattttcatttggctgcaaacatgctgctggggttagtagtagtagtagt

SEQ ID NO: 31923 - DNA, 569 bp, Arabidopsis thaliana columbia
ggggattcaatgcctgcgagttcatctggggaacctgtcaccgaaaatcctatacactcccaatctcgcctccggttcttgctttacttggagtgttagaattcgcttctttacttgatggctccgagccgcaggaaaggcggtggtaaggctgccgccgtagctgctgcctgccgaaagcggaaggtgggcgaccttgtgcttgccaaagtcaaaggttttcctgcttggcctgccgtggtatgtatttattattctcttttgcgtttgcttctttatggatggcctataagtttctccacatgttaccaatcctatttatctatctagggtttatttatttggacatgtacctgcttctcctaggattgaaaatcatgttaagtcgattctttcttgtccgattgtagactgagttttaagttcttctgcctaatcgatatgaggtttttctcaaaggagctgaaatccattaattcttgttgttagtagagacgggaacacaactagtttagtttgtccttgtttcagccgcatctgatatcccataatatttctcctctctcagc

SEQ ID NO: 31924 - DNA, 768 bp, Arabidopsis thaliana columbia
atcatcgaggtggccacgcaatcagaacgtctaggttatgagttttccaagtggctaggggtgcagattccgcaggtgcttcttttctttcttgtagttttttaaaaatgtagtaatggttttgctcatttcactttctttctagaattttcaagtaatgagtaatcatcatgcgacaggctagagtaattcacagctgtaatcctgagtggacactgatcaaagaagccactgaaaaagcacaagctaaagcgacttcggagggggacgaggttggtgaaatgacatgttcagaacttctggaagcccttgagctcagccgttgtcttctcttaatgaggtgaaagcacaagattcatctttattctttatcacttttctccattttttacttggaccagcagcataatgttgacagtttttttgttcctttgcattagtgtttaactagatgatagtaaaccatttgaaatatgaatataccatttgataatatattttaagaaaaataaaagatgttatgttattagatataaaaattgtattataaaataagaaagatctaaattacaaatatgaggtggaattattttattggataaaatttgataacaacagttaaacagaaatctaatcttgctttaaatgataataaatatgagagaaatagctgaacagaaatctagtcttacctaataggattatgtaaaatctagtcttacctaataggatcatgtaggcactttcaaatttacaatttttaatgtg

SEQ ID NO: 31925 - DNA, 553 bp, Arabidopsis thaliana columbia
caaatttaatttgactataattagcttacattatttgaatttaatttattttaacttcatttaataaaaaaattaataattaaactagaactcaaacccctcgtgatatcgcagagaaaaatattataaatttgtttatataataatttccttaacacaaatctaactccaaatgatgcatattataaatctctgtagtttttcaaaagtatatttataagtaaccggaaaaaaataaccgtaaatattttgactgaaaatgacaatataggaaagttgcaataaaagacacaagcgagaaatatcaaccgtcaatatttttctacgaaaagttgcgatgaaaagacacaacaattcagaatgcaaaagacatttatttaagtttcgtttaatttaattctgtttaatttaattattttccattatcctttcacttatatctcccgatcgctaagtcgttcgtttgcatgtcgatggattcagcgaccaaaagcagcgactaatcacttaaatcagcgcctgatcgctaaaactttcggcgaccaaaaattgc

SEQ ID NO: 31926 - DNA, 585 bp, Arabidopsis thaliana columbia
  unsure (1)..(585): unsure at all n locations
cgtagtttttaagttaaaacaaaagaaaattgcaagtaaatgaaagcaataacaaaattaataatttgtagataattaaatggtattggaacgaaaaataaaaaagcaggggaacaattaacacctctcgaaaactcacaacaatcacacttttatttttttaaaggatataatattaaatttaaaaatccaaaaaggctaaaactcgcgattgtcgtttgatttgatatgttcacaaaatatcctgacataaattttcataggttagagaagttttgctcatgtaaggacctgttcgtttataatattttttaaacaaatttaaataaatttataatatttttctctgcgatatcacaaacggtttgagttctactttaattaaaataattcttattaaattaaattaaaataaattaaattcaaataacataaactaattatagtcaaattaaatttgataaaactaaaataaataattttttttattaatttatttttctcatggtgtatgatatatatgatttatattttgattttanaatataaattagcaccaaaaataattaatttaaaagaaaatat

SEQ ID NO: 31927 - DNA, 527 bp, Arabidopsis thaliana columbia
tcagatccttctgcctttgatacagacgatgaagctcgtagatctgagataacaagtattgtaagagagacaagaaatactgaaatgagacatcttttgaagacagacgcactcatagagtgactctaactagaattggggaatgaaaaagctacctggagtttcaaagacagattcttgggcaagcatggtctgtttcaatgtttccttgtactgtctcaaataaagatcacagtagactaatctattcgttaaggccgtatcaatatcgtgtacaggatacaaactccacaagctatcctcttgcatttccattcaacacacagtgataacaaacctcctttttttaagaacaggacagagtaagttaggtaacacaatgtcccaaaaacaccgaattgatgcatcagggactcggaagaactttaaccgaacagtttttaactgaaatttcagcgatgattcacaaaatgggaaaaagaaagatgaatctgcgagagaagaaacttacctaaggaagagaagag

SEQ ID NO: 31928 - DNA, 436 bp, Arabidopsis thaliana columbia
gacgaattaatagcgcatgatatctgcatggataaatgattccacctaacgcacatggatatgtaaatttgtaattaatgagatagatatctttatctcggagaccctagctcttataagaataaatggccgcgacacacgtcactcgtcgtcgtcactgcatgctactcaacgacttggacccgccgggaacaaatttaagccgcaactaaatttcaattattcaaagagaacttgtcgattctcatttagtgtattagaatttgtattacttttagtataatactaccatgattagagtttttcgtgtcaaaaacctcaattcatattaaatgtgtttacggattttgtccatttaacagtattaatgtctacagaaatatctacgtagaaaatttgtgttctccattaatctgatgttaatggaagttggaga

SEQ ID NO: 31929 - DNA, 611 bp, Arabidopsis thaliana columbia
  unsure (1)..(611): unsure at all n locations
ctcctacgttgtgaaatccacaattccatggctttcgcttcaaaattcgctcgttctaaaactattctctcttttctccggccttgtcgtcagctccactcgacgcccaagtcaaccggtgacgtgaccgtactttctccggtgaagggacgccggagacttccaacttgctggtcgagctctctgttcccattggcgatactgcctccgccacttctttcgcttacctgaatctgtcgaatccttctatcagtgaatcatcatcggctttggattcaaggttcgtcttattttttaatataaaaatgaatgcttttaaagtatccagaattgtttgattgcttcgttttcaattatctgcagagatataactgttggtggaaaagatagcactgaagctgttgttaaaggagaatacaaacaagtccctaaggagcttatttctcaattgaaaactatcctcgaggtgctgcaaaatttgaacaaatccgtcgaaatttttcttgatgctgtacacaacttatattgatcacaaattctgtntcgnttgtgtntaaggatacttgacactgactacgatgagaggtcttccatgggaagcccagacagtt

SEQ ID NO: 31930 - DNA, 585 bp, Arabidopsis thaliana
ctatgagaatttagtagtttcagtaacctttgattgttttgatccttaaggttaggtaaactttagtagtttcagtaacctttgattggttatgaataaatggaaaattgaggattttcagttgtttttatagttacccttttgaggagtcataataatggttacattttgattgagctagatcttttaatgtataatttaacaaaaaagaagaagatattttgtatttccagcttgagcagagtatttatgatttgaggtatgagctagagagtcttgaatggaatagaaaagagatagagaagaatctccgggaagcaataaaagaatatcgaatcatggaacaggacttagatgaactagaagatgaacatgatgaagccatttccaaaatagaaaagctagaggccgaggtacaaaaactggtttagtagacatgttgcataaccacatatacatatgttctaaacatttggattttggcagctacaagaactaaaggaggaaaatcttcaactgatggaagttaatggaaaagactataggagcaagaagggcaaagttaaaccaagtgaagaccaagcg

SEQ ID NO: 31931 - DNA, 577 bp, Arabidopsis thaliana
cattcaataccggtttagaagatcttagcaaagagattcttaaaaagaaagacaaccagtcagaatcggtgtgggaaacatatctaaggcagagacgcgagaagaagagagccaggaagaataaacagaaggatgatgattcttctccggatgatgacgacgattataacattgatagaaaggcagtgaaagatgatggagatgacgatttctttatggaggaacctcctcttaagaagaagaagaaagaaggaaagacaaagaaggaggaagtagcagcggaagaaaaaagtagagcggacgttgagttgttactagctgatgagaatgcaggagatggtaatggtctgaaagggtataatattaaacggaaagctaaaaaaggaaagactgatatttcggaagacaagatacctgctgctgaacttgatgatccgagattctcagctctattctcgtctccttactatgccctagaccctacggatccacagtttaaaaggtacattgatgaatatttgaatttttctgagaagtggaattgcgaaagtttaagaattttgggggatatttgttt

SEQ ID NO: 31932 - DNA, 579 bp, Arabidopsis thaliana columbia
cctctgaagtaattcctctacgcaggtacttcagagagggtcctcttctttcctttctttacctctgttccctcattttctgcctgctctgccttcttctgcgcacggatcattgctcgccttgcgcgcggtcgcatctctctaactctacgaggcggcatcacaaatggctcaagtggcttgtccccaaaaggatgctcaccgccttcaaatatcctcagcttccgatccctgtcctatacccacacaaagcaacaaaacctcagcacattcttgttttaagcaacacatcctaaactatgcgagcaattcatttaggagctgagaagcgagaatgtatcagtacaaacaagccactattcccaccaaagataaaggacaaataacaaaatggtaaaaccaagagttcagaacaatcttccttccaaacctaaatgattttcaaaacaagggtatatcatctcattcgataagaccgatttgtgaggagagcaacctttctagacataggcaccaagaatctcattccacacaactcatgatggatacaacaagtaagagtaaagctaggtgtggggt

SEQ ID NO: 31933 - DNA, 630 bp, Arabidopsis thaliana columbia
caagaaaagaactcggcatgattaaagaagccaaagaaggtatccctcgcacccatataatcattcattctgttctgttaagatacatacaatttctttattacatgttgctgcatatgtaaggtgattaaaattattcgcagatgctgagtttgccttaagattggagcctgagagccaggaacttaagaagcaatatgccgatatcaaatctttgctcgagaaagtaatattttcatatgcttctttgctgcatttttgccaggttaattttaaatgcttcacaaatacttaactttttgaattttgagcaggaaatcattgagaaagccactggagcaatgcaaagcactgcacaagaattactcaaaacatcaggtttagataagaaaatacaaaagccaaagacagaaatgacttcaaagccagtgaccctagtggccaaaacgaacagggatattgttcagcctgttctaggtagcaatgaaagttcgggaaagaagctcattgaaaatatacaacctgaggtatatttcaagtttattttgtttgatataagttaagttcaaaagtgcacatctaaaaggtcgtgtagaattagttttactagtaaagtttgtccggatatat

SEQ ID NO: 31934 - DNA, 340 bp, Arabidopsis thaliana columbia
cttatatacataaatgatttaatttagtaaaagcttttgtttatattgcttttatacaagtttttgggtatgactattttaacctcaatcctcaaaactataaaatctattattgcacgcttggattttatatatatatattcaatctataagaactaaaaaataaaagtgatcatagtcaaataatttttgcataaatacttaatattgctacccaaaaaaaagaaaattgcataaatttatgtataattacattatgaaaatttatggatatgtggatacacggttttcggggaaatctctatgtgaagagaaaaggagaaaaaaaaactttgtgagc

SEQ ID NO: 31935 - DNA, 217 bp, Arabidopsis thaliana columbia
cttctttaagatgactaagcatcttacagtgtacgcataagagcagttttgtggctgacttctttctgaaatatacttgttagtgttccttaaaggcagtctggtaatgttagacttcggagtaaaggggacttggggatcatttagtcccttagttttacaaatgagaaaagtagggctcagaggctgatgtgacttgcaccaaggctcacagcat

SEQ ID NO: 31936 - DNA, 236 bp, Arabidopsis thaliana columbia
tactatagacaaagaagaattaaacaaaaggagacatagacgaaaatagaataaataaaaaaaaaaaaacataaaaactaatcaaacagcaacaacaacataaaaaatcaaggctagttcttgccaatgcaaataaatatgagtaatcaagtgaagaagacacaatccacaaattctacacaacaataatgttatttggataccagtaaacttcaagtcaattgaatcaaaaagct

SEQ ID NO: 31937 - DNA, 519 bp, Arabidopsis thaliana columbia
ccaagattaaaggttcttggaattccaaagcagtgttggtgtggcgatggaatcgttgagaaaatttttagatcagattcaaatctaattatgaagactatgtgttgaatttgatgtgataaatttaataatgaagactaattagtgttgtgtttgtagtagagaaaacctaattttttgggttcatattttttcttatcaattataaagacatatagttgtacctagtgttacaaacataaggagatacaccaaaagaaaacaataaacatgcaacagttgtacctaattttagaaaacataagaagatataaaaataacaataaacatgtttaacagttgtacctagttttcaactaacaacacagttataccaaaataaaacaacaacccgattcacgtcacataatcaaaatcgaaaaacaaagttttcaaaaacaaacaaccaattaaaagtgtttaaacattcttcgtctttgtctttgcattttttgctagaatagggctccgatacaccgg

SEQ ID NO: 31938 - DNA, 976 bp, Arabidopsis thaliana columbia
gactgatatgtctctttgccaaaaaaaagactgatatgtctaaaagtggctttaacagatttctgaaataatactgcatagagtgccactttatcacctttttaaaacgatatttgattcttaaactgcaaatatacaacaaataattaaatgtatatataattggtggtgacagcattaaagataaaacaaagttgatcttatttttatcagtgaaaagtgaaaaccagtgcggaatattaccatgttaaagcatatgtatcgaataaacaaacatattttaataagataaaatgtcatcaaaaaatatactatgttttttcgttgaaaaaaattcaattttgtatctggtaaaataaatgactatttttttaaaaatttttttaataaatgataattgattttgctgatttagacacaacgttaagtcataaaacaaaatggtcataggatccgggaccggtccaacagattttgatgcctaaagcatttaaaattcttaaacatttttagcccatttataattaaaaatcacaaaaacaaacgaaggcaaggttcaaatcaaaccgttcaccaaggagtcattaacatatgaaattcaataaatttgtgaatttttgtgaaagaaatataaatacttatacctttacttttttataataaatattgaattaattcgtgattctagaaacttgttagtttaatggttaatccaattatgtgtcattgtgtgttctttacacagaaaaaaatgttggtgaaaacaaaaacgtttttacatacccacaaaaatatatatatatatatctttcattgatttagtgtatatccattaaaaatcactctccatcagcaatatcaaatcccaaaacttaacaaaaagaaaaaccaaaaataatccaaacagcaaagaaagaaaaaggtccataattatggagcgcaattaaggacaaaacaaataataatattagtttat

SEQ ID NO: 31939 - DNA, 350 bp, Arabidopsis thaliana columbia
agagaagggtgatgcatattaacacaatgtctgttatgtaattgcaatgtaagagagggaatattgataggagtaatttgataaatgcaggaacatttgttgagaaagtcctgcgaacgacaaagtaaccaacaaagcatggacgggatccttctaaatgacatcgtcgaggattggggacctgagcccgagcccaaacaagcccatatgatagctaattcggcccatcattcaaatcagccaaggtcaattaaattcaaccttctttttatttatggtttaattattttaaattataattgatttttttttttggccggtcagctatgatttactcttacgcaggagta

SEQ ID NO: 31940 - DNA, 513 bp, Arabidopsis thaliana columbia
tgtctactttgtttataagcccatttggtgttaaaccaagaaaatatgtcccttctataacagattttattagttcctttgttatttgattgaatttgtgatttcctaacgaaatcgataattaacaattattaatctatcgattagtatatttttaatcttattagtaagaaatagggtaactgaaattagtttttacatacaactccaattctctacccagattaaaagaaaaaatgcaattgtggtgataatttaaactttttcttgtcggcaattttccaaacaaaaacaagaataataaaaataatttgtatttgaatgctataaaaaaaaattagtaaacaaatacaactagacaaatgtaacgttgtgcttcagttctccacaaaaaaaaataaagagaaaaaaaatatgtgcttcacttcagttcagcaatgatgacagatagtcaacggtttcacatcttcctaatttcactaccacaaaagattggcaaaatcaaccgagcaa

SEQ ID NO: 31941 - DNA, 534 bp, Arabidopsis thaliana columbia
gataaattaagaaggtaataggggattaaatatgtgaagtgatatttgtctacttgaaaactagtgtagactaaattaattgaaaaaaaaaacgttatgtgaaactaaagttatagttccagcacgtccggattatctctgtgttcctaacgtgttcaattaatattcaatctaaagacatttaggttttgtaaatagtatgtttttcctttcattagatttgatggtggacattttacatatacatcaagaaaaacgtggaaagggaaaatcaatggaaagataattaggaattcaatgaaagaaggaaataaaaaaattcaatataaaatttgaaaaagttgcaatatagaaattatagaaaaatgacttctaaacgaaacgtaggagttttatcatttactggcaaatttaaattatatatatgtagatcgtatgtataaacatactatatatgtgtgtgtttacttttctttctaattgtattttgttcttaaaacacaatattaggttgtaagaagaaaaacaaatggc

SEQ ID NO: 31942 - DNA, 340 bp, Arabidopsis thaliana columbia
gtgctctaaagtgcacatttgtgtaaataaaagctgaacaatgagaattacagtggatcagtttcatgagcttcactttccctacacctgcccagtatgctttgctcaaagtgaacaactgatcatcccattatgtaaacaaacgagtataagttgaaaacatgatcataagttttaaaaatctgatttgtgcgagcagagtaatttcagcttatgccccaaaggtgcaaatgcatttttatcaatctggatgattttttgattgaattattccctactgttagtgacttagtgcatcagttaaagacttcttttaatggctgtaagcaattaagctgaa

SEQ ID NO: 31943 - DNA, 587 bp, Arabidopsis thaliana columbia
tgagtattaaactacgagtcgttttttagtattttgaacataacatacatgctgtttttttctttaccagtcacaaagcctacgatcaaacataacaacgcccaggatttccaaaggaaacagtgtgccatctctgatctcttctctctctcactgcttttacatgaggttattaactgatcaaactgaaaatggtgaaggaagaggctcacaagcggccccaacgttacagacacatgatatagaaatagttcacatctctcatggttgatttagcagaaacattaaccatatgaaaccaaagcatgtcaaacacaggagctggtcaaatgagaaaccttcaaaactctatgtaacgtgtctaaatattggtattccagagtttcaggctcttgataattgtgtgatctcatatagcaggaaaatgagtacagaatgtgtaaccttttgatcattccggctcgaaaagctttctttcgcatttggtaaggtcgttttacttatgttctactgcaatatatcataatcttttacgtgttgactcgcacatttgtgtaaataaaagctgaacaatgagaattacagtg

SEQ ID NO: 31944 - DNA, 606 bp, Arabidopsis thaliana columbia
ggaaaaggcaagaaaagtaacaaacgaaattgggaaatagaaaagggaggaactttaaatctctctaatcagctatacaagcccagtcaaaaaaaaaacaaagctttaatctctctaatcagctatacaagcccagtcaaaaaaaaaacaaagcaaagcaaagcccagatgacaccattgaccattgcacaatgtgcgctaataacaatctcaaagttgagatttttatattgatgtatgaaacttatacattcagaataatcacttcacacattgatcaaggttccattaacgattaagtaaagtgaagaaagagttaacacttaagtaacccatgagtgagaacagtggccatattatgaacaagagagattcagtaatgtagaaacttgagagactttttagtacagtcataagttatcaaatgatcctaccaaaaagaaaagaaaagttttacagaataaactgaagtgtgtgacaaattctaaacttccaatgaaaacaccagaacgtttataaaagtgatccggaatttcatcgggaatcttcttcgggatccgctgccatgaacctgagattctgctgtaggttaatgactgagaacta

SEQ ID NO: 31945 - DNA, 544 bp, Arabidopsis thaliana columbia
tgtattatctctttgttctatttttttttgccaaggattcaaatccaaaggttcctactatgtaaagccacacttttttcatttataatgatattgacattcatagcaaaaagaaaaagtcaaatattttgtgtaagaaaaaaaacatattgatctcccaattcaccacttgcatccttccacgttgataagagtcaaccaaactccattaaacaaagaaagcttacgactaattgacgagagttgatggcctagtgatctttaaaacttcgataactgagactacgatggagtagattgtaatctatagtgtgctacacttcaaccacaatactaatgagtaacgtagatataacctagcgtacgtagtttcatttgcatacctttaaaatttctaatcttgaaatgaaatgaaaccgctatcaagaaagaaagaaaaactaacttgatcgaactatagaaattctcaatatatagcatcctataaaatccttggaataatactttcgaaaaagtactggtatcactatcaaactatgcagag

SEQ ID NO: 31946 - DNA, 529 bp, Arabidopsis thaliana columbia
tgcttcgaatattttatctttttattacagttgacagagagacaaagcattaattacacattatccaacggagaaattgtgactcacatagtatgtggcaagaattgctttttcgttttacgaaaaaccaataataaaaaattatcaagttggtcttcttcttcctcgttgctgatgtgtcgctctgcttgagagagtcagacagtcaagagagaaaaggggtcgagaatggcggtcgcaatatctgggagtagtttgatatcgtcgactcttcagcattataataatcggatttatatccgagattatccgattccgtgtcactcttctaatccaatttgcaattcttttaatttcaaaagacgttcgttctctccttcttcccccaaatttaacgaccatgtcgttaacccttcctcttcttatttatcctccaagctttctccaattcgaacccattcctctttcgctggtaaacgcctccaaatataatctcttttctttcctcgcttccttctaatttttgagg

SEQ ID NO: 31947 - DNA, 565 bp, Arabidopsis thaliana columbia
ccaacaccgactccagtgaagtcagagagcaccatagtgatcttcacaagaaaaaaaaagaaaccaatttaggaatctataaattcaaatgagcagaaattgcgaatctgaattacccgatgataccttgtttgttgttggtaatcggtgaatctggtagattgctctctctacctcccccacttaaaatcgcaagccctgaaagcaagagaagaaaggtgaagacgatttgttttagagacgtaccaaattaatcgaaccggtttaactaatgaaccgggattattttcaaaatgattttatgtaaaagaatttggtcaacagtgaaccggcctaattctttttctcaaggtcaacaacagtcaacagtaaaataaaacgatctagtgagcaaatggatcaatccatatgcaaaaatgctcatgtcccattgaaatcaactcacaaataggatttggatggttgagacagacaaacagataagtacttatggccattttttggagtaactaatgagcacggtttgaaatagacagtggaggagaaatacatttactagtttgtg

SEQ ID NO: 31948 - DNA, 442 bp, Arabidopsis thaliana columbia
tcccatttaaatacagaacgtgagcggactggagtgggaaaatcaaaactttcaaggaaaattgtgagaaaagatgaatcaaacataagaactcaatgtaaggaagagaaatttaaaactttttccggccaaaattgaagacgagactgtatcagagtcataccagcgaacgactcatcggtggcaaagcagtagaaatcaattgaagcgatcttctcagcgatttcatccataaactgctccgtagcgtcgtcggaaatttaaggcgcgtcgaattcacgcgccgttgttgactcgtcgtcgtcgctttcatcggcggacataggcaatgtcacggtcggctcgaggagtaattctaattttactcctcattagttatactatttaaggattcacccgtttcttcagttatggtaattttactccttgataagttttctat

SEQ ID NO: 31949 - DNA, 461 bp, Arabidopsis thaliana columbia
tagaagagaaggaatataagtacggagaatattaattacctagacgggaacaaaaaggaggtcgaatgagtcgtccgcgtatagtaatgtagtggctgacttcaggagcttcacatcaacatagttatcacaatcattatcggactgcatcacttgtcgggcggatataaaaactcgtttactactgtggggctaatatccactatcctcaatacatgagggcgggttctacatatcgaaggtcccattgactgaccatcagactcactcaggcttacttgtggggtgggactatgtatctgaagccctacttgctgacccggctggtccgtttccgaagtccttatctctacactgtgagatctctccactctgccttgctcatgtcggtcctacggcgatctggggtttgagttgtcgctcgaggtggatcaatgctagcgggtcatggagtgtgggcg

SEQ ID NO: 31950 - DNA, 486 bp, Arabidopsis thaliana columbia
cgaacgttatttattaaacatgttgcaacttttacatagttacatatagacaaataacgcacggcatttcccttccttcgtattttgtcgaaaaacaaacacattatattaataaagatgaactcatggcttccttcctctgttgtgaaaaaatggataaaattatgcttctgtcgaagcaaaatgtttaacatgtgccctgttcagtgacctgaatccatcatctccggcgactttcatctttcccgcggcatcgtattgagctttacctccaaatccaacattgaagaaatttttaaataaaggagcttgagcatatagttcccttcgaattccttttcttccgtgagctttggcgtccaaagaagcatgaatagcaattttttcatcggcgaattcgcctgctggtacttggtaaaagagttctcttcggtgacctcctaagataccattaaagaagtcagaagacttatcgataatggattc

SEQ ID NO: 31951 - DNA, 555 bp, Arabidopsis thaliana columbia
tagtaacgtcataaattcttattcctacatttcgggtcatgcattccttttatgatatcataacatttcattatttagagatagtcaaacttattactttaattgataataaagagaggtcaaacaaagaaaataataagtaaatatattcattagcttctaaagtttaaacatttttcacattaaagtttcttatttttgaatgcaattgaattaaggtgcatgagccaagcgacttagtcgttaaaatgagaataatttctcttgcaaacaacttgcaattttgggggttgaatgggtaataatacaataaaaacactaacacaaattaataggatacaagtccatagtaattaaaataatttgttataggagaacaaatgaattgattatattaaggaaaatataagtgttgaccataaatagataataaaacgtagcatatagatgtttcattttaagtttcaaaatgcgtccaaaaatgaacaaaactatgtacgatgcatgagaatgataatatctctaataatttacgtgcatagcatgacaatgatt

SEQ ID NO: 31952 - DNA, 809 bp, Arabidopsis thaliana columbia
gagaaactatcttctttttcatgttaaaagaacacactgattaacaattcctctagttcctctattactaacagaaatgatcattgaaaaattaaacggaggctgatcacttttcaattccatcatatataaactgtttggaataaaatcaaatatgccttagttaataattcatacaagacatgagaatacaaactaattttggatttgcactaaacttgaaacataagtggggaagaagttatgtttgaagattctttgaaattcacttttttgaaaatatccatcctcactccaatgtttagagttcacaccgaacatcttcgtaagaccaagattgaacaaacctcaaaactttgtggttgaggccgcatgatttgtcatccacgtatcctatgccatacttaatcctacggtgacaacttaacggttcgaaccaccgggttttctttgtgggtaggtgcatctgtactgtaatttcttcttctgtagctcaactaaaaaactgtactgcgttatcatgctcatgggcctggactatcaaattgagcccaatggatatttatcttacagaattttgccattatttttttgttttgtttattaataatccagtcatcattcataagtttttaaaaaattcatttgttgcattgattgtaaataaaaccgacgtaaaactttattagtttattataaattttgacattagaaataaaataaaaccaaaaactgaaaaaaaaaaaaacgtgaaaacagattattgtcaggacagcgaccaataacaaaccctagccgcaaaatttgaa

SEQ ID NO: 31953 - DNA, 376 bp, Arabidopsis thaliana columbia
tatatacttatatatatatatagtgtatcatgcatgcacaaaacacccaacgactaaactactcaaatatggaaaactagttggtcagattctaacataaatttaatggttttaattatactttggaagattagttggaatgaaaaattcaaatggttataaataaaaaacatagtttgcttaagaaaaataaaagtagatgatagctgaggaacttaatggcactttctcttctgttacgtgaagtgggaaaatcatctgtcgacacatctgttgtctgcaataaagtcagttgtgggtttgtactgccaaattgcaattagaccatcatgagaaaggaccgaccagtagagagtatgacttttagatagagaca

SEQ ID NO: 31954 - DNA, 368 bp, Arabidopsis thaliana columbia
  unsure (1)..(368): unsure at all n locations
ctctttgtaggctcattcatgaagattcatnnnnnnnnnnnnnnnnnnnnnnnnnnnnnnttaatttgcttcaaaatatctatgtgtataactctgcaagtagttcaattgttgtattaaataccaattcctgctctattaatgattttattatagaaaagtctccatatgataatgatatatattcatgtgctgagttccatcctccttctccccatgtggtacagttgcaaaatgtcgaaacattcgttcatgttgtagctgcctatcaggaatacattcaccatccggtctcaatatctcgcgtcttgctcggtgaaaatgcatacaagagtattaaccatatactccttaaatgcacatacaat

SEQ ID NO: 31955 - DNA, 461 bp, Arabidopsis thaliana columbia
tgtcccaacattacatcaagtaaattcttgatctttggtttgcatatgtattatattttatgagattatcccctggtttctcatttctattataatgaatattctcgtaggtggcattcaatttgctactgctcaattgccccttcttgagctgatggattgtggcatgactgtctctgatcccaactcagataatccgacctttgtagagaatccaagtccacataaaacaccaggctacaatcaaaagatgtttatcaaacataaacggctgaagaaacttagtttgtggggatgctccagtttggacgtgagattcctctcatcaatgctctctaaacaagttcaaaccttaataccatcttctcatagtttcgatcttttgatgcaggctttgttcctaaactgcccagagctcatggacttgaacttgaacttatgcagtaatttgcatccggaga

SEQ ID NO: 31956 - DNA, 607 bp, Arabidopsis thaliana columbia
ctcacgccaatcatatagttttcactaaaaagaaaaatttgtgtattaataactaaacgatcttcgatctaaatattaaacccatgtggaaagattccctatcgcctgaaaataaaatgaaaactctattcatcggaagatctaatcataataatatcttactaaatatataaacatctatataaaacttgaagtatatgcatttttcgtggtctcggaattataacatttttgtacatgatcatgatggcgaacgtaattgggtctataaagttacaatgtgaacgaccagaaataatatcgactgactcgacaactgcaaggccaaatggcggtttattctaggttaccgcgatacctctggagtatactgtatacgttctctctaaattctggcttttttttgggtgaatttaaaatggaatcacttcaccaatatgtacatgggtcaactccaaaactgaagacgacgaagagaagcggaagaccgcaagaatgccaatcaacatcacaaattgtttatcgtcttctctcttctcttccatccacttatttcagaatttatctcaatattttcaaattacatcatagagcatgtagtgaatag

SEQ ID NO: 31957 - DNA, 289 bp, Arabidopsis thaliana columbia
tatccgacgttaaataaacggtgtattgtggttcgtacgtgttcgttgaggttgtcgatgatagaggtttgtgtattggttgccgctatattgtcaaggttccgcatagttgaaatctagttttggattatgttgaattactcatatctggttagctcgagagagtcaatttatgtctcatgaatgaccgtcaaatgatttatgctcagaaaatcaaacttcagcaaatccaaatacaactaacatttacgagacacaaacaaattgttacacatgtccctcgttcatt

SEQ ID NO: 31958 - DNA, 560 bp, Arabidopsis thaliana columbia
ctccttatgtaataagatcgataataacgaggatatgacagacaatgcatttgagtttcataatttttctaggggcttgttatgtaaatgttcattaacaacaattggaatagcgagtatcgtctcactcaaaatagatcgataacacgtgtagcagtccctaaggcgcgatgaatatgacaatgattgatccatttatgagactatacgacaagaaagatcgactatgaaacatcaaatgcagctactaatatggaatattaacacaacatattgaatactccattttcaaaacagattgctatacgtgtaacaagccctatgcctcgatgcaaaggacaatggttgatatatttatgagactacatgacaagaaagactaaatctgaaacatcagctgcagcaactaatttggaaaaattggtattaagaaaatatatagagtagtccattcagaacagatcgatactccattttcaaaacagattgctatacgtgtacaagccctatgcctcgatgcaaaggacaatggttgatatatttatgagactacatgacaa

SEQ ID NO: 31959 - DNA, 569 bp, Arabidopsis thaliana columbia
tgtatacgtagaatagaaatgaagatctcgtggtaaaaaaaaaaaaaaaaaacaagatgaaccaaaaaacaattcaagatgagagaagtccaaaaaatggcctaggttttttaacccacgcaacacaagttgggaagtttggtcaatagcctttaacctaagctttctatttctctttatatgtaaaacattaaagttgtcaacaaccatcctcttggaatatctattaatgctgtgaaaatccaagtttttgctttaatgctttgaacggtttgtgctttaaaaccgatacatcaaaccatctatctccgagactaaaccctagggagcatgtatcggacatgctcgtcgtcctcaaaggaagaggatgatggaggtacacttgcctctcggctggtacaacactcgctcgcaaggttcgattaatagctcctccaaagtggtctgctcaacctagaaaagagaattgaaggagacattttaatttagtgagataaaaaaagtaaattgtgaacctgaaataaagaagtggagatgtttcaaaaccttgatacacttttgaaagagcc

SEQ ID NO: 31960 - DNA, 356 bp, Arabidopsis thaliana columbia
ttcaggaggtaaaggtggaggtgggggtaaaccttgagaatgaaaatggtcatcaggatgagatttctcaagtgatgcttcactatgaggcagtttgcgtctatcatctttgtctctctcatccttgtctttatcatacttcctagttgtccctttatctagacccttctcaactgagcgttctctaccatgacgttccaaggacttgtctcgtgctttctcaacatcatctccacgaggtttatcagaacgatcgactctttctctgtggtctcgatcctgtctttcataacccttatcctttgatctatcttgatccctatgggtgctttggtcatcagtaactgtcttgttta

SEQ ID NO: 31961 - DNA, 578 bp, Arabidopsis thaliana columbia
gattatgaacctctctcattcaataaagagccatgacattgacttggattgattagttctgtttgagagccaaatcggttatttagataaaccagcattattatctcaggctgatcaacttggatagattacttcatttctaaaaccaaacactcaaaaccaaaaccgaattgaacacagatattgaagaaaccaaaggaagctttaatgagtgatataaaagagttacaatctcgttgagtagcctgaaagtggggtggttctgttacattgagaatgttacaataaggaactgagagttctggtctcaatcctgaaatgtctggttttaacattcccagagagaaatctacaacaacaaagatatgtacagcactcacataatgtatgctgctgctgctgcttccaagactaaagggtagtagtcggagtaaataggaagaaagactaataatgtttttgttttgaatcacccgcgagtcaagtcaatatcagtgagtgggtttctgctagagtcaagtgatctgcctgagcctgagcctgaaacgggccatccgctcattccctgagctgggaag

SEQ ID NO: 31962 - DNA, 1442 bp, Arabidopsis thaliana columbia
tccccatgaattgagtgatcgatctgtattaattttataacatgcaactgctagaatatatgcttgctttatagagtactaaagacgattcacgtttctcttaaatggtgttgtataatgcgatagatggttcaacatctaacatttaacacatctctcgtgttcttcattgttctcctcacaaaccccacgcatcttttccatttttaaggttctgtttattactactacgatctcactttaatgctcactatcacgcagtcactgcaatctccagctttttagtactccattcgttacaagtattacatttatatttctgtatccattaaatataaattcaagtaagaaagttccaaacaaaacaaaaatccaagaaatttttttagaagccgtgaattctctggccttcttctacttgacaataccttatctctctgactcttctctgaaattttttaactaacaactgaagaaatctccttttggatcattccaaaagtttcacaaaatccagaagaaaaaaagaagaagattatatagaaaatttcaattgtgaaattatcaaaattccctctagaaactccatttccagaccttgacactaagatcagacttacacttagtttttttagaagtagctacaattggagttttaccttttggtatagttccttcaaatccttcacatgtcactttgatctctactccttcactcttcagcttccccattatcatcttcactttagttctcatctcgatctcatatcctacacgcgcgcgcgtcagatctgatctcagatgcttagcttcatccggatctaactcacgcgccgctgtagacgtagcgatcacgccgtgaaacgaagttttgttaccgttatcgctgaagaaagcaggaacagttccgttaccgagcatcgtaccggatttagctgaattaacggtgacggtgaaaggatcgtaagagaaagagaggtgttggtttggattctctgagattagagtgaagttgaagaaggaagagagatgagagacggaggaatcagaggaggttgttaggttcacgcggctgattcttattgacgggacggagaacgacggcggacgagggtggtagatcacgtacatcgcggtggcggcgattgcagtcatgagagctaagatcagaattatcagaatcgaccagaaacagcaacaacagcaaattcgtcggcagcttggtcgagattggtggtgatgacggcgactgtaaggctgtggacggtaaaccggacggttagctggaatgtagacttgaggtttctgattagccattccgtttgttgttccgttgctggttacagtcgccggagctggaggaggtggtatggaaccaactggtggagctccattagtggcggttggtggtttggaagctgggaagactcggtcagtcatgg

SEQ ID NO: 31963 - DNA, 778 bp, Arabidopsis thaliana
cttgatatgtgtagtccaaccacaaaaacaagagaagtaattaacaatttggacaatgaagatgtacttctgcataacagaacattaagatcaccacaagttacttttgttcaaagatggaaatttaaacatacagtcaatggataaaggatatgttataattcgtaatgtctgattatgttattgaatatccaagagtaaatttacagtatccaagaataccagattaataattaggacaatacacctaaagacaacaataatcccaaaagaattagaaactagaaaaaagaagaggtcagctatttattagtcggagtccgagtaatggtaatagtcatcaaaatccaaggaagaagacccatgatcatcaaaatcgccgttactattatgatcaaaagcaaccacatcgtcatcatcaacatcatcatcatcatcatcatcatcaacataatcataatcatcatcagaatcataatcggatacggagaaacacagaaactcccaaagacagataaagagatgactaagagggaggcaacaagccacctccataagctgttgcgtattcatcaactccgacgacggaaccctcctcatccgctgccacttgtcggtggaaaatttcgccaccgtcgccatcaccgagctgctaaaaaccatagccaacaaattctctcttttccttcttcttcacggaactggtttatggttttgactttttgacttttgtcgttgactttgcaagtcgtaaagcctatgatatcatttaagtttt

SEQ ID NO: 31964 - DNA, 555 bp, Arabidopsis thaliana columbia
cgataggaataatgattcaccaataaagagtttttaggttttcttaaaaatttacctctaagtatgccgactagtttcgagagcagcgatgatgaaacaagaacacggtgaaggaatagttatgaaacaaaaaggggaaaattaatattgaaatcataatcaacaatacacgattgatagtaggatttttgtcaattaatcctaaaacactatcttgtcgttgtagtattttaggatgtcaatccaatccggtgtgatgcaaacagatgagatatgatcagaaagctctaagtcaagccaagcagaaagttggttggtcctaacagtcctagtatgcaataacagaaatgaaatgaaactaaaagcaggaatggcaatagcaggcaagtgaatgacaaagcagaaatgataacaggcaatcaaatggataaacgattcctaaggatggggtaatcgaatagtgtggtctacttaatctattcaggcggttgcaaaacttcacagaagctatccctagacaacaagttcacaacagattaatcactcccgtgatag

SEQ ID NO: 31965 - DNA, 613 bp, Arabidopsis thaliana columbia
aactccttctagtcgacctgatcttctacgtggcgtcttagaggatgaagatgtacctgatacataacaccagaatcaacaaatagagtcaatacacacacaaataaaaacactcgactagtcagtctcctatggtccattcacgacacataacacaaccaaatttcaaagattctactcatactatcaagtatcaacagaatcagagtgagaatctccatagaaactctgtccaaactatcggccactatcaaccaaaaatcttataaagtttcaattttcttctatgctaattcaaaatactccaaacccattacagtagtggagcacatttactcaatcaataacttaatttccgaggaacccaataggaaaagacgaggagagaaagaaaaacaacagaccagaagcaggagcagaagtgacggaacaggaaacggtagacttaattcgagagctttggcggaaggtgaaagtatagggacaaagcgagagggcactaaaagctgccattttcgaaggagtagtagctggcctgcgaacatcggagtagatagaggaggacgcatgtgaggagaaacttgcaaagaagcaggtttcatcatcactgtat

SEQ ID NO: 31966 - DNA, 523 bp, Arabidopsis thaliana columbia
ctacctccaagaagttaagaaaaagagtgcaatttaaacttcctgaagcttcatggggtggcactgctaaatattctaattgggatagtgcatccttcgcgtgaaactgtgggcatatcagctgatataccgataaccattgaattatcccttagtacagaggctgttatgcaaggtatgaaaaagaaggatcattgtgtggattcagattcaagtaatgtgtctgttaaggattgcaacatcgagagagaaagtggtggttctgtaaaagaaaaagagcctgtgttttctgaagaacacccccaagagaggcggagtactcgtcttgaacggcttcggaaccagaaacctgagaaggaagggttagaatttgataacagtaaggatcctagcagtgacatccttcaatatcttgagaaatttgtccttaaaaggggttttgacagagagtctgctggttctttctgcaatgaagaatctgatccaatttctgaacacgccgtcgtttctaatttttgtgaag

SEQ ID NO: 31967 - DNA, 540 bp, Arabidopsis thaliana columbia
tgcttaacaatctctggtagaggtggtggtgggggaggcggcgatggaggaggaggaggtggtggtggaggtagccgcggaaatggatccggctatggaagtggatatggtgaagggtatggaagcggatacggtggtggagataattacggtgactcaccctagatcatgcttattgcttattgtttcatgattctgaacttatgataataatgtgttcgatgttttgtcgttacatatatatacatgcttgtatatagtagatatcactcttcttatgctattgaagagagatgatgtggacctgtggtttcactttctatattaggaatcacaagtattggcatatgtattagcatgcatatcatttccgattcttatatatatcgttactattggtatgtttatgtaccttgtttacccacttattgattccttccactggcactaggaaatgttttggagacgtacgtctaataaaattggaacacgacaaatttgagtatgctcgagtgatagtatacatgacgaactgaaaat

SEQ ID NO: 31968 - DNA, 272 bp, Arabidopsis thaliana columbia
atccccgttagttacaaactgagttggttttggtggttgagaagatggactattgcaaacaacagcatttaaacctaaattgactcttcttatatccaaattgctagtcatgaaatatcaatgattgggctcgaacttcattgaaattatactactgaacgatcagctagaagtgcgatgacaaatggtcagaattaggggaggcatctcgtcgatagatgcggcatatgggtacgtaaacgcaaggcaagagtttgggtacatggcggtga

SEQ ID NO: 31969 - DNA, 232 bp, Arabidopsis thaliana columbia
agttaaaatgttatggcatcaataataaaacaaattgtagagataaaaaaatattactttaatataataaaaaattgaaaatatcaaataaaatgaaaaaaaatcagtgtgaagaatattaaataaataaatatatatatataaatatatatatttgatatacacttaaatttaagtttattttatatatgataatatgggtgaaattggttatttttaaatttagttatac

SEQ ID NO: 31970 - DNA, 472 bp, Arabidopsis thaliana columbia
tataatagttccactaaaatcattttggatacaacctcaatagatctcagcgtattgtttcctgtatgttcaatgaatccatcctccatgcaatctggagactggagtataaaataacacgtatggtatggtatttatttctcatagctagttccttaacagttggaagaatttatacatgacccggccctttaaaacctatccctactacaagacatttgggttactttccatcgacttttgaatgtgcatcaggcatgaaaatcctttaattatgcatattttataatcaatgcttaaattactataaacacaaaaattgtagtgatatattagaaagataatttaaattgttacattgaaaagataataaaaaattataaatagacatctgatataaaaatggatgaagtatagcatattaaaaaaacatatgtttttggtcaaaacagaatcaatgcatagttagctc

SEQ ID NO: 31971 - DNA, 606 bp, Arabidopsis thaliana columbia
tcaagctctaatacacatcataagaattcaaaacagatgacttaattcccatagatcatctcgcagatacgaaactaggaatctcaatcatttccggacttatacaagcccaaaagaggtgacttttaaaaatttatgaatcattcaatggataacaccagaaatgaaaatcaatcgagagacagaaagagttgtagatcggcagacctcttataacgctccggtggtaagaattgaaagatgagagatctgcagaggggacagatctagaagcggaagaggagttgcctccatcggaaagggtatggtcacgggaaaggacgaaggaggtcgccgtcgatgatctctgcgaaacagaaaaaagcctccttcctgctactcgcagcatctctgctcaaatgggttaagaccgattctagggtttcgctcaaagcaagaacacacaatcgtaaggttagagatggccgatgcaaacaaaaagattagtcctttaccaaaaaaatgtttttttttcttctttgcggatatcctttaatagtctcgagaaatcgcaatttggttttttactattaatctgaagagacaatgacggtgttctacatgata

SEQ ID NO: 31972 - DNA, 832 bp, Arabidopsis thaliana columbia
aagagtcaaaaggttaaagaagaatcgccgtttctcaggaacatccttcttaaatactattaactcatcactatttttggagatttttgtttagtaacgtgattttttctatgtaattaatttaattagattttaactgttacagagaaattgatgcgtgttcaacactattcatatgatatgagacactgacccaatcaaaactcattcaaccttataactaaacgtatcttaaaatatagttggtgaaatgacatacgtttatcaaagcttaacctattgaaatttaatccggttaatggagtttataaaccgggaattagatttggatttaatgtaaagagggacgatgcttaagggcggtttcgtggcggccaatgggggatccagaaacggctttccgcatctcagattgagacgttagatttatgacacgtggtagttaccgtaccgaaagtagagccaattgtcctaatctatagcttggtctccaagcaacttttaactcttttacgcgcggtctgttttacgtttgctacacgcgccggctagtgggctccacgcgtgtgagattggtcacgagtatgtgtcaattcgcattgacccaatatggaaattgtgaagtttaatggtaatgaatctaacgatgtgtttgaaagagtaataaaatctcgtctttaatattaaaatatatttttaatttcggaaaaaatttatgatcttttgcttggagaccaagtctcttatcagaaactttattagaaaaagctactattaaaaaggtaactagaaattagatttcgatagttaatggttgagctttgactagatt

SEQ ID NO: 31973 - DNA, 316 bp, Arabidopsis thaliana columbia
tacacttgagagagaatttaaacaatatcacaagcgcacgtacataatacaagtgattggattaacaattatacagaagcaggaagcaacaacgactgtaatgtagtgtggttcctaagcatagaacaacatcaactgggttagaaaacttaattgatatgtagtctcatattctatgaaaacggagaataatggatcattacctctagctaaaaatccaccatcgcggcatccgcaccttctggtatgtctggattggaaatcacctttgatctagcaccatggctagcaagctgtcagggtaagaccattcggt

SEQ ID NO: 31974 - DNA, 587 bp, Arabidopsis thaliana columbia
  unsure (1)..(587): unsure at all n locations
tataaaagaagaaaaaaacttctttatgttcatatgaaagaaatttaacactaaaaattttaccgatagatccacacacattattgattaacagaaaaatatatctatacattttcacaacgtacggagaaaaaaaataaggaatcacatacttaataactctcgactaatgtctccttccgtacattaataccaacaaaagagaggcattttggtgacgagaaaataaattaaaaaacaaataggattttgttgaattagggcacatgatcttcagctatcgtctccaactgtggtttcttagatttcgaaacagagatccgatgaataaactctgccgccgagaactcttctatgtcttcaagattcagcttcggtccgatcagcctcacgtcatcattatcttcattttccggagacactctcctatgaccgcagtttttcgtgcgtttctttccggtgaggtagagcctagccatgtcggaagcgttggctgcagaagtggcacgtgtcatcggaaatngcgacgtcacatgacagcctccaagatcaagatcgtcgtcggcggcgagtgggataaatttacg

SEQ ID NO: 31975 - DNA, 1208 bp, Arabidopsis thaliana columbia
cagattaccaagactaaacttgacaatcacaagagaaggttaggcttgtatcaaaaactgaacgtggtggagaacaaaagttctcggagtcaaaagccggtggaaacaagtataccctggagacaaaaccttatgaaagggagacggtgaaagtagtacaacctaaccaagaaaagctgtagccaaaatatgaacctaagtcttgaaataatcctatcttgctcaaaagaaactcaaggatcaaactaaccaggaaccaatagaaggaggaaatctagaagaaaattccatagaaaaacaaaatattaaaaggggaagaacctaatctctcacttaaccctcgtcccaggaacctttacacttaacgcgcgacttggcgaacctagatgtgcaatccaattaaccgaaacttcagtaagaacctcaaacacagagatcccaaagcttgaaggaaatgtaaccacttcgacgatctgcttctcgaatccaaaacaattatgcagaggagagagagaatcatgtagaatctgcgaaattacgaaaccgggaaacaccaaccacttcgaggaggacatccactagaagaacgagtcccaaaaatttgcctcaaaaaaactattgaactagccctggatcttccacaagcaagaaaagagaagagcatccgaagaatcactatccacaccataaacgaaagcaagtttaagatggggaaaacctaatcgggtataggtacaacataaagtccaagttataatgggcttctacaaagattatttcccaatacaaagccttggagttgacaacaaagagagatgttgaaggataatcttcaccacacgtgggaagcatagaacatgataagaaaccacatgttgcagcaaagcaacaagtcatcaaccaccaaccctctccacctttgtagaaacaacgagatagacgtataaaacagatcataacaaattcaataggttgctaaatccaccaattgggattcaacgaacaaactccattagagaatgataagatctgaaagtccaccaccgtttgttatccgactgaaacctagagaccaacgattgagagtcaatctaaaattaacaaaggaacacatcttcataccatcaatctgagtcgcaaaactctgaaaagaaacatgctagagagagttgaccttagtcgcctaaaaccatgacgctgatacaatt

SEQ ID NO: 31976 - DNA, 579 bp, Arabidopsis thaliana columbia
cgtacgtaattcggaacactaatagtctcttccagaaattagggttcatccgttagttgtgagtcttgttctgtgaatcttttggattctaagttttataatatcatgaatcagtgctctgttaatcgtgtttaatactggtcaatgattttcttaagctaaatcgatctttcttggatatgaatctctcttggctcattttgttgataaggaaatgaatctttgaagagtcactgccttggcttttctcatcttgaagagtcttgtgtttagttaagataagatttaaaactgactgcaaaatacttctttcatgaatgtagtgtgtcttaagtccctttggattcttgtttgcaatgtatttgtcatttactgtagcagaaatgagtcctctttgcaagttttaatcaatagattttgaaaactgtgacaagtgagcttgattcattggagaatgatgatggtaagaagaataaagcatatacaaatgcttaattttgtgttatgcgtttttggtacccaggcgacaccatttatagcgggggttgcagtagctgcacagacttgctggtagatatg

SEQ ID NO: 31977 - DNA, 385 bp, Arabidopsis thaliana columbia
gcttctgaaatttctaatttcgtggagaatcttcttcatcttaccatcggatctggtagctctcacttcgattcatttcaaatttggatttcaaatttcgttcttagagatgtataatcgtggaatttgtaatctatagcttaattacgttcaagtagattcgagatttgatgtgattttgaagaattgattagctgaaaatgtggagtgatctacgttgtctgtgatgatgatattgatggttttcttcttcttcggctttcttcggttctgcagagtgtatacaaaggttgttgtggagcttttatcagatcacaggaataagatggaggtaattgggaaacttcccagggtggtacaaccggcaatggtaattaactggccg

SEQ ID NO: 31978 - DNA, 539 bp, Arabidopsis thaliana columbia
cgagcttaatatctaacaagaaagttataccttggtatcctttccaagacaagaacatatccgtcagatgtaataacacgaatagcttcgtaaggatacctaccaagagtaggagagaaatcaagtaaatatcaactacttgagaaagagaaaaaaaaaatggaagcatgagacatcgaatctgcccctttaccccaactctgttatgacatcttgacacgttcgagtatcagtgttcatagagttgtataaacgtgtgggactttcaacgggcctttccgtgggggatggatctgtatctcctaaagtagcagtctgcacagtttcatcataagcaacctcaccatggttttctttagggctgcgactggaagatgagaaccatgataacaatattgcaaaagcttctgatggagaaagaagaagatgcgtacgcttgtgaaaaaaatcgaatattgcttctatgccgatctcgatagcaagatgaagatcctgaaaaataaagcacattaagtaggacgagtttgtcaaaaggttta

SEQ ID NO: 31979 - DNA, 491 bp, Arabidopsis thaliana columbia
gtataaacagttacgaacatggcaattactctatctacaactactatacgtacatatgtcaggatctccaaaaactatatacataagacatacttttttttttgctaaactatataagacatactgtaatctgtattattctctactaattgttaagttttatacataaccaatatgagaatgcaattcatcatatgatcagaatttcactaaacacgtcaattactatggcgtgtagctatgaaataattacacttaatcaattggccatttggcatactatattagaccgcagatgtatacgttttctaactataaatttgtaaattaaatttttgtttgtggaaaaaaaactaaacattataaaaatgtattcgaagatacaaaactactatatatataacgtgttcaatcctcacttcaagaacccacaaaaactttagaacgaaaaaagatgaaaatctttaactcatctcaaaacctattcttgg

SEQ ID NO: 31980 - DNA, 526 bp, Arabidopsis thaliana columbia
atcttatttactagctagactcttcttgtaacattatatgatctaaaatactagtaagtaatgaaccaaactttctgtttgtttctttaatttgaatacacactattgtttatctcgtctacatccatttaaattgtctgccttaatttaatattacaaaatcaaattaattacaaaaaagggaaagaaagacaaaaatattatttactgtcctagaaaaagcctaccgttcaaattctgcaaccatgaccgccttctcatctcacagttggtgatctattaacaacaatggaacaacggtaagcatctatgcttagagcatttgaaagcagagagcactctaaatgttaataatttattgtttgatttttggctgtgaaaagttggagaattaaatctaggtgttattaaggcaggtatgatgaatcagttgcctgaagctttggtaagggatcggtgcctcgaacatccagatatacatgtgtatggttacaaagagacattcacaccacaaaccagcttgaga

SEQ ID NO: 31981 - DNA, 493 bp, Arabidopsis thaliana columbia
ttattttttttagatttacgttttgaatgcttaatacatctaaatattgtacatttaacatattataaattcaaaaagctaaagagtttgagttttgtttaattatccattggttaagtcaattctttcggaagaacatttgctttctcaccggaatttactttcatttttttcgatttcaattatacatgaacacaaatctgggttttagtttgaaacatttgttctgcagcaaaaagttttgattttattataaatttttaaaataaaagcgtaaccagtaaaacaaatcaactgaacatgaatagtcacagttgcagttgtgttgaagggtattatggtcaagttcagctcaaatggctaaaatgtgattggcccagtcgactttgccagttgatgaaagaaaaattgaaataagtagtacgggtgaaaataactttttaataaatgagtgtagtttggggtacccatttagccccatttaacttttttc

SEQ ID NO: 31982 - DNA, 871 bp, Arabidopsis thaliana columbia
tgcgtctatcaaatacagggtaacgacagggatagtgatagcagcgaaccagaggtcgaagaacagaacagaggagatgaaagaaacgatagacaaagcaggagaagatgttaatcaaaacattcgtacagtgatagtgtcgttaacgaagatacagtacttgttgcttccatacgatcagaacacgactcatcttctcaacgtcaccactcatcgactcggcaaaggttctcgccttatccaaagcttccttcatcataagggtcgttccattgatctcgccatcaaaatctcgtacgatctaacaacaactcatctttttgtttttcctttgaaatcgtctttgattgttctgctctgttttttgtctcaggtatgtatctcatcttatgattacatcgaccaacttgttccttctgcttctagccttttgtgagattatttaacattcactaaaactttcaaaatgttatcatcttagcctaattgtaatggtctttttttgccggtgtctttgtctcagtacctctattgcttcactggcaccctggattcatcatgtaagcaatgcacaatcacttcaaacattgttcttgttcaatttgttttttaaacttgaaagattaaaaattcttcgtccttcttcttacaaagggtgatattcttgtgttggatcataacaactctttgttgggttctaactggattcgatttctttatacacacgtaagtaaagcaagtcctaaaatgaaattcatctacatgtttccaaaccctaaactcctcaattttccactcacgcagcttcgcagaagacctttgttcagctttcaatggtttcgtacaaaacccacgaaatagcacactgact

SEQ ID NO: 31983 - DNA, 512 bp, Arabidopsis thaliana columbia
cggcgattatgatagtggttaaggatatgagtaataaatccattttgcttagacaaagtgtggtaattgataaaatacaggtttgatgcttcttcatgaagtatacttttttatacaccaaatattaaatgatttatgaattattatttttagtcacggttatggaataagctgtttagataacacgtaattttgcatgaaattgtcatgaattggttcactttttgcttttctcacactatttgcattttctaatttgattgaaaattttagttgaactttctttgttgtaagaaagacactttcatgtactacattcttttaactttttgaggtatcaatttgtgtatcttgcaaatgtatccaaagttcagagtttgacatctgttaacaaaattcatatggtaaacaagagatttattagtaggctgattggctttgagttcaatttctagtttggtttaggcgtttacacggtttagaaattgtggtgacgcacaagctcggtttga

SEQ ID NO: 31984 - DNA, 534 bp, Arabidopsis thaliana columbia
tttaataatagcattccaaattgcaaaaactgattggtaacaatagcattttacaatttcttgttaccataaagctttggcatttgtgtctagtaagttctctaggtaatgcaaaagagatcacaccaacagattgaagatatgtgagacactcccataaaacattgtagaagtttcagattaaatggttttgagacaactagctaagcagaaattccctttttggtcttcttctcaacgattttagttcccaatgttaccattaatctctttaacacatttctctgtgtgcattgcagtgctctcatgacctgtctctacgtgtacaaaatggagcatatgatctcctccactactgaatgttgacatctgaatttgtcaatattatctgttttgagtagaaatctaaatttcttggtttaaatatgatttatattatatgatggaatcaaggctatctctgttcatcatgaagcaaacaatcctgtacctcatttcgatccctacagcgatgtgaatgtttgactcacagat

SEQ ID NO: 31985 - DNA, 626 bp, Arabidopsis thaliana columbia
ctagaggatcccctttctcttttattttctttctttacctcttaacactttccacgcattaatacacaaaaacaaaaacacagaatccacaatattgtgtgtctctctctctctctactagctctccaagtttagagaaaaatatatcaaaactcatttcttgatcttacaagagcttctcaattctgaataaccctaagtgccataaaccattttcctatatgttgtcgctttatgttgtgattattatataagcttataatcttttatttggtataacatgtgatgagatctcctcacatcaccatttcacttgtcttcttgttctttctttttctaatcatccaaacccatcaaagaaccattgatcaaactcaccagattggctccaatgttcaacatgtcagtgacatggcggtgacttcgcctgaagggaaaagaagagagaggtttagagttcggcggccgatgacgacatggctgaagggaaagatgatcggtgccaatgaacatggagtcccaagtggtccaaatcccatctccaataggtagagaaatatttaactatagagcttgttgtatgaatatgttacctagtatgatagtatatatctttgcttatgaga

SEQ ID NO: 31986 - DNA, 689 bp, Arabidopsis thaliana columbia
ccgtgaatcattaaatcggagattcagtttgagtgagaatgacacatactagccgaagttgtagaacacaatgattaataactgtgtggtcttatcatactactttgagggtgttacaggatctcataagacttatcaaaccgcatgaccagaaaaatttagagcaactatccaactaatatgaaaagagggagggtcgtaccacggcggctgttctttgtggtactctataaagttgccagcctgagactttggttccggcgttagaaggacgatggaaaagagacattgagttatctgctgctccaatgcctaaccaattttcaccagcgttgattgatagtatagaagaactatggagtgttatgtttttcacgcatttaatgccgcctataaaccaaggaaacaaaaatattaacggaatggttggtgcaatagttgataattgtgtttagatccaggttaataatgagattctcaccttcgtcattttcccaaaagcgtacaacccatccgccgagcctgcaagaaaatagacagcaacgcactaacgtaagctttgatgttattttgtgaaaaagatgctacttaataaatcttttgagaactgatggtagatgaaatcagcatggacctgtgattattcctttgtcaaacggggagtattcacagattgtactggccagcat

SEQ ID NO: 31987 - DNA, 489 bp, Arabidopsis thaliana columbia
aagcaatgtgtaatcgaatcgttccactaacaaaatgcttaacaacgaagggcacaaacattgagcgaagagactacagagacgttgaagaagctaagaagatgacaagtcgtacggagatttttaccttgacgcgattacggagaaacactagttctgtttctttggcgatttcagagtctcggtcatcgccgccgggatcggattttgcgtcggagatagtcatgaatcagcctcgaattttaagatggatacacgaatgacggcgacgaaacgagattcgacgccggtgaaaagagccaacgagacggcgacgaaacgagattcgacgccggttgaaaagagttcaacgacggggacaaaacgcggcgtcgaagagaaaatgtgttgggattagtcaagagtctacatatgtttctctatttacatattagtcaccataggtattcatatttctctgaaaaccctcttatggtattggtttttttt

SEQ ID NO: 31988 - DNA, 566 bp, Arabidopsis thaliana columbia
gagcttctgagaaagctctgtctctgtagaactgttgtgaactcttgttaagaattttctgagggcgagaatcacgcgaagagggctctcgagatgtacagcgtgaccagcctctggaatttcaactatctcgatgatattgtttacgctcttcttgcttttactcatctcgcggtacattctagtagcgatttgcttgtatttgacatctttctccccgaatacgagcgagatatttgtatcacaatcctccaactcttcccacaatgacctatttttcaaaggggacaatatcattatagtcatcagacattatcccatttgaatcaaattcatgatatataaatagttgcaaggaccatgaacttacggttgtctccactgcttagatcagacaggagctttgcaacactaggaacatcaccatgtagcaagcggcttgcagcaattttactaaaatggggatgattctcaagctagtcattgcaaagatcgctcatgtgagtaatgagtttaagtccggggaacgaaaaaatagaaagtacaaaaagttgtaatgtctgaga

SEQ ID NO: 31989 - DNA, 513 bp, Arabidopsis thaliana columbia
tatagactagataggactttgtgagctcgaatcaaaaaagcacttcagtcacacgtttttcaatttctctcttctattttgttctcagaagaagaagaatgatggatgaatttctgggcatgatttgatctctctagttttgtttctcttcctttagtaatctcctgtcaaatcatggttttttacaaaagatagttcttgacttctcttgttaaaaattcgttgcgttgtcgtaaaatttcccttttttaacttatgcctacaaagtgtttgcgtatattccgcagagagaaccagaaggtagctcaaagaggtaaagagaatgtctcactgttgttaatgtcaatgaatttgtaaaaactctttttcagatttttcttctgtccggatgagtttgtgtatataagtcttcatatccacattgttgctagtgttcagctagaataatcaatttggtttgacttgtgagtgcgcttcgcttagatcttgattcgtcttctaatcgcattgact

SEQ ID NO: 31990 - DNA, 548 bp, Arabidopsis thaliana columbia
aaagaaggaacagtaataccagtataccacacgttcagaatcaaataaaaaaacaaaaaacaaaagcataagcacattcatttcattaaatttagattgtcgaattagaaacgtcttacatatcataagccataatatcaccacaaatccttttttttttttttaccttttactaatatttgaatacccgagagagagatatctaccaattctgtctgtcttgctaccatcttctttccaccattccaaaaatcaattatccgccacaagagaacccaaatccgctctagtacgagttgatgctggcgacgtattcattgcctctacggttaaaagaccttcctcctcctccaggacctcgacctcccctcctgtaatcatagccatatccataacttcctcttcctctcattcccactcccacattcctatttccgtatcccacgtttccatttcctcttttacctgttactcaagcaaacaaacaatcatcatcctctttctccacattaccatatcaacgttttgctactttgctcactcttgat

SEQ ID NO: 31991 - DNA, 588 bp, Arabidopsis thaliana columbia
tagagttttcattgggcgtttaacaaacgtaattatagaaataactttttaagtatatagagttttaatcattttttaaactcacaacttcaaatttttgacataagaaaatacagactcaaacaaaataagaaaaaacccagaaacataaatttttgccctagtataatttcttatatttttgcgctagttcttatatttcttctattcagttttcatgacaattttgcgcaaatctaattaatggcctatagagttttcattgggtctttaacaaacgtaattatagaaataaccttttaaatatatagagatttaatcacttttgaactcgcaaattcaaattcttcacatcaggaaacacatagactcatacaaaactagaaaaaaaaacacaaaacaaatgtttgcgctagtctaatttcttatatttttgcgctagtccttatagtttttctatactgttttatgaccattttgcgctagtctaattaatggcctatagagttttcattgggcatttacaaacgtaaatatagaagtaactttttaagtatttagagttttaatcatttttgaacttgcaaa

SEQ ID NO: 31992 - DNA, 514 bp, Arabidopsis thaliana columbia
ctcactacacatatgtttccttgccatagatcacattcttggatttatggtggacaccatttcttggtcaaaaattcgtaggtgttagccttcagtgtcattgaaaatgctcgttcatggctattttcgacaaaaatgggggttgtgtgacattgatcatcgaccaaaggctcgtacactttaccccacatatgttctcttgccatagatcacattcttggatttctggtggagaccatttcttggtcaaaaattcgtaggtgttagccttcggtattattgaaaatggtcgttcatggctattttcgacaaaaatgggggttgtgtggccatttatcatcgaccaaaggctcatacacctcaccccacatatgtttccttgccatagatcacattcttggatttctggtggagaccatttcttggtcaaaaatccgtacgtgtcagccttcgatattattgaaaatggtcattcatggctattttcgacaaaaatgggggttgtgtggcattg

SEQ ID NO: 31993 - DNA, 566 bp, Arabidopsis thaliana columbia
  unsure (1)..(566): unsure at all n locations
caacaaaaaaaaacacaattttaagaactcaatcagaatcaattatgactataacctcaacaataacactaaaaaaaagagcttaccattaatctacacaataacttaaactggccatggcaagataaatgaagttcaaagtagaatgaaaataaagagagaatcaaatccagtaatccattgctgactaacatgtaggtgagtgaactgtgatgactattcttcactaagaaaatccaaaatgaaaaatcttctcaaaggcactaaaaatagaaattgaatcgggcaatatctacataactaacattaaacagatccgatattatggccaagggacttgcaaaccaagtcgagattacccaaaatagaaactaaaaaaaaaactaaataacaaaatcgaaaagaattaagcatgtgagaggacaagtgatgacaccgaacctgctctcggaagtcggaaaacgtcgccggaaagttttataacgaagatagttcttcacatagctagcgagcgaggttttttgctcgttncactctctttttttttcttgtgaaggaaagagcga

SEQ ID NO: 31994 - DNA, 543 bp, Arabidopsis thaliana columbia
tagtaacggccgagccttaaaaacttggaattttgaaaagaattaaaatagaggattataaggagacatgaatgtaccagaaaacgtggattggctggagagcagcgtttttgaataatccgtgtcgataaaaaatctgccttatcaattaatttcatttaattttggattctttttcatgtgatgtgtttcctttgatgatcaaagtaaaaaaacaaataatcaaatgacctgtttttttagatttgtagatgatcaaatggatattatttttgtttttctcgtagatatacaaagtttttttttttttttggttcctttgtctgtgacgatgacgattgttacgtggtgagaggatcaggatatagaaagggtttagatcttttttgtaaggaaagtcaaatttgggtaaggggctaatgactctacacttccccccaaaaaccttaaagtacgtatttttcgttcttgaagttggctttactcttccctaatctatggaccatgacgaatgtctgtttaagcgccacgccatatatatat

SEQ ID NO: 31995 - DNA, 600 bp, Arabidopsis thaliana columbia
gcaagaaaataagtgaatcaatatctggaacagttgactataattgagtttgcattagtatcatcttctttcttggtgttttaaacggacatcagtcttgagctaatcaaatgatctgtgtcccatttttacagactcaagcccaaagaggttactgccttcaccagattcttcttcacaacttgagaggcgtgatgaagcaggggagaatcagacagaagcaggaggaaagtcagagacaagaagggaaagaggaaactggtcaagaatgtcaggtctacacagcaaaaggaacagaacaataggactaggcgagctagaccagttggtggtggatgttgcagtcacagagtcgataatcagatgggcatcttgcacgcatattcccaccgctccatctctcagattgtcgctcgtctgctagaagaagaaaacgaagaagacaactgttatcagtaaaatattgtatgtacacatctgattttgtcctgcaatgtctttgtttttgtagtaaacttttccatggaaactgacccaactgtataaacaacggaaatagagtgtgattttgatcctttagagaagttattgtcgattatg

SEQ ID NO: 31996 - DNA, 597 bp, Arabidopsis thaliana columbia
  unsure (1)..(597): unsure at all n locations
ggggattgattcagaggaaaactgatgtggcgaagaacgaaatgaaaaccgagcaaagtttgaaacttggaggaaatactatggagggttctcttgctgagtctttgttgaagcttaggagagtggctaaaggagaaaccaatggtgatgtcagtgagaaactcataagaagttacagcgttagtgcgagaaagtcttgtgatggtatgttacgtggtgcttctattgttaatggctttgaaggtggaagaagctcttgtgatggtctatttcatggctctataactggtgttgagactggaagaagaagcttgtgtgaagacggaatgtttcatggcgttgaaggcaaacggaatcatcttctccagagtgatgacaagcttggtacttactcgcctgacaacctcagaaatggtatggttagattctacttgacgccattaaacagccatatgacaagcaagtccggtaaaagtaggctgatgaattagtctgatctctgattgttcagttcatgatggactatattcanactgtgttgtaattagcaattacccttgtgtgttaattatttctccactgttctatagatatatg

SEQ ID NO: 31997 - DNA, 588 bp, Arabidopsis thaliana columbia
tgcttgattactcttccatgtgaaggaaaattcctcgctatgctaataaaagcgtaagggcatcggttcttcatggatgatagatcaaggtgttgtggttgattggagaagagtatgacgagttggggttcacgtcatgttttaatggtcctccaaggaatattctaatcctaatcagctgaagtttaaatttccggtgaccaaactaactccaatagactatttccggtgatccttggcaaaaggcattcggtacaactaaatgtgggtagaaagtttcatggaggagctgaatcatttgctgaccggcggaagatttctcggcgacagtgacggggcatgtgctgaaacgttgatctacgctgcaatctccacattgcatacatgtgtcatcatattgtctatttaatgtttgcaattagtgggcttttggctcaagttgtacctgtttatgaacccatttggcgtaattaatagaaaacatgtttgccggttaaaaaaaaaaaaaaaaaagtggttcgatggtcgtaaataacttttatgggttttggtcttgggttagagaattcaaatcatgggccaaccaat

SEQ ID NO: 31998 - DNA, 521 bp, Arabidopsis thaliana columbia
ctataaaacaatttcaagttctttcaattctaatcaataagaccaataaacgaacgtactaagcatagtctacaagtccaaataacgcagtatggcacaatgtgactattaaataataatggactttagacaagtcaatggataataaataaacaaaaatggttatagaagtaaaatataaaaatttaccaatggaagggatagggttgttttcaatatcatattcgtctcttgaagtcatcaatgctggataaagaggaggaggaagcgcctcaacagacggaggcgttgaggcaacagttaccgtagctccgccaccgccaccacggttaatagtcggagctctgacacgtggacccatgaaaagagctagttcttgatagacttcttcgtcaaaagacgcgggaagtcgatgttgctttctctcgtaaggagagagcctgaagtaactcttaccgtatttgtcctgatctccacatttttcccattcatacactttcgtaaactcaccaagcatgttg

SEQ ID NO: 31999 - DNA, 619 bp, Arabidopsis thaliana columbia
  unsure (1)..(619): unsure at all n locations
ataggtctttgtttcaaatttttggtatatttggtaagtttttgattatttgttgttttgtttagtttatgtaggtaacacgcatatcaagtgttaaagagtcaagatcacaaaaagttctatcgggtgatctgggctgctttcttttgtaatctaattgcagaaactttgctctgacttggatagcttcgtaaaaggttcaatctttctccgtttttcatcaatgagtagtaactaatctggaaatttgttgggagagaaagggcacattgcactgctattgctagagaacgtttctgcatccatgctggtagagagcatgcgtggatactgtgttttgggtgatgccctgacaaaattagttcccgatgcattcggcgttgtgacgatatgtctagtcgctctgctagttcttttgggtctcctttgcatcgcttactcgttctatttccagtctcacgttcgtaagcaaggctatattcaacttggttacttcagtggtccctggattatccgaatcactttcattctctttgctatctggtgggctgttggtgagaattttcgattgangttgttgaggcgcacagaaggttgttgagtgggttggatctgagat

SEQ ID NO: 32000 - DNA, 435 bp, Arabidopsis thaliana columbia
atcatagaggatccccgagtggaaaattcgtattaaaggatatgccttttggttgttcatttgcaggaacttgttatggagataatctcactgaacgttgtgccccagtgctctgtggttacttggagtagtaaattagcaacgaaaagattggtcccaaatcggtcaagtttgttattctcaggggtcaaaaaatccagacttgtgattcgaagtggaaattccgatggttatgttgttggtgagaatgatgacttgggtcgtatagccagaagaggagaatcaacgtcaaaggttttgattcctggtttgcctgatgaatcaaatggtgaaattgctgctcgaatcagtcattctcactgcgagtggaagcccaagcttagagtacattatgagaaagccggttgtgacaatctcgatgctcctgcggtgttg

SEQ ID NO: 32001 - DNA, 590 bp, Arabidopsis thaliana columbia
gttgaaacaagttgtaaagtatcctttgctggagtttcggtggtattatttttccaagatgaagtcaattggaagggtgtttcaacgcggattcactacttgggtgccgaactcagagatatttcggtctcttttcaggtaattaccttgatgaattgtgtttccttcccctcactagtatctgtgctcgagtttcttacaatattcaataaggtcaacaggtatgccttcatgatctgaggttagaaggagaagtgaacagcatggagatcgccgattattgtcaaggtggaaatgttgttgacactgctaatgctgaatctcagacttgtttgattaaggatttacaagccaaagttcagactagtcttcctccctttgcctcttctgatatgcattctgactctgaaagattaagcgagatagtttctgatggattcctctttcgtaacaagggtttcgcagtcaagacattgttggttatagctgcagggggcagtggatttcagtttactgtcaatttccaatcatccaaagccagccatagaggatacactcattctcattgagtttaccccctacacattctg

SEQ ID NO: 32002 - DNA, 650 bp, Arabidopsis thaliana columbia
tgatctagttcacatcgtgtgttataagagtgaaacatcgtgcatcaccaaaggtgatctgatttagattttgtatatctcaattatcaagttacacggattttctaagacaatttatttcatatacagcatgttcttatcaaaataaaattaaaatatatatacaccatgtttttacacacatagactgaagaatcaaataatactaaaagttgacgatcgagatacacagtggcgggcgcacaccgcttagagttgcacgcattgcgattggacagacaacctaaattggctgtacaatcagaatttttgtgcagcttttacgatttatatcttcttttttttgtcaactatcatctacatataataattatatatttataggataagatacgaactttcgtcgtcaccttcgatgaacaaatattataggttgatcaaaagcataaacttaacgagcagccatgtttgagaagtcgtaattggaatgttgtcattaatagcttgaaagaaacatgtaagtaacgcagtgagttcatgtttattcttgtcgaattccttattgagtctttacaaaagaaatgtcatggtggacctttttggaaacaaggtgggtacatttgcgtatattttttaacaaagcagaatat

SEQ ID NO: 32003 - DNA, 639 bp, Arabidopsis thaliana columbia
gtcaattccacaaccaccaacattcacaaaaatgaaaagcagaggaggatagtagcttataaacaaaagttctatacaagatattataattcatcaacaagaaccctgatttcccagagcaggaagacactaacaatgtaaagctcatgacattgtgtatatctgagctagttattagtcatcatgtagcaattaaaaccatttactaacagaaagtccacaaagccaaatagcaaacatgaccaacctggaatcgtcgttaaccggagctaagggattaatcttaggaacatcaacctccgaatcgggtctctcctttcgcttccctgcaagtttgttgtgtgagttaagacaactgagaaaccaaaccagtctataaaccctaaacccaagcttaaagttcgaatttttaggttgaatgctacctaatatggagctgggattttctgggtttgaagattttcgagtgttgccatgagaatcagatttcagtttctacaaggaaaaataacgggaaccaaatcaatggctgaacaaaagtctggaagaaaaacaggagaaattagctaagagaagaaagacatagagactaacttgttggaggagtgacaattagggtttaattgacaggtttaggag

SEQ ID NO: 32004 - DNA, 544 bp, Arabidopsis thaliana columbia
cataaataaggatgaggaacaaaatagggtgagagaactggaagaaaaaaaaaggagacaaaaggaaagcaacaaaaagcagtttcgctttatcatcggagagttgagcccaccgcaccactcccaatcacgtgaactcaggtccaatcgacattctccacgtcatttttcccatcccccgctttgcttaaacaaacgagcattgtttttgttaattacataaactacttttgtagttccaattcttactagagataaacaaactaattatggtgagaaagacacgtattctaaggtaaaaaggttaggtttggtgggtctaagtttgtaatccttttcccaaaggggtcaggttgactttcaacggctactatcagtttccacatgcactagccagtgtagccaaagtactattttgagcaaattaagcaccaaaatccaagagattttttgaaccaacaaattattatgtatagggtgggtcgattgtctagtccaaattcgaatggacgcggtgctgaacgggtctagccgtctaggtaca

SEQ ID NO: 32005 - DNA, 232 bp, Arabidopsis thaliana columbia
tatctcggtgaacctggccaccacctggcgcaggacttcgcgggggtcggcgaagaagggatcaccttccagctcatgcatggtcatcagcagttgcgcggtcggccgcttctgccagggttccatggagagggtgccggggatcgggtagcagatccggtcggcgtcgcgagtgtcgagacccaggccggtactctctacggtggagccggtgatatcgagggcgaacagg

SEQ ID NO: 32006 - DNA, 118 bp, Arabidopsis thaliana columbia
tggggagtttcactacatctgagacaggcttgattttgttaaaactcccaagttccatgtttggccacatcaacctgagaccatgattagagttagaaaagagactctgtaaaagatg

SEQ ID NO: 32007 - DNA, 541 bp, Arabidopsis thaliana columbia
gtcttcactagctttaacattcccattaccataagttcagtgaagtagaaggataacacgagaagctaagagaagaaacataagattgaaagtgataacaacaaatctgattggtgtatgtatcaaacacacgaatctatatgctacatgtgccacatgagtagcttcaaattggttgctcatggtcaaaaatatgatctcttacagttaaaaattacgaaactcatcatccacgagtgggagtggtttttctaagttcagtttccagctttgcagaaccgtcaggcaagtcatagaattcagctaagtatgtcaaagcttcaaagttgttgttgcataccttccacagtgcagaaacttctcctttagaaacagttcccaagttttcacaagtctcaatgaattcaagcagctttgaatagaaagcatcataattcatcacaatgaatggaaccggcaatgcagatccaatcctttcgagctgaatcaatgccaaaatctcaaacatctcatcgagcgtgccaatgccacctggaagtgc

SEQ ID NO: 32008 - DNA, 520 bp, Arabidopsis thaliana columbia
ggagtagtctccagaaacgatttttggtggaattcattttcttagtgatgataactgttcggttgctttcgatctgtttggttattctgtaacagcgaatttttcattttgaagaagtcttgtaattaggtctgctttgtcaatttggattaaacgattgtttcattctccttctccatgtagttatatgatgcttagtaatcgttttataagtattatgctgtagattgtttatcatctacaaatatttatgctcgcaagagttgagtcataaaggaggattttaatttacaggtgacattggacttcacagaagatgaaatcaaccatctgcataaatttgtggaaattgaaaccaggtatttctccttcttcacggatgagattttttttttgttgcggactgttttctgatagtaaatgataacaattcagtcaactatggcaatgattataattttcagattagattattgcgtacaagagtttcaagtgttttacattggtgtctgatgtgtta

SEQ ID NO: 32009 - DNA, 468 bp, Arabidopsis thaliana columbia
gccttcttcaaaaaaaaagttttaaaaaaatacagatatagtatgaaaaacaataaggataaattgggacaatgaggtaattttgcatacatcacttattttgaaagagaaaaacaatgtgaatataagagttaaatgaaacagagaaagtacattgtatcaaatatcgtctgtttttaaccacattattagtgaaactatttgagcaacggtatatactatattccaaggtactaaaaatgttggcaaaaaatattctatgtgtaagtatcaataaataatactgcgtagggtgtgcggacactagccgacataacagtgcatagaggggtccgatacccgcagagagtgttgtagtatgcttcactaatccaactttttgtgaagcgacaaaaagacaagcaaaaatggtggcttgaattgaacctttctcttgtaaatttgatttgaattcttgttagcagtaac

SEQ ID NO: 32010 - DNA, 474 bp, Arabidopsis thaliana columbia
  unsure (1)..(474): unsure at all n locations
taatagggtctatagagacttttagcatcaaacctggaatctgttatgtaccacactaaagcccaaataaaaatagaccttgttcaacgggcccaaatcaggtggatttcagtaagagagtccttttgaggcaaaagcagagtccatcaccatgtgaagtacataattttgacgttataatacttaaaccatttgaagttggtttcatcacataaaaagtacataattttatctagcataactggttggggtaaataccatcaacttagtttaggcgaattttgtatcacctacttatattttcctagtttagatgaaataatgtttgtttttaattgtttaatattagtataagaacataatantacaattgtaatgcntagtattaaatataattccttaggaaagaagtcaacgaagaagaagcaggagcaaagacttgtggcctgtaattagttatggtgtcactttgca

SEQ ID NO: 32011 - DNA, 483 bp, Arabidopsis thaliana columbia
caacagactacgtacttcaaatcgatttaagtaatttatctacaaaattttggtattgaggtggatgggaaacgaatgagattcaatcaaacttatgcttgaatcctttgattttatgccgtcatggctagcattcgcaaggcattcttcgatcccatcattaagcaaaagaagtcacatataggtaagcttcatcactcgaagatttttggtgttttcaaatatagaaataattatttaaagcaaatccaattgtcgtatatactatatacacccgtatgtgtgtattattgcgtttcctttttgtaacacttttataggtaaagatataaagatggattaaagaggaaaagtttttctttcgtgtgtgattcatcaatttttatgtctctcctttcaaacttttctcctttgctttgaccaccaataagacataagcatccacaacggctattattaggagaccgacaatcctagtaccac

SEQ ID NO: 32012 - DNA, 480 bp, Arabidopsis thaliana columbia
cctcccccttgttttgttgccatggatcttcggagctgcaagtaagaattgttctgaacgttatatgtactgagcagttcttggtttctcttgttttggataataataactcaaagcttttgattttgcatttagttatccacgcaacaaagcctctcaacgataaatgccacatgggtcttcaatggactttcccagttgcaggccttcatgctctctatgtccttgctttaattgcattcacaagagcagttcgacatgtagagtttcgttttgacgagcttagagatctctggaaaggaattctcgtctcagccacttcaatcgttatatgggtaacagcgtttgtgttgaatgagattcatgaagagatcgtcttggcttcatgttgctgcaagattagtgcttttagtcacggtatgaaagctaataccaggactgttctttatatttgcagttggaataccttgttaacagact

SEQ ID NO: 32013 - DNA, 575 bp, Arabidopsis thaliana columbia
gatctaaatgtgtttttttcggcttatcccattggctttgaaaaagttctctagtttgtttctttgtactaggagcattcttaccattctttaaacattgggcagtgaaagatattttcttggattagtattctgcttcttgtggtgttgtgtgacactcctagactatgttatttcctgttaacactgtctttgtaggacaggatgtgagaaatatgctgtttctgcaggataccctgaatttaccagtttaccggaatcatatcagaaacataaactcttatgttacaaaattgtaatggattagttgatgcgcattctgtgttttttcagttgtaaatttgcagaattgttgaatgttgattgctcgagaagagtcttgtgagtgaattctatttcttaatatatctgattatcgtttttgttgttgatttaattagcagatggggagaactaaggagcaggcaacattaactcggtatccacctgtcctaggaacctgctaaatcaatgatataacaaacaccccaggaaaaaggatatggtaaggtctgaaaagaaaccttggacgggtg

SEQ ID NO: 32014 - DNA, 522 bp, Arabidopsis thaliana columbia
cctgataattgagtagatgattgctgaggatagggagaggaaagtgtagaagtttcttgaagagaatccaaaggcttcaagggtattgtatgctaagaaaaacagagcaaaagcagaggcgtttgcagagagaaggaagaagaagttgcaaacgtaagttttgagaagccggagtagaaaacagaggaggaatctgcagagtgattgtttgatagaagtttgatgacgtaagctttggataaaaggaggaatgtgagggagaaaggaagagtgaataaagaggaagatagggtttgtgagagtttaaggcttaagatgttgaagaagtcatgagaagaagagaaacccgctccgcggaagagcatgttaagcctcatgtgaagggtggaagaggaagaagagaagaaaggctgagagatgaggagaccggcggagaaagggaggccacggcggctgcggtggtgaccaggtggtagttttggaggaaagtgtgaattgaccttctcatgatcttgcttggat

SEQ ID NO: 32015 - DNA, 601 bp, Arabidopsis thaliana columbia
taattaaaagtgtttatttaaatcaattcataaatagataaaaatcaacataaattaaaaagatcgaccggtgtgttgcctaaaatgtctaatgtaattaggacgaaccttggatcagcaacaaacacacaattaatgcagataataaatgagttgtatacttgtattagcttttttaggtatatgaccgttcgacagaaatagtagtcgtgtgaatgcaacaatcgaatgagttatagacacacaaaaagacctaacgtattcagattctataaaaagatacctacctggtggtagtaataaatgacattctatcaattatacgatctggataagatttggtataggagctatatattaatggaattactaagttttctgaaactacatgtcagaaccatttcatgcaaagaaagttgattacgaaaaaataaagttttatatgattaagaaaattaatactttgtaaaaaaaaatgttaaatatggatttgtggtcttcctcacaccagaccaaacatcatgtccctaactctggcaaaatacctggcgctcgagctcgaccaggtaaaggaggacccatatccatgaagacacgtggt

SEQ ID NO: 32016 - DNA, 531 bp, Arabidopsis thaliana columbia
ggtgttacattgtcgaaatcttggaatctaaacaactagggattgtctggcacattgtggaaacttgacttaatatagtggaataagcaacaatttgctacttcacaagttcacatacatattgagatctgtttagcatcgctgattttttatccatatacgaatgaagaatgaataacataaagtcatgtgtattgtgctaaaccgatttaccatagtaaaagtcctaaactcgattaacaaacgcttaaaaagtattccaaaacgattgaaaatcggtcttgaaacaatcacaaaattgcatctgaactagaggctctacacaatacaccaataaaaataataaagggaaggctttatggagagagagagcgagtaaactagagtataagttagttttttttttttttttgaaaaaacaaaattgagagtagcagaaaaatctctcccacgcctattacctaggcccattacccgaggcaccatggaaccaactaatacccagatctgaacagtgcaatcctcttttat

SEQ ID NO: 32017 - DNA, 376 bp, Arabidopsis thaliana columbia
gtaatacatattgttgtcaaaggccaaggcgtcatcagacaaccatttgggcattttacctgtgtagaagggatccattgcctcatgccggtcaaaatattcattcacagacttgccacctgatctctataaacagttagtcctctctgggtgattgatctcgaaagaaaagacagtggcaaagatgataagcatatgtacatgttggtctgcaggccaagagcctcatagtcttgtacatgataagtatcttggtgataacatccagtagcactgaacacagtcttaaaagagaagacagagttgcaggacggatccattgcctcccatatgatgtagtgattaatgtaagcagtgcccgtagacgtattatact

SEQ ID NO: 32018 - DNA, 489 bp, Arabidopsis thaliana columbia
gtgtgtgtatcttttttctatgagactatggatttagatctttcgttgttgctcttgtcgtatgttcccggaaaatgaactgttgtgaaatttcctttttttattgggttcaaaatcgtttaaaatataggacagttcttgcatctcatattttacttcttggtatcgctatcacttggatgtgtgctgtgcaggattggggatactttgttagtctactcggtttgatgtttccctagtcatttttttctttgacttggtaatgtggatttctaattggtggctgaagttttctttcctgtcttttcctttcagctaggcgattatctttcggatgaatttcatgggaacgatgatggcatagtgccagactcagcgtatgaggatggaggtcagtttccaattctagttagtaacacgaagaaacgaagagatgatgacatgggtagtggacgaaccacttcagagtaatacttttatcaagagaga

SEQ ID NO: 32019 - DNA, 503 bp, Arabidopsis thaliana columbia
aggtaacttagataatatattttctatataggatctttaacaaatttgtaatgatactatattttctatgtagaatctttgggcttttcaagtcttatgttagaaattgaaacaacccgacccatttttttttataaatataattaaatattcccataaatatctaattaaaccaaccaataacataataattaaaccgcaagtcaaaaatactattttatgaataaataaataattcgaccaacaaaaccaagaataactgacaatcctaaccggggtccaattacccaaaacaccaaaaattaaacaaacgaggtcccagatctatcctctcttccttggcatgattccacgatcacactttatctttacctgcatcaacaacacaatgagatgcgtaagtattatcataaattcttagtgaggcgatctccgatctacgagctatacacacaagcaaataaaagggtataatcacgaatacaatacaaacaaaccagtca

SEQ ID NO: 32020 - DNA, 520 bp, Arabidopsis thaliana columbia
cgactctccagttctcctttttgttcttctgtggaggcagccactggactggtctccttctcttcaccggattcatccggttgtgcaaactgatctttatcttcctctttcggttcctctccgtggtcagaaatgtgtacatcggtctcaaccttgacaatctcttcttcgtcttcgtgagcagacgcaagaggagaagaatccggggaaatctctttacccgaagacttcttgggaacattcccagaaccttcctttttgctcttggaagaactgttaccgcttagaccgctcttctttacccctgaagatcctcttgaagccacaggaggtgatttaccgtactgcttcctctgagacctcccctgctgcttccatggaaagatgtagaacgcagaccagtgacaggcttctcccttggaaccgcgggtttgtctcgcaggtgtgggtgggcaggagaggtattgagagatctatgggctgatgaagttgatggagaagtcaaagacgaaggaggatg

SEQ ID NO: 32021 - DNA, 580 bp, Arabidopsis thaliana columbia
gttcatgaggttaatgtctttttgtaatatggagacttacctttacacgattgcaattatctatcttctttggcattggattcccaaaattatctattttgaccgttggctatttttcacctaattccggttttacccctctccgtgatccgtgcgttagcatgggctctctctctctctcacgggcgtgacatacgcgtacggtgagcgatgccacttctcgcacgtgtggcctttggttacaacacgtgtgaatctctctactcgtaagctttttctggctagtggcagtgtgactcggacggagctgacgctacttaccagagttaaacagaaatctaaacggcagattctctcatagtggcagtgactatgaaaattttctttttttcttttttcacgacactaaagttaataatgtcttattatgagatattatagacatttttttaaaaatcatagacatttcttcatttatcaatcttgtaaatttccatctctatttattagatttccttcgtcacaaagctgaaacgattcatgattcataataaatttcataatttattgatatgtatgt

SEQ ID NO: 32022 - DNA, 535 bp, Arabidopsis thaliana columbia
ctatgttttagtctaaagctacaaaaaaagttaattgttgtatagcttgtatcgctcagcaactcactgtactatctcttgattcatgacatcattagttgttgcatgttagaacttagaagaatccagaattcaaattaattaaaccaaattgtccttatccaacctaccatgttgccaaatatagtattcttttctactaaaaatactactactagtcacgttgcaaaatttccttttcaggccacaatttaatgaaatctcttaactactactactctttaaataatcatatcgttaacatagcgttattaagcaacacaacaatcaattattatgctttgcaatctgaaaatccaaaacacatagaaaaaaagaaaaaaaatggatgagaccaagatcccaaagaaactgcaaagcgatgacgaagaaaacataagtttgatttcttcacttccctttgacgtagatttcgacagcacgaagctcttcaaataccaaggatgttggtacgacgacaaaactctgcaaggag

SEQ ID NO: 32023 - DNA, 402 bp, Arabidopsis thaliana columbia
acttgctacagcggttacaccaccatcgctttctatatcacctcctatagccctagcttccacctcttttatggcagccaagtcggtggtttctaccggtttacggccgacatttatcgccgctgctttgagtgcttctgtcaatgtcgttgacctcccgactagcgcttcagccgccgtggaaatttgttctgttgtgcctgcatactgtttcaaaaggccgaacccgaacatcatacgatatcaacatggtcacgtaaaatatttcaagttaaaagtttttttacattttatcaccgcggtagaagttatacaattcctactatgagctagcaatcggtaaaacggtaaattaaagggaacaccaacaaaacggtacaaaatctttaccaatctatgttt

SEQ ID NO: 32024 - DNA, 586 bp, Arabidopsis thaliana columbia
ccgaactcgtattgctatcattgactaaattttttttggttagctttgagcgtatatgctcgtggcgccttaagaattgatttagagttacttacgttagtttaaaggaaagagtatatatttctcttggattttcttcatatctgtttcagctagcttgacattaaaattttatttgatcatgttcttcacccctaaaattatgactatccttctacacaaactggcctctgttttgagtttcttcttctacttttttcttttaccttacaatttatttcaaaaattgctaaattgtctagcagaaaaaagattataagactctttgacttatgatgttggtacattcaagcatttcttcatgaaaaagcggcataaaaattaaaagatcagaaaagtgaatatcatattcaggattgtagaaggatataaatggcatggcaactgcatcttcaccttcaacagtgacttcatccgatgaaagaaggtcttcgccacatgagtctccacctaatcaatcgacatgatctaatcaaatcatggcgagtatagttgtgtccatttttatagcttaattctatatgtt

SEQ ID NO: 32025 - DNA, 565 bp, Arabidopsis thaliana columbia
ctaaaattttatccaatgaggtaattacctaaaaccctaacctgtcctaacccaatttttttggttcgagcatcgggttgggtatcggatccggttgttttccccaaccctaaatctgggtaatgacggggtcaccctctattgaaggcgagatgtgatattggttaagcacccacaatcgctaatgatctttcatgttataatttccttctaaactgtttttagattttgaacaaatattatttaacaaaataactaaaatagtaaaatttaatatccgttaaaattggaacaaataaaaaatagtgcattagaaaaacaatttggttttatgcaacttaaattaaaacaacaaaaaaacaattaattggtaaatgtgattgtcacattcaccaaattgaagattctgttttaaaggagagaaccaaaaaaataaaccatatacactcaaaaacctaaatatcattcacaagccttaccaaaaaaacaacccctattttagttgttacttagtaacaataatcaagtttttttttccgttcatagagacaagctaactctatat

SEQ ID NO: 32026 - DNA, 570 bp, Arabidopsis thaliana columbia
cctcttgttttttttttaccctttcaatttgtttgatattttaccgtcttattactttgttaattgtggactataatctcttctttataccttttacaatgattcaaattgtctagtctcatttaggttatatatatatatgatttgataccggaaagcgcaacacgaacgcaaagagcaaatgaccattgggggaaatttcaatagaagaagaaacacatgtatcatgctcacatgggtttcatattcacccaaaatcctccaaagtagaagaaacatgttgccactgtatatagtaaggcttattggcaaaacctgaccttacctaacatatgttttgaaaatttcaacaaaaaactattatttgtttagaatcattcaagcaatatgttttgtaaacgaccggttatgattttatgaatgcgtcaatggtggcacctagaagtagaatcaaagaatccatcattgattaagctttgcatgtcttcttaattacctatgacgatttagattcgaataagtaaaatagacactaccattcgcaaatggcccattagctcagttggttag

SEQ ID NO: 32027 - DNA, 401 bp, Arabidopsis thaliana columbia
ataaagatttaaatatatgttgctaatgattttagaaaataaaataataatattaaaatgtgaattggtttattttccacataagtttgatagaagttcaactattaacacttcatctcgaaaacacttttatcattgcctagtttttgtgtgtctctttgttttaagttttttaactgaattaatttgatacaaaatgtccaataatagccattggtgattcagtctagtaactcaaactgaaatcttggttgactccaaaatagtaatggtttgatctttatagttttgttcgtttaattttggctagtgattgcaaattagcaacagaggatgtttgttattccgttgatgatttagtacacattcaggttgattaaaaataataaaagaacactaca

SEQ ID NO: 32028 - DNA, 875 bp, Arabidopsis thaliana columbia
gtatatatgatggagcattatgaaacgttggtgtcttccacaaacattgttcaaaaccgatgaaaatgaaatcaactctcgaagattgacttttcatgcacgtcttaaaataagtttttcgcttcttgaaaattgctttagtgcttttattttgtttatctcagcttgtatttaattctaaagctgattagtgattactagtacattttgtgagtgacattttcctaggattttatatctccggtttggctaaccgaaccgaccatatccattaattaatatattttcatttggcaaaaaagtaaacgaagcccaaacccatttagcttttgacttgtgttgttcttcgtcgctctgtcttaatatccctcaccaactcgtttcatttggggacaagcttcttcgattttcctctcagaccaatcgggctttcgaatcccatcaggttagtgtcgatctcaaagtagatagtcttaggaagaatcaaataacaagattgattctaacctaattcttcggtttctatgtcgtcatcatatggccataaaagatttaagattgggaatcgaaacgaattgtgatgtttatgtaactttatggagtggttttgtcgagaattcgtaaaattcgagggctctgtgcaattgcctcacaaccggctctgggtttcttaatgtgcttgtgatataagattttttgatatgatggatttggctttatgttaagtaaaagtgtgttttgattctccaatcaaatcctgtatgtgctttatttcatctctatgggctcttttttcgaagtttagacagaatgtgtgttgaccaatttacttatcacacttagtagttgacattcacaaaaaaactgtattattg

SEQ ID NO: 32029 - DNA, 414 bp, Arabidopsis thaliana columbia
ctatatttcgggtggtgttttcaaggattagatgtttggttttaaatcttctccatcgaccattggtattaatgtctcttgaatgtgtatatttcgttttgatacagtccactacacattgctctagatttttcagacaatggtggtcgtctctttgcggactctcttatcattatgaattcaggttgttagtttgggatcttttggttaaggttaattgtttgttttaaccattatcaaaaaaggttaattgtccatttttctaactaattttgttgcctcgtcgtccactcagatttttagttggaacaagaaaaggtagaaatcataattatccagggccatgacttaaaggcgatgaatatatgagtatgcaaggaaaatttcataattagccaacgaagagagcatcat

SEQ ID NO: 32030 - DNA, 312 bp, Arabidopsis thaliana columbia
taagaagataaaatcataaaatgggaaatataagcagaatacttttatttaattaggttaaaagctggcaagtatgattagtcgtacatctgatcactagcctctttcacacggcagtcgatatactgcaacattcgaacaaccaaaacaaatatctatcatgagtcatgacattggaaataactaaactccaaatggttttattcatacaagcattaaaaatgtacgttagtccattcttcttattacccacaacatttgaataagttacaaaacgtttgttaaatactcgatcatgtcacatattatata

SEQ ID NO: 32031 - DNA, 421 bp, Arabidopsis thaliana columbia
attaggcagcttgccaaattcaggggataattacaatccagcctctcatctggatttatttacaatatgagcagaaatattagaaaattctcttcagcctttcgcctccattttacttgcagaactactagaagaacacctaaaaggctaaaaagcagtaggagtttatggttccaaaagcattattgctaacactttcaacagaatatagcctaaacaattctaattttagatcttgagtcacataatttgaagatcatggcttgttttgttaatagataaaaaaattggagggattgacaatttctatgcataactttggttgagtacatgaaacaagacttcgactagttgcatattttattcagtcttcttgagagttgacttctactttcccttggatctataaagctagtgggta

SEQ ID NO: 32032 - DNA, 622 bp, Arabidopsis thaliana columbia
  unsure (1)..(622): unsure at all n locations
atacaatatgtattgctaataatgtctctcatccattgcaggttacaacacctgatgatttactacttgctgagagaatcttgagcgaggactcatgaggtatcattcagaaaatatttataaagctttttaggagttcactaaaattattacatagcttaattcattgttgatatatgtgtgtcggattataatggagtcattgtttggctcttcaggttttggatcagtttcggttgaaaagtttgatttttatttgctgtcatttagcgaacttctcaccacatggaacagttctattagtttttgactcgagagttctcagtgagaacatagtataaaatgtgaccaacaatggctgttatttacctactgtggatttatatgctttatattgacaatacatatgttcaactcatactttgcaatgtaatagaaaatttcagtttcttgagttattttggtttcagcttaaaaaaaggaggttgtgtttggtagcaagctagattcgattaatactgggattantactaagctaagttggaaacaaaatctagaaatgtgggaattgagcaatagcagcgaatgtttagggactgattaagattccaaagttttgaga

SEQ ID NO: 32033 - DNA, 193 bp, Arabidopsis thaliana columbia
tgactaggggttataccggacgccatgaaggtgatcgtcctgggcgttgccattgccacggcgagtctaaaaagttcatgccaactctgaagtacaggttgatgtttaggagtaggtatcgacacgcgttgcggcaaaggaccgagaatcggccgccggatacccgggtcgcttcgcatgatgaaggaagcat

SEQ ID NO: 32034 - DNA, 205 bp, Arabidopsis thaliana columbia
gttaaatatgtatattcaaagttgcattagagcatcggcttgtgcatctcttttgggaaggatagaattgaacgtcatcgtttcatctattcccttagcttcattgcaaggttgaaaaatggacccaaaatttggttttaattaaccgccttttatgcatttatatttttattcttttttactataaattcctatggataagttt

SEQ ID NO: 32035 - DNA, 505 bp, Arabidopsis thaliana columbia
tttttggcgggttttgcaactgaatttgtaaacatcatgtaaggattacttttggttatgatttttggtactacataaaaaggacatgtttttaagttttgcgtaagatactcctaaatgccggaccgccactgataatactgagggtttggcaaaccataaagcacatatgaaaggaaagatagttaaactatgcatacctttttgatattcatcagcggtttagatcttttgctataatgttgaatcaaaatgaaagagtgtattttggggagaagcaaatgagcgcctatttatagagtctgaatatgatggttggttttgtttttgacgacaaaaaaaagaaagaatagggtggttggtttagggttgacaaaatctcaaaaaaaacgttgtataacaagcatttgtataaatttgcaatcttctagtaaagaaaggaagataatatgctagattaatggtagtccataaaaggaaaaaatgtaataaataagagataatt

SEQ ID NO: 32036 - DNA, 631 bp, Arabidopsis thaliana columbia
gaagagggataatattaaacagaataaacaataaaacattggaatattccaattgcaagacgtctaaaaagaagtcaactttttctccaacctctgaaaaatacttttaagctttcacacttgtcaccttccattccatgaaagagattaacacaattaaacaggacccatttgcagaatttacctggatgttacataagctttccatttctcgaataatctcctaagagtgatataatgacaaaaccactattagataagccagcttaataataataacacagtacacaaattttagtttacttacagttctctcaattaagagcaattcaatgtacctactttctcgagtcgcttcaacatgtctctttggtaaatctgttgaaaaaagaaaccgcacgaagtcaaaatatttgaaagttaaatctcactcagtcatttcgtcgaacacattcagtgcatatcttattgtagaagcggtcaaaccttaaatagtgcaagactaaacaattttttaaaaagaaattgtgattaatcatgcagagatcatctgggcataagtgattcgatccaaagtctcaaactttggctgagaaacaatgtcaacaacacacaattgatgatggtaccc

SEQ ID NO: 32037 - DNA, 577 bp, Arabidopsis thaliana columbia
gaaaaataattgtgcaaactaataaatatatgtccacaatctcgccatgtcctaacaatagattgttttaaattagatatatattgttgtaatgttataattcaaattcacttgtaatgttgtaattacttaaattagataaataattcataattcatattatgattgtttatatatagattagttgtaatgttaatttggaagctccagtaaagaaaacatacgaatataagttagatgtctcagtttttacgctgtcaattattgttatctcaacttgaacttgattagtactaaacaaatgcaaaattctagtttgtaagacttctaagaatatttttgagtactacataaataaagggataaaataaagttacacacagaagaagcataagtaccattgattgaacatgtacatatatagcgaccatttctacttatttactattttaagtttcgtactcccatttctttgtacattcctacacagctggtcatgggtcttctcattattgtacactttatgtgtattactggccacatttatttgttttgtatatatagcaagctattttat

SEQ ID NO: 32038 - DNA, 542 bp, Arabidopsis thaliana columbia
tgtcactctacaaataagagacaaatatgtaaattattattgatattttaattttgtaacccgtagttaggaatggattgtacttggtgcttaatacccacatgacattatcattttaaataaagaaatgtcatagtggataattgacctaagaatgacatgttctatggatttaattcggcgcgctggtatgatgtgagattagtatttttcgtaattgttaatatactcagctgattttttttaatgcatcatgtaattgacaggagcaagatctatatgactatatgttaagaatcatgtggaatcaatcccactttttaaaataaacatgatgtatagtaaagctacacaaaatgtgttgtatactagggagatgagatcatactaaaaccatagtgtaaatctttaatggggttaaggccttattcgagggagatgatactagaaccatagtggttattgttaatgtcactcaaaaataggtcattgcatgcactattttacatcaaaaaaaattgcgacaacttgcaaacgggcac

SEQ ID NO: 32039 - DNA, 526 bp, Arabidopsis thaliana columbia
  unsure (1)..(526): unsure at all n locations
ggatcccctgtaaagaaaataatcgtactattaatcttgtcataattatatttatattcaaatccggaaatttgtatgcgttgtaagtttttttggggaagtaaaattggagtgtgatatatgtgttgtaacttgtaaaactagaaaattattttgattttacatttggtgttaagagtaagagtttttgcacctaatatttaaataattctttattaataggtggaaaactatcgaatgttaattccatgttgttggacctatatgttgcatttgtatatgttcgatcctcgtcctttttcaatgtgcagattagttcatatttcttttttataactaaaatttttaataccaaaatccaaataagtcttgaaattaaatgaaagtagtgcattcttcgcatttaaaatatttgcagtaatgaaggatctacagtattattaaatttttcataaaagaacttgaaccctaatctcttaactccatgcatgtcaanaaaatccaaccacttgattagattagattt

SEQ ID NO: 32040 - DNA, 569 bp, Arabidopsis thaliana columbia
caaagttcactaaaggaagcaagatcttaaacacattccaacattgctcctcttgtctctctatgttaaaaggttacaactgtttaatctcaaaactctaactacttgttgtctcttgagatacatatgagaaagataaaaagacaatgaaaagtcaaaatgcagcatctttctgacaatatccgagatgtgtatcatcatgcacctaagctcgaagctggactatccacggttatctcccaaagcaagaagtatcttcttcctaggtccctgaaaaagaacacatcttgtcaacatttcaaacaaagaaactcgaatctaaacattgtcttcttaatagcaaccatattaaatatggagcaaaactgaggccatgactattagtaaggtatgctgatatcaagcattgcaacaacaaatcttgtggaagcttatcaaggactttaccattggtatgagcaaagctttgaggtcatcatctgtcatatgcctaagagcatccatatcaacctgcaaaaagatgaaaccaataagaatccttgtacatctatagatgcatcaagaagaga

SEQ ID NO: 32041 - DNA, 561 bp, Arabidopsis thaliana columbia
tgcaggaaggagagtgatttgttgttatgaaggtcaaagctaaaattgtgcatcagaaagatgctccaatgcagagaatcccctttcactcgcaacagatacagttatttatgcaaacgaggtgattaaacatccacatacacaatagtggaagagccactgaaaccacttatataagttagagtgaaataaaatataggtcgtatggagtttattcaattgcagttctttgtcagtttacataccgatgtgatacttagaaaggctagcattaggcattatggtaaatgttcaaaagggcaatcgtattgcaagctattaagtaaaaccttataaacattaaagctattaagatagacacagccaaaaaaaaatgagtgacattaaggaaatggagaaaacaatacctgtaatgacgatactgaaaaagcggtctggcacgtggacgaaatgtatttacagtggaatcatccctgcagatcatgcaaatcttcagtttaagaactcacattaactttcaaaatagatttttatgctttaatataagaatttgcacaaaag

SEQ ID NO: 32042 - DNA, 313 bp, Arabidopsis thaliana columbia
caatcatgccccatcggaaagtatctaatcaagcacggtcaaggcagttgggcttggatggacaaagaatctagattctccggttagcaaaggaaagtccccaagtttcaagaaatacggaagatggatttgggatcgtgggctggacgaggatagtgaaatatatggaggcaaccggaagaactggaggggcatgtgggaggagttatggcctggaggaaagctgataatgtcatgggtggattatggttcgagagagtttggcgcgtgtgggctccagggagacagatggcggaaagttgtggaagttaga

SEQ ID NO: 32043 - DNA, 549 bp, Arabidopsis thaliana columbia
caaaaccatccaataattaaactataatcaaaaagattctgtttctattattccccaattcccacaaataagacaaagccacgtcaacacagcggtacataactgtcacgtgtcggtttcgtgtattctcgatgagccagcatatgcctcgtttcgcaggaagcatccggtaaacggtcatcatctccaccactctcatactactcaaaaaccctgtgatatataattatcacattttcttctataaattccgatttctgatctttgccctcttttcataagatagttagggttttagtcttttgtgtaataattcattgatcatgaacaagggagaagaaggaggagaagacaaggaagtggtttctcttcaaactctgagtaagaaaatggatgattttgcaaaagctagagattgggagaagtatcacagtccaaggaatctccttcttgctatggtatctcgcattaacaatctcttatgtcttctgaaaaaattgaaatgggtcttggttctttagtttgatggtgtcttataacaaaaaaagt

SEQ ID NO: 32044 - DNA, 851 bp, Arabidopsis thaliana columbia
tgttaagaagcttaaggtattgctctatgaacttggcttcttcatatctatgaatctgctaccttctcgtagggttttattagtattctccgtatttgtatgctgttaataatattctagttgattattagttgaggtggatttttaaaacttaattcaccatagatgttttcctagttctctttgccatttgactgattttccttatgacttatatatcttagaattatatatcttacgaactgaatttattttgaactatttgccaggaatctcatgcaaaaacgttatcctcccttaccaagacagatgagaatctgactgcgtcgttgatgagtatcacagctcttgaaagttcgctatctgcagctggagataagtatgtgttcatgcaaaaactcagagacttcatttctgttatctgtgacttcatgcaggtatgcttaatttaatgttgtgtttgtactggtatacatgttgcttatgttgcaggctcgacttttattctatttttggtaccaatagttaatgctttcttagtaaatctcagttgcctgcataggatcatgaatccaagggaaaatggaatagattagatttagtgttatgttgcatttgtttttgtttttttaaatcttaatctctaagaaaacaaagaaaagatgagctcaacccatattttaaggcaaatctaggttctcatggcatatgttggagttggatttcatctttatgaaagcaaacgatttttgtaatattgaaactaaaactggttttacactagttttacttgacataaaacaaaatatttgtcccatatagagctgtatggattctttatgcataacgta

SEQ ID NO: 32045 - DNA, 569 bp, Arabidopsis thaliana columbia
cgtagccttttgactcgtttaaaccacaaagctccaagaaactgaatattttataatggtgttttggcctatagtggtgagttagtttcttcaactgattactttttctccgaattttgtgctaagataagctctgacctgaagtaaaacgtcctttagtgggatatactactacgagcctcctagagacgtcatcactcaccacgaaggctttttttgttgttattcttgtcttaatgtagtacatcaatggacatatctatgattttgtacgagcaaactggtacgtttgtttaaacaaaagcatccaaaaagaagaatgaggtaaacttcattcttaagcaaatctctctgagtgtagtacaacatcaataaacatttagatattggctctgcagtggttttctgttcgatttctttgaaaatgatagtagatgaaacacaacacaacaaaaattacaatacattgatatttccttgctagctcccatatgtatgctcatgtggagccacagagacacaaaaatggagtcgtagctatgaatagtgcaaagagttgagcgagggtg

SEQ ID NO: 32046 - DNA, 1003 bp, Arabidopsis thaliana
tacgtattaccgagaatttcccgccaattatcagcggaacgttctagaacatctggatgaagctggtgggtttcgcagagaaagaggaggaggaccaccgcgtctaggtcccggagcttcatggtgacggcgtaggaggagtggtgtttacggtggatgagaagaggatggaggagggagagaagatggttggcgatgaggtgagttttgtcaggaagagatagagagaggaggtggcggagagtgagggagaaaagggtcggagaggagaggactgcaccgaggcggcggcgatggtggtgggagatagagagaatggagtgagtcagattcgtgaggtgtgaaggagaaagagcagagagtgacgccatgatgattgtggtgttttcgtcttccatattaaagatcttgtgtgcttcgtttctcacttctgttaacactttcactttttgacgaatctttgctttatatatacattgtattaagtcattaggaatttggtggaagtaataataaaatattggtgatttttctattagggaaaaacaaatggttgtggtacaaaagagattattgtcggctttgcttgtttgggttttgatgtaattgatagatgtaaatttgggattggagaataaaggtgaagaagcaatgaatggagaagagttggcaaaacttttacactttagcaactgttggtgacaggcataatttgcttgcaaactttatgcaattaaaaagtgtttcattacactttaactataaatcttggaaatatgaaatttcgaaggatttagttggaaaattgtgttgaaatttaacaaactatatattttattaatgttactagctccacaatctaaagttctaaaccaaactatattttagttacatttaccaaacttcatcgaagaatttgatattttagttacatttaccaaaattcatcgaagaatttgataatgtgaagctagttagtgggaccagacaagagtctgtggag

SEQ ID NO: 32047 - DNA, 945 bp, Arabidopsis thaliana columbia
gctaaggaacttgagttgttgtcgcagaagatagatgttttgaaggaggtggcttctgtgattgctgaaactatctaagaagaaggacttggattgtttaggtttaatggagatgtaatgcctcttttgttatttatcgtaggatatatgtttctcatctatgtttctggttcttattagtcttctttttttgtttcttgtgtgagaattagctaaggaacttaagaactttggactttgtaagccttttggtcgatggttgtaatgaacttaagactttgtaagctatggctccgactggtaaaaggtgttttcaaggttgaattgcagtcgaagttataatttgatgtaaatattatgtggtataaactgcagtttgatattgccctgttctttttgttatcgctgcgtcacgggtctggcgaccggaaattatagcttatttgcatgtaatctgtatggaaactaacataatcgttcttgtgaaaagagccgcagtgtctataaaaatggtcgccgttttttttagcgatgccgacgacaccggtatcccctgtaaaagtggccgcagcgacacccttattcttttttttctgtttcttttgctgttgttgacgtttaaatttcaatcgcagatccctgacgcagcgttaacgtgccgaacatggccattgattcaaatacatccaccatataacccattccaaaataaaacctgttcaataatctctttacccgtcccgtgatttttttttaaagtagtaatttttaaaatttaagaattattttttatatataaaagttttgcaaattgtatcattctctaatacatttatattttatagtttaattttatatatagtaacattatacataccacataacattttcggttttatataattttttctaaattaggatgatttgatatgtttaatattagtg

SEQ ID NO: 32048 - DNA, 317 bp, Arabidopsis thaliana columbia
tacaaatcttcttctaaagtcttgatgtattgtaacctatttcaatattcataaagactgaccaaaaaggaaacgaatcacataacatatgttgaacggcaaaatatgtggtctccgcagctaaaaacaaatatggagtacaaaagaacatttaaacatgactaatcttcctcagatctgtccatcgagaacatccttgtatggagtcggagatgataccaccacggtctctgtagctccctctccggcttcggacgttgtgcgtgcccgaggtttagctctactagaagcctcgtgatcagcttccatttacctta

SEQ ID NO: 32049 - DNA, 539 bp, Arabidopsis thaliana columbia
cacctctacacaagttatataaagcaaaatcttttattcctcttttatcatggatgtgtccttggagaaagtctttactctatgatccttacaacgacatcaacctcttcccaaaaatgtctctccgaaactcatcatcaatacgaacttaacacaacgtgtatgaaacattattttctgttctttgtttcaatttaaaactaagcacatcatcttcttatagcaaataaaccaacgactctttccttttctaataaagaataacacaaatcacaataccaatgctatattagacaataaaccattaagtagggatacatttcttacaaaaaatataattctctaatcacacaaagtaactggaagaaaaccgtttataattttttttaaatgaaaccaaaataatttgtattctacaaaataaatgaaaacttataaagaatctatatagaagtagaatttccattaataaaatagttttgttcactaggtgtgctccaacaagcgctagacgttatcaacattggactaaaagatga

SEQ ID NO: 32050 - DNA, 525 bp, Arabidopsis thaliana columbia
gtccctgaggaagctgttccgcgtatggttgatcccggaacgacgtcccctccgccttaaacaccggcccattcccgtacatttacagttttattaataacaatttatataaccaaaatcaaacaataaataataaacaattcactctttgattttctcaacgttatttgttagaaattattgtagcagaagaaagattaatgtttctacagaattaagaatctggtgagagaaatatggaagaaaaaaatattttgaaatatatactttttttgggttggagctggacatacgacaccaaaaaaaccttgagcacaaaattagagaagataagcgtcaaattttgttggtgaaaaaacacataaagatgaagatctgatattaaatggttaataatgatttatctaaatgtagtagtggtactttatagtgtaattatatgaaactagctgttgttaatatacaaaaatagaaaaccagtttgttggatagatagtttgaccatattatcccccaaattttttt

SEQ ID NO: 32051 - DNA, 487 bp, Arabidopsis thaliana columbia
ccccataaccttcgctaaccgttgagccgccgctttggtggctacgttttgagttcttttaacggttgataagccaccaacaccaccgatttgattccggtgagctggagacatcgacggcgatctagattccgtaccgttggatgatctgctccattgacgaccgtacactgggctactcggtctcctgagatccatcaggagaacttaaagccagattcaaaatcactgaagagaagaagaagatatgaacgcggtggcgtgggagggattttggtaagcagtttaaaaaatgtgaaagagtggaaacgacgccgtttaatacggaggagaacacatgcgtcatcgattgggattagatttggcggaggtaaaagtgggaccactttagtcaactgcgagatttgatttttaattgttatgacataatttaattaaaccatttatataattttaattcataaggcaagttactatattaagaaat

SEQ ID NO: 32052 - DNA, 590 bp, Arabidopsis thaliana columbia
tggacatatttgtttaggtattgcttgctatctcttggttactgtctgctctgcatatgcttatgtttagttttgatcaaagcaagggtttgtcgaattgatatgtagatgtagaatcggttagactctgcatttcatagttttctggtcaaacaagaaagtgaatattgctgagttttaagatatgttgatgattattgataagtgttatcactcaaaactgtttttattgtatacccccatgcgtgtagatccttttccttagtatctatgatacttcattgtttaagatagagttacttagacatgttgtagcagcctctccatgtttgcttttacttaaacgtttaccatatgatgaattgcattagaatcgtctgtcttagattgtaggttgtattctttaccaaaaccgaaatctttttcagatatcatagagctctcatgtgtctgtactcatttgcctctaagttggactctaatcaaaatcctcaaaaagctctgaaccaatctgaaattatgcaactcttactaccatttacgacttagcagtccaatacatgtgtacaaactgaaaagctgtgttgttg

SEQ ID NO: 32053 - DNA, 624 bp, Arabidopsis thaliana
aattccaaactatttttcatgcaaaaaattgctatacattaccgtaattttgccgggatttaggaaaagattcttcaggcaggtcttgtgatggggatggaccatcttccaagatgagcggtgttactcctttgtaggattttccacgtatggctccaataagtttctcgtctgtgcctcaatgttagttgtcatccctcgagtttgtagagataaaaagcagattcaaggggaggcctgatgaagtggcaaaaggtactttgtagagaactcggtagttctcaagaaacttgttgttcatttgagcgattacatgcagaaacgaagtttggttcacttattaagggatctccttgcattcccaaggccgtctaactgtcaaatcgtatacgttgttgactgttagaaagacttttaggtggggctatctagctacgatcagaccgatattagcattcctagagattgaacttgcattttgattttgtggaattctgttatgatgtctttgtatggttttgttgaatccaaactatatcttatgcaaaaaattgctaaaaataacattaccgtaactttatcggggtttagacaagatcttcaggcgggttttgtgatagggat

SEQ ID NO: 32054 - DNA, 612 bp, Arabidopsis thaliana columbia
tccctgaaagaaagtacataactttgcaaacaaaaccaatcaagctaacaattttaattcatgttataaacaaacacgtactagaacaaagagctgaaatgttgaaaaatccaaatttgatgaaaccagatgatttgcaatctaataattggtctaggagtatcaaattgaaaaaagtatataactttggaaacagaaccaaagcaaagctaacatgtttaagcgtttaattatctcctaatccaagctaagtgaagaaagagtggaaaagagacgaacattggccatacgaatgaagataacgaatcttgggtttccatcgtcttcaatcttaggcataggaggaggtgtacgttgatactgacgcgccgccatacctttctttcccttagcctccaccacaaaaaccatccgccgctgctgtaccgccgtctctcggcatgccgttcttgagctaaacagagagtgtctcgctaaaccaacctcttcgaatcttcctgtgttcttcagaggaagccgagttaacgcattcaaagacatactcacttccattactcaccagagaagattactcaccactagtttgtttagaacgagagatatttggttggg

SEQ ID NO: 32055 - DNA, 490 bp, Arabidopsis thaliana columbia
  unsure (1)..(490): unsure at all n locations
gcttccttgcgccttacggganaangtattgtctcgagtttgaaatgctttccgactaataccgagtgatagtcaggccgattgcatttctgactactatgtaaaccaattgggctacgccaacagacagacttcccaaacaaattatcatacaacacggttttaattgacttcttcgaaaatttatatgatgaaatgatatcaaagtatgtacttcgttcaaacatgccaaaacggattttttggccaaataaatggcattgtgaatatcactgtacattacccttccctagtggttcttacccaactcttgcagaaatgattgtaggcatgtcatctctctttttcccctcattgttagcaacatactgagtttcacagcttcatatagttacgatattcaacaaccttgaaacctaacaaattgtgttatcaacaaaagtgtaaatactaaatatacacgattttgttcgtcatgctatcaacatta

SEQ ID NO: 32056 - DNA, 482 bp, Arabidopsis thaliana columbia
tgctcaaatgctataagatttgagaagagagacttagtacctacagaaaaaacatgagaggatttgtaagtttatggaatttaaggattttataggtaaatatcgtttttatacaaacatatatatgtgtaaggaataaaaagtaggaaaggaattaaaagagaacctttgagcttaccatcatggattagtagtttgggtatttctagataaccatttttgaattcaatatcccaaaaccggtcggttttccttttcctgaacttcacaccagcttcccttagttctgtcacgcaatgtaccagttgttgttgtcgcttatccaccactcgcgtattcctagtcaatctctttaggagagatcttgtgttcggtgtaggactagactggagtagacttcgacggaaaacatccaaacagtgcaactcgcccttgtcaccaagtgtgtccaatgattttccagccagttcatgagttttgac

SEQ ID NO: 32057 - DNA, 205 bp, Arabidopsis thaliana columbia
aataattatcccgtggtgtaccacggtcacattctagttgttaataaatttttataagacagtagtcgacgatattcttatgtatcgtcggtaatccgtcggttatgtttcaagaaccaacggattactgacagaacgaaaatttttaatccgtttttttgttttattcaatttttacatagagttgaatctatttatttttaaa

SEQ ID NO: 32058 - DNA, 569 bp, Arabidopsis thaliana columbia
ataacacaacgcatattccattcctaaaaacaagaatgctgtggaatcatctaataatcatcatattctcaacaaatttaaccgccaaatttcagaacaatccttaccaaaggcagtggggacttgaacttcaagatcagacatgaaccttaagttgatacaagggacagtaaatcgacaaggcctgagaacaaaaacagaatgttagaattacgagtccaagaatgattgcgagtcacataacgtaaaaaaaagtgacactggttatcctagcaatgtcttattcagataatcaaagattcatataacaaataataaagaaaccattttctgcaaaagtctccattgcgtacgcatatcaccagattccacaatcactgatcaagccggtgaatgctgcaacacaatctgtaactcgagactaatgactgaggaataaataacatatctagttttggagtcaatttcttctgaaagaaaaaacaatcaaacattatcattttgcgaagaaacaaaacccagagtatatattttgaccaaaaagagctgcattcagatcagaaaataaa

SEQ ID NO: 32059 - DNA, 262 bp, Arabidopsis thaliana columbia
gagtctcttaagctcgagcttcaaaacgtggagaaagcacattcagagcttaaagagattgagcaaagagagagggatcatcaagccattgaagatctgaagaaggaaacaaaacatgcaaaaacccaactctcgttgttagaagaagagctcaagattgctgtttgtgaagctcaagaagcaccagatgcggaggaacacgccagggaacggctaaatactgcagttcgagaatccgatttccgatcgttagctgtggtga

SEQ ID NO: 32060 - DNA, 521 bp, Arabidopsis thaliana columbia
tgttcctcctcccaagaatgatcaacttgtatttctccctcttcctcctgaagcttactctgttcctcctttgacttctgccactgccagtcccaaaagtcaaaagcttctgttcctctcacttgctcgcttccatatctgttttgacttccctgttccctgtgacctgattctgaaaagtcaaaccaaaagaagcctattcagcacccttctttgcacgtttttgagtttagccaatgaaagttacctgcacctagcggcaccgaggtgtctctgcaggttggtcttgtgtaacgcttccctgcacctgcacttagcttcttctgcacgttaacgtttttctcacaaatcctcacaggagacgcctgaataagagattcatgccagcattatcaagagatcaaatcgaatcccacaaaacatttaagaatagtccagtttcaaagcgtgtagtgtccattattgcctgttggcgacatctgcttctcgaagtcccaaaagcaaatttatagagctacagt

SEQ ID NO: 32061 - DNA, 557 bp, Arabidopsis thaliana columbia
aactggcttcgatcaactacgatcttgtcctaaagaacgcaaaggaatcagtagaagcttcgaaccagtcagcccctcgacccgaaacatgatgactactaatatgtatggatcatttatctaacttcaagagctgattggttcctgttcaagccatcaaagaaagtaataataacttggaagcatagcatagctaggaagcaaaagagctacagagatttgagtatgatattttatgtaattacatgatacacttactgaaattacaagattttttcaaataaatctaaaaaaatcttgaatttgtatacattatgtgtaactgtgtatcatgtgatctgttctatatatttccagcttaagctctataatatatcaagaactatcaggtcagggacattcaaagtgcaaagcacatttattcattagattaatttggaaatcaaattacaatgttttataagtttgattctttatactggtccaactacacaattctagaatgaagtcaatgaaccttatgattaatcaacctacggcctaattaaacatacttg

SEQ ID NO: 32062 - DNA, 489 bp, Arabidopsis thaliana columbia
gaaaggctgaatggaagaagcaaggggcctcttgagagaaatgcttgtttcagaatctgttgttaagctgattaacagagttgatgcggaattagctgaatctgaatcgatcagaggcttcctcgtcgagctgtgcgaacaaggaagggtccctcaggctatcaaaatcctagatgagataagttcaacaatctatccgtctggtaaaaacctgggttcttaccaaaggttgcagttcttgaatgatgtgaatgaagaagagataaagaagaaagactatgttcatgattttcatagcctgcactcaactgttagctcactctgcaccagtgggaagctggagcaagctaatgagttcgttatgtctgtgctctcttgtatgcctagataggtcagtatgtttacttgacttctcaagtcaccaaaagccaaccggaaataatcagagttattcgaattggattatcgatgtggttagacatttaatgg

SEQ ID NO: 32063 - DNA, 532 bp, Arabidopsis thaliana columbia
ttatacccaaaattgaaaataaaacaacataatagatcaagttagattgggatcaacgaagaaggatagaagaaaaacatgaagaacgtaattactcaaattggggaagacgtaaatcaacacaatatttaactaaatgcaaataaggaagttgtatgtagttatatcaagttcaacaaagaagataaaataatggtgaaaagaaaagaaaacaattatatcttactagggggtattgaacccaggaatttaatagaaattgatcacagggaatataagataaaaattactgatttcttaagatttaacaagattaatatctttctttatcattctcccagatatatttcccaacattttactagaataccgaagatttttctagaattaacacagggagatagatctctgcgtgagatattgtctatcatgtcccctttaaacacaacacaacgtcttacatccttttctactctacatattcatttctctgttatcaataattaacaagcaattgaaattgaattaaaat

SEQ ID NO: 32064 - DNA, 596 bp, Arabidopsis thaliana columbia
accgcccaaatttcatggcatcggaacaaagttttcatatatgatgacaactcaaaacaaaagagtaacggtaaaatcccaatacccataaaatgggcttaagaatccagatcggatctataacccgacccggttgttgacaccgagagagtccacgcaacgttcgccgaattcctaacgaatcggacaccgtttcgtcgctgtaaaattttgatgcgaaattttccaattcacagattttgtttttccattgttttggatttctagattctagttatatgttggtgatagatttttcctacatctcgtgattctcaaacgcttcttgagctcttcgtcgaatcgggactgtgatcgggacttggtggagaagaagcgatgataacaagatcgaatctagcagaacagctcagggaatatcagattagatcaaagcatgattgggcctccgtttctttcttctcttccacctccaatttctcttcctccaggttagagatctccggcttatcctttcctttttaatctgctgtgatctggagctgcgtgcttagagttgtatcgaaaaattgactttgtgatatttaatcaattgg

SEQ ID NO: 32065 - DNA, 550 bp, Arabidopsis thaliana columbia
ttcgtttcgattcgaaacgcgaatgtgaaattgcctaaacgaaaataaattatattaggaaccacacgtggccgatgatcgagctggtgtagtgacgtggcgtcatatgagtggaaggttgatgtcattgaaagccaacctggaccatcagatctactaatttattaaccagcggctgtgataattttatgttttctgacatttttaaaataagctaatatctagcctattcggtttatatgcttaaaccgatccatgatttcattcggttactgatttcgtttgctttgcaactcccaaaccgataattttaaggcaattctaaaagtaagacatatcacgttttattttagtttcaaaaatattatttataaatattttttccagtaataacacattgaatttttaggtttgggaatttttgcatttttcccccaccaatttttgagatgttttagttgaatatggttggcaacatgcataactaaaaaaataacaacggatttaacattttttttagttcttttggtttcagctcataatttattat

SEQ ID NO: 32066 - DNA, 542 bp, Arabidopsis thaliana columbia
gagaagtgacactaaacgtgcattgttttcttttcaagatagatttttagaagaaagttagcctcaaagatcgtccaaataccttggcttttcataaatctttccttcttcgcctacatgcctatggaggataaaacaattctttgaaacaagggctttgtgcatcagaattacgtaagacatgctaaatttaagggttgttagaggcacaagcaacattaatacagataaactcttccttttgttgcttccctttcctcaaagttatgcaatttttttattctattcaaaacttgtaacaaagctttttgttcctttcttgcatgtaacaatgaaccattttcttgcatataatatatgggttttagaaatctaaatatgtgtacatgtaattgcatataacataaacactcaaactctaaattttatagaagatgggccaaaaccactttgttgacataacattgcatcaatctcatctccatccttacgctccagctaaacaaaacacagtgaacaaaagataattttatgaatgacgg

SEQ ID NO: 32067 - DNA, 612 bp, Arabidopsis thaliana columbia
  unsure (1)..(612): unsure at all n locations
atcatttagaagcttcctctgaggcaatagacaatgatggagccagtagttgctgcaatctttccggtgaagtgtctacttcttgtaccagtaacaaaggagaagaatgtgtgagaccagagagtgtgctgaaatctcaaagatctgcgaatttggagcttgatgacaattgccaatttccaccaccagaaaacctagtagaacctagaacttcaagcacattggtattggaaaatggcaaagaagagagtatcagatcctcccaaaccatgaacggctcttgacttttagtgactgtgaccgaagctttggttgttatcttgacaccttcaggattactaggttctcttaaccacatggacaaactctatttagtattcaaaactctatataggattcaaaagatccatcaggaacttgttttgaccaatgtttcattagagatctcttcttcattgttggtaggtcagaatatacaaaagtggtatagattaagagttgatttggcatttgtcttttctttggaatcaagatccttcagactttttatctaaatttttatatgagattcagttttacttcttgtcacttctggcaatttgtntagagagt

SEQ ID NO: 32068 - DNA, 364 bp, Arabidopsis thaliana columbia
tgggcaaataaaatcctactacaatctccccgtaaaattacatgtcccctttttcttttgtccactgctttcaaaaagctagtttgaaccaaacataacaaggaacaaaaagcactgtcaaatagctgaagtagtggcactttcattggcgatgtcttaccttcacaaccttggaattggacttgtgatgttcataagtgacaccaaagcattgtttcaagcggtagaaggccatcataagtggcttagaccggagggttatcacgacatagatcttagaggcaaaaggatgacacatcataccatcttagggagcatctctatcagtagtatctcatagagtatttggagatttaaaaaaaaa

SEQ ID NO: 32069 - DNA, 437 bp, Arabidopsis thaliana columbia
acaacgtcggtatcaaccagctctgaaggattagtgtccatagtcctgaaaacagagaaagcaacgtcgaatcaattatacatcaaacgtttgcattgacacaatatcgataatactcatgagagcaaacgaagaaacgaaggaagaagagaccagggaacaaagagatccgacaaaagagaagacacatcgcagaacacaaaatctccagagaataaacacgaaaacaaagaagagagaaagttgaaactcacacacacaaaggaagaagactctgaaacgcgtgtgtaatgggctctgatttcaccgaaacgctaagcaaatcgaattggactttcagttttagggttttgagcttttccttttcgccgtcggcccttttctgtttctctctcacttatataatcaggacaagtaatagactcgctcacgtacaa

SEQ ID NO: 32070 - DNA, 321 bp, Arabidopsis thaliana columbia
gttataaaaacaaggaagaaaattagcgacactttggttagatcagcgaataagcccatgggctataccttagctaggcccattattactttatttaagatgtatgtgatggacatcactttattttgatgtttttcttttgcatggataaaagccataaaacagttatcactttgggctctaaatagtacaactgtacaagtttagctagttttaaacaattttccatttcagttgtttgaattacatcatgaaattagaattctattccctaataaaaatcatgctatagaagacttataaactttaccctatatatta

SEQ ID NO: 32071 - DNA, 418 bp, Arabidopsis thaliana columbia
ttccacgactccgatcgtcttcttcctcctttcgtaaggtggtttcagtaacccaaatcaccacaaaatctaatattttaagagaaaatctttgttttgatttttttgatgtatttagttgcaggcactactgtttgcaacatgaagtcaaaatccccttctttttatatctccagaaatatgaacagttaatgctaattaaaaggtgtgattctgcttcttctaatgtggatctttttgtctaatttagatacattatataatatctaccctatttacatcctattctctgtcagctatccacctctacgtccacacttttgttttgttggagcggcatcaatcgttgattatatgtgatcttcatttaaggacaaaagttggaatatcatcatatgcttcgatcatgtcaaagaac

SEQ ID NO: 32072 - DNA, 541 bp, Arabidopsis thaliana columbia
aaatgacttagctggaggtgttagaaaattacgtaaattttcccgaaaataggattcactattcttataaagcatgccaaaagaattttcaaattccaagtattgtttttatggcacgagtgactccttagacatttcaatgtctactcgtgccaagtcaaaaaatagatataaagctatatgaaagggtgggtgttgagggagtctgcacagaccaagggaacctgaaatgtcctaacctgttttgcaaatccgccaaagacccaaaattgcagcaaaactccgatttgctcttaaaacacagatttatgacaattttggctagccatttaacctaaccgttctacgcagcagaaaaacattacaagctagacccttacttaaccaataccttagccattcgtagactctgactcatttacattcatgtgcttccactatctcaccttcaactccaaggactcgatccttcattagctccactatcactcatagctctcttgcatcaattgtaccagctactaataatttgtccacatct

SEQ ID NO: 32073 - DNA, 473 bp, Arabidopsis thaliana columbia
atttcagttacaactacaaaattgatgtaaaataaattttactagttctttccccactaatttgttttagatttacatgtgatctaaatatatatactatcatatcattgagttcaaccatactaaaataataagaactagagatatgatttggatgaatatattcttcatcacttctttttttttggtgatcgaaagtactgtataaaaagagatggattcacaaatacttgggctttaattatccaatatgaaattgttattattgactagcaagtttctctgaattttaagtttttaacattacttaaagattttttttctttattgggcttataaagcccttcaactgttggatttagtttcctaaactaaatagcaattgtacaaggaaaatctatattattgatatataagaactatttgctccattatggtatttacggttataaaattgtgctaaaccatagaaa

SEQ ID NO: 32074 - DNA, 500 bp, Arabidopsis thaliana columbia
ctccgacaacaaataagtccaacacgagacgtttaagagttaaagactgaatcaaacttgccaattgattttttttaaaaattatttccctttttgagacatttgaccatttccaagttccttagcttatgcttagtggttccggttttttggtgttatcgtgtcatcctcacctcccaaattcgaatatgaattgcgtcataaatattgcaaaaaaacaacttatgagagtcaataattgaattgtacctagtattggaatacgttttttgaatcgaccccaatgcttcgatttaactggctactatcttgttacaacaactatcatataccagactcaccgaaagtacaaaactaaatcttcaaaacctaacgttaatcaagataaataaattaagtcctaataatgagttcatagatttagtagacttttggtctgaaactggacgggaatctgttttacaaacgtaaatataatttagtttacactttacaccttt

SEQ ID NO: 32075 - DNA, 512 bp, Arabidopsis thaliana columbia
tttcatgattttgtcttctttttttccgctacccaattaatttataatcggcttatttgcattgccagcaacttatctgaccattagtactctacaacattcatcctttgatgctctccatcccttacatcagatgctgttaactaaatgttgaactaatcgatagtatatatatgttcttttagaaccctcgtggtacgcatgaaaatttggttttggatagtttgcttgtaaaatcatagattttttcagaagagaatgcaacatgcaacatctccaaccaaaatattttcttccacctgttttttttttttttttttggttctttccactgaacaaacagttgacaattcggccaagcagcatcacattttgtttagactgttttatatcgttatataacgtaaacataataccaaacatgttttctagaagaagctcatgtgagtcgggtaacaatgaaaagtcattgggtcacgaatatataagcccagtgttcaatagcccatata

SEQ ID NO: 32076 - DNA, 432 bp, Arabidopsis thaliana columbia
aataatttgaagcaaaaactcaatatgatagaacaacgtttagcattttaaataaaaactctaatcaagtgaacaactccattttacaccaaaagctgtgcatgtgtgccattctatatgcttatcttttactattgccattgtaattaatctccttcataattctccttatcaatcattattatttctcaaataattactttgacaatgactacattcaacatgttatattttccacaaacaatgattccgattcgacgaacaaaatacaaaaatttaagtctaaatacaaataaaagacacacacatgaaccgacgtattcatcctccaccaccgctgcatataccggttaaagataccggaaatctacaaagggacgtggctaccggcgttccttctccggtaaccacttcagctgaagccggaggaag

SEQ ID NO: 32077 - DNA, 269 bp, Arabidopsis thaliana columbia
gcatcgagccctcggaccccgtcaccaggggaccgggtctggcagatcacccgcaggtacttttgggcgcgcctctgggcccctagccaacccctaacgaatggggcacggacgcccactcggattacccgcttgcagctcatcggagacaccatgttcggcgcccatcgagggcaacatggtgctttcccccctcctccttgcggaaaggcgacgcaggggcgtatgtaaaaaaagccgagtctacccctgaccgccctctcgctctg

SEQ ID NO: 32078 - DNA, 545 bp, Arabidopsis thaliana columbia
tatttcaaagttgtcttacaggaaatgattgtgaagacaataactatgtcatgcgtaatcaaacttttgggaagcagtcaccagcctgtaagacatgcagcacaagccttactgcttgagctttcaaaatcccaacatgcatgtgagaagattgggactgctagaggggcgatattaatgttagttaccgcaaagtataacagggagttggattcctttgcatctgaaacatcagaccaaatcttaagaaatttagagaagtgtcctgagaacatcaagcaaatggcagagagtggactattggaacctcttctgggccatctagcagaaggtaattcattactgcttttctctccaaagtttatgaagcatagttgctatacaagcattacctggagcgaaatgataaacaatgaattgatgttgattaatatcagtttacttccgaatgatatatggcagggagtgaggagactcaggtggcaatggctgcgtaccttgtggaaattgatattggacatgagaaaaaacttatgtagctgaga

SEQ ID NO: 32079 - DNA, 477 bp, Arabidopsis thaliana columbia
agaaagtttcgtcttttcaccaaatcgagtcagaaaaaaaaacattgaatccaattttttgtctgtgtcggcttgacttgtggtactgggcctaggtcgtaatagaccttgggcctctcaccatgaattcttttgtccagctataaaaaatctggaataggaaaattcaatgtttaattgtgggaaaaaatgttataggatcacggttgaatttctcacatagcaataatgtttttttttcgaaaaacatagctaaatatgactgatataatagatttccattttaaaaaaaatagctaaataatgttttgctattattcttgtcaaaataaactttcattttgattttgttcttcaaaatatggctttggtaattagtccctagctaacatgttattcttttacgttcatgtctaacattcacatgatgttctaacatacataagctgcctgaaatccaaatagatagagacaaat

SEQ ID NO: 32080 - DNA, 563 bp, Arabidopsis thaliana columbia
  unsure (1)..(563): unsure at all n locations
tgaatgtagatagttcggttcgatcagtttggtcgtgttagagattgtagtgaaagagaaaataagtcttagcaaaagaatgcgagacaactgtctagtattagtggagatgaaccagctttttctctttgcatttctaatatggagttttttttggatgggaaattgcactatgatagtatgattagtggttctagtctatgtgttttgaatgttagcagttagattcttgttagggatagttgatgaaaagaaacctaaatttgtagtggtggacacattgttctctgctgtctagagagtggccgtgactactagacccaccaaccggcctaagcttgcctgtataggggtgggaaaaaatagaataacaccaaaaatgaaatgctcaaatgacaaaatcaaaattgatttccttcaaatatatctaactagactattgtttgtaaaaaaacaaaacagaaccgaatcgtaattgcacaaatgactaaaccatatattctcccaaaaaaaaaagaccanaccgtatacgaaaggtttgatttggtatcgatttaaaaaga

SEQ ID NO: 32081 - DNA, 455 bp, Arabidopsis thaliana columbia
ggatgggtctgctgttagaaaaaaaaatgttgattcgagtaagtattaattttggttgcgatgataatttctatgtataattttatgatattaaatatcagtttaagtcggttacacgaaattatgagagtaaaattggatattgtagttaaccgaggggaaaatatgagataattaaaagtatggagactgtttaagaataaattaaaacctttggagtgattatgtaaatcgaaagaaaaaggggaagaaaatcgtggcagttgctggtgagtgatgacaacttggaagaaagtacgagaagagtacaaatcatttcagtttctgtttaagtgaatatccacatgtatatgtgggaccttttgtgttagagatgttttttagtgtttttaacttgaataaaatatcctacaatatatatcacaacccaaaacacaaattatacaagcctttaa

SEQ ID NO: 32082 - DNA, 1029 bp, Arabidopsis thaliana columbia
atctttctaacagagatattaaaaaaaaaaaatcatccaatatcatatgccaacagagagcaagggcaaaaagatgtatccacaagttcttccaatatagctaatgaaccctacaacatctacagctttccaaaacaaaattcacgaacaaaccttaaacaaggatcataaaggttctactagttgggaagatattaaacacgtttaaaagtgaactgagaagttcatcatgagttattcatgcttctaaaagtgtaataagggtttttcaaactcattagaacaacaggcaagagagtttctgagtgtaagttacaggattcacaatgtgatgattctagaatgctttatagtaacaaaccttttaaagtgatcatactcttaaggaaacataagaagaaaagcaactgacaacaaagcactcatcaacaacctagaaactgtgcaagctaagacagtcatgagcagactactactcacaacacatgcccaagctaatcaagacaagttcaattccacacaaatcacacatggccaagcagactagaaattgctgataaattataaaggctaattaagtagaatttctgtgtaagttatcagttcaagttacaagaaagtttttgtgtaagttaaaggtttcacaaataaactatcagcagactagtagagactgcagctaacttatgatttataaacttcagtcactacacaagtccaagctaaatcaaaataagttcaatttcaaccaaatctcacatcatagccaagctacacttacaagcaaccatcagcagataataaaggataatcaagtagtgttccaaaacttgataaacagctacctaatcaatgttgctgagcaaggcgaattcgcggacgaggttggcatgccaggatgaggcgacgaaacatcggagcaccaccggggggaggcattccagggcgagaaggaggcggtccttgcataccatgaggtgaagaaggtcctctcatcataccaccaggtggaggaatcatcattggcct

SEQ ID NO: 32083 - DNA, 466 bp, Arabidopsis thaliana columbia
agtttgtggatggcgaatctgctgtatcttcagctttcttcttgcgtcgtcagaggcagattctgttctctaaactgcgattttgatctctgcccaaatatcgtgagccgcggttcctttgattgccgcgcctcccgcggtcctagctgggaggaggagctcttccgcgacgaaggttttgcttcgtttgagttcggaaaccgtaaaaagaagaggccttggtggcttgatgatgatgatgacgatgacgacaacgatgattggatgaatgaagaagaagaagactggtctatggtttttgaggtattacttcttctttttggaatttaagaactgtaatgttgaatctcactttaaagttgctcactttagattcacaatggtttatgtttagttgttagctctgtttagccaattttagaggttttgttttaattgcaggtatttagaacattgagttggatgc

SEQ ID NO: 32084 - DNA, 495 bp, Arabidopsis thaliana columbia
aacaagtctttcttccttaaaattcacatggtgttcttgcatatctacagcctccacgttcgcctctaggcatgagactttttctccggaatagttaaagtctccatggaagttcccggaagcagaaccaccgtcccatgagtctagactgtttcgtggctcatgtgaggcttgagccaatgctataatcttgctcaacatttcatctgtatcgttagctacattgtttccaaaatattcattgtgtgtgagaccttctacgtaaagtggtggtactggtggcaacatacgattttgtagtcttgcacactctaacgctatatcaacctattatatgaggagaattcaatggataagagattagtttgaaaacaaaaggttacatattcaccaattttaattttgtatctctttgagatatatagtttaaatgttaccttcgagggatgatatgagattgttccatcttgagactgaggtgggaagttgaggacg

SEQ ID NO: 32085 - DNA, 399 bp, Arabidopsis thaliana columbia
ggatcccgactacaaatttaaatatttcttggtcatgtgaatagacgaatttatccttaaaaatttggagagcaaaattcaagttatttaattattattttttttaccaaaaaatcgtgttggtttacaatttagggtttagagtttagtgtttagaatttaggatttaggagagtgaaagaagggtaagatcgtcattttactgaaacaaaaaatgcttaaaactaagggactgggaagaaatacctaaactgaaagttttggattgacaaatgctatggacaagaacccctatatttcacctttggtgtgtaatatgggctagttggctagttccctactttgggctaaggccttgaataggcgtgtaactcttttttttctccgcatgtcattcga

SEQ ID NO: 32086 - DNA, 480 bp, Arabidopsis thaliana columbia
ctaaatcaatagagcaacaaaatcgttgttgaaacagtgagttaaaaaaaatctggattttgattttccttggcaattaagaaacacattcaaatacaatgatcatcacaccatcaattctagcctgagagttcggttactcggttaggtttaatccagttcactaacattcggttagtttggttaaatcgattttatatctggatatatttaatcgacaaagatattgggccagcaacattattatacataactgggtcatatagttgtatgaaaaaactaaactggaccacagtttatattcgagatattgactcatataattaatcgcgaatgatattgggtcagccattttttttacagcccaaacacataattgggcctgccgtattatgaaaacgacaagactcggcataacgtatcatccttcagtcagaacagaggttatcgatcagaacagctaaacgtgtttgagacaga

SEQ ID NO: 32087 - DNA, 574 bp, Arabidopsis thaliana columbia
tcaaagttgcaaatttaccccataagttatattttaaggctatggaagccctcctcctccctccttcgccggaaccccaaaatcaaatcaccaatccggcgaattcaaagccaaatcatcaatctggtgacgtacataaagatgagacgatgatgatgaagaagaagaaggatacgaatccatcgaatttggaaaagagaaaactcaagggaaagaagaaagagattatggacaacgacgaagcttcttcgtcctattgttctacatcttctacctctaattcaaattctactaaaagggttacgagagtggttcatagattacgaaaccctatgcggttaggtatggctcgacgaagcgttggtgaacgacaagctgaaaaattggcgacgtcctgggcttttcacttgccgcttttgctaatatggttcgatcaatttccaaactttgatctttattgcatcacataactgttttgatacgaaattggctttgctggtacgggttgttcctatagttgaccttgcgtgaatactaggttttggttgtgttgaaagttttgatctttagatgg

SEQ ID NO: 32088 - DNA, 534 bp, Arabidopsis thaliana columbia
taaactctactcgtttcagagtgaataagacattgaaattgttgacggtagatggtgatttgcacagtggttatactatggtggagtccaacactttttagaaaactgttgtgtaatctgactttttcacaaatcttagttgaatacgagcatgtccatcacaattcggataccgtcagccttaatgaggtatggctgcaagacttgtgaaaccatctttgttttgaagaataacgacacatttagtatttatctctagtttgctctctttttggcttttggtttgttctctaatacctttggtttcaaactttggttctctattagctgacgatccataaaaaataaacaaagagataaaataagtacaaaatgtttgaagtgtcgatcagagaggatactgaggatcaaaacatataaaacataaccattaccaaaacacatttgaccttgttcttcaagtctccttttcaaccattatatcaaatcttcaaaattatactgttcttgaacttgacgaacatttggataaag

SEQ ID NO: 32089 - DNA, 493 bp, Arabidopsis thaliana columbia
ccctcaattcatcacaaattgatatgagttgtcacagatgctatagtttccatgcaataaatagtaaacgcgttgatcgtggtttgtttgaagtttacatagaagaaaaaaagtcgtgcacgttagctattgcgttagagaaaatgatacaactcaacattccttgtaagcaaatctagaaactactacatatccatttttcaaatgtcttacgttcaatcaacggtttcccctcacacttcttcatatattttgacatttttgtcaatatctaatttgatacgacagacttttctctttctagttgcggacacaaggaatcatcaacaacctttgaattttcccggcaaaaaaggtatttgttgtcgtatctcattctatcaatagaaaggaaaaaagatcaaaggaagttttaggcgtttaaacaaaatagaagatgctgccaataagaaaaacagaaacacgatttaggaatgcttaaagaagagagaga

SEQ ID NO: 32090 - DNA, 592 bp, Arabidopsis thaliana columbia
atatacatatcactctatacacagattcttctgtctgaaactttttggggaagaagctttgatttgaattaagaaaacacaaagaagcttctccacaaaaaccaaagaagccacgaatcaaaacaatacagaaaagtattgaatgatcagaattgatttacgcctcctaactaagccaataagtatgaaattgcctaaataacttagggttcataaagctactcaaggaggcggattttatccccaaatatcaaaacacaaaacaaaaacgatagagattaacaaagagacttatgaggaagatgagttacgaagaagacaagagtggcgcaaccctttttattcactctgttttctagggcttttcttgggttgggttgtgaatgactattttacctccctaattgactgaccggttaatgtaatgtggtctggttttcttaaaccactcaatctgttttaaccattggctttaagaaaaaaggcagagtaagatctgtgaaaattaaaaaggccagcaatattctttgtacaatattacaaagtttgtaaggttacatgaagttgtgatttattttggtggtgtggtgat

SEQ ID NO: 32091 - DNA, 369 bp, Arabidopsis thaliana columbia
attatttatttacacaggtaataaaaaaaaagcataaagagaaatatagttcacctttttttaatataaaaattcactctttcaaagctcatccaaattcatcgaaatttacataacaattagtccatgccatgtgattaaaagcatccaaattcatttcactcattcagacaaattttgagaaaattagaaatacattggcaataatattttctttaaaagttatttctgcgaaaattttgttggtggataactataagaacctaacatagtttcgttttatgaacggcctagtcttagtttagtgttgaaatagttgccaagtttatcgtctctcccgggctttacggaagcacgagccactgattt

SEQ ID NO: 32092 - DNA, 469 bp, Arabidopsis thaliana columbia
ggtattgcttgctaaaagttagatcttaccaggttgtatcatccccgttgaaagcggtggaaactggccataaagtgaggatggacttgatcaagaagagcaagctgagataccagtggaggcataggaggctgcagttttgttagtaggttcttggtcgttgaatggtgttgaagtagtggaatatcttcgtccttgatgtgagcaaaacagctcatttagtttcaaagcttgagaagagttcgagatctaaagcttggaagtcaaggaagcgaagatactgtgtacagaagaaataaactgtgaatggcccatttagttttaaaatgggcctttattaattgggcttataaattcgactttatttggactagttatggacttaaacccagaagtgaatggcgggaaaattaacttaagaaccccaaattatcagtcgaggtcaaaaatcaatggagaaatacttagt

SEQ ID NO: 32093 - DNA, 492 bp, Arabidopsis thaliana columbia
gtacacatggaggggggatctcctactcataccgttacagcatcttttgaaactgcgtttgatgttgataaagaagtagcagctgctgttaaaactgcatttgctaggcttgcaaattgcccctcttttagcaaagctgagattaaagaccttctgaagaaaatcagcgagaatcctgatgtgcgtgataatcatgagatcactgagatgtcttcagaatgcgacacagagtctgactctgaactcggcattctccacaaggtcgatgaagaagtggctgaatgtgaggagacttcgtatttcaaaatgagacaactaaaagtcaagaggcggcagtaatttgggaagtttagcagggagaacctagtggaattgatgctggagaggcttcagggcttacatgaagatcaactttcaagtcttgcctctgtagttgctacctgtggtttaaatgaggccttggctgaagttagtaccagaggggacagacac

SEQ ID NO: 32094 - DNA, 659 bp, Arabidopsis thaliana columbia
  unsure (1)..(659): unsure at all n locations
atgtacatgggatgtccttgcgacgtatcaaagtgtgttgctgatttaaagtctttccacttagaattctgctggcttgaatcgccgagctcaagacaaagactcatccgcacatatgaccatgaaggtttagctgtctcatcaacttattttactgagacaaaaatgtgagcttcttctcatttatgttcttgtaaaatgttcatacctttgtaatgttgcaaatctacttttgctctcacattatttgacttgaaatttagttaagatacaattcatgaatcatcgactatgtaatgttttgctgattaattacatttcactaaagttaactaatgaacacagatcaccaattatatgattctttcgagtttaaactgtttgtgatcttgttctaaataaatatatcttcactgcatatcaatcgttttcagattgatgaactttttgcaatgtattgaatgattgataccagaacaataaataaccgagatttaccacatataaccggaaataccaaatcttggcacaacaatacgaacaccgcgaaccggtaaacaaaattaccanaaactaattccattttcagattgatgactctttgcaatgtattgaatgattgataccagacaataaataccggatatttaccacagata

SEQ ID NO: 32095 - DNA, 585 bp, Arabidopsis thaliana columbia
ccagtctttaaggttggctccattctgtttccgttgaatccactgagcacatttcaggatcagttgttaccaaggaacttcacttctctgtgatccgctcaaaggcagatatcatcgatgcacgcatgttggctatttccaccagagtttcaagagctgtccaaagacgagagaaaaaagagtttcagttgtaaactggaatcttcctttgagtatacttgtggtgatgaggatgttacctgtttcaaatgattgttgagcgccacgcagcttaggagagactagacctccaaatactgacagagattttgcccgttctttctttatctggagctcaacacattcgaattagtaaaaccatcgtcctacattttgaaaacaagtagagtttctgcagacggttaaatgattgctcacctcttcatcagctgctaaaacggtttcatccttggctgatggtttccttctatcgaattacataaagcaagagatgatgaacaccgacaaacaaagggcagagaataacaacagatgagtctttttttacagaaactcctcgatgtcgtagctgtgggctgagaggtg

SEQ ID NO: 32096 - DNA, 538 bp, Arabidopsis thaliana
gcatcgccattctaagaaataaaatgactcaacttgtagatctaagaagattctgcttcatacaaattttatcaaagtcatgtataagaagctcttaactttctcgacggatagataaattgcaaattcatcgtccagacattattgaaaaatattaaagcaaccataagaaaacgaaatctttccaaaaaataaaagacagtagtaacataaaactggattggctaaaaccaagaaaattgaggtccaacatactaaaaacaaagcaacacttataatccacgacaaaaaggtaagatcttaaccgacaaaatctactcttcatcgaacaaaccgaaatcacctccatagtcttcttcgtcggactcttccttctcctctaccttagcagcagctggggcaccaccacctgcatcagcagacaccgcagctactgaagcaacagcaaacttgcttggatcctgcattccagagagttacataaacaaaatcagtactccaaacttctgaaataaaatgaaaaagatgcacagtttta

SEQ ID NO: 32097 - DNA, 575 bp, Arabidopsis thaliana columbia
tgcgttgtctccagcagatcagaagaagaataagtagagaagaaacctcaatcaaagtcgttgttctttcttatttcggttatgcttgatttggtttctcctacttgttcaccaattcttcttctctgacccttcgttgactgcaaggtaaagttgccttctttcttttgcccttttgttcttaacctcaaagtctcgattttgttgtgaaatcattccatctctttccgattcatggctcttctgcgttaagttctctggattaggtttagcaattttatacgaatgagtaaagtttgactcaacaaattcttaatttggcgttattcagatacttttgattttgattcgcgactcttttctccttttccctaaggaatgaggtttataactctgtgcagtgctacttgtagttgttgctcctgtaatatgaagctgttcaattaatataaaagtgtctgtttcctataatgttaagcgttttagattaatttgtggtgtaaaaatcatccatacgactcctcaaagtgttttcatctagtgtcactgtggttataacttggatctcatacaag

SEQ ID NO: 32098 - DNA, 578 bp, Arabidopsis thaliana columbia
cccaggaccttctcgctgaatgtttctgcacaaactctataaaattgacttatcccggcttcatattcgtcgaatacatgtccagtgtgtcgattaatacgattatacatccactttcttacgatttctatattattgcttgaagacatttttttgttacaaagaaaaagataatagaatagattaaaaagaaaaaagagacggtttgctcaaatgaaaaattttagaatgaatatgaaagaatttttttttgttgctagatatgaagagagaaaacgagaagccaaagatttgaatgaatatacaacaaagaagaatgatgcatatatatagattcgaacaagagagaaaacgaagccaataattaaacaaaaacttggtggaagatcgacaagacaccatcataaatttgctataataagactgtcgcaaaagaagtggctttgtaatcaacttgctgcaattatagtgtcgcataagtagtggctttggtaacaatttgctaccgacactaagtggcctttgatatgagacaggggcagcacaaagttgcataattgctacgaaacatattgtga

SEQ ID NO: 32099 - DNA, 574 bp, Arabidopsis thaliana columbia
catttgctgctgtatgtgaaagaatgagatcacgccacgtggtgtttttacattggtctgtggtgatttcgttctctagcttgctgtcttgctgcatcgtttatgcctaatcatttaagatcctaatcgttatgattattaaaatcatactataaagcagagctcacaacaacgataaatatatccagatctaacagttaatcataaactattagaagatgactaataattatcaaaaagatatggttattatatttcttattagtttatgaataaaacacacactcgaactcggtcgtacaagattccgtgagtccatcgaactatttaattgggacttttgggacctttacatgtaaattataatgaatattttcttttagtcaattttacgtagactaaatcaaatacattttagaaagaataatcatgtttttttagtcctcgaaatctaatttaacactgttaacttttagttagtgtggccatgctaagataatttagctagaaaagtaataattttgtgttttgtgggccagaaaataagtagaataatgattagaaccaatttgtt

SEQ ID NO: 32100 - DNA, 548 bp, Arabidopsis thaliana columbia
gggagatatgtaatttgtagaacgtattaattctgatgaacagacgtaactagcctcttattttcttgcagttatcattttggttagttgtcctgttagttgacttgattattgtttaacaaattaactcaggtgggggataatagggtggggtttagtggttggatctacgctttttaaccaaaaaaggttaaatggttggatatagctgcgatgatggtcttaagggctattgttaaccgaacgagttggtggtaattttatattcgttgaagttggtggatagtagtaataattaatgttcttataattttgtcgtgaaaaactttatacttttgtatgtgtttgaaataatcttgaggatttcagatgacttgtggtttaagttattggataagcaatacttgttaaagcgttgtcagcccatttttctcagttgggcccaaagagacccaaacaaacccttgtatcaacctttacgggttttgattatcggcaaactgattattatttaaaaatcatgataaacaaagtaattgtacgtatga

SEQ ID NO: 32101 - DNA, 624 bp, Arabidopsis thaliana columbia
ctttgatgaaatggttctaaaatgacaatttcttcttctttgtccagtatatttttcttcacatcccattttaactattaaatctgtggttttggttatcaatgatatatgtgacattcgggggaaagaacaaaaaaattctcaaactgacgaaaatgttgcaactatctcagtaaactattagaatggtatcgattagacgatggtgattagattattataacatcccaaatcgagttttgtcttcttttttttttctctcaaaacaagctcaatactatttggaatcgagttttgaacaagttttctctaatttatgtgatcataacgcttagtaatagaatccatatgtatttatgcaaatctgttttaagaaaaaaaattactctccaaagaaaagttaaactatatataatatagacaccctttcataaagtgatataagagtccaatcctcaaccttaactaatgaaaaaagaacatgtccgtcttcgtaaatagaatcgaccttatagcagtgctgcctaaccgaattggtgcggtgctgcctaaccgaaatcagatgtgctgcctaaccgaaatcaaatttgatagtcggtctctaaacaattgacggtttcagga

SEQ ID NO: 32102 - DNA, 487 bp, Arabidopsis thaliana columbia
cataacgacatatatatcttatatttaaaataactcagcattttctcgtcaaccgagtctagcctattggatccacaaaaatagtctaacaggtcctttcaaatagaactatttttattcaacattattttttttaacgtatttttttagcagttatattttgttttcagtaaagaaatacttattaaagatacttttgaaaataggttttcgaattatttaacatacaagtctattcttgaaacccatatttgatatttgttttaaatataatggtctctcaactcatatattttatgactataagtattcttgaaatccatatttttaaattctttcagaggtcgttgctttttggctttgaatggaactgcgggctaatggcggacgaactgcaaggtgggacgtaccacttttagttacccattcaacaattttgatacagtaaaagtgtatcatgattataaaaagggagatttgcaaaact

SEQ ID NO: 32103 - DNA, 633 bp, Arabidopsis thaliana columbia
cgaaaagatttcatctttttttttttggtttcttctttgtgcagaaagtgtaagaaacaataataatgatactttacgagtttagtattcatttgttctaatctttctcctgaattttgtaacttttgattcattgatttgtaatcttggaaaaagaataacaaagagtttgtaaccttcaagcaatttcttctctttactactaatcatttttctccaagacccaaatcataggatacaaataatgtaacttagctatttacaatctaaaacgtagtggaaacttacagaagattcaggttgagtcgacttgaagtttgattgacatgtagaggagggtgagaagagcaccttgtggaagaggagcatgtctagctaaattagagccaacccacattgctactaacacaagaaccaccacgctgctgcttgctttcccacagagccagcttgcaaatgttaagcagagagtaagaaggataccgccttttccgccaagtatccaagcgatcatgaatccgactttgtaaccatgtcgagtccttgtcgagcacgctgtgaatgtgctaaatgtgagagatgctaggcaaccgaatgtatatagaagaacatcgataagaaggcggatttgag

SEQ ID NO: 32104 - DNA, 581 bp, Arabidopsis thaliana columbia
tgcttcttgttaaagctaatcaccctcacgcgatatttcgtattagatccttacctatatcattagtccaaatctctagacatgtgcatagaatatattaaaatcggccaaacctgaagtagtagtatatttgctcggaaaagacataaagaaaacagggaatcagattcacgcccatctttcatgtggactacaacctcataacatgtagtattatataaagatacctacgatagttttcaaaaatatccctaataaaacaacactccgatccaaacaagaaagagctagtttaagaatggtacttggaaactcctccagtcacaaatctcatcaccatcaacatcataatcatcatcaccgggactcgatgaaggagttccgagctgtctttgcagccgaagaaccaatccagggcttcgagtatgcagatatgaggaggtcaaagagcgagaatatgggcactagagaggttgcaaaagcagaggatgttgacaaagaagctgagcaattcatcaagtttgagcatacgaagttcagtaagtggatgactaagagcgcctagtctatgtggacgaaga

SEQ ID NO: 32105 - DNA, 481 bp, Arabidopsis thaliana columbia
acagaaattaaatttataaaagacattttctaaaagagtagaaaatcgtaatttttgggtatacgaacgtccggttcttgcgtttgtctttctgttcctctcaaaatatcaataggccagcctaagtgttaggacaaacttatgtttaattattcagcactgctactaatcaaataagatgtgaaactgtaggggcaaaacatattataccataaggaccacaaaacatcacaacaatgatattttcaacagagtactagtagagtatgtttataaggagggatagggaatttttttcaaacatagaacagattctctgagagagaatgttttcataagagagtattatatagctaactctgatttcagcaggtcaagagaggagatgaaccactgcatttgacatcagaagcatcagaaaggcgttgtcttggagagagtgttgtaatcgctgcaacatctacgtcgagattcactatga

SEQ ID NO: 32106 - DNA, 583 bp, Arabidopsis thaliana columbia
tcgccttctcttctcttctttgttctcagcttgtctggttgagtgcagaatgagcagataggcttcctcgtgatagagtggtgatcgagtggttctgatggggtgattcctccggcttcgcgattgagtgaaactgagctgtttgcttctccggggttgcgatagagtgatttgccctggcagggctccgaggctgcgatagagtacttttgctgaaggcgtcattgggcattctgacttcatgttctgtttttcctctgtttgaactccaaaagcatccaaagtacctgaaaacaaccaaatatgccatgcacatgcaatcctaatgcaaaatcgtcctaagtatgtaaaacacactaaaacgactcctaatgagatgaaatgtggatgaaacaatgacaaagtggtgaagaatgaatgcctaaatcatgcaaattatagatatatcatacgtcataatcttgagataaaccatatctccaacagaatactccaactctctctgacgcttctctgacgcttctcaacatctcttttgtcggttctgagcttgtttcatcttaacctttaagactttgatatt

SEQ ID NO: 32107 - DNA, 535 bp, Arabidopsis thaliana columbia
tttggattttgctagagctcggtccatctaataaaagcccataaataaatgcagcatatatcacatgtacataatgttgctctctgtttcattatcaattgtacaaactacaaagtccgtttattcatgctcaagattcatcagaattcaactcgttagtacattgatcgtttccaaaaatgtcttacgtcgaattagacatatgtacttaaatcttatttaggttttgatcttcttctttttatcagttaaaagggttattgatcacttctcactctctttctatggaataagatgaactgatgaagtacaaacaccaaatacttaagttttatatgtgacaatgattgaccccattagattcatagtcaccgatcaagaacacaatgatggtcgataatagaatctaaaatgtggaagatgacaaaaactgtctccacccagtaagaaaacactagctagatcagtcatacaactaagcatatctatattctatcaaaggtcctaaattgtatcagaagaagagttttgtgtg

SEQ ID NO: 32108 - DNA, 567 bp, Arabidopsis thaliana columbia
tatacccaaaatgcccaaacttttctgcttgttgattttttttgttattataaattcacccaaaaaaaacataatttaaaataataccatatgtaatacgcatctgtcggtcaaagctaaagaccttttagtcaattgaacgaacgaccgaatgattaggtgagcgttgaagaacattatttcaaagcttatgaacaaaaaattcaaagcatctctactatgaatctgaataaatgaccaaacacatgcttatgtccctcctattattatgctctttttgtaaactaaacacacaaaattatgaaacaaaaacatcaaaattattacttgaatattggataatgcctcaagaaaaataaaaacccaaccaaaaaaagccgtttacaaaaacaaggctaagtataatctctgcaaataatttgaaccatcctcactctctctttttctctatatatatatctataaacctttctataattattgttctcattcactactaatagatatagtaatgaaccagaataacaataccgtgatcaagagtttggttacttgagatttatggtg

SEQ ID NO: 32109 - DNA, 470 bp, Arabidopsis thaliana columbia
tcaggtcgttaaaaatctaatcttttttggtagggtgaagactcttctttatcaaatcaacctaatttctcagattctcagatctcaagagttttgtttttttagcaacaatgaataaaaatccacggctcgatttttcctcaccgtcgtcgttagccactatctccgactctgcagacggtgagctgaatgaagacgacatctttgcaatcgacatatctcacgcgccgcctcaagctcgtcattctcctgtatcatctccggcgaacgaacaaactcctgctcgtcagcttcagaggagcaaaagcggtttgaagaatgtggaagcgtctggtatcctcgcggctcttcctgaatcatctgggagtagtagttacttaagtcatgtctttcaccacaaacctgcggctgctctctctacttctgtctcctccacagcttcttcatcgtcttcttcaggtggtggtgca

SEQ ID NO: 32110 - DNA, 621 bp, Arabidopsis thaliana columbia
tccaggtccccactgatctgaaccacaagagagcctcccatgagttaaccaacaaaacattctgaccagtcccatcggcgtcgtacgaagaaggatcaacttgtaagacttctaaggaaccaacaatgggaggatcagtagcgatgctataaaagcacaaatcgagctcaccgtcaccgataaaagcaaagagatcagaataagagccatcgcggagaagactctccggccaaggagatctccaagagaaaacaagagtgccttcgacggagacatcgaaagacggggaatgagatttaccgtcgtagttatcataaacggtgaaagttctgagatagtaacgaccaggagggagaggaacgacgtagcaattcttctttccgaaggaaagagggaagtacctgatggttttctcggcgattagatggaatcgaagaggctcggagacaacggcggtgcttccgcggacgtagaattgatcaggaagccatgtacggttgaatacgtctgtagaagtttcgggacttcacagtcaatgaagacagaagtatctgcaaactagaggaagaatcagtttcagttgatagtcagatctagacggagaggagacagagagaagga

SEQ ID NO: 32111 - DNA, 664 bp, Arabidopsis thaliana columbia
agaagaaaaaagaaaaagaaaggtgcattattttagaatcacaagcacatgagtcatgtacaagagtacatgtaaaaagagattcaaaggacattgtattagagagaaaaagaagaaaagctgaaacatagcgtatagtgcaattagtgatgattgtgatccagaagaaaagcatctctgtaaatgagagaaatatatttatataatgatttttgagtgaagtcgtgagtgtttgtggtctcgactttggattactttaaagagtaatagagagatgctttggtatgcacatggagatcattggattggttcttttcttatgcaaacggcaatttcactctattcactttcctaatggctttgctttttttctttttatttcattggcaatggaaaagttatttggtacggtttactctgttttgtgactagaaaaggtaatgatattgtacgaaaccaactaattttgttggattgcgtttggagtgttgtggtaactcacaaaagttttaggtcgaggtttagttattacgatgataaaatgagaacgagatcttaataaaaaaaaaatctaattgagattaatgaggaattgctttattgaaatagatctaaatcagtagaattgaaggaagaactaaaaatggggtatgaggtgtatgat

SEQ ID NO: 32112 - DNA, 537 bp, Arabidopsis thaliana columbia
gaggaaatacacacaactttttacaaacctcactcacataaatcacactaacaacgaagcaagagcaaacaatttctcatcaatttcgtggtaaatatatagttggtttaaccttgaaccggttttacaagcatgaagagtctgcacagacgagactttctttacatttttctatttttttggacaagagcttctcaaagagcctaattccatggtggagaagaggatcggtgcagagaagaagaagaggaaccatagttgaggtcaagattctgaatctgttccataagttgtgaccgtcgttccttgaagaaatccagacgagtggttagctccatgagagctgcagatgttgcaggaggatgatgatgtcttccgtagtccattacctacaagaccgtttactcacactttttacacatttgaatctcgtgagattggtttaaacaagactatcactaaccggagaatactcttccattgggatgcctaaggatgctgcattcaagcttggtgagcctggtacttgtctgttgt

SEQ ID NO: 32113 - DNA, 497 bp, Arabidopsis thaliana columbia
cgactatccccgactctagagaaaaaaaaaaatgcaaaggtgttacctttagcagtgaaacaaaaaaaataaaactcttttcttttctctgcctagctagggcacacccggtggtatgcaacagaaaatttatattttctgagttaacttaagatatagattttattatgtttgatatcttgaatttccttgaattgcttttttaatttaaataatttgacatatgattttcaatagtggactttttttagcgaatctcattaattgatcatacgatgggtcctattagtgaccattatttagaaaatgaatgcacaggaacaacatgttgtgtctctttttttcaccatcattagtattttttttccaaattgtaatatgtagaccccacaatattcctaatcattctttattttttgaggaatggtagaagaaaatttttccttcccaaatttgatgaggaacaaacaggaaaaaaaattaaatatttattaaat

SEQ ID NO: 32114 - DNA, 516 bp, Arabidopsis thaliana columbia
tcatatgtagaggctgactcaaaagatgcaatgaaaggaggagcttgacatgaaaagtgaagcattcatcaaagaagaatttaacgaaagctgcaatttcgacgtggatgatgctatcacaaagcttgagaagcttggacttgtatctcgtgtgagtcccttgctatacctctcttctaatcagaatgttcctctgaatatgttcagttaagtaaatattgtgagggctggtcaggattcagaagacaagtatagatgcgtggaaatgaaggaagcaaacgagataatggggacaactacggaagagatggtactcaaggcaagacaaggtggagaatatgaagacgaggatacaacagcgacagagcctcaaatgaatcctcaagataaacttacagcaaaggaggaacgttttcaatctcggtatgatgagtttgagaccttgtggatgtaacaaagatttgatgtcattcaagacccatagatttaatattgtagacagcacaaaaaagagag

SEQ ID NO: 32115 - DNA, 511 bp, Arabidopsis thaliana columbia
  unsure (1)..(511): unsure at all n locations
tggccccactttctttcttctccagccgacaganatactccaacacatatgtcattgtaatatgctgagaggaagtcaatccattattagaacatgaagaattttccttgatcacaaattagagaaaatatatgtaacaccaagaacataactacccaagcaactgcaatgaaatagttagtaccaaatttaagacgttgttaacagtctttagactttcataatcacatcttattgtacatttaaagaactagttgacgcaaaagatgttccaaccaagggtttcacaaaagtgagcttgaaaaaattctgtgaatacgaaaattagtcttggaccatgttctcgaaagataatataagtcaatcagcgatagattacaaggtacacatgcttaacatacaaaaaattttgcttggttgaacaaaagaatgcagtattcatatagtcaaacaacttaaaacaacgatcaagatgatactttgtcaacatcaatgtcatcaaccacaaagt

SEQ ID NO: 32116 - DNA, 579 bp, Arabidopsis thaliana columbia
tgacaagttaaatcttgcccatccatcattttcttgtttcatgtttctctgtcctgtaaagtcatgtgttgactccttaattgaagtcttcttctccgttgttttgtattttgcgctccaggtcttgatgatcttcgtgattggacaaacaatgtccaacctcacattccaatttacactgctatacgtgatctcgaggtttacctgttttccaacactccaaaatatttcccaatgctatttcagtagctaaaggctctccaccatgacatgtgaatctcaggtgatgaagaagacccattattacttggttgatacaagtgtcatcatacccggagctgcagtctcagagttggagtttaaagtcatacacgaggaccagccatttgtggtaaacgatctgaaggtaacatctatctctagcttataatcatcaaaactactatgctcagtaataatcttggcgttgtcttatgcatgaattggatgtttttaactgtttcagatcccccattacctgtatggcatggaagtaactaccgttcccttggtttcgctttggtaatgctgctacataag

SEQ ID NO: 32117 - DNA, 519 bp, Arabidopsis thaliana columbia
aaaccacaaaaccaaaagtgactgatccatcatcataagcttgtgaaatcttggagacaaaattaatagctaagagcagagaacagtccagagaaatagaaccagggggatataataggtaacaaaataacaccatcaaatatcaggttagtactcaatgagataaacagaggtatacaattatgtgaacacactacaccatcccaattaacaaaatgataagaaaaaacttgagagaagagcttcattttcaaatgtaatacaacacatcagtttctcaacgaatcaagaaagagttaacattgatcaaaaacagaaacataaaacactaactagaacaaacacactcatgacaaattaaattaccaatcggcaaaacatttaatcagtatgaatataagaaaaaggtttgcaggttattcttcaaagtgaaactgcattatgacttgacatacagacttgttgtacctctagaaaccaaataaagttttcatttttatgattccaagacataccaaa

SEQ ID NO: 32118 - DNA, 621 bp, Arabidopsis thaliana columbia
gggagagaaaatcccatggctatgaagttttttccaatgactaaattcagatattgcatatgactaaagtaactataacaaatttggaaaatagatagaataaacaaattgttaattaacaaaaatgctagtaagtaataacaataggaaactacccgacgatgtttgaataacttgaaaataccaaatatcatccggagttcctctaaacacttcagtaaaaaaaagttaccgaacggataacattttttcaatgaattgctgatataagaatgagagttgacgtgaaagctaatggattcactgatggaccagctgataaactttatgaagaacttgctgatggactagctgaaagactttctgaagaacccgctgacgaactatatgacagaccattcctactcacatgaaccacccgaccactttgaagacttcctgttgttttactcactcttttgaagactacacaacgtttagaagctgcatgaatgaatgtgtcaagctggagagacatgggtttagggatttgtatccaaattcgacgaatgcgaattatttatgtggacatagttaattgtttatcaaatcaagctatgagacgtttgattatgtgaagat

SEQ ID NO: 32119 - DNA, 495 bp, Arabidopsis thaliana columbia
atgccaagttgttcagcaagcaacaaattatcaaagaaaaaataataatgtgatttaagatgataaagatggaagaaatgcagaagaatagtttgtagagccaagcgaaagagatgaagagcctaatggtgagcctgtttaccaaactccaaatgataaacctagagaagatattgaatctcatgaagagcatgatatcactattaatattgaatttgaatcagataatgagcaggtggtgaatgtagatgtgatcagaggagaagaagtttaggatttaagattacttttgggttttcaaagatttaagattactcttagttttcattaggttaagccttacgttaagttttatttaggagaattttgcattattttgtagcttaggtttcaacgagatcatttagatcttaatcttacctttatcattatacatttgttgaactttatcatggatattggaatttatagtctattataaaagttttaaaataa

SEQ ID NO: 32120 - DNA, 368 bp, Arabidopsis thaliana columbia
ctctagaggatcatcccgacacagagggacaaagcttatttttctataatgttgttctctttatacttgacattaatgttctagtaaagttgaaggctaattagcatatataatcattgtaaaaaaaaagagaaattatatgaatgaaaaattataaacgtgctttgttataacatgtctttcatatttagaattttacagatggaattaatttttcatagttgactttagatctcattaattagaacactaattatgtacgtctatgtaaaaacataggcaaaatgataacataatcgaagaacacttcataaatatgggttatatatagatcggtcaattcgacgttctctcattgtacatttaac

SEQ ID NO: 32121 - DNA, 443 bp, Arabidopsis thaliana columbia
  unsure (1)..(443): unsure at all n locations
nnnnnnnnnnnnnnnnnnnnnnnnnnctaaagtatgatcaaggaaggtttggtgatagttaagggataagtggtgcgtgaattagaaatggctatcatgtcaggcgacaatgtgtaacttggcggtcgtcatgtctagcacgacgaacaggtatgtcatctgcttaacgagtttagtggtgataattgtagtgtgacacatgatgaggttggaaagatggaagatgacgtggagtaaaatggtataaatggtggtaaaggtttaaatagaaaggattgtgatagaaatggagtatggagttaaagggatgaaggtgatttttgagagtagatgattgacagtggtgatgagagtgttaaggttaatgtagcgagtgtataaggtgtgggaatgatgagtatgttgtgtgtggttggttgtattgagattgatggttagaaaat

SEQ ID NO: 32122 - DNA, 123 bp, Arabidopsis thaliana columbia
tccgggtagaaacggtatccgtacaacgccaagggaactccggggagacccttgttaacatcggtcgggtacttgcaagtctcgaccggagataagtagagcgagacacgacagttctctaga

SEQ ID NO: 32123 - DNA, 556 bp, Arabidopsis thaliana columbia
agtcataatagcgcttctcgagccgtttgtaaccaatagcctgagccacatcaatgggtcgaccaggcgggtaaggacgttgacggaaaccccagaggccgaagagaaactgtttcatgaaatcccaaaacttatcatcactctcttcctttgatttgatcgccttcctaggcatgggcctcccgtcaaagcccgggacatgaggaatggctctccagtaatccttgtcttctttccgataaggcgtgtcgttatcctcgagctccatcttgttcatatcgtcggcaatctcctcggcgcgagtcataaactgaaccacaggactcgctcgaaaactctcccaccatttctgctcagcttcaatctcttctgtgctcggattctccttcttctcgaaaactggatcttcgttgagaagcttatccacttctggagtgtgcctgtaatccggtatgtcgcacactcccataagaactgctctgctatttgcttgtacggtcctggttcgtcggtcctgctgtttcgggttttggggacttctttgagaattttggaa

SEQ ID NO: 32124 - DNA, 517 bp, Arabidopsis thaliana columbia
ccctcactttattattattgtttgattatatatatatatatatatatatatatttgggtgtaaataattttatattttggtaaacataatataattttatattttttacacatgatatgatatatttgttttgtctctatcaatactaaaacaatatatatatatatatatttataaaatactctaacatttctactaatattcaatttattagataaattttaactaattgacccgtggtccaacccggttgacccgctcacccggtgaccaagaaggtagtccggttcatcatccgggtcgggtttcaaaactttactggagagaatcaacggctaaataataatcaattgaatggctaagattagcagttatgacgcgcgattttaaaattcgggtcaaaaggatccgcgtctttttaaacgggtttttcatgatagaaaaattttaactcaatgacaaacttgctatttctgcgaaatggcacctcattaaatgtacgtctcacataatagag

SEQ ID NO: 32125 - DNA, 806 bp, Arabidopsis thaliana columbia
tggaacaaatgccacagttactaatcaaacaaaatttctttaccaacaacaacaattactaatccaggcaagtattgctgtcttagggctaaactgacctagataataaattctacattctggttagaactaattaaaaagtatagggatcgatacggtaattaccacattctctcgtagggttgttgttggaaccggaacactggcaaagaaagatctccgtctcggcgtcaaagccacaagtgccacctgactttcggcaacggtcacagccaatctccgttaccgagtacgaaagctcgattccataggaccaatccaaaggccccactcctctcatttttccattgtcaatcaccgtcgtgtaatgtgagcaatccaaaatgttcatactcatcacccgcaccgtatcgtagttagtgaaacagcaatacggcgtcgtatgaaccgtactgttgttacctggaaacacagatttcaaaatttgggggaaaatcgagaaatttcgacgagattttgaaattcaaatcgttcaacttagcgattcataccatagggagaagtggtgttgaagattcgaaaggaagtacaggagctataaagctcgtcgcaagagtggccggcggcattaaaacatagattccggtaacgattatgaacaggagaatcgttggaacagttgaaaagtgcgaaaacggtgtcgtacgaaggtctaataagagtgttttgaatatccgccattttgaaatcgtggtgaggctgaagaatcgagcaagtagacatagcaggatcgaagattaccattg

SEQ ID NO: 32126 - DNA, 521 bp, Arabidopsis thaliana columbia
tcgaaaccgaagcaggagatcatcttcttcttcaaatggccagcttctattcttgggcccttttcctgttcatacaaagcaacatgtttctgttgttggttttcccgggaaaagagagaaacttcttcgagggaatgcctcaggaaagaactttctctgtgttgggctttaagagaagagaggaagataaatgtttttgaatgaagattatccgaagaaagagaagcttttacggtgtttggaatggcgggaggaacgagggagtgtatggtcagcggtacgtgatctaggagtgctggacactgagttctggactgtatcattcttagcatcagaagctcgtggaagaagaaacttacagccgagcttgaccagacgaggcgagctcattgagctagaggacttactaactctcttcttcatctcctgcttaatactctgaaactcctcttctagttctccaacccttgacctcattttctgcatatcaactttcaaaaccctggttttggcgcacaaca

SEQ ID NO: 32127 - DNA, 561 bp, Arabidopsis thaliana columbia
gtatgaaacgtttcatccacagattatgtaattgattgctccatcggtgcgtttgatgatcgattattctcgttttctttgattttggtgttgctctgatgatgatgatgatgatgagattatctcttgatttgattttatatgatcacacaaaatgttctctcctgtgcgatctctcgttcagctcgaaaccttttggttgatcttcaattttaggcggaatttgtggttttgtgtgcttagagatgtttgcttgaatcttatacactgagagcctgtgagaatcattttggtttatatatataaacatctctttacttcttttgaatcacatcatctgtttgttaatctgtgcattattgaagcttatgtactatgttcttcattgattctttagcttaagattggtcctagtttatatgatcatgatctgtttcatcatttttgttacttctacaaattttgttgtggacttgtagtagtgatgcagctcaataatctgctagctaagttttttggaatgtgttggatatgttgttgattctcttctccatttttgtc

SEQ ID NO: 32128 - DNA, 501 bp, Arabidopsis thaliana columbia
ttttattttctgatatccagctgattctgtggcccaagaaacccaatccattatccatggcgtgaagacatatgtagctgtcgtaaaagaataaacaaagaccaattaaaaaagagccaattaacaaccaaattacataaaatttattaaaactaatctattaatcacacgtcttgttctgccgtcagaatgtaattaccgtccgtcttttaggaaacaaagaacaaaacaaacggcgggcccaccgccgttagaatctctctcggttagccgacgcggccaccattctctctctctcttcatccattctccacgcgtcgcgttgaccacgtggcactatacatctttaaaactctttctattttatttaaatagcgagtgcgttgtgggccatctttgtttttctttggcggaggggcggctaaatagccttttgtttttattttagttttattccgcgaaagaaaaagcagtcaaactccaagttgaatttggagctga

SEQ ID NO: 32129 - DNA, 578 bp, Arabidopsis thaliana columbia
ctcagattttgttaatatgaaactctctctagttccaactcttcttcttcttcttgttcttctcgtcttttatcaacatcactcttctccaaacctaaactcgaacgctctctcttctttcgtcgacgctacgtccctcgccccatctccttcaccgtccctgtctatggagtttagtgtcgcctcatcaaacctttcaacaatttcgagtcctcctgaaaatgtatgtttttattaatttacgtgattttgttcatttatgctatagatttgttttgacttttgaatatatataatttgttgtaataagaaaggaaataagaggaacataattgaggaaggtttagcaaaatcaagatccgccatacgtgaagccgtgcagttgaagaagtttgtatcggacaaagaagaaacctttgttcctcgaggagccgtttacagaaacgcttttgcatttcatcagtaagtttctgtttcctttttttcttcgtttctccttttttttttgtctttcaaattttcatttaaagttactttccatactaggaaatacatgtaatactaagattttattgggg

SEQ ID NO: 32130 - DNA, 519 bp, Arabidopsis thaliana columbia
ctagtaacggaagagaaattttttacgaaaaagtacatagggaaggattgaacttggataatgggggtgtcaatgacacatgataaaccaacttagctattatctctttaacaaatttcatgcattaaactttatttgtagatttaaggtgtgtcaactgacccaccttttctcttaatgggtccgctttgaccctcatattccggttttcatgttgaaagattggattatgactaatttggttattaatttgtcaaggggatgatgggaaagtaggggtgggcattttaaccgaaccgcaccagccctcacgaactcaaaccgacccaaaccaaacccgatctcagactcaaactattcgattgtattttatctcaatccaaatgggtcggttcggttactaaaaaggtttaactgtgtttatcttcagtacatgtattcctccgccgccaacaactatattgcttaaaaacatcaaactaatttaaaaacctaataattatttttgtctacaattat

SEQ ID NO: 32131 - DNA, 522 bp, Arabidopsis thaliana columbia
tttttgtaaccggacggagaacctttcacgatgtctgcaaaccaggaggaagacaagaagccaggagacggaggagctcacatcgtgtatcgggactcacacggacaggtatctctctttctccttctcatccttgtgtgttcttgtgaatgtttgggtttctgatttcgtgtagctgcgattagggtttttcattctccaatttggtttaattttagggtttcgtactactagctcagtcttaatggtcttcttcctcttttgttttacaggtttaaagtatcctgctttatgtttacacgtttgcttgtttttgctaattgtttatcaaatttctgaaattatataagtcttgtttaggtgtaagttgttattgagcttttggttcctgttgttgtttgagggttttatagttttggaagggataagtttacttagttgttgaatgttctaaagactgtgaacgatgctgtctctgtactaagtcgtcatatatctcctgatgaagttgtagcacggtac

SEQ ID NO: 32132 - DNA, 254 bp, Arabidopsis thaliana columbia
cagtgtgctcgtgtgctctaaagagagtagtggaaaaccagcatgagttgctggataattggatcattcagtagataaagactgccagcgcataggcaaatagatggcagtatatggagaagtcgaagttatcacacaggaacttacgcttagaatgcttcgagtacttccctaatccgtcgtaggacaaagcagtaagtagcataagccagggcgaatatatactacgagcagttcaactagtacccaaaagg

SEQ ID NO: 32133 - DNA, 511 bp, Arabidopsis thaliana columbia
gtgaggagaggattgaaacacgactgtagaaagaagacagacaattgaagacagatcttatctctatccctcccacgactactttctttggaaacacaaagctatatatgtgttctcttttataaaaaataaattatcatttcacataaaatagtcagagacaaacaattttcgaaattttatgaacaatacgtagccatttatgagatgtgtcatgcacgtgatgaaaaaactaaataaggaaaggctgtacatagaaatcttcttggttaagagacaaaagatcttttctaggctttggtccatgtatctgcctttcttttcttcttctttttcatatatatgttttttatataatccaataatatctgcaattttatccaagataaaataggctaccttactatttctggaattatacaatattttctcatgtagaaatatggttttgtgttaatttccactaaggctgataaatataatgttctaccgtacctgatgaaattgtagg

SEQ ID NO: 32134 - DNA, 480 bp, Arabidopsis thaliana columbia
tcagtaataaataaaaaaagtcagattaacatctgccactagctggttatctaacttctaacgtaaacgaataactaatgttttgatgcagacacatcagccagaataataaatttcctagtggtgtagtacatgcatttcatcgatcaaaagccaacattctttgacttttttctaggattgcattcatcaattctacaatgtacttgtttttaattctagagcaagaaacttatccaacacctacttgtaggaagctggtcaatttcttcggtttagtttggtttatactttatatggccaatttcctttgggtttgcttaaaacaaaaatttacatcaggcccaactctttattatctttgacctgccattaacaagactagactggcctatgcttaatggcttaatgcttaactttttgtttaggtcagtaagagcaaagccacgtgtcataacacaagataagtggacccacatg

SEQ ID NO: 32135 - DNA, 1047 bp, Arabidopsis thaliana columbia
ctcaggtgtcaaaacggatcttcattttccggacccggatgttaccgccgctgccgtctccatccttgcggctctccctgccttctcgcttcctaaactcatctctgattgcagctctgagattgcttcctgcttcgattctccatctgacaaccttcgtttttccatcaccgagacacttggctgcatcctcgcgcgtgatgatctcgttactttgtgcgagaacaatgtgggtctcctcgacaaggtctccaactggtgggctcggatcggccagaacatgctcgacaaatccgacgccgtctccaaggttgcctttgagtccgtcggcagactcttccaggagttcgactccaagcggatgagccgtcttgctggcgataagctcgttgacagcgagaactccctcgccatcaggtccaagtgggtctcttccatggttgacattgtatggagaaagaggagcgctttgatggctaggtctttagtccttcctgtcgaaaccttcagagccactgttttccctcttgtctttgctgtcaaagctgttgcttccggtagtgtcgaagtgattagacagctttccaaggcttcctctgctgctgctgcagctaatgccaccgttgtggactccaacgccgagaagctggttggcgtctcagatttggttacccatttggcgccattcttggcttcctctttggatccagctttgatttttgaagtgggaattaacatgctctacctggcagatgttgccggacgagagccagagtgggcttcacagtccattattgcaattttaacactctgggaccgccaagaattttcctctgctagagagagtatagtcagggccgttgttacgaacctgcacttgcttgatctgcatatgcaggtatgtcgttttttacttcatttaagctcggttagttgtgtcctttgtcttgaagctgtggcctatgatttctgaatcatctttttggaatttgttacgaaggtttcgttgtttagaagactgctgcttatggtgagaacttgagacag

SEQ ID NO: 32136 - DNA, 538 bp, Arabidopsis thaliana columbia
cacgacgatggtactttctggatggagatcccatgtttctttgatcgtgtctcattgataaaggctccagcgactatttttgtctccgatcttgcatatccggtgaaatcatgtcggaatagtggtcagccactcaactcgaagaagcggcagtcatcaggagacaaaaccctagctgctggtgtggatctgtaacgacaggatctccttttcgaattgggctggatagtttctgacccactaagaagtttactacggcccaaaactaatgcatatgggctgacccatttaccaattcggcccaggtctgattttctttcttccttatcaaacactagatatttgatgtcacgttatgattttgagactggccatggactcctttctctcatcacgttgacaacaatagatagtctagacaaggagctcttattaaccctggtggtagatcttagtgtccttgagagtagctcatacaattcctatatgtctaagaatcttatgatagaatcatcgtctttgatagagagaacttttg

SEQ ID NO: 32137 - DNA, 608 bp, Arabidopsis thaliana columbia
taataaatatttcggtttcacaaaatactttctgttaagattacgatttttactggatttagaaaacaaattctaattttttagaattaaaagaaaaaacgccaaaagaaaacgtgccttagtcgattaatttgtgccctatcattgatctcttcttcttcacgttcttcctttttcatctcgtgttctgtttttcattatgcatatctatgtgaggagtggtatttggagattgtatgataacaaggagtggagatttattgttgatgaaaaaaatcgtgggagattgttgtttttggaattgaatacaacttttgaagagcttaagctgatggtcagagaagactatggaatagaacagagtacaatcgatgtggagttaagctacttacccacggatcttagcgttgattgtcctcctaatgttatgataaataacagacaggttagtaattttctttcctattgcaaaaagaaaaaaaccgtaaagttatgtgtgacgttcaatggtggagttgaagataaaggaggtaagaaaattttgatttgaataaggaccaaatgctccaagcgatggagatggttgttttaatgctgacgaaaaagta

SEQ ID NO: 32138 - DNA, 599 bp, Arabidopsis thaliana columbia
taaatttacaacagacaaaaacggaaacataactaatttaatccggacagttgtgtgagctccaagccagtcgttttctgtttaacaacttaccgctttctgttaacggaaaacaaaaattacccgtgatttaggccgacattttaattgggcttagattgttatcaaccaaacaaatgggcttagattattaaggcccaatttatatctgaagagtgttttaccactagtgtttttttcactacactgatccgccgcaccaagttttaacgcgtcccagacagacaggcaggcatgttctgtctgacatttccaaaaattcaaatatttttattaaataaatatatttcccctacttgtttaatccaaatttaaatcttcattgaatgctttttctgaagctttatctaataaatctcttcgttgatccttcctttccattaacgaggtagaaattccaaaacgcgtaataatcttgtcgtcattacaaattacaataaaaagaagacatttttatttagattccctctgatcctctcttttagatttcgaatcgagaccagatctgcgtgaagatgatagagaagtgtataggagcg

SEQ ID NO: 32139 - DNA, 767 bp, Arabidopsis thaliana columbia
ccatatcaataaccggttaggtccatacacatagatttcgaaatttgcacctccggtttaaattttcgaaccgaaccgctttaaaactcctcgcggtcggattaaactattcgcatccttaagcacagtctttgccggagaaaatattccggtagccatgctccggtcattaacttgttcctcgaccattacttcgacctctctcttcttccgctctttccgccagctccctcgctcttacttgtctccctcatcgtcaacgaccgtcgtcggtgcctccggccgcaacattcgccggctttctactctagaagctgctgggagacggctatttctacgacgaggcttgaaactactctccgccgcgagtcgtggtctcaatggacagttctctcgcttatctattcgcgccgtcgctacacaatccgcaccttcttcttatcccggtgagataatcaaactctttagctggaattgaatctgtactctttctctgtaaaatttcaaatgtttctattttccgagtagtttctagattcagagtgtttctcgttggtgaaatttgtgtttagttgatgttactttactccacaaacactctcttatagagaaatttccttgggcttttgatcaaattgacactatacctgcgttaggataaaatggaacattttcttctcatatttgatttatgtttttggttaaatagtgttctgatgagagtcaaatgtaggtcaagatgaggctgagaagcttggatttgagaa

SEQ ID NO: 32140 - DNA, 577 bp, Arabidopsis thaliana columbia
ttttttcttgtttgttttgtcttaagctttcgaagcatactttggttacttgcatggctttgtgtaaaatgaaaataatgtagcaaaatgtttttatttcccatgaaggaaggatttcatatgtgagatgtattgtgtagaactggtcaatttcacgtagaaatttagggctggactggtttatacgtagtagatgtggttgcgactgttgtagtttgtacagatgagcggttgttgtttcaagcattatgaagcagatgcgtttaatttagcggttgagaattgatacgttttgcggaagttttatgactagttaacaattaggtacaacaacagttaaatcgaaaatgatcaaaaaaatataatttataattatattaagtattaaaacattaaatataaaaagaccattgggagatagaaaataatttaactatagttaataataaaaattatttagaaattctacataattattcagaataaataaatttttacgtaaaatgctttttttttttgatgtaatgcatttgggacacaactcgctccgagtttacttatatataaagtttgttta

SEQ ID NO: 32141 - DNA, 569 bp, Arabidopsis thaliana columbia
ctatgtatgatttaggtcactgagctatatagcatctttaatgttctaatgggatctgatgggtttgcttagttttcgatgttgtgttccaatgcacaaatgatagaccagtttggatactaaaaaacttgtctttagagatgttgtgttaatcccttgaattgttaaagtctagatttttatggtcatgtgtttgtaatgttggattctgaaacagctgtttttgtatctgcagataaaaacagtacactctttgatgcatcacaatatgagttttttggacaaaatctggatgatatggaacttgggggtcttgatgatgatggagtaatcgctcctgttcttggacatgctgatgatgatgagtatcacttgtttgataaaggagaggtaacatgctttctctgttgaaagctaacatcttgataatgatgcatgtagtaagtaatggttgcagatgttttactaatagatatgcatgttggttccagggtgcaggtttaggatcactatctgacatggatgatcttgcgacaactttcgcaaaggttagcataatttttatttac

SEQ ID NO: 32142 - DNA, 569 bp, Arabidopsis thaliana
tcattgcgcctgcttctactatcatagtcacgccttgatctcctatcattaccataatccctttccctttctctgtatctatccctccccctctctctttcgcggtctttctccctctctctttcccgttgtctatctgagtctctgtcagaataatagtctcggctctggcttctacgtggggaccgctgttgtacttcatcgcctccatttctgtcataaccagtcggtggaggacggcgaacaggagaagagcctctggtggaagcacgatgaggtgcacgctgaccaaatgaaacagagagggatgcttttactgatggtggacgacgggcagtgtcttctgagccacgggtcatgtctccggttgaaccagaaggtttagttggtaaattcatcttctcaaggtttgatacaatctggcgcatgacaggaacaggtatacgaggaaacaaagtatcaaagtagtactgcaaaaaaaccaacaacagtaagtcagattcaggaattggcatcatggagacattaaagtattatgataaatgactaataaacacatttatagcaaa

SEQ ID NO: 32143 - DNA, 523 bp, Arabidopsis thaliana columbia
ttttgggtcaaatggaaccatgctacgcctgggtcatggagttggtagtttttattaataaagaaaaaacacatatctccatctatatcttttaaataagttttgtacagttgtataatcaagattgtattcgtttaatgttctttaaaacgaaatgcttacaagaaaccaaagaaaaaaattatttgcaagaaatttctatcatgcaaattatagtacataaaatcatagtaaaatattaggactgtaaaatttaaatgaaagcatgtaagactttaactttgtatgtgtttacagcccatctcatgacacgtggatgtcacatctatcttctatgagaaacctcaaaccttcctgggccagcagcatccagaaactactccaactagtaaacaagagagagtgtagtgcatgcagttgttagatgaacattgaatgtatgccacgaaatgacatgtacatttacttagagatagtacgagatatcattaaccatacatttttgaacttagctaatatattg

SEQ ID NO: 32144 - DNA, 517 bp, Arabidopsis thaliana columbia
ctgatttttggctgggcagacttggatgcatctagggttgtccatggggtctataaatatattttatgatactgagaatttgaagtgatattaacacaagaacttttattcgttggtaagatgctgtgtgactttacactgggctatgttttggcaggaaagtacaaacactcttttaatgacagttgcttgtttaaaattgttcttagttaccatttgataatggtctttgatacctaaggtgtggtagtgtgaacaattcattagattggtttgccctgcgacctttatcccttaagatgattctaagctatgttacgagtgaaatgtagcaatgcaaaccaatctaataaatagcttagattctaagctagttaccattgataatggtctttgatacctaagctatgtattcgatattttttttattttctgttcgttttagtaaacatccgttagcttttgctataaatgtgtttattagtcatttatcataatactttaatgtctcatgatg

SEQ ID NO: 32145 - DNA, 645 bp, Arabidopsis thaliana columbia
tataaaaagtttttgtttgatctttacgtgaatcttaaagatgaaaaattgttgtttgcatgttatagatgtcgttgaaggatccggaagttcgttgtgctgtaacacacatgcgaaatttggagcttgcaacacataccaagacagaaagagatgcaacatatggtgtcttgatggatgtgataataagaaaggcggtttttgcaaacgttttgctggtggagcaaaaaaatgccattgttactgttaaaaaaaatatgtttttactgttgcgtgtgcaatcctcgattgcttattctaactagtattaaactcaaaatcttgtcttcactgttgattatatctttagtatgtgaaatggtcactcctgaaaacttctttcacgttagtttaaacttttcaagttaacaaaatttgtttaaaatcgtatctaaaccaaaacggtaccaaaccaaatagaatataaaattgttttgctcataggtatgacctcagaatagcgatacaatcgtgtttaaacaaaaaggaccaataagctatcggcaaaaataaaactaacaccaatgtctcaaatatgttttggtctttggtagcagcagctagagtaataatactggtaccaaaccaaccaaaaccattgaaaag

SEQ ID NO: 32146 - DNA, 501 bp, Arabidopsis thaliana columbia
gactatgattctttcttcatttgtttggtaataagtagcagacagagagatccactaatatagccttcataactcaattcattggttttgtagcatcaaaagaaataaacagacacattctttgattctcagtgaataaagcattgtaacccaatacggaaacaaaaattctttctgagcccaaaatgtaattttagccttagtattttatttacataaaagtccttttaatcgttggctattgcatttatcgcccaatacttgtctttgagctcaagaaatatagtttactaaaaggctgggtttttctggatttcttactcccaaaccgatacaagatcgaagctttgccttctgtttcttcgaaaatctaccatggctgctctacaataccttgaatcgcagaaaaatgcgcacccagagcttggtgagtggtacaattcgctcgcagatctgtaccagaagaagctctggcatcagctcactcttaagctcgagcag

SEQ ID NO: 32147 - DNA, 625 bp, Arabidopsis thaliana columbia
  unsure (1)..(625): unsure at all n locations
actaatatatagtgagaggtctttggatgtggtgagattctcttaaactctttactttatcgcttccgctatagaataatttccctgtcatttgaaatgtcactgtggttattgaagttaattaatatattggtacaattggatttggtagatatgtaaggataaagatgaggctgaggtgtggtttactggtcttaaggccttgatttcgcattgccatcaaagaaacaggagaactgaatcaagaagtgacggtacaccatctgaagctaatagcccaagaacatatacccggagaagctctcctttacattctccatttagtagcaatgacagtttgcagaaggtactataacaagttttctgcgtatacttttgtgcatgtgaacattaacttacatttttcgtttaccttccaggatggttctaatcaccttcgtattcatagtccatttgagagccgcctaagaatggcctcgacaaggcattttcggacatggctttatatgcagttccccaaaaggattttaccctcagattntgcaactatttctgtcattctggaggccggatagcatcatggacatatgaggggtatgggcatggatgcctttagagttagtat

SEQ ID NO: 32148 - DNA, 915 bp, Arabidopsis thaliana columbia
ttttttttggcataattttttcctttggttgggcagctaatattggttgctggttaaaaaaattatttggtctcctaaccaaaaattgcgcccgaggtagttttcctaatttttttcccaaacttgtatattaatacatgattaattaatctatttttaaaagcccttaactattgctagacacattaattttagttattcacgaattaaaagaacattaatcaaagtatacttgacaggaaaaaaaatcaaagtataatcagaattttactaaacaaaaaaacattgatggggtggtaggactgttctcgcacgtgtgagtaggcatgtcagtatgaaggtcaaggagtaagcgcgaacctcggctgcttaccggctcggtcccgctaatcacattgttgcctcttcttactaatctactagtatctttttatttaatgctaattaactcttctttatatatctcctatccatcataaatgaaggacgtggaatcgacgacgaaccggcaaaagtatataaatagtttatgaatgatgatatcaatgcaccatttcatttaatatatatttctccctaccctttgacaatttaccctttgatttggaccatgacataaatatgttagaatttaaaccttttagttttacttttcttctggtacaaatcagaccattgatcaccgtaccttcttcgacccaatacaaattttgttggctcaaacccatttcaatatgggctaccatgtaaatagcaaatgggatattacggcccattaaggcccacagaaaagatatatctgaagggattatagttagctgtccatccaaacagagcaagctttccttcttatcccgaacaattcggtctgcttcgtctccctccctttcaattttcgtagacgaaccaacgaaa

SEQ ID NO: 32149 - DNA, 610 bp, Arabidopsis thaliana columbia
  unsure (1)..(610): unsure at all n locations
tgcaatcactgtaaatgagtaatatactacacaacacaacaattaatgttagtattatcgcaaactatataagaatgcaagtactaatttacaaaaatattttttagcattttagttcatgtcaaaagtattattttattttttctgtatatatgtccaagactcgaatctctcaaaattatttacttcatttatttttaaaactctccccacacgagtgaatgatttaaactttaattcattcctcgtccgttttttttgttatttatagccacaaaattccagaactcataaaatctgcaaaaccacattaaagaaagaaaaaaagaagaagacacagagaacattcttccttctctgataacaaacctggtcgtatccaaaagagagttttcttttcttctctgattggtctacatatatcagagttttcttcttgaagaagatatggtttgtttctgtttcttggttgatcagacaaggaaagtgaacaggagcaaaccggcggctggaacttgctcacggtgtggccattgtgcgagcatccgcgacatgaagacttcgactagantctgttcattcctatttattggagatctggagactgttg

SEQ ID NO: 32150 - DNA, 476 bp, Arabidopsis thaliana columbia
tggtctacttaccactaatatatgtttaaatagacatcatgcaacatataaaccacaaagacaaccatatatagtaatatactaaaataaatgtatcaatttgatatatgaaatattggcgtctagcaatacacactgatatcatattcaattttcgtatccgcggataacttccaaattattttaagctcaacatcagagatgaatcataacgacattatgtagacatttatatatagtacaagttacatgatccaaaattcctaaacccaagaagaacagaatccctcacttttgtcatcttccatggattcttcttctctgtctccttctcaatggtctgatcttcctttagatattcttgagttgatctccgatcgtcttgaccacgactcatcagacaccattcatctcctctgtctccgctctgtatgtgcacttggcgtctctctctccactctccaacaaaaacaacc

SEQ ID NO: 32151 - DNA, 512 bp, Arabidopsis thaliana columbia
ggtcgacgcggagagagagatatattgatgttaaaattattcaagaaaataagtttgtttatgtttatataaaataatcgaaagttataaactggattttacgtgggctgtacgcggccaagatatgagctgtttagccgttttgtttgtttcttaagttacatgttttctctttctattctcgttttattcaattctttttatatttgtttgattgtactcacaaaactataaccgttttcaatcaaaattactgaacgattttctcaagttataagaaaattagaccaattaagtggaatcgatttctttccactatctatgttttttttgttttgaatatgatgttgaattatattcaaaagaaaaagttactaggtattacaagtgaatgtaaaaaaaattcaaaaatatctacaagaaatttggagattctagacttgatttcctcttgttgcaaccaaaggactatgccatcttcatactttaattgtctccctctgaagtgtgct

SEQ ID NO: 32152 - DNA, 573 bp, Arabidopsis thaliana columbia
  unsure (1)..(573): unsure at all n locations
gtcgactctcccgtgatagaaaatgaattatgactaacaaaacaaatttacaaacaaggacaaatagtattctgaaattactattacacccaaatagtttcctttattcccactcacgtctccttcttctagaaccctactccggcgccgccgacaccgacggttgccggagggtgtggctcaagcttcctatttttccagaaacaagcttccggcgctagttcgacgctgacttcctcggttccgatttgcaacgtggcagcactggtggctgtaccttattagctccggctaccctctgttccccaaccgccgcagctgccgttattatcggtggagctgctgggtatgaacacgatgaccgtggcggctgtaggtgaagtggtggtctatcgattgaccgccggcgagaggatgcgttggaatcaacggctgtgacgattcgcttcttgggttgatgatgatgatgattgtctcgacggcttctggtggtacttctcgccggagtcttcctggtnacatctgcgaaatctgtctgaaaccaagtctcttagaacttcattgagactttgg

SEQ ID NO: 32153 - DNA, 554 bp, Arabidopsis thaliana columbia
tttatgacgaaaccatcagagtgttggaattttagcttgttgatccgaatttgtctgttcatttcccaatgattgtttaaattgtttgtttgatcatattagaacagagatctgagtctttgtttcatatcagttgactttcgtatatattcttcttctgaagtcaatctgttccagtatgtgttgagaagctaaagatagttctcataggtctgattagggttcatatacatatcgctttcttgcatctcaagtttgatattgaagtcattaaagctcaaatcacttttgaccattttctcaaaaacattttttattgttgaatgattgattgcagaaccgtccacacgttccgaagtttggggactggaacaaccaagaccaaccattcacggtcgtctttgacaacgcaaggacgaacaaacgacaagacttgtatgaatctatagagaaaccagagaccaaacctcaagagctagctcctcctcctcctcagcctgctcgtagaattcaaaaaccggaagcactaaaaccggttaagcaagacacgccga

SEQ ID NO: 32154 - DNA, 568 bp, Arabidopsis thaliana columbia
gaaacaatatatatgtacagttgcaaaagcttccccctgcattttattatacaaacaaacaaacaaaaatgtcaccataatggatgaatgtttgttcaccatgagtatgcgacttattaacatattacattttagcattactacatccaaatacttcaactatcatcatatattggaaatttggattgatggcttgagtcataaaaacctacaaaaggattggacgatacttttagtaaaatctcttaaaattgtccgcagtgaccaaaatgctaaaaagctagaaggatatacagacttttatcttactttatgtatcagaaaatcaatatttcttaataaatatgataaagtgtttcagtttattttgagtttagaaaaagccaaatgaattggaatcaaaataatgtaggtaaaaaagagaagtggaattaaaataaaatcattctatccaatcaaaacggtaagtagttgtgcgttttagaggcaaaacaccacagcgtttcgaagcacgtggatgtgtcgtgtgatacagcagtagcgcactattgggcattgagaatacata

SEQ ID NO: 32155 - DNA, 532 bp, Arabidopsis thaliana columbia
ccgacaatagaaaataagcccatggcttttatgagcccatataaaatgactttcccatgtattttaaaatagtatataattgaaattttgagggtaagatcacaattaataaaagtttcattagtgttgttgattaaaataaataaatgattaaaattattgattcgtatctttcatgtcaaatctttaaagattaaaaatatgattagcttgattaaaagaagaaaatattaacgaagtaaaacaaaattattgattcgtctctcagataatatttaaaaatgtcggaaacttttaaataatgcgataaaaaaaaacaattgtctaaatcaataaaacccaacaaaaaataaattctaaactgttgacaaaaattaactttctcagaaatccaaaattgatccctcaaaaacatgaaacttcaaaattgaccacgtatcaaaacaagaatattctactccacgttcaaaatcttgacaacagaggagccatcgatcttgtgcaacgcacaatcgagtccctgtcttacata

SEQ ID NO: 32156 - DNA, 740 bp, Arabidopsis thaliana columbia
gtcagagaaacacttacatatgaatagcaaagggagtcaaaacgttgcaacaacctgcaagcctgtcactacatttgtccaaactgacaccaacactttcagagaaattgtgcagcgcttgacaggtccaacagagaacaacgctgcagcagcaacaccagaagcaacagtgataaaaaccgccatacaaaagaggccaacttcaaagctccatgagagaaggcaatgtatgaggccaaagcttgaaattgtcaaacctcctctgagctttaagcccactggtacgacaccatcatctaaatctggtaataccaaccttttaacaagtccagtgggcaccccttcttcattgttctctaacttgtccttgatagaaggggaaccagatagttgtacaacaaacatcgaagaagaggagaaagccattaaagaaagacgcttttacttgcatccatcgccaaggtctaaaccggggtatacagaaccagaattgcttactttgtttcctttaacatctcccaattcgagtggcaaaccataaacccgacagattaatcataagtttgttctctgcctactatcccaaagattatgtacatgtagagtttcacaacaatatcattggaagaggaagattgttctcttacattgttcactcaagatttgtctgtgtcatatgtgcaattgctttgtgtagaccatcatgatctacgtcgcagcgttttaacaattttcatcga

SEQ ID NO: 32157 - DNA, 552 bp, Arabidopsis thaliana columbia
tatatacaaagacaacacaacattggtttcaatctactcccagttctcatagatacaaaacgtaaagatgagcatagaagaagaaggtagcctaccttttaagagcagtttttgactatctgtcggaaacatcttcttgactcttgaggctcttttgccgatgtatgtatgcactcaaaacttagtcgagtttagaaaagtctaaagttgcttagaagcttgtaaagtgttctgcgtccccattggatatcattctcaaaaagcacatccggcgttccaagcggctctgtctctagccgctgctgctcttcctctactgcattgtattgcctctgctctacacttttcactgcttcttgctccgatttctcgaataatgaaatcgcttttacttttgctttcttgtttctttctgctttgggttcttgcttcttatctacctgcaaatagcacaagaagggcatttgcagccgaaaatcacattgctggaaaataatttaacagttagatatgcattgtaccagtggacaagaatagtcaatatagtgaagg

SEQ ID NO: 32158 - DNA, 421 bp, Arabidopsis thaliana columbia
tgttgggcattataaaaaagtttgtaaattcactcattggcagctgatttagccactcacaatatctaaataaataattgtaagcattatcttgaaatattttctgaaatgactgtttcttttttactttaattaaattttgttctagaaaccttttgatcataatgaaaataaagagtccatccaccacatggggtaagcataatgtgtgatatttaaagggtaacaaatgtaatctgctttttattttactttttacctctactcaaattgtatgggcagttttttttttttttttaaatgataagacaagtatctgtttaatggtattgtgatgaaacagtagtaaagtcatatcgggcacgccatactacttccacagtggaacttggccaaattttgtctttgccgtctctacagt

SEQ ID NO: 32159 - DNA, 1534 bp, Arabidopsis thaliana columbia
gagaagggcatttggccaaaagcctatgggttatgggttagattttaatgggataaatgatatgagcgatggaactgatgacactgatcccaacgaaaggcagttcggtgacagaatgattgtaccaggtgatgattatcagctctcaaatgtggttgcatctagatgtaagaacatctacagccatgatatgctggactgggatgatgacccttgggaaggccggattggtatgaagaagcgaggggaggaaaaactcgaaggtttaggtcaggagtttgatgtttctgaacgacattttggcagaaaaacgtattcttcattgatggatgtggatttagaagtgcgaggaagctatcagaaagggcctgtcccaattgtctcccttatgagtaagttaaatggcagacaatcattgggcatccggtcgaagtcgaagtcttagcagatggttcctccgagtcatatattcagacaattgattactttggtaatgaaacaacttaccaggacaaaacctttcttctgccctctgcttggaagactgcaaggcggagtaattcccgggttccacggctgcagccgttctcatcgtccgtagaagcggatgatgatgcaacctatgattattctctggcagatcagggaaggaaaccgcttgttaagaaactcggattgggacattttagtaatgatgataactcggtgaggagaaacagttcattgcgaattccgcgaccacctgcagagagaaagcaacagcatcagcagcagcaaaagaagttgctgaagaacacaaatgcaactgctagccaaaagacaagggcactatcgtcattcagcggcgaacaaggacacaatgggatgaaggcgtcacgagaccggacacacgagctctctaacagacgggtattaccgggaccaccaactgtggcctgcataccggtcaaactagtatatagcagattacttgagaagataaatagaccgccatcaaagccaactgcgaaaccctttaacgagagaagaagagttcaataacaagagatctactcaagtgaaaacgagatttacaggtactaaacacataaccatttctggtctctggttttcgtagattgagaatcacgttttagggcattacaaattctggggtgatgggtctttttgagcaaccatcaggcttttattatgtgatgattctaagggaaaatttagttgtagggagaacaatttacttagagaggaggctctggttacttattggtacagatcggtgaagaagtagaacaatataccactggttcgttttgtatatttttatttttctctcttcagaaagcttttgatgtatctttgatttagcctcagctttagtttattagtcttagagagcttttttgcgtttatttgatttatgaatcttcactggttaatcaagttacacatattatcgattttgtcatttggagattctttttaatatttgtcgtggttgattaaccgtaccaaattaaaattgtgtggggggtgg

SEQ ID NO: 32160 - DNA, 609 bp, Arabidopsis thaliana columbia
ggcagcggttatatcatctagttctgctactcctgttgacagaaatgttattcatcgaaatgcaaccagacaaagaagtaatactctagagattcccttgtttgtcccagctcctgaactgagaaatgtggcccatggtcatattagcagaaatgcaagtggtgctagacatgttgcatcgtcttcatccaggacaagtgttcagccatcaccgtctagtccagcattgactccttaccagaataactcactacataatcaaagaagattatctgaaaactttcgtaggtcattgctttcttcccttgttacacagcagagggctgctcgttcattggcccatcctgcctctccaaatgagcacgtgcttcaatctggtggtgataacacctctcaggtgcataatcgagcttcctcgagagcaggtccaagacaagggcaagatgcaactggcatttctcattctttgcgaggcttggcatccacaagtcgaggaagaaccagaatgggggcatctgaggttagtttcttatcaagattagtgtaccttgtgttcttatagatagtggtgtagatttatgtcatacgactgtaacctatagtttcttg

SEQ ID NO: 32161 - DNA, 437 bp, Arabidopsis thaliana columbia
ggtgattttgtcaattttggatagtataatttatgatctaaattttgtatgtactattgaccaaataaattttagtaacctaacttcatacaccttttagtttgtatgaccatgtgatttcaatagtttttatattgagtttggatgaattagatgtctttaaaaaatgttataatgagttagacacgtagataaagaagagtaaagaaaataacattaaagttgttagaataaatatgtgtattaaataaaattaaaattttctcaattagtacatcgctatatatattgtctttacaatatagatgtggttaattatccaaatgtaatattaatagtattgtagttactgttcatctgatcataaactaataaacaaaggtatcattgtttttaagttattatcatgttataatatcatcatgttgtattattat

SEQ ID NO: 32162 - DNA, 575 bp, Arabidopsis thaliana columbia
  unsure (1)..(575): unsure at all n locations
attcttgatcaaaaattttaaaagtcagatccgatcgaattttttaaaatatacttcaaaaatgttaatatagatgaaaaaacataactcaaaggttaaaagtagaggtattgaaatccggattttgagatttggattgtttctttttgtgtatcaaattatcagtgtagcctatttacaggtaagagatgtgactgaactttaggaacagcaaaggacaaaaagaaaatgcaaaatcttccatggaacaagttaatgtcaaaactaaaaaggccaatttaatttatctaaaatagttggactgcttattagactattagttatttgagggtgtattgactcatgtcagttttatcttcatcttcattagaattggcgacgagcngcgagttcggcgcatgccaaagaagacgacctgagtacgaaccataatttactaaggttcataaatcaaaatgaattattttaatcactctgcagcagttagagtttctaactcgatcggtaagtttactctcctattaccgtttgttgtagcatagtttgtggcatttatgatttttatttggttggtt

SEQ ID NO: 32163 - DNA, 582 bp, Arabidopsis thaliana columbia
attataaaagatgggatgttaagtccggttaatttttgacgtatttatatatgtgtcgtattaaatactgttaaaaactaaccgtttttaaacataaccaaagcgatttaataaaataaaaataaatgttaaaagtttaaattatgtgtaaactatattgaacatatctcatctcttaaggattttggatatttttttaaatccggttagatttaacaacgtcatattaattaatatttatagaaaaaaaagagttgaaaatcttttaagaaaaaaaaaaaaaaaatgctaaatatacatgaaaatgtgaaaacatgttggatttgtggaatcgctaataaccacggttcaatggcgggatccaaaatccggttagatttcacaacatcatattaatttaatatttatataaccttttaaaaaaagagttgaattttttaaaaaataaataaatgctaaatatatatgaagagtgtgaaaaccatgttggatttgtggaatcgctaatgaccaaggttaaatggcgggaccaaaatccggttagattcacaacgtcatattaatttagtatttataaaattt

SEQ ID NO: 32164 - DNA, 385 bp, Arabidopsis thaliana columbia
tacgtttttgtatagattataaaattagtttgaaaatttggttcaaaaatttcctgattaaaagaatataacgaagcattttataatgatgacaatgattcataatttttgtaagtgcttcagttgctacctaactcaaagtcgcaacttatattctaacagtttcatcattttaattttctaaaaaaaacaaaaattctatgaccaataaattctaaattaaacctagaatagtttcctttaaccaaaaaaaaaaaacctttcctagtttcaaggctcctagaggaagttagtttccttaccattcaaaaacctacaatttaaatatctaattttttaaaagtattttctaaaatacctttacaggttagatcttttttttttt

SEQ ID NO: 32165 - DNA, 542 bp, Arabidopsis thaliana columbia
attcaacagtaattttctgacacagaataaaccaaaatagccaacaaaccatatatattaagatgcttacttccatcgttgagtaatgatgataaattaatctcaactgtagaagttggtagtatggctaataaacaaaaatcaagacagtttagccaaagccaaaatacaaaatcatgaacgtttcaccgtatttttagtatagtattttataaaaccttaaaaaataatatataaaaaaagagttgaaaacctttaaaataaaaaaataaaaaataaatgttaaaaatatatgaagatgcaaaaaatatgttggatttgtggaatcgctaatgattatggttaaatgatgggatctaaaatccagttagctttcaaaacgtcgtattagtttagtttataaaactttaaaataaaattaataatcaaaacaaaaactaaggtaaacaaaaaaaagaatttgaaaacggtttaagaaaataacataaagcgcataaatactaaatatacatgaagatgtgacacatatgttggatttgtgg

SEQ ID NO: 32166 - DNA, 625 bp, Arabidopsis thaliana columbia
tgaggagaagacggagaatctgaagacgaaggaagaagaagaagaagaacacaaaggttccaacaagactctgtttggtctcggcattggtcttttctcgcttgtgttcttaatcctcttcctcttttatctcgctaaaaggtgtcgtttgatttgagaagtctgggacgtagtaattttgtattggttgtgtattcacccttctctccttctaaatgttttattttattttctcctgttttagtatttatgaattgtggttatgagtgtatttatgaattgtggttatgagtatctttagttttatttatacaaatttgttcaaaacatagggttagtttagggactgtgtagtccagagacatattcatctataaggacaatgaaatcaaaggagctgcttttgattgattttagttttgatgatgacattgaataaaataagaaacatatctccaaggttcttggaagatttagattctaccaaactgatgtcaaaagatttactacaacaagaaattctttaacatccaaagataacaccttaaaataagctagaatcaacaaaaatctttaaagatcaaaacactttttaaccagtgatggtctgagacttgttgaggat

SEQ ID NO: 32167 - DNA, 664 bp, Arabidopsis thaliana
gagctcgacactgtatctcattgttgtagttgtttcatatgattgttgtcctgttccaaaccgtgacactttacatgctacgttttgttttgatggtgaatggagcttctttaatgttatgttgcaagctttttttctgaattgtctcaaaaatgattaattctcaggaggatacacccaagcctgcacaacctgggcaggctcctcgccctgccggtggtgctcctgctgctcctcgtgcctgaagacttcaagaagctggcaatccgaaacttcttatattctagtttcaatctctcttttgtctgaaatttttgaagatgttttctacattttgttaaagatgatttcgccatattggagctttaaacgtttcagaccattttaccagttgatttgaccaagatttttcctcttttttgatttttgcaacttcataccttcttttcagagaaatatttaatgaccgaacgttcgctcgttcttaagcgatgctaagtacttgtatctccctacttagcataaagcaacaaataatatagtcgagtgttgggtatgattgctttgtaaagtataatcagaggcttaaaaaaatctctaaacttgattataacaaaaagttaactatgcaaattttccttggcaatcctaacaaaatgggaca

SEQ ID NO: 32168 - DNA, 486 bp, Arabidopsis thaliana columbia
ccataatgtaagtaattttctgatatatcattgaaaaatttcttttaacataaatgatgtttttagtttttaaaataaaattaataaatttgattctttaatttgttaaattgttttattattagttgaatcatgtttagataattaaaaaatgatgttctactttagaaataaacaaaacatatttattaattttgccaaattttttacattatatatataaaagagaactaatctcaaatcttgcccacctcgtggaaacaaaataatcaattttttttaataactcagatcccaacaaaaaaaaaaagtaagcgttgacgtatcttcgtttcaaatctcaatcctcatcctcgctgtgatttccttccgccgcacccatcattctccgccgttgctgcgaactcttcttcccatcaacatcatcataaatcgcaaacgccgacgataactccatatgacaaatcctagcaccaccaatcaatc

SEQ ID NO: 32169 - DNA, 452 bp, Arabidopsis thaliana columbia
acaggtcgactcttgtatccgaaagtcagcaaaacattattggtttatattcgataaaacagctacaagaaggtcctggatttggatcggttactttaaatattcttcactggttcaattttttccaagatttctgaagaacaaataagagatcaacacgacggcgtttgtgacgttgacgattttataacagccaaacgtcatcgtttctggatttatacataacgacgtcgcgtggtttctcttttttttttttttttttttttttgtcagagtttcctccttgtctttcgtgaacccccagcctcacttcttcttccaaaagccgaacccagaccctgttctctagttcccatcgacgttcttgatcctctctggttcgcacccgtgtttttaatcaattctggttcgcataggtgactccggtactgtttcttcgtcgatgtaagtct

SEQ ID NO: 32170 - DNA, 588 bp, Arabidopsis thaliana columbia
tttggttattattagataaaatttatataaattctaagcgactactattattattgtactctctatgtcccaacctatatataggatgttttaggttttttgtttcattttattagattttctcaagtctctatgaattaaatttaaaagcttataacaattgaattgtgcagtatttatttatgttggttaaacttttataaatgaaaaagcatttctttttttttgtacttttagccaaaaaaaatcttataaaatggaatagaggaagtattatattgaaatgagtaggtataaattcattatttaggtctattaaatgaaagtttcaagtcatattacaatttcttgaatagatcaaggataaaataggtatataaatatatcgttacaaaaatatttttacggaacaacgattgactttttacatagattatttcgaatataattagatcgagctgatattgttacaaagtttataaatttatattgttacaaaattcagtggctttttggatgaaaaacatttataaatttatttcatttaacattggattgtgtagacattttcttcaaatatatacttaa

SEQ ID NO: 32171 - DNA, 544 bp, Arabidopsis thaliana columbia
tatttaattatttgttttgaagtttaaaatttatcaataaataactaataaatagtaaatagtaaatctaaaaaatcaattgtttgaaacaaattgttttctaaaaaattaattaataaggaacagagagaatatacaaataaaatattgagatgtttcttttttgtttaaagtattgagatgtttgttcattagaatagaagactattcgattctttcaaaacaagtaaacaagtaggagatagaatgaatatttaaactccaatacgaacgtggcgtactcacctcagtgatattattacttgctttgtaataaataaaacattgatgtcatactcgtgtatgcacaaaatatcaggagtcacacggagatgatgaatcgttttaaggtgtggacatacacagagggagaggtcccattgttccatgacggccctgtgaatgacatttacggcatagaaggacaattcatggacgaaatgtgcgtggacggaccgaagagtagaagccgttttcgggcagatcgacccgagaatgctcatgt

SEQ ID NO: 32172 - DNA, 536 bp, Arabidopsis thaliana columbia
tgtgatgaagatctgatttgtaaagaaggggcctccccacaacgcccttgaatcttccgctccagccttgatctccgattgtgacgatcaccgcatcgggacgtggggagaaggagacccaacctcttttggagtagacgtggaactctgcatggcagaagttgagacatagagaatgtctttcgtcatagcctcttagcagcatccttatggcttcttcctttgattcgtttttaatattatgcctcttcacgtagcaaacccctaccccttccttttggcttcttcctcctgctcctagcttttctctcaccgccttccctatcctctctgcctcacccatcaactccctgcgatcttcaaatcattacttactactttattttaaacaatatatattcctaatcaattactatatatagtaaattttgctgccttacctcaaatctgaataacaagccgtgtgatcatcagcattaatatcttgtattaaacacgaactcctccgtctcatcgtggaaaatggttttgccatg

SEQ ID NO: 32173 - DNA, 600 bp, Arabidopsis thaliana columbia
ctcaataagctaactttggcatacccagaggttggaaacttcaatatagtgagagatacttgctgattttagcagataatttcgtaaagctaaaatgaagaagacccaaaaaaaaagaaaaaaagattacaactttactttgcctgtagcgacgggtcgcgaaaaagagaaacccacaaagacaattgtcgcttaagactaaagagacataaagtctgttcggctcgaacttgttgataattttggtgtcttcgcagattctgatgagagctttgagcggggataaagataaatcgaccaaagcgattggtattgcagacgcaaaataataaaaaaccaacaaaaagagagaaaaatcccaaatcaaaaggttaatgcgtaagaagtaagaactactaacttcttaagggtttaatctagtttatctaatttcttttttttattaactcatttaactatttgttctaagaaaataatacgcatttcctttagaacaaatattcattctttcaccaaataaaaaagaacaaattacaaatataaactcaagaataaataatatgttcaaaaaattctattaaataaactaaataatatatg

SEQ ID NO: 32174 - DNA, 145 bp, Arabidopsis thaliana
cccggtggcgcgggtgcagcagccgcaccggccgctgcagccccacgccgggcgcgtgcagccagacgagctcgccgcgcacgccgcgcaggcccggggcctcgggctgggcgccgaggcgcgggtgtcgatgaccaggtcggcg

SEQ ID NO: 32175 - DNA, 588 bp, Arabidopsis thaliana columbia
cccatttctatatcatttgtgcaaatgaaaacttccgcatcaggacttgttaattcgatgaagccagattcccttccattgcttttgacaacagaattcttcagctcagactctgtagctttgctgacatcatcagcggttccatctacattgcttttacgagcttctggaaccggaggggtaatccccaaaaaccccaaggcggtatctcctcgtctgtcggattctgcagaatggcatacacgacaggttggcaaacccgagtcactgtctgtactataacgcgcctcagctgctagttcctcgttcttgacgggtggacaatcgtgatcattgactccacaatttgttgtctccaactgattctctttacccatcaagcccgaaaaagaaaacttctatttcttcacgagaccaaaaaaagttcactagatgaactgaccaagaaaatgttcactagaaaggttatccacttagacaagacaactcaaggtccaataatacaaaggacctcacggtatctagtattgtactctaatatcacgttgaaagagaacgatctgaaagacaaaggacaagagagagatg

SEQ ID NO: 32176 - DNA, 718 bp, Arabidopsis thaliana columbia
gcacgcatccaaacctgtgtaacttagaagttttgtacgaagtagtgaacttaaactgtagcaacaatgatgaaagaaatgttgcaaactcattgttgagaatatcacttatatattgcatgtcaatatttcactcttcatatccctcatattgcacctatgtctatatcagtagtaatgagagagcgaatgcatagagctcggttaacatgcataaaacatggaaaatgagagtgaaaaatctactatgcaaatcgccctttagcatcacccatctctgaattatttttgtggaacagagtcatagagttgcacatcagtttggaattatgaacattgatagaaatcaagaaaacttccaataagaagacaccaaacagatatttgagttaacaaaaggtgtttctgaaagctttgaaataaattaaaatagtgatgtattagtgattaaggatctagagatatttaaaaggatctgtcattttgccatttgtctgctgctattggaaggattttgatccgacaaggatttcacatctcaaatcaccatgtcaattgtttggtgaaacaaaatagagcaaaagtagtggtgcaaagtagggtcataggtggttggttagtataaagagagattagatagaactgagagtggaggttgtaatagagcctcaattagtaaagtgaaagtgtgccccaagagactataattgagctttat

SEQ ID NO: 32177 - DNA, 802 bp, Arabidopsis thaliana columbia
tcaaaatatcacaaaatgttagaatttataataacttcaactttttgttgttcaaaggaaaaaaaaaactttaactttcaaaatatcataaaatgttagaattttgaataacttaaatttgtcacaaaaaggtagttttgcataattagcttatcaaccttttttgtcatcaattaacttattaattaagttagtggcaaaattttgataaacagagaaaatgaaaccaaagctgatctagtcagttgatgatccaataagaaagtgccaagtcatcatcattgaattattgtgagttttaacgtctgcatcacagccgtccgattgagagacctctaagatggcgccagagagagagaagctcagctgtcgaggagacgcgtgggttccacattttggctcctccctcactcactgtttttgctcgccggttacgaaaccgctcgaaccacggatgatgacgtgatgtgttggttaacgccgttaaaatgccataattgtcatgtcacatgtaaagtatcaataaagacacttagattattaaatgtgaatatatactacaataggggccacgtaatttataaagttggtatacacttcataattacaatcagagaaaagcaagaaaaagggctttataaattaacgcaaatgttccctattcgtaccatgaaaacctgcagaccaatcgaattgcgggcaatagccgattcaaatatcgttaatttcacgtaaatatagagtctattattacatagtcatttctaaccaattaaattatcagaatcctaagcgaataaac

SEQ ID NO: 32178 - DNA, 401 bp, Arabidopsis thaliana columbia
tttatgctatgacttcaaatgttgagtatgattgcacaactcagaacttgttttccatgtttggattttccgggaaacatctatacattagggtgactgagaaagtgaaaaaaaaaaaaagtgaagcttatttctcctggtttggatgaaacattatttgctaagttgagaataatctttggattcttaggctgagtcatgtttaaaaagagacgtgcacaggcaaagaagcagtcttgagtcaatgttctgttatgataaaccaataccagaggaaataatcgaggagccagttggattatccatgtcagagagagagattggtgataatcagcgttgcacttgttgtgaagctaaaggtgcattgctttgttccacttgttctggaactggtctaaaag

SEQ ID NO: 32179 - DNA, 601 bp, Arabidopsis thaliana columbia
gaaaagcctttgtcaacctcaaaaatttgtttagtgtcttgtgcttagtagacaacaacattggtcttttcctctaaatgttatcttatctcatttattatgtgaatatgatttatgcagggactatgtaatctaactctttttgtacttgagagaagaagctgaagtacatttgttcatcatttggttttatagtattaataactgccaaactccagagctttaagatgtatgactctcaagttttgaaatctaagtaaggcttaccatttcttcctctcttttcaacttctggattttgattcagcaactccttactagttgactgaattttgatcagatacaacccatttctcagacgttcgcattctggaaagaaatttcagggcacagttaccatgtcagaggtgtgaagatacattgtatttattttcatttcagaaactaactgttgaagtcctagaaaaaacattaagagcttgcttgcttaatttgtacagggcagagaaacttgcgaagaatctacgagtggtgaatctttccatatagatttcacttgaagaggatgtgagttctgacccaataagctagtatgatacgt

SEQ ID NO: 32180 - DNA, 541 bp, Arabidopsis thaliana columbia
ggtatttgaattgatttcgccatgtcgccttacatttctttcttgccaaatgtggtacttatttttctatttgttaaaatattataaacatttaaagtctcgacggctattatccgtgggcctaacattcctctcttggttcatggattccactctcgtctcacggcagttttgttacttatataacatttcgtttacatattaaaaatttaaaatcatatcatctcatctctcttaagaaatatttaatatttatacagggaatgctagtttctgatggaatcaatgttactttaacagcctagaaatatttttcccttcttaaatgcaaactaatagaacttcaaacatgtgaggtgtttgcgagacaaattgacattatatgcgttttatatacaagtaaaagttgaaatcataacacaacatgctaatttatttgtgttagaatgttgtataatctctttaaatggggaaatatcttcatataagacatgtaaaaaaccttatatatatataatctatatctctatatatatatata

SEQ ID NO: 32181 - DNA, 572 bp, Arabidopsis thaliana columbia
tccaatcactcgtggaacatcgcaccgtgcttatgttgctgacaagagagagtgtcctgattttatcgtctccatggaggccaaacttgtgaacgccatgatgtgcagcgagactggccacgattttgatatgggaaaatatggtacgaatattaaatgctatggcttttgtgaaaactcagtaactcaaaagttctcagttccttccaaactatgtttctggtcaccaaagtaatggttcgaacctgagtttcatgttgtgtgtccttgatcttttattgagaagtagtgtatgttttaatcctctactgtatgctttatctaatttctctatcctacgtttcaaagactattttgatagattgaccagcaagaacttgatggattgcaggattggtaacctttaaaatcatgttaacttatgatctgacaggagaaaacaccacataatgaaactatgttgggctaaaagtaacaaaagcccaataagaaacagtaatagtatcttcttaatctccatttgccgtatttctcctctagagactgagatcagaaacacgagaaaatgacga

SEQ ID NO: 32182 - DNA, 168 bp, Arabidopsis thaliana columbia
accttgacacggtcgcggtgcagcaccggcgcatctcgttgggcggcagataaatgtcgggctcgccatcgtcgcgcaccacgaagccgtggccatcgcggtgtccttgcaccgtgccttcaatttcgtccagcgcgttgccggaaatgtctgaatttttgatataca

SEQ ID NO: 32183 - DNA, 460 bp, Arabidopsis thaliana columbia
taatttgtttttgtttgtttctgatcaccaaacccattatgagagtattctaacttttctgttttacgatgcaatctttttgacttgggttgttgtcgcattatcgtttactttgacatactcctcttgtagtagttgttgaaagctaatctcctattttgtgtaacttaattcatgtttgctacactatgcttcagtttattaatctgcagattatatgataagaggaatctttacatctaagagacaaatagatttgtatcagtaatggagacattattgtggtggtggtaacgtgtatgattgtcttttctgtgtatagatacatgggaccatgcagatattccctagcttctctgaagacaaatcctacactttacagccatgtataggctgacgaagatttatcctttttccgcttttaatccttgaaaacagttaaaaagtaaatttgatagtg

SEQ ID NO: 32184 - DNA, 1160 bp, Arabidopsis thaliana columbia
ctgacgttgcgccacatattattctacgggcctttttggccattaatattaggcccattaatattaggcccactccattacgaaatctcgattgtccgagaaactgactattggccccataagaattcgtctattttaatcgaccttgttaagagacaaaatcgactatgactttggacaaaccgacaacaacgaaatctttttttttcttgtcaactaaatctttttctgtttcgtatttttaaagtttgtaaagttggagcaagttgtaacatattgataatataatcaaacaactaaatgattaaggaataaccagttcatttgatccaccaacttctcaccaataatgacagctttcatcaaacaacctcctttttgaaaataaactattgtgattagagccgtgacaaaatctttgtataaaataaggcaatggtcttgacttttggaccccatccattacgaacaaaatcagggacccaacatttattctaattagtgatatgaataaaggttttgacattgtattgattattttgaaaagaatatgagttaagttgtttttttgttcatttggttcattttataataagctatcgtgtggtgatatttttatataatgaaaagagccacaaattttttaaaccgcttatggtcaaaagtttaagcaagactcgagaatttaaaaattattatgaacaaagattcgttatcacttataaacaagcaagcacaacagtaagattcttgtttctatgtgtacacactacacattcataaacacgacataaacaacatttaaattacacacatttacacttcaaatcataagttaaaaacacaagcatcccacacattcttacaacaaaaacataactctcagtttgttctgaccaaaaagactctttagcaggcaaaagcagtctctggttccaaatttcggttcatttctttatggtttatctggtcagcattccgtgtggtttcatcatcatggtcttctttagagatcactagagtctttcgagtttcatgccgcctcgaagctccttttgctctgtttccttctttcgggttcctccgcctagttttggcgactttgctcgagttggaagaggctgtgtatgtacaccattatagataagcataatataaca

SEQ ID NO: 32185 - DNA, 768 bp, Arabidopsis thaliana columbia
atgttataaaatttgcatttttaatgtaaacaaaaaaaaagtagagaacattcgcaatctgtttagataattatttacacgttccagagtcagaatagtattttcttaaattatatgtacgacgactttctcattgtcatcttctccaccccacaaaggtaaaacgcttatgattgttgagtgttcaaacggtgacatgttcacaaacttttattcgcagtgaaaagaaatctatgaagaataacaatcagcttagttatatgtcttcttcgaaaatagaaaagtatactccacgaacgttaaacttagtgttgttggtttcgtctgctgccatcattaaaaatgtcaaatcatgttttcaattccaaatttttataaaacacgtttgatcactggtccaacggtaataaacccttcttttcactcagtgatatatgttaatacatgtccccgtaagccatagatttgggtggcaagcgttttgagagcgagtggggaaagtggtttggggttggtgagagagagagagacgtcaccttttattggcaatcacatgaagtagagagagttggtaacttggtatagtccgaccagacgtagctgcgtgccatagataaatttaaactcactcattacaacttcgtctatatgcccagtaaaatttccaaaaagaaactagtgactttctcttctttttttgggtcactaaggaaacagtgatattattgatgttcttttaacgtttttttaagtgctagtgaaatgata

SEQ ID NO: 32186 - DNA, 754 bp, Arabidopsis thaliana columbia
gttcagattgaagcagttaattactgtaatcaatatatcaagaaaagggaattactattctacctcaaattttgctttatatgtagtgaaagatgtcaactgctctaggctcatttcagccataagaagttcaggttcagcagccgtctctaacagcttaaagaccttggcgtccttcttcgctgtcagtatcgttttggctgtgaacaccattaattcctctctggtactcacacataataccctcaacaagagctgagcgcctacggaaaatagagaaagaaagaaagaaaagtacgaatgagaataaaccatgaggaactgcaatctttggctcttctgttggcaaaaccatccataatcagaaggccagaagcttttctaataaatacaaagattgtcttttctaataaaaaattcgagattagcactcaacatttaattatatgttagcaaatagtataacattagctagcaaacttataaacgataaatttgaccaaaacaacataaaccaaggtcactttatctactttttgttctctgaattctgaaaacgaatttgaatatcgtattctaacagtgaatattgcatttatactaaaatttacgatcatagccataaataagtagttatgtatagtcaaactatatgtagttatgcagtactttaagacgtttgaaccgctaagattcccataatctgcatgataatataatgtatgtacactgatacatgcacaattgcacatga

SEQ ID NO: 32187 - DNA, 606 bp, Arabidopsis thaliana columbia
gtggtagtcataaacccgttttctaacccttagatttggtttggtctagtgaaccagattttaataacaaaaccacattgacctaaaaaaaacagaaccacacttacgcttaaaccagctcggagaataatcaaaccagccataagtaaaccacagaactcaatttcttcttcctcttccatctctcttcatcataagccacgaaaagtcccaaaacatcctggaaagcttccaaatccccaggtatgaactcgacatctcacgcattattgcagtctcaggtcaagctccactgtagtagtactcagcttcgtatttttattttattcaataaaagttttaatggtttgtactaaccaacgatataaattttactgtatgctaaaatagaagctagtcaatattttcacctaaaaacacttgttctccttttccagatctaaattgtacttagctcttcttctctcttcttcttctcattctcttcgcttgtaaccacagaactttgcagtggtcttgtccactattattagcctcgtttttgcttactaaaagtttatctgtattctcatcatcatggggagttgtttttcttttcaaattgct

SEQ ID NO: 32188 - DNA, 598 bp, Arabidopsis thaliana
ccctaccaataatcctgaagtcctcaaggttgtgcaaatatttttgttcctttcaggttttgcttgaattagagtaaagaaaaaacacattttatgccatcttaatcaatcttttaggtaaacattgaaaaaaacgaaccagagctctccgttgaagccaccataattgaactttctggggaagccgttgaagcctccgtaaatgaactttccggggaagccgtctccgttgaagaagacaccttaatcgaactttccggagaagctgtccccgtgtaagccatgctaattgaactttccggggaagctgctggggaagctgttggagcaattgagtcagcgccacttgtatccgtgaaggtggagaaacctggagcagcagctgagacgcttggggtggtggttgcagcggccgggttccagccaaaaggcctgtagtgtacggaacacctttgcctggaatccagtcgtcaccttggatgtactgagccggtgtgaacttgaggatatcttcttcgctcaatgtcttgattcagcccaagtaacccggtttgcaagggcggatccggtcctgtgttttggactcagagtagacaat

SEQ ID NO: 32189 - DNA, 585 bp, Arabidopsis thaliana columbia
ggtatgacttttgttaatttttgaactatatttaaaggagtagttatgtataaagattaacctgaactccaagcgtgttgagaagtattttcccaaccacgaatgtaagaacagcttctaacgagttcttcttcctgtcgatggtcgacttggctcttcggagatgtttcaacggatcatcgcataatgcgatagagaacggaaagataatgtagccgatccaatttccccatctacactttgatcctttagtcatcatatcagctagatcctgtttttgaccaaaaacaaaacaaataattaaaaaatttgtgatcgattatagccatatatctactattcttctatatgataattaatttacctggattccagtagtcggtcttaggtttacaagcagagctgcccttagccttattcctttaggtatgttacttgaattcctcttagactcttcttgttctcctaatatatttcataacatatttaaaattcatgttagagtaaagtttaatgctccttaacagaaaaatcataaatatttccagtatcttctcttcaaatactgcgagagaccagcctgtg

SEQ ID NO: 32190 - DNA, 320 bp, Arabidopsis thaliana columbia
aactccaaatgttttgagaatgaatttaccggcgacgaacgttagggcagcttctaacgaatttttcttgcgatcgatgatccttttggctcttcggagatgttgtaacggatcgtcgcgtaatccgatagaaaacggaaagacaatgtagccgatccaatttccccatctacacgtagatcctttagccatcatatcagctagatcctgtttcaaccaattattgaaattttataccaataaatatattataccctcctcgtcaaaacataaatcaagtgaagatcaggtcaatgaactaacctggattccagtgttgg

SEQ ID NO: 32191 - DNA, 534 bp, Arabidopsis thaliana columbia
gtttccaaaatgtgattgaaggtttttgttctttagtttggtccctcaatgtagggaaagttgcatgctttatgatttttgggttgttgatttcgatttcgtgtgttttgtgcttcgcaggcgactgttgctgatctgcaagaagcgtttcataagagaggtaaagtttccaaagttttcatttttacttgaaatttgacttgtcgaatgttggtatagatctcacctgagtgtgtaagcttaagctagtgtttatgtgtttgagttctccttataccatttgatgcttatggggttatataatcaagatctgtgtggaagcttaaggagtatttagatttgataatgttttctgctgataaggatcacttaagcttctaaacacagttttggatttgaattaatcatcacaaccttttgtcatttatggatcagtccgtttttagctttaataaaggttcactttagattgtccatcaatggcaattatctgaaatcatcttactatacagtacaatgtatattctgtatgta

SEQ ID NO: 32192 - DNA, 448 bp, Arabidopsis thaliana columbia
cccccaaaaagacctattttgttgcagggagaagctcgggatcaatgggtgcctcagacaagcaaagaaaacggtttagttttctggtttaagctcaagtgggaaattgagaaactgacaactacgtgtgttttgtagttacaagttacctgagcggttttttgcagtcgtatagacatcaagacagggttcgaaagattgttcttgttgagctgcattgctgcaaggtttaagaaattcaaaacagtgaggagatgttgaagataagtcacagatgtcttcaatgtttaaggtacaaagaaagtagacaaggcaaacaaagtcatacatagttctatttcatgtacttgaacaggttctaagatcaaacatcagagtgtattagagaattacctgggcctgtgaagaagttgctgatggagttagaacaccaaatatttatttatta

SEQ ID NO: 32193 - DNA, 529 bp, Arabidopsis thaliana columbia
caatgttctactacgtttatgcatttaacgccacgcgtctttgccatagattgcatgaatcgctgaatcatattcatcttcgattacttatccctggtttcaagtagaatccagcagaagaacacattcagaaatccagtagagtcaagcagataaggcaaaaggaaaaacaaaaacaagacctaactagcgaaaaccataaacatggtttcaagttttgacataaacacaaccatttctagttgcagaggaaaaatcgtcgaacaagaagctttagagtaaaccaaagtaacaatgatagcttccattaacaaagaacaactctaacgttaaaaaggattcaaatcattcatccaaaaaaaaaagttcaaaccctaaagtttatctctgttcactaatagcactgagaaaggccaagtcacggagtagaatcggtaacaaatccaaaacaagctagaagaatcaacagagagagaaattgagagaaattccggagacacagagagacgagaatcagaaggagaagaca

SEQ ID NO: 32194 - DNA, 561 bp, Arabidopsis thaliana columbia
attgatgaatgttagttttaactgtcaactggcaatcatgataatcatagaaacctaacttctagaaagttaaatcatttttagattctcggactacattatatattatgatatatggttcttgtttattttttttaattgcaggtaactcgaatattgttttgtctttcttttagtgtattgttgttttctttgattacatatttagtttttgaattattgtgtaagtatatatatttttaagaatttgttttttacatcattttttataaggaatatgtaaattaaacgtaatagataattctaacataatcaaaccttgttcatacatgtcagaactgcatgtctatataggaatacaattaaattaaaactaaaaatataaatgccttctcatggaattttttgattcgtatcagaagatatttggcaggaatttattttcttagtgattaaaactccacaaacaaatgatcgaagtatcggagaaggcccaactgagcccactagtttgaattgtactttgtgattcccttgggccttgtggatcccattaagtac

SEQ ID NO: 32195 - DNA, 601 bp, Arabidopsis thaliana columbia
tgagagctagtgatttgatcaaagggcagattcaggttggtttgttgatgttccttggatcaactttaggattggcgtttgtggaaggattgtttgatcacagagtgaagaaagttagttatggagatggctcttcgaggttatgggaaggacctcttttggtgttgatgtattcctttgtgacacttatagattcgatgatgagtgcagtgttctattttagctgccgagtttattatagtatggaagcttctagaggtgaaactcagccaatcatggaaacggttacggttgtggatgctgagtaatggtgcgttgtgcggatcaaactcggtgaatggacatggaaacgtattagctgaagaagaagttgtatatcatcaaatggggttttattgagcactttttgtttcactttgaaacttgatgcatctttaaggtttttgttatatatggtttctctgtttacattgtttgaagattatatagcatcccaagttcgttcatagttctgctcttgtttctttttagccagtttgattgagtcttgaaaatcttgggcgtaaaatagtaacattaaaaagtaggtgggcctttatgc

SEQ ID NO: 32196 - DNA, 487 bp, Arabidopsis thaliana columbia
ctccctgcttacgggataatgttagctgacgttataacgggagctaacgatattcgtgatgaggctggacaagcggcgagagtgactagtgttgcacgcctctaatgcgttctgcttcctttgtattctctcacttttctctttattcagaattcaatctctggaaattttcttcctaaagattaaagagaaccgtttggaccagatcagcttgcctcttggtaatggtctctcttctctttgttcccaatttctgtagctttcttctttctccctaactcgtctgctctctttgtctcttgctctcacagttcatacgtcttccatggcttccggtgatgttcttcctagattcttcactgtcatcctctcccattgcagctccgaatccatggtgagatttttctctggaatatttcatggaaaaagctgcttgggttgatatgtttcttggatacagtaacgatgtgaatgagatctgcaacat

SEQ ID NO: 32197 - DNA, 684 bp, Arabidopsis thaliana columbia
tgtcttaaatacctctgagaggcaattaacagccagcgaaaactcagcgaatcgccactaatgtgattcaacactgtatcgacgcaactgggataaggctctaatatcccctcttcaaaagcagggccttctaagaactcaagcctttaagaagcaagaaatattaaggaatcagcaactcaagaaaaatattgaaaaacggtaaaaggaagaaaaactatacggggagaattagtcactaactcttacagtgatgtcatcccaagccatatagatgagcggtctagatatatccttggtctcggttcctgagacgcggaaggcagtctctccatctccagaattccaatgaatttcttgagcaatggctggaggcgctctaactgggttgctgacctgccatgatagcagataatatcatacatggtttcatacgcactacagatagtcttgataacagagttagctattaatttacttagttgctgtatgaaaaaggaaaatacctcaactttcccatggcccttgccaagcgataaccaattacacgcacccttctattgagaaaaaggagtgcatacacaccctaaacagaatgaaatatgagaaaacaccaagtcagatagatgcagtttagtaggaacacaagaagctctctctggtattacataccggaaatcttga

SEQ ID NO: 32198 - DNA, 757 bp, Arabidopsis thaliana columbia
gattcgttgctccaatctggagatttgagagatgtgaagagcaagcgtaagaattagaaatcttcactgtgaaatcaatcaatcaaaggattggaatgtttggttctgatttgtgaagtctctctgaacaaccagtcaataacgctgtcaccgttgctgattggtctaaatttttaaacaattaaaaccaaaaaaaaatgaatttttcttattggtctttggtgaaccttattaatcgaataatcgctatttggaactcttaaagacacatacttatcattcttcaatataaacgacattgctaagaatctacaaacttgtcggaacacatagttttccatcattatttcattatttggtttcttaatccttttttcgtgtaaattatatcatgctttctacatagatgagcaaaagtaatatatttccacacttgtgatatgagaacttttatcctaacttaaacataaaaatggatcgttgtaacttaatctatctttattcttttgacaaggataatcaatttgattcattcatcgttactataagcagatctaacactcccatactaaacatttgtacatagagtttagttttgatacatttcattcacttattgaccaaatttagtatagacatatatataaacagtactcgaaatttagaatttccctgatttggtagaaacatttgtgaatcacgagaatttgtgttatttattaccttaataacatagaaaatgattgaacacatataa

SEQ ID NO: 32199 - DNA, 798 bp, Arabidopsis thaliana columbia
caaacaatttgaaaataatttgtgattaaataacaaaacaaaaaaaaaactagtacatgtatcaataaattagataaaattgtactaaaaataataataataatttgtttgattttcctgtgatataagcaccaaaatatagaggttgagaactgaataacagaaatggaaagtgcagctaacgaagcattaaagcacctaatggcttcaatacgcttatatgtataacaaaataaacaaaaacttaagacgaattggggaaatgttaatgtacgacgaggtgcaggtaaagcattagaagacgagtcgtcctgtcgtccacgtgtggtgatggctaatgacaatttgggaaagttcaaaatggatgcaatcatttgactcgctgcgttggtctttagcacaaccatgtggttcttatcctacgacacgtgtccgtgttcgacggcgaaccatttgggatcgatcggtgattcttttctcctcccggtcatttactatttaaccaaacaccacgactcctcgttttatgtggtatggtaaattcttgtcaacgttagtttcaagactaattttggttcatcttcatcttgctttggttcaacgtttctttcaagactaccattttataaaatttaattatgcaaatccaatctccatcagccattatctgttgaaaaatacaagaaattatttggtattattaaccaaaaaatctctatgtattatttactaattaattagcttctaccttttttggtagagaaaatggctatgaagatgtagcatgataaaagtata

SEQ ID NO: 32200 - DNA, 444 bp, Arabidopsis thaliana columbia
tcataaacaccaaactcatttcaaagtaatcatctttttccaagtattgcaatagccgaacacacaaagtaatcatctttttccaagtattgcaatagccgaacacacaaagtaatcatctttttccaagtattgcaatagcgagtgtttaaatccaagtaatgaaatcattccagcttggcaataccagttccaaacatacttttaacacctacaataatgttgatcacggagttgataacagagactgatgtttcagagatttgagttcaagctctcgactagaaagattcgaaaaaggaccagactcgttacacaaggcattagatatagagttcattcccggaacacccacatacttctttgcatccccttcgtagacagtacacacattaaaatcagaaattgattacttggtatcaatcaatcctagtatcaagtatg

SEQ ID NO: 32201 - DNA, 523 bp, Arabidopsis thaliana columbia
gaatctgtcaacaaccatggtatctcttcttccaaccattccatcttggcaataccagttccaaacatactcttaacacctacaatgttgatcacggagttgataacagagactgatgtttcagagatttgagttcaagctctcgactagaaagattagaaaaagtaccagactcattacacaaggccttagatatagagttcatgcccggaacacccacatacttctttgcatccccttcctacacacattaaaatcagaaattgattacttggaatcaatcaatcctagtatcaagcatcttacaaacgcatacattgaaacaagtaaatcacacttcataatctactaaagttttaatataagtacaaagactgatgtttcaaaacctgttggatgccaagaaacttgttggaggcacaatcaaaactcccaaaaacttgtttccattcagaaacaaaacctctggattcccactcatgaacaagagccatggcatcagagttgctcacacagaaaaatg

SEQ ID NO: 32202 - DNA, 614 bp, Arabidopsis thaliana columbia
tgtgtgtccaatatagaatgtttttgtcacgagttttgtaacttttttttttacacctaactgatcgatagacattttttttttttttttgaacacaaaactgatcaatagactaaacacacatttttcttatgatggttcaagaagaagaaattctttttatggtcaaacatattataggctattaatttcctatatcctcaaatgttttgtcacgaatagaaatagggaaataaattatatgcggaaaaaatgatttattcctatggttgattacaaaaatcaaactacaatgttcgttacaagttccggcacgttttcattgcacaagccgtgaagaaactgttgtaagttgacggcgacattacataaaggcgttaacccatttaattcattcgggtcccaagagtttctgttaaatactaatttacccttctgaggtaattcgtttagtggtggttaggatattcgttattaaagggcgtaaatgagggcatttgcaaacgctatagtctaacggagttctgacggagttaagtcacgcgtcggctgcgatggctaatacgaatttaatatgtgggatctattagcacagtcgacttgtgagtggatat

SEQ ID NO: 32203 - DNA, 493 bp, Arabidopsis thaliana columbia
cacttttttaacacagatgaatcactagtccaatatttctccaaaaaaagacacaagagtctcgaaattgtaatccatatctgtaattttgcacccctataatatgcctagaggaaataagaagaaaaaataatggggaaaaagagaagctactgctacactttcaggcacgtgacaacgtctcacacgtgtcatatatcttacgtcatcaagtcctctttttctctctttcacttttctgtttacctctctcacgcgttgaaaagtgcaatcaatcttacataattaaccacagtaagaaaaaaaaaaaatggtctctgtaacgtctttttactgttataaccttacacgcataaatacccctcaccaactctctctgtctcgcctctctctaaaactccaacacttctccttcttccatctctctcaaacttctgaaaatcttcttcttcttctcaatcataaaccctaaatcgtcatctcttcagatcag

SEQ ID NO: 32204 - DNA, 616 bp, Arabidopsis thaliana columbia
gttagacaaggccaactgtgtagtttgttcttggtatatggcctttaggttctatgtatctttctgtggaactaggaacagagtaggaacacttggaattcatttttcccggtttggtgtttggtatcatgcaaaggttgtccatctctcaatatgcttgtgttattttcgagctattttgggctatcttgtgcatcacagtgtgttatacattttttggtaaagcttgtcgatctaccaagatgtatgtggtgattttgagctcataccacctaggaatttataaatattataagacccaaccctcctatatattcttcgacgcaagtattgttttaatagttatgagagtctcttgcagaatgaggctgttctaagggcgtgtggtgaatcagatgcaccaaatccgccgggagctagcaacacaaaaagctctagcaatgcggtgaaaaatgcgtaaggccgaagagaagctagtcctagtttgtaaggactcgtagatcaagtctctgtcgttacctgattttcaaaaataatatttgaaccttgtgtttggttattagttttgcaaaagaagagggacatcacaccaaagcaaaatatggtatttgagtat

SEQ ID NO: 32205 - DNA, 605 bp, Arabidopsis thaliana columbia
tttaaaaatatatttgaagggttgtagtgtgacaatacttacgacttacaagtggcgatgaagcaacgtggtagcaaacgaggcccatggtcatgtggcccccggatgcgtaaatcaacacgaacataacatagcaccaccaatgaacaaatatctatacaaggttggtcgaaaatatatataatttatggtagaatatatttgtcgaacgaccaatcagaaactattagcagatgttctctgttttcttttgccatgtgaaacccacatgacactttgacatttgacaagaactcccatgacatccatccttattaatttcttttcttttcgctcccatgttttgcctgttagtccataactgttacatataaattaggcagtattaacaaaaaaattaggcagtatcaagaactcccatgttttgcctgttagtccataactgttacatataaattaggcagtattaacaaaaaaaaaactaatcattttagaatttcggtatttttctcctcaatctttagatttttttttacgaatagtaccatttatttcgcgtacagtgtatatacatgcgttaaggcttgagataaaagaaatatgat

SEQ ID NO: 32206 - DNA, 728 bp, Arabidopsis thaliana columbia
tttcttgctgcaactataattctcacaaaaccagcctgaatgcgaacaaaacagagcataaagctgattaatttcaccgaatcagttttttgtatagtccgcacatgaagaaacaagatccaagagaatacagggaatagaaatagaaacctcaatcagaactctgcaagttatccgtccaccgaagatttctgaacagtgtaaagataaaataagaatcttcttctgcttccttttttttttctcgagaaatcaaattagcgtaaacaagaaaagacgatttctcgagaaaattacgaaataggaaacagtgagaagaggagacaggagagagtgaagaaagaaagaaggtactagaaatagcaagtgaccaattttttatattaaatagcagagatgtgccacgtcagattcagatttttatcattatttaatgttcatggaaatttcgagaaggttgacactgagagagagatatcttgtggctcagaacaaagctaacactcactctcgctagtgtacaccacgcgctgtgtcttcttcaaagaatctgatctgtttctctaatccgtacagaaaaagattctgtggataaaaaatgtgaaacgttagcaaattatgaagaagatatttttttgtgattatttggaagatatcctttttttgtgtgtttccgatccgtctctgacattcacttgctttcgtgatattactctttgccggtttgc

SEQ ID NO: 32207 - DNA, 958 bp, Arabidopsis thaliana columbia
  unsure (1)..(958): unsure at all n locations
taatttaaagcgggagtgatatatatatatatatatagttttaattaactatgagactaacatacaaactttaccggtttgtgtaaaaaacattcaaaacaaccccataactaaatcaactcccatgatctttattttgggtaaaagacctccaacgtatcctatttcttagctacattaaattcaaaaggttcagagaattaagaagctaatcaaaaccattctatcaaattactaataagcagtcgcttcactaaattagtttctacaaaccatttgcagtaataacaccaaggttctacttggttgaaatataaatgttggtaccatttcgataaatacaaaaaaaataaaggggtagatttgctttagacccaaaaataacggagacttaccctaaacccgcccatcacaccaaactctcaacattcaaaaacaaaaggttgaatcctttttttctctggttttcttcttcttcgcgtcgtatcgtaaaaagagaagaagcgcgattctctattggtatctggggactctcagattcttgggtcttcttgatttttgctgggaaagaagaattggtactttaattttgttgggtcaatcttcgctgtatcagacactggttctcttcgttactttgctattcatcaactttactcttttcagaattcgaaactctgtatttctcgattagggttatcttcaattcaattcgattaggattcgaatttcaaaaaaggaccattttcgtgtatttatcaatagttcaatacggagtatataatccctttttgtgttcgatgatatttatgttcacagatcaagatgttcattttttgttaaaaagatcagtttctgggaagtttaaagtcatcgatttcatcaattttctgcggaatttcataattcatccggagaatgatgtnttcatttttttggttagttttttttggaattg

SEQ ID NO: 32208 - DNA, 591 bp, Arabidopsis thaliana columbia
tgagaagcgtgttgctaaacaaacggcagctatttcattacgccgccgctgatgagctaaagcaactggctgatgatagggaagctgctttactcgtatgtctctcagctctggttccgatgaggcttctctccacaggtccgtgaaacctttccttatctaatctctcacaattcaaagatccgtaaacagctgtagaattataaacatacaaagaaatatgtgtaaatcattacttacatactcttatttaatcgaccacaaatcagtattttattagtatttatcacataagcttgtaaagtttgattataagttgtttgatggtgtttatcagtttatgatgatttgagaatcacactaatgatatggttgaattgaaacaagagaattctgtagttatgatcttcaggtgctttctcatactctgccttgtgaagcaagttttgttttagtgtttgataagggctggttttgcttttttacatttcattgttgcttagttcgttaaatagtttccgtatattttagtttcttgcctgtgttaaatctctgacttgctcaggccattttatgctctgtttgtgacat

SEQ ID NO: 32209 - DNA, 573 bp, Arabidopsis thaliana columbia
tcaaacaaaactatgtgccctaaaaccctaaacctcagaccaattaggaaatgcgcgaatgacttggattaagtaaaaagagaaactttgaaatggattgcagaaacagatgagtctgggaaatctaagaacaacgaacctcgagtccacgaacaaacggtaattggctagagacttccgctcgatgaagcagccgaacagagcgaagaagacatgtgacgcatttacaaataagtaaaaataaaattacaattaaaaaggcccaagcccaaattcgaatcagcccacatggaaaacaatccgaagtccaagtttttttattgtggtttaattatgtgcgagattaaaactttttagtcaattttaaaattttaatcgtgaaaatggtgaattttcaaaattcgttgggagaagaactttgcaaagatgtttgacatcagcaatttggaaatgcctaatgtgaaccaaacaaaagaataatttcagtttctttttttacattttgtaaatagtatagcttgcaataatttaacttttcacaagactttagttcttctatcgttttaggtttag

SEQ ID NO: 32210 - DNA, 892 bp, Arabidopsis thaliana columbia
gtcagaggaagaggatccctgatatcttttgtgtcgtccttactcaaccccataatgatgaatttctgtttggtctttcgatgatcaacagtgactttcaaaccaatcaattcttgtaccacgtcatcaggcctacaattcttaaactgacgtatatttctccacccaaagtacaacttcaggtattcgatgactgaaattgctttgcggaacgcaacaaagaggagttcaaacataatgataaaccttgtactgtgggcttgagagtgtggtgaaaccctttcgcagctccaactccgtatccaaagtcaatctctagccgagtactaaagaatcttttaccaacagtgatcatacgttttgaaggatgttccttcatcacaacatccattccttgcaacacatcacgcggattgaaagacgatctccctgtcatgtactctttcaagtcacctagcttcagcacattcacctgtttgatagtgaacgtatagcttcgacctctcatctcttcagttttaggatactccaccttgtatgaccccgtaggtaactcaaccgcactgaaaatgttcttctgaccatcataagctgtcatagctaagggaaactcatcgggattgtcagtgaacaccttgtccctaaccatagctagctcaaacctcgaaaccttcttggtaggaatttctcctttgatttcaacatcataatgtcttataacactttcaggattgaaattcactttataatgattcacatatagattaacacgccgcacagccacaactccgcctctatcaggtcgcttcattggttctttcctatcagaagtcgcaacttgcaccgatggcttcagattcataacttcagctactgtcacatttcaaaaata

SEQ ID NO: 32211 - DNA, 539 bp, Arabidopsis thaliana
attagaacaaagtctagaaaccacaaattcaagtacgcatgatgctatgataaagtatcagtttttgaaaatcctaccaaaagaaacgcagctaggctccaagtaataagtcaggaatccatgaatgaacaatggagttatcaacagaaacattgatgaagcagataatagtacatgttgaatgctttacctgaatatcttccatcggaacatcattgatgtcaggcttttcctccacttccacttccgctttcttctcgctcgactcctctacagttttgtcctcatcaaccttgtcttcctgctcaaccttattatcctcatcaatcttgtcatcctcctcaatcttatcatcttcctcaatttctgtaatttccttcttctgttcctcaagtactgctatctgcaccattttaatcacacttcacttcaaatgaatcactaataatcaaaactaaactagatatacaaagtttcaaattccaaatttataatccaacacgattcaatgatactgaaaacagcttcttaagcagaga

SEQ ID NO: 32212 - DNA, 1238 bp, Arabidopsis thaliana columbia
ctcctgaagatcattttccccagaaaaaataattttaatagaaaatagatttacaagagtttttaaaagatttacaggggatttaaaaggatttaattccttttctgaacccgaaaacgatccatatagtgtcccacagtcattgtgcttttatatcttagaaaaacagtactactattaattgataatacatacataatcaaaatgctcattggcgataagcatgatagtgcatagatagatcggtctataaattatacacattactaacgatagttgtatgtatattggagagtgagaagagccaaataaaacattttttcccaaaagttgtgcaggaatcaaaagagtcagagcgacgacatactgacaaacatatttgattgcttactactaaaaaacaacttcccaagtaaagagaatgatcaacacaaacactaggcttctctctactctctcttcacatttagtctccttcttctctcgctttccattacctcaggcacggatcatctgtcgaatcacattttcaacaaaagcattttgagattttcaaagttctctcatagatataatgtcttgtgatataaaagaatatgggtgtttttttctttgttttaccattttgcagatgtttcttcctttcaatgtctttgaagcttcctcagcgaaactctgagctgcttctgcttcggcttctgctgcctccgcttcctttgcagcttcctcagcctctgccatggcagcttctgcctctgctactgcctgtgctgcaactgctgccgcctcatgtacgttcatactcttcattctggctatctctgtatcaatctgtgaccttgtctgaaaattcacttcatctatgtctgttttaggtgaaggcaaagaagaagtcctctgttttcctccaaacacccccagaccttttctcctgtgggaagacaagggagtggagtttggaattctgtacttacgtttaacctgtaaaagagaaagcccagatcaataaacctcgcaagttgcagtgaataatggatatgtctctgttctactgacatccatgaactaaattgatttgcacaaaaagtcatacatactattcaaaagaccaaaaatatatgcactcaaaagcattaaatgaatgtaggaattcttaccttcacaagtttccgcaagatgtcaagtactttagcttggtagcaacaagcgtttgaagtctggtggagcatgatattgat

SEQ ID NO: 32213 - DNA, 559 bp, Arabidopsis thaliana columbia
cataacatatacagacaatatatattatccagaaataggcagctttaaaaaatcaactaaagcgtggtacactattaagatcacataggaagaagttgaaagaaaccacacaccgttatagcacctagcctttgcaagagagtatatgaggttccggagagagcaacctgcagcaaacacatagaataatttgacgagaacgagcttttgtaaacttatcatgcatgtgcaaaacaattcttttacaaagaattatacctggaaggcattgtctgggcagttgtggaaaaacttggatatacctccagcagtaagtgcgagaggtggtcgaagagaaacggtaggagcaggaagataaaccaacatgaaatcagcaataatagccatcgcctaataaagaaaagaaagaagtaaaacagtgcattcagcttaagtccaatatcattcagcagagaaacatagcagtgacaaaactactgtgtatgtatttgccagatagttcaaggaactttgacttacaaagtgacaaagcagtaaagggtgaccttttacttttatg

SEQ ID NO: 32214 - DNA, 528 bp, Arabidopsis thaliana columbia
tatctatatgtatatataagtaacatatagcagcagataagaagagcatccattaagcaatctttttgttctagtcgatcacattgttctatttgataaaaatattagaaaacatatattgaagtcataaattctatcaccaaatcccccaaaaataagttttgcacttaatcatagcactgaccaaaacacaaacatacctgaacttaacccatttttatatgtacatacatatcaacaaacctatgtaggacaacattattatagaaattttgattcgtgaggaatatataacctctaatcaaattctagtcggctcttatcatggtcgatatcaaatttgtgatacacgaagtggctagatatgaagaaagatttgagaatttttttttccttcgcagacgaacacaatagagtttcacagaaaaaaaaaaggattcaaacataaaattctacaaacgacaaaaaataaacctaagcttaacatgatgaacaagacaatgtccgaaatcacgatgataatttgaa

SEQ ID NO: 32215 - DNA, 812 bp, Arabidopsis thaliana columbia
gcgacgacgaggatgaaaaccagagtggaggccttcccttctcccattatctccggcgaaagagaaatagagagtttttgcagagacgacagaagtgaggagtgagagagctggaaaacgagttaaagtgaaaaaacacacacgagcagtgagtgtcgttaaaataaagaacacgctagacatagcgcgtgcttgtcacgttagaataatgatttgaagaaaagattcacgcggagtgtgaggcgcgtggggaaagctttttgaattttgtgtttcctttttcgaaaaagttaataaagggtaagagtgtaaaggccattttataaagatatgggcttgatgggctaaagagcccaaatatatccctttttaagttaaggccgcctaataggtttgacttttacgagagtcaatttaagagggattttaagaataatcaaattgtttcttattgcaaaaattgtgattgatactttgatacaatcttagcgtagtacaatcttttgtcttacttcaggtgaaagttacatgtcatgttaattttgatttgagatttatctctttgtttgttgtcgtcactaatttagataaattgatacttgaaattcagcaaattaattttaaattaaaaaagcttgcgagatttccggccacaaagtttgacgaatcttttggtttgattgacacattaaaagcgaaacaaaataaatttatttatatttatataatttacaagctgtaagcaaaaggaatcgaaattaaatagatcaggagacaaagaaataatgagttgtcctcatgtcacttggctg

SEQ ID NO: 32216 - DNA, 834 bp, Arabidopsis thaliana columbia
tcagatggaagatagagagacacatttaggaactcgggaggttaatgaaacatctcctgatttgttaaagaacacgccttcgaacattgcgaggttggaagatgtgattgagcaatgccatggtagacaaaagtatcttgctcagactagaagtccatctgatgggagtgatgttcggtggtacttttgtaaggttcctttggctgaaaatggtgagtctaattggcttaattggttggtttgagggtttaatagagaatgcaattgtttgttttgtcgaaatgtctaatggctggattaaagatgtaatgtgttattgtcttttctgcagagttagctgcttcagtacctcgcactgacgtagtaggaaagagtgagtatttccgttttggtatgagggattctcttgcgattgaggcgtctttcttgcaggttcttcttcttcttctaagcttttgtggttttacgatgtatttgtatatctcgacaagttcttgcctcttggctgtttggttcaagatttgaatgaaactatcatatctgataatattttgggatatttgtgctatagagagaagatgagttgttgtcactctggtggaaagagtacgcagaatgcagcgaaggtccgaaactgcaagttaattctaaaaagaaatcaattgaaactccttcagaagcttccgtgtcctctagtctatatgaagttgaagaggagcgagtaggtgtacctgttaagggtgggctatatgaggtacattgtgcagatatctaaagaatgttttagaagcatcttgtaaattctacgtgttgagccagtagagtcgttgtgtg

SEQ ID NO: 32217 - DNA, 655 bp, Arabidopsis thaliana columbia
ctcgccgccggtttatctctctagggtttaagacccccgttaaaaatctccttccttgttctactactaaacctctctccacttgtttcttctctacttccgctatgccgaccacaacggcttctgtttcttcaggcggtgttggtttctctgcttatctacagaggactgttcataaaccggcaccggcgtctgttcggttctcaacagctggttaccggacttgccggtgttcaattgacggtacgaaccgggcttgggttggtcgaactgggtcttggcgtgcgttgttttgttcagactctactggtggtttaaccccggttaatgctactgctggagcagtggttgaaagcgaggaagagtctgacggagaagatgaagacgaggagaaagatgagaagcctgtgaggatgaaccgtagaaaccggagctctagtggaagtggtgagtttgttggtaatccagatttgctgaagattcctggagttggtttaaggaatcagagaaagcttgttgataatgggattggtgatgttgcagagctcaagaagctttataaggataaggtacttttgaatcttcaatttttaacttgcgggttttgagacaagtattgaaagtttcaatctttatttttggttggttgatttgt

SEQ ID NO: 32218 - DNA, 1376 bp, Arabidopsis thaliana columbia
  unsure (1)..(1376): unsure at all n locations
gagaggagtaacggccgccagtgttagatatcagatgtgggttcaaaaccataaaaaaatatataaaatcatgacttatattcaacgcattcgcggagacgttgatattgtttcacaaaaataggaaattaacacacgcgtagaaatattcatgtatctatttgtgttcatacaaattaaagatgtttaaaataagatattgttaaaaaaaaagatattgttaaaaaaagaaaagaaaaaagatattgttataataagaaaaatataaatattgtcaatagtagcatgtaatatgagaaattgaatcaaacgtaaaatcgtgatcataaaaaataaaattcaaaagtaaagaaaaacatgcattgtccattttttttaatacttgaatttgtttaataattaatcctcgagttacgtacgttcactagttatttccaatcgacaaacaaattcaacggtttcgaaaattctgaacagaaataaaagatgtagtttcatacaaaataaatgttagttttttattttgtttgtgtgatgatattcagccttccaaaacatatttgttggtgaaagacaagtttttggttgtcggtagtacgaccatttaaattaaggaaaatcaactccaagattcacggatgtattaaatccaccatttgaatactgccacgtggcagtagaccaccagaagacgtgtacaagtgtgtctcctcctctccatgtataaagatgaccgttgccacttgccagtgccacatatgatcgtcggctccggtgattttcgctctctctgcggccacacttgtttgcttggtctctttgtaatactttaacatcacttagtatattgcatgtttcattctttctttctctgattttgttttcgtgagatattaaagagttcataacatataatttcgatgtcagaccggtattaaaaagttttttttgtggattagattcacgatgcattttaatcagtggagtttaatgaaagaattagattcttaataattttgggtacatatgcaatttcagattttctttgtcataaaaggaaaatttcatttctttttgcttgttttgtgcattgcgatgtttgtctaattcagataagcacatagcgttttcctattttcagctactaaagtacccaaaaaacataaagactttgagattcttctctacatagtgggtgaaaaaaagactacatcataaaaaaaactacacgatatgaagtcatttatatgtgttataaacttcctttgtgtgtggttaggcatataaagacctgttgcaaaggctaacatctgatcagagcgacgtggnttagaactccgagtgatttgaggggatatggaggaagaaagagtgga

SEQ ID NO: 32219 - DNA, 658 bp, Arabidopsis thaliana columbia
actcaccagttacaggttctcattacagatataagtggaacttctcggggatttctctgaagaaaaggctggacttctttcaatctaactgggcattctttgctggttttggtaaccttttctactttttggttctgttggtgaaattaatgtaagacaacactaaatgctggcttttgtttggttttcaggaagcccctgcgtgttggccattttctttctctcgcctcttgtgagcggagcgcttatggccatcttatttccattggtaaacgacttttcttgttcctttttgagtgtcttgtatgctgtatcttaacaaaaccagtattattaacagaatgtatgcagtttgtcttaactgctacaggatcaggacctgaaaaattgattggggccccgagaagaacgtggaaatgtgcaggtttaggaaagcttccaatattctatattgctgacactctctcgtaagccaatttctctctcaatctcatgatgttaaagcttcatatcgtaaaatgtttactggtcctagtaaaaatatgcaatagtaaattcaaatccgtatgattgaatgaactatcctcagtattcactgcattaataacgtttgttgtgttttcatgaggaaataggcagttctagtgatacgatttta

SEQ ID NO: 32220 - DNA, 483 bp, Arabidopsis thaliana columbia
ctatactacattatgaccaaaactaatcaacacaacaaacaaagtgctgtcatacataggtttggcaaacgaaaatcaatgaaattttatactcagaaatgtgaaatggggagtgtggcgtttgcattgactcaaacaagaagcatagtaaaaaaatgagaaaagaatggaacacttctatggtattgatgactcagtatctttggcaggtccgatgtaaactgtgtagcctaccgataggagaatgagcaaacacccaacaagccggctaaacaaacctggcgatcctgtttttcccgtgctgactaaccataactgcgataaaaccacctaatacgagaaagacactaattaaaaactaggtctttctgatttatcactatgctctaatcctgttcaaaccatctttaatcttaaccaaagccaaaccggaaaaatcaaagagaagaatgaacttactagacaaaaaagagtgtgtttatt

SEQ ID NO: 32221 - DNA, 456 bp, Arabidopsis thaliana columbia
  unsure (1)..(456): unsure at all n locations
taagaatttattatgtgagtctcgggaatggattcttcggtcacgtggcagatattgccatacgtcagtcttcttccttgtcgggcttatttggcctttgtttgggccgtcatctttaacaacttttttttcctttttttgacatcaatatattaacaacttttcaaaccatgaacatgaacaatgtgtttagaggattatgtaaaagtttcaaagaagaattcacttgaactgtcttgggcttttcacttgttactcttaggacgatacacaaaaaaccattgtcgtcacgaaccaaattgtcttgggcttttcacttgttatttctaacagcctttaggcttggcaagactagtggatttgaagtacatgttccaattttagaaaaaatattgaatttccataccagaanacatgaatttccagacgtaacttgccttatcacaacaggctaca

SEQ ID NO: 32222 - DNA, 478 bp, Arabidopsis thaliana columbia
tgaaatcttgacaaggacattacgaaaaagagaagaggagcgtgtatgcaatgagccccgtccttggccgaccatttttcctataagacgccccgagtctgtcattgatgatgcctcattatattctacttattataatttatttattttttgcttaagggtttctaaatattagtaatccttcttacattatttatttaggagaacctataagattaacttcaattatctatgttttgtaattttcaaaattttaaaattttgataacatacaatatatgtttgtggattgtaagaattttggtgtgatatcatagattttgttttaaataatttactcttatttctaataaaactcattaggtggtttaatagtctaagatatttcaattttaattagttttaaatatcatcaatatattgagatattcatttaataacaccataatatcaagatctatgattcatgatttacaaa

SEQ ID NO: 32223 - DNA, 562 bp, Arabidopsis thaliana columbia
gataaggaattcaaggaatgctgttgggaaaagtgggtctttggatggagagaaacaccaaaggataggtttaggaaagcgaaggagagttttctatgagatagaggatgaagatggagactatccagaggaggatggtgatgaagaggaagagagggatgtggaaaatgtggattcaaattctttgcatgatggtgaagacgggaagatggcattggaagagcaggacaatgtgtcacacgagacagaaaaggaagatgatggagattatgaggatgaggatgaggatgatgatggcgatgaagattttaccgcagatgaagatgtctcattagatgaggaagaggaggaagaaatcattgcatgtaacaaaaatgcactgaaggtttgtaagggaaacaagcgaaacgtatgatctggagaagggcgtaaaagaaggaagaaatgctctgttgcaaaaacccgtttaacaaggggaagaaagagacgtgtgagaaacacaaagaaaggagttgatgaagatgatgatgattttgtagatgactgcttacctgcaagaaag

SEQ ID NO: 32224 - DNA, 538 bp, Arabidopsis thaliana columbia
cagtggtaacggaatcgctaaaacttactcctattttcgtagtaaggtggttgtgagagagtttaatacccatctgaacacaggttcgactatcatattcgaccattttttggacttttttttagtcccacacctaatttccagcgactatagccactgtcggagcggaaggaatgtcgaccaccgtgtttcactgaaagatcacttcttgcaagtaagaccaaaaaaaatcagaaaatgagatctggaaaagaatttaagaaaagaggagagagagattttgctaaaagagttctctgctccctttagatcagaattaattaacgtaccaagagaattgttaaacaaaaatagtttcgccggcgttgaaagaacgatggtctagagagagagagagagaattaaaaaaaggtagaggatagatttgaactcatgtttaagtggatatcaaactctcacataaccacctgactacgataatattttcataactattagaaaagaaattgtatataacaccatagggttaagttttact

SEQ ID NO: 32225 - DNA, 545 bp, Arabidopsis thaliana columbia
ttggttctaaaacgtttgtcatttcgttttttgggttctttgtaaaattccatttaaaactgattttggctgaatattgtctgaatgataatggcgacgacttctggttttgttgttgtgagcaattaaacaaaacaaataactaaactaaatggtttttcgttatttgggatcactaaaaggaacattgtgtagaagaattaattatacaggacttgtgacgttttatttgacagaatgaagaacgtaggtcaaactaaaattatgtaatggaatttactcaatatgggttacattttgaaaatctttaaaattcttccgttgcttgtaggttataaacatataactcatgtctaattaattcgtaaatcaacaccctgtttgttctcactctataaattcaaagttcctgcacataaccaaatcatcaaagtgaaaagaagcaagaaaaataagacagagataagattaactaagagatggaaagcaaagcaagagttattgcctccttagtcttagttgtagtcacttatcatctcttaata

SEQ ID NO: 32226 - DNA, 476 bp, Arabidopsis thaliana columbia
tcggaattacctgattcagtgttcatgacggtgtagagactgtcgaaacgttggccggcaaattcaatcattcaactaaaaatatgctgaccaaacaaataaaaaatgcaacgaggtaattatccagtacccttgggtatacgatagagtctgtggacaccgctcagatgcagtgctgacaaatttaatgggcctatagctaaaagcccaaatttgttggtcctaaatcctaatacgctgtcctatagaaaacaaaagtttcttctacactcagcacagatccgacccgacccgacccgacccgacccgacagcttccgaagacgaaatttctacattgcacgtctttctccgctagtctcgaggatgctaatggaatctttcgggcatctatggtgactggtgagtagattcttcttgcccacaagtttctttcattgtttcgtctttacgaactatggttgacttgaacatttc

SEQ ID NO: 32227 - DNA, 843 bp, Arabidopsis thaliana columbia
  unsure (1)..(843): unsure at all n locations
aactaagaagttgactatctctataagtgaatactcaatcagataacacatgaaaccaaaaaacttcatgaatacaatacataattgcataagcaaaagtttttaatctcatgcttactcaactccggtttggatccggttatagtagacaaaaccgaaccaggtgatgaaattgaaaagtaaagttccgtacttttatatataaccccacaagtttctgtctaaaaatctaagagagaggttgcaaaaatattaaatacgatctctgattctgcgacgaacgcggaaagcgaaattgcagaagaagcaaagcccccaccaccaccagcaccaccaccaacgttaaggaaaccccaaaagtcggagacaccacccaaaaataaaaaacccttttcttaagtcgcttgcacgatctcggagaaaggaaggaaacaccgacccagaagaaaaaggattcagcttttttttttccttctgaattcgccattgataaagtcattgtctttggaaaaagtatttgcttttgaatcagttcttataacaggtaaaaattattactttggcttataacatttgagatcagaatgattatgcaagccaatttaatcggtaatgtgaatgcaattttgagttttttttatttggttttgggatttatacaatttcattgtcaatagaaacgtaaagtatggatctttatgcttcaagatgaagtttcactttatagtctacgttgcatttatgacattgttgaagataacttattcactctgcttttgtttacagatttgttcttttgataacaagatcaagctttgttaactanatttgaaccttttgata

SEQ ID NO: 32228 - DNA, 979 bp, Arabidopsis thaliana columbia
caaagtgtcttctatgcttaaactaatttaaatgccccggatatgtctgtgatattcagggaagtgcgagacagttgtttcaacgactgcaagggccaatggaggaagataccctgaagtctcattttgagaagatttgtttgattgccgagaaattacattatagaaagacacaggttagttcacctactactttgttactgtttccaagcttgtaacctaaaactagtggatttctttctgcattttttggctagtcataattcaactgttgcctggaaatagggatagttcgttgtgtatgtactgtgtagtatactagcatcaaggagatgatatgttgggtgatggtagtccaaattttagtttttgagtcccttgtgggcagaatgctaaatggttcttatagtgccagagagtgttatcggggtttctgtggtttcttttgttcacggaattcagttttcaagttgcactggagctggtaaatgtttttgcttatagatatggaatttgacaagataggtttgcttaattcagtttttaatttgcttaataaagtttatggtatgaaaggcatatctcaatcactcgacataccaggtctgcatgtttctaagtatagctgcaaatcttagcaaagatttgctgaagtcacattgtagtttgaagtatgaatctactaaggacctaaatctgtttttttgttgctgcttttgtatttttgcgactgtttcatctatcttcaagaacgatggtcgggatcccaagcaaatagtaccagttcacaattcacaagtcatggctctctctcaagtattcccgaataatctgaatggaggtgttcttacgtaagttctgttgtttccttgtattcacatacatcttgacttctactcttgcaaattctaatattttgctactctccggatgaaggccccttgatgtctgtgacgcatcaacttcaggtcaagatgta

SEQ ID NO: 32229 - DNA, 577 bp, Arabidopsis thaliana columbia
gatgtgcttaagcttgcacttgtgtatatgtcgattcatacgtgtgtctcgttcatgcgagtcagcttggttttgaatccacgaatgacgagacctattcttctcaaaagagtacacaaaatatatccaagtttaaatataccaaaaggcaaaagcaatgaaccacgttccacgtatcaaaattttctacttcaatttgaccgattgactagagtgtattggtagttaatggggaacataatggggaacacaatagacgcacaaaaattggtaaataaaagagaaaatgaagaatcatcatgagtttttattcaattcacaaaagtacatgagacaaaaacaaagctcaattccgccgtaacaaacaaatagcattattatgttagccagttttttattttattttctggagctagcacccaccacttaaagaagttattttttttttctggtaaacaccactaatttgtattaagtgtttatgtacctttctgtttctttgtatcacatcattgcaaaatttaataaagtttaatatgaatgaatgtttcccttctatatatacatatatatatat

SEQ ID NO: 32230 - DNA, 423 bp, Arabidopsis thaliana columbia
tcttggtttaaaagttactttttatatgtttcatggtggtaaaggttatagattaaatcacaaaagtggaaataaaagtcgataagtgattattgaagtacaacaataaaggagagtttctttttgttggtgttgtctctgcgtctttttgttactgattgctcctgatctaatggccagtttgacaactaaaagcgtactgccaaaacgggtaaagccaaaggacagatattacattgtcactttttaaagcgtttggttcgttgaacaaaccgaccgtttagtgggacaggtagactttcactatgtcccaaattatgttccattccatgttatagctaactaattctgaacttgagctccaaatttgaattttaaagttaacttttgtgatagaagaacaacagtaaaaaagttaacttt

SEQ ID NO: 32231 - DNA, 416 bp, Arabidopsis thaliana columbia
gactgtgtaaaacaatttgaccggaaaattaacaagggaaccggggaaaaaaactaaaaacacttgctttattttaagcgggaatggatacgccgcaagaactgaatccgagatatagaactgcttaacgcaaggtcctctaaaggttccaactttacgggaaaacgaagaagaaacagtttacacacagcaacatagaagcagcaatcccaaaatagatagaagatcacaccaaaagaaggaaacgccgaaaaaaagtgatagcttgaaaacatggctctgtatatatatgactatatgtatatggtattggtatgtatgtgtcgacgtgtcttgtatggcaattcataactttgaatctgggatcgtctttacctccggcgaagaatctccttgagggtttcctggaggctgga

SEQ ID NO: 32232 - DNA, 956 bp, Arabidopsis thaliana columbia
gctagacaggcttctaaaggaactcgtgggcgtactatttcatcacttgacctcctgaaaataaacaaaaaaatcttagataagcagtgaaactatgaaacagatttaaacttaagtccattgactcacatatcattctcttccaatccttttcctgctttttgcttgtgaaaggcttctaattcatcttgatcaccaaacattaagcaaaattaagaaacacgccaaacgataaaggaagaggaacatagacagacgaacaggatatacctttattagttgcctcatgtagcggaatgttcaaagaaagaatacagtcttccctcttattatatccaacctttccagacggacaaaggatcttctcttctattccaaacttgaagctcctcgaggggtctaaatctggtgtcgtgttgctagcacgctcaaccttgcctaccagatggaggaaaaagtcgagagcatcctacaagacagattggtgctagttagtatgaaaacataaaataatttcgttaactgatgccgaaaaggagtatcgttccaatacaagttaaaaaataaacaaaactccgaacattaaaaaagacatggttttcacctgctgtctcatagaagagaattctgcgtggctcgcggcaattacgtttttgaacatgcgaggaggtattccttcttgtctctattatcgattaaaaaacgaaacaagatgtaaagtcatcagaaatcaacacaagtggggtatgcaaaaaaaaaagtgtggccatccgcatacatatatttattcaaaagttaaacacaggacttcaaataaaaatcttacaggatctccagttgtagcatccttctgcaatcagaagaaaggcgaaatcaatgtactgaggctctaaaaggtggtttagatcatatacatatatatatgcatacaagcaaaaatatttcctctatagtta

SEQ ID NO: 32233 - DNA, 797 bp, Arabidopsis thaliana columbia
aaattgggtgaactgtttctcgccatcggaatagaatagggaacaggagttatggaggcagtcatagatattcttgaaaatgctgaatctagttataagaaatatctgttgctaagtgaaaggaaggagaatcaagaaactaaaaacattctgacagcatttggagagtttgtaatgaaaatgtttcttggctcgaaagaaacaccggagaaggaagaagaaatcattcttacatttggggagtttgtaatggaaaaatttgatgggttaagtgaaacaatgaagaagatccagaaggatatggtggatttgtatacacatctgcctaagtcctttctatcgtctaacgatgtgaagaatatgatcgtagcccgtcaagctcttcgccaagccagaactttcttgcaggagaaacaaggaagcttcacatttgattgcttcaacaaatttgtctgtgttgattgccttcggactctacgtttgctatcaaaacgttttgagattccagccttgttgatgaaggaggatataaggacattctgcctacaaaatgcacacataatcttttgcactgcctcgggtgctgcagaaatgaccgcggaacgggcagggtccatagacatgcttgtagttgacgaggcggctcaacttaaagaatgtgaatcagttgctgcattgcaacttcagggtttgcacatgctgttcttataggagatgagcttcagctccagcaatggtgcaaagcgaggtactttcttttgtcttatctataagaactaggaattgcgttgaacata

SEQ ID NO: 32234 - DNA, 533 bp, Arabidopsis thaliana columbia
tcaatgttttctttgccatatccatgatacccgtttcttggcttgtaggtattgttaaccgcataccaattgggcatgtatttccatgagtcataaccgtaagagccatacccatagccattcgtgtaaggtccacacatcccataattggagtaaatgttgtccatgtatcctccataagattgaccattaccagctgatcttccctgctgagtctgcaaaataagatgataataaattaaacgaataaacaagtcaagattacataccaagtgattataactacagctcaatgaatgaaataagaacataccaggtactgatactgaagattggtttccctgaagcatagctcccagtgtaaccatgtcttgggtactgatatgctgggggatagtaccataagcataggcaccttcccatatgaaccctttgcgttataagctgcactttggtaccgagtttcataaggttggatccttgtctttggcacccgccatctttagcaaaagctaggttacaattttggtagc

SEQ ID NO: 32235 - DNA, 580 bp, Arabidopsis thaliana columbia
aatccagggggactgtgttttcaccgcatgtaaaacaaccatttgtagtgtttacgctgaacttaggattgagtgtgtgggggtaggttggattagacagaggacatcttgggtttggaagggtttggttatcatatcgtttggattgaaaagggcgaagagttggaaagcctagacgtgctattcgtttctcaagctcgttgccgctttggttatgatgtcgtctgaatccataaggcggaggaggcggaagaggcggaggaggaggaggatagtgacgtggaagaggtagatgcacttctttgatgtccatcttttttcttgatcggatatgaggcagaacaggtggaggaggaggaggaggtagtggaggcacttctttgttgtccatctttttgcttctttttttcttatatcgtttgaatccagaaggtggaggaggtggaggcacttctttcatgtccatcttctgttctattgtgcatctccggtgtaaaaataatccaaggcggaggagctggagctacttcttctttgtctatgtagtattttattgaccgcttggttgcgattgatgtgt

SEQ ID NO: 32236 - DNA, 507 bp, Arabidopsis thaliana columbia
agaggatcccctcaagctttttcaatttaatagaatttgattgaactaagatgaatgtattcaatatagtattttaggtgatttgtgtaaaatttacaaattctgtgttattcaaacatagtttcttaaaaactctaatgaaatctagtgttattgaactaatgatttaaaaatctactagaaaacagcttgtggatttgattcttattaattttgaaggatttgaaaaaaaaaatttagttaaaaatacagaattctaaatcttatggttttagatggaatttggaaagattttacaataaatcatattaacttcccaaaaatcatcatgatcatatagtaactcactaaaactcagatcattaaaaatgtaaggttcaatacaccctaaaatccaaattctttttaaaatgtagttggtgaatatgttatactgtctgatgtctttaatatatatttcaactagttttaagatttaaccaatgttgtgggtagaatatttttttt

SEQ ID NO: 32237 - DNA, 390 bp, Arabidopsis thaliana columbia
acatatatatgattaggcgatcacccgcgcgacacatcgattttctcaaatgattttgtatagtttaatttaaatataacttttaattatcgaatcattcgctcatgcaataaaaaaactattcttagtagtcctgggcgtttgggtattcggttcgggttcagatcggttcgatcgggttcggattgcactggagtataattttagaccccggtcgggaatctgaaaacttcggttcgggttcggtccggtaaattttgggtttgagcaggtagcggtacatccattgataatccgaaaagtgatcgagtattattggatactagtgcataactacccgaacatacgtgatactatccacatgcaccataaagcctgtaaataggtaat

SEQ ID NO: 32238 - DNA, 453 bp, Arabidopsis thaliana columbia
agttagctttaagatcatcaagaggacccttaatggttaaaagagttcttagtgatgtagagtaagtcggctttctctggcatctcaaagaattccaccatgcaatggctgctgcccgatccttagattcttgtatcctttcctcaaagacagccttacgaatttcttcaaaaatatttgtcccttgcagatttttgcggttttttggactcaaagggattgcttctagatcatccttcaagttcacacgctgtttgattaattctgagggtgttgaaatagctttgatctcatctccttcccaagaagtcatagaaaaatcaagatgggtgaataagaatcccaaagcctcaagatcaaccttggaaaacggactttccaatagtagcgaacagattgttgaactcaactgcacatcaatgccagccatatcaaaagaacttacaataggac

SEQ ID NO: 32239 - DNA, 419 bp, Arabidopsis thaliana columbia
catataattcccaatcgcagagacgtaaaatattcgattcgttaactaaatcgtaaggagttgacacttgtctccgacagcggccagagtcgatttacgtggaatccacacatccgcacttgcatgacacaaactgcaccttttcatctgtttttttttttttttaatttgaaagttttacacccaatggtgctaattttagtagccacatacataactataatattaaaatgtgcaagagatcattacataattggaacgaaattttgatcatgaaacatatggtttacactaatacacgaatagaaatcctattatgatgagttcatgcatgatacagtggttggtatacttcactataaatttatatgatcttgaactcgaatataacatagaatgatcatatatatatacatata

SEQ ID NO: 32240 - DNA, 525 bp, Arabidopsis thaliana columbia
ccatctcaagagctatagagttagcttgcggtaacgaattaacgatgccttgaacttacaccatctataacttgtaagaagattgtttatttcacaaggaggacctaattggcttcatgctcgtattgccgatgaatgttgatgttagagtctttgttgttgtactctgtgttagcatcttttgtgaaggtattgttatgttgacttttgaataaactcaaattcgaaaaatataataactaatttttcattgtgcaatatacagtgaagaatattataactatattctcatgtacaactagatcgatatgcttcagaaatactcaaaagtcaaaaccgttgcaacctgaaatgttcttgcccattttatctaattggtgtcgtctttgttaatagcccaattgatataaaccgcaatagatcggcccaataagtatatactttgggaaacattgataaatctgaaacatttgtgtcaattccaaaataactgaaactataaggggcctgaaaataaataacaaa

SEQ ID NO: 32241 - DNA, 348 bp, Arabidopsis thaliana columbia
taaaatccaaacaaataaagcaattcaaaaatcatattagacgatattttgtaaaaaattcacaacagttttatagaacatcatgtggtttatgcgctaaatacaaatgatcacgttgtaatttattaagaaattaatatcccatttatatttaattactatggggatcactttattaacaggttttagtacagggattgttttactcaaaacatagattagggttaaacaatggatctaccaaagttgaaggtttttttcattaaattcccattaatctattactaccataacagcttagcttaactaaacgaacctaataattatgttgaaacacataagtccaca

SEQ ID NO: 32242 - DNA, 348 bp, Arabidopsis thaliana columbia
ggaagccgtcgtgaaaaaattggaggatgacaagaagaagaaggagaaggaagccgcagagaaactggaggctgagaaaaaactggtggatccggctgcgaaaaaagcaaaagaccatggaaacaagaatccaaccgatgccgcaaaggagaaaacgactcaagtagtagccggaggagaggataaagctcagacatcatctgaaagaaagccgtatcttcttttgattcttgacgatgaaggaatgaccagtgagtacgaggtgatggtgcatttaggccttgaggattttcttgaaagatcacacacctcgaaaaatccttattacaagaagacaaaggaactgag

SEQ ID NO: 32243 - DNA, 573 bp, Arabidopsis thaliana columbia
cattatctttttttggattttcgaaacttttttgactttttttgggttttagttactcttccttcccctctcgttattagactgaaaccaaatcgaaaaccctagaatttgaaagaagaaaaagaaatcgaatcgaatgacaaaatcaacaaaactaaagccaaagtttttatcttttcgttttttttgtgtttttatgggtatatcagaggagagggaagatgaaatagggtaagaaattgccggcgcgaagcctgcgacggcgagtgagatatttgggggccgagagattctaggcgaaacaagcacaattacgatagatgaaaaagaagcattacggtttctccttttctttgcttttatattattaacccaacaaaaaaaagaaacctttaattcccctagaagaaccctaggagtgtgagattgatctcagccgttggatcgagtctgaagtaaatcgtaggattgattttagagttgctggtgaattgataaggtcgtcttccttctcgtcactttcggaaaagtcaaacagatacgcgcgtgtttgacactttcgaatctaattag

SEQ ID NO: 32244 - DNA, 441 bp, Arabidopsis thaliana columbia
cattggcaataagcataacattcatttatttatattaaaacacagaaacaaacaattattaaataaagagttctggcatttctctattttagtccacttaatttaatactatcatcttcaaacaagatttcatcattaataatttaaaaaattatacgttacatagtgtattaaatgaattatcgttgggatacactttcacatttttcaaaaacgtatgaatcataatgtgacacatggagatttcccacaaccgaggctcccatagtagatgcttatgcaattcatattcttgcagcttaaactcttgcaagttcagtaataacaccgtgatatgaaaaataaaacttagccctttttaatttttgaacttattcagattaattaaaagcatacgtagcatatttaagaatatatagcagagaatcaaaataacatatt

SEQ ID NO: 32245 - DNA, 510 bp, Arabidopsis thaliana columbia
gaagatcttgaggaggaaatcgaaatcagcgagcgaagaggctgcagcaaaagctaagagactcgtcaagagacggactcaaggattaagaaacgttgtacctggtggtgagttgatgagcaatgacgtcttgttgcttcaagaaacgttagattacattgtgtcgcttcaaacgcaagtaaatgttatgagaagtattgttgatgctgccgaggccgaaattgagagataaatgataaaaaaaaatcttgttttatttttttatctgcggagattagttgcgaaacactgatgtcgatcggatcttgttgttggtcattagaaccgtatgttattcggacaatgcaattgtcatacgaggatggagagatattatagtaagccattttgtacataaggaaatttatacaatgcttatagaaagtttctgctacgtgatggtggtttttattggaacatttcttggcaaatttttatttgttttgaatttaatttagttaatgtgagtga

SEQ ID NO: 32246 - DNA, 477 bp, Arabidopsis thaliana columbia
ggtgtttgattgtcggaagcagaactgaacgagagaagctataaaaatttccgtttgaagtccgtcgttgctgctggcaattaacaaaattaatttaccgtctcaagtccgtcgagctctttctgggctttatgtaataattgtgggccgggctcagacccacttaatatgtggtaacttatgaaacttgctttgatttggattaggagttaaattaggagttaggaccttatacattgttgactgctccacattattagcattaagcatctatattaatatattgttgaagaactctatttccaaaagtgattctacaattagttgcatattaaaaatatagctagaaacgaatttgaaggtaatgatctagtaagacttcgtactaaacatgtattttaagtgcaaaacaggatcaatttgacttacagtgtaatgatcctagtagaatatgtacataaaggtgtaggatcaaag

SEQ ID NO: 32247 - DNA, 485 bp, Arabidopsis thaliana columbia
taactgtctatttcctggcagaagaaacaaattctcttcacactttacccatatatatattgtttatagcaaaaatatttcgtctttttttttttggtctaattatatccgagaggagaatttggttgtgttaccacatcatactttgaagtttgaactcgttgaattaataacacgcagttctgatatatattattcttttgtgaaagaagttctgatatatttctagatgttttttttccttctttttcttttctagatgtttcttatagaataatcaatgtgtaaaccattactagcttgcttatttacatcaaagagataggaaaatacacaaataaagaaggaaattcatcccaagaaaactagagacaatcaaaagattacaagtctcaacaattcacaataagtcaaacaaaagcatcttccgatagagactagcgagacagactaagaagagaaaatgaaggagaatcagacgttgt

SEQ ID NO: 32248 - DNA, 107 bp, Arabidopsis thaliana columbia
ccggaacttggcgggtaaccaattatcctgacgtattgggaccttctgtactgcaaggggtacgggctattccggacctacgagggcatctgttcaccagactacta

SEQ ID NO: 32249 - DNA, 487 bp, Arabidopsis thaliana columbia
ttcgtaccaacataggcatccactatctactccttaaagtgttcaagactataattccaaatcatatgccattaaccagctagccaatagtccaaagaggaaaaactagcattccattcaaatgagtaaagtggtttaacatatttagatttatggggtcaaggacaataacatactttgcgtttaaatgctgagagactgcaaagccaatccagttcattcggtgattaggcttcaatgtcaaaagctgctgcctggtctccacaaaaccggataagtcccgcatttgtgcctaggaaaaagaaagtaaccaatatgattaactattgaaagcatcaaaagagattaaaattggaacaagctttacacaaagtaaagtgataaaaagtatgaaaaatcagctttgagaataactggcacacctaataaattcacctcaatctagtttttctcataattacctgcagaagtgagaggtctctgagta

SEQ ID NO: 32250 - DNA, 436 bp, Arabidopsis thaliana columbia
taatggaagctctgaatctgtgttttgggtttatgttcgaactgaatttgggactacaataagctaaaatgattcaatcaacgctcatttagtcggattgggtatctaatgcttacaagttgtgaatctctgaaagtttcatttttgcaggagcttgagtttaaagtctctgcctttaggtgggacttgggtcttttagatgcccaggtgaggtttgctactgtaaagatgcaatctttagggtctcattgttaatgtttttcctatactacagggaccttcaaagtcaaatctcagaggacaggagacactgagccgtcttctagtgtcaacgtgaatgatttcagttccatattgcataaggttaagctaagccatgtccagtgtcatgtctttatctttctgtctttgaaggatgagtcttagctcattgtgt

SEQ ID NO: 32251 - DNA, 372 bp, Arabidopsis thaliana columbia
ttccaataaaattggccgttcaaatagatatttgatcgagggccacaactatgatcttgatcagcttgcgtccaagcacagctgtagacatttgtctcattcaaaccaatgtaaaacaagagggaatcaacccccaatataaaacattaaactctttcattctctctaaaattactctcggcacatctgtactgttccaatttctgaactcatattcctcatgagtctaagctcgtactattgtattcttcaatatatgtgttactaatcaatatttaccttggatgacaaatcgatattgtcgtatatggattgaaatatccagccttttgatttaaattatatttactttaaattatcctggatggtttc

SEQ ID NO: 32252 - DNA, 644 bp, Arabidopsis thaliana columbia
gacacctataattgggaaccaattctgtaattgacatccaagttaggtaaaaagaaaatgccattcgaattgattcaattttagctaactttaaactaaagaacaatttcaagataaagacagatccactagcaaatgtagcctagctatttgatttcagcaactcttatgaaaatatcaatagtatatatagacatcaaaagctcatacgaaaatccacaaacaacacaaatacaaaccataaaatcacatcttctttacaacaatgcagtactacgaaaaccgtgagaaagactactacgaggtggctcaaggccaacgcaatggttatggccagagccagagccacaaccacgagggatatggccagagccagagccgtgggggatatggccagatccataaccgtgagggttataaccaaaaccgtgagggatatagccaaagccagagtcgcccagtatatgggcttagccggactttgaaccaccgtagccacggtgggtttcttgatgggctcttcaagggtcaaaatggccaaaagggtcagagtgggctagcacgtttctagggcaacacaagagccaagaggctagaaagagtcaaggacatgggaagctcttggggcaacatgaccagaagaa

SEQ ID NO: 32253 - DNA, 571 bp, Arabidopsis thaliana columbia
agtaacgcgcgccagtgtgctctaaagacctacatttggctaccttgtggcaccgaggttccaacgccaggatgatatttggcatcaatgatccgggaatttgaggacttactcttcataaaaacgatttaaaaaacaaggactggggctggtgatatgatttcattaacagttccccacttgagcatcatcccttgagaacgctcttcaaaagagctggcctggtctggttctcacttctgggactgtcccgcacgccgcctatcaattctgccctcttgccctcctctctcccacctgattcttgctccctccctccccctctcctcttgcccatatttctgtcattcaacctcgtgcagggtctctgtgaatctggctcttcttccttttttccaaaagttaattgtcgcctgttgaaatcatgggccagactctgtcagagcctgttgtcgataaggtgggtgaaaagcgactgaatcaagttcgctaccttgagacccctctgtttcccattctccccacactgcaagccattccagacgcgattccaaatattacttcccgtctc

SEQ ID NO: 32254 - DNA, 804 bp, Arabidopsis thaliana columbia
cacataagaacgctgggaataatgggaacaatctattcaagtttcaagtgtccccaaggcaaaaattgtatacttaaatattcttctggttgggaatgtagtctgcgaaacattatatcttaatcctgaaatgtgtgcttggaagtgtaaaatgtaaaccactcttaataagctaaagacttcactctctctctctctctcttcattatcccctacacttctctttctaaaacctctggggttcttgtgaaagatgatgtctttgctcccaaatcccgacccgattactgtacccctggtcctcaagctttgctcctttcctccgccacggaggctcttctctctcaggctcaggcgcttcacccgaaagtcatcatctcttcttccgttggtcgctgtttcgtctctctccgctactgccgcaaaacctaccagatggagagagaagccggaattggcggaaagcgactcaatttccctcctcaacgagaggattcggcgtgacctcggcaagagagagactgctagaccggccatggactctgaggaggccgagaagtacattcacatggtcaaggaacaacaagagaggggtctgcagaagctcaaaggaattaggcaaggtacaaaggctgctggtgacggtgcttttagttacaaggttgacccttacagtctcctttccggtgattatgtggtgcacaagaaagtaggcattgggcgttttgttgggatcaagtttgatgtcccaaggactcctctgagccctcgaatatgtctttatagagtatgctgatggtatgg

SEQ ID NO: 32255 - DNA, 776 bp, Arabidopsis thaliana columbia
ctcagaacattaatttttttttatatgtctgtttttttatagtattacattataaagtcaaaataaattagatataaaaatagtgacagaaaattatatttttatttaatgttgatatacattttagaaaattagtcttaatcgaatatagttcaataaagaaagatttgattaaggataaaagtttaggaaatagttaattcaagaatttaatgcaaatttacgatgtataatttcttaggaatagaatatttggttgagatagaatttgcaaggacctgaatattaatagtaaatagtatagggatttttggtcaaaaaatctaccaaaaatgtatatataaattgatgcaaataaattaaaagaacagtacatcactatatccttgcaaatcatccgccaaatttgctttattttatatccaagtaggttcaaaatcatatctttgacaaaaaaaaaaaaggttccaaatcatataaaccaaaacaaaatcattgatttcaagtaaaatttacgttacagaaaaaagggaaacaaaaatttatacagaatttttcttaaagtaattacacccataagtttcaatgtatcctcaatatatgatcttaaatcacttccatcgataaagcttcttctcaggcttgtaaaaaaccccatctttccgaaccgagtaaccacaaacgtagctagggtacactgagcagatgtgtcaggatgaacgctaactgggaagttgcaacccgaaattagacggagatggcaatcgtgaacgtgt

SEQ ID NO: 32256 - DNA, 489 bp, Arabidopsis thaliana columbia
aaatattctaattggttccttgtggaattcttattttatttagtctcttgttagtacagtgaattaagtttgtgttttaatacagacaatgattgagcgacttctgttgatgctaagtgactctgattatcgagtgaggtttgtcttggcaagacaaattgggattttattccagacgtgggatggccatgaggcattattccaagatatttggtaaagtttggttattcaaaattattattatcctgtggcttttttaagtagagtgttttcctactaagacaaactgttagatactcgttcgtacagatcttgtggcttaccaaaaaagaaaataagagaaagaagctgatctctgtctttgttgtgggtttctgttatatactcatttctacagattcttgtgatttcccaaaaagataagacaaagaagaaaaagtcgtattctgtcgtttttgtgagcagagtatgtgtttggcatgttctagt

SEQ ID NO: 32257 - DNA, 485 bp, Arabidopsis thaliana columbia
catctgttcatgaaaaatgggaatctgcattatattcaattagtatctcaatgctattaagaaagcgaacagagagatcttgtattgaaaacaaaaaaaagctcgtggaaatgattacaaacatagtgttacaatgatacaagttgacgtgtatgtatgcatatttgcttttctctcctgtggaccagattgctctgtccacacaaagatatcaccataaagttaaaagtagatcggagaaggaggccatttccctcttccgcgtctaccgtgaatcctacctcgagggaggatgagtagcacaaacaaaaagtgagaataataaacatacgtacgtgaaagagatgacccgaggatccaaaacaaagacaatctttaagtatctgcagcttctgtggtggattctggatgtgttggttcagcttcttcttccggttgtgacacagccgtttccttctgctgttcagcgagacggctgatgcgtt

SEQ ID NO: 32258 - DNA, 521 bp, Arabidopsis thaliana columbia
tatttacaaacgttgcgttatgtacattaaacatggtagaaggaatagatatatgtcactataaactcattacacttagtgcttactcattctataaatagatatcttcgaaattcaattattgcaatgtagttttcctttatgtatttttaattaaaacatctaattaactcttaatattttcagatacatttgtaaaaagactaacaacctaatgtttctgatacctattgtcattagctctaagttagtaacgcggttttcaaccacaattttcaaatgtcaaagattctttctgtttaaatggcaagcttagaatttaatttctcccacttactcattactcggccattccaataatagaactagatatacttccaaacgcagcgtatatgtttttatttcaaaagtcacacgacttagagcatttagcgatcgacgctgagagaaagtagcaatgaattgacggtggatgaaattcttggactttctttacggtttaaatttttgattaattatat

SEQ ID NO: 32259 - DNA, 538 bp, Arabidopsis thaliana columbia
gcagaaaggaaattgcagtgtcggctgataagctatgcgcgatccttagttccttctcccaccaaacgaccaactggacaagtagttgctgttgtagaaaagtcacttgtaagggattctatcgtaggcttgcttgatgtcaagggatggattcattacaaggaaagtgatccaaaaaggtgcaagtctcctctgtctctttcggatgatgacatatgtccagctgatgcctgcagaccctaggtttcctaaattgattgtccccttccatgtcgtacctggaagcattagagcaagacttgagaatttggatccagatctcgaggcagagcatggtagctgcccaaattgtagactggggcgaagggagtccatttcctgtagcccaaattacacatctatttggccgaggcagtgaattggagcctcagatcaatgcgatattatatcagaactcggtttgcgattctgacattttctccaggatcgcttactagtcttccacgtgtgccttgggaagtacagaagaagagggcaa

SEQ ID NO: 32260 - DNA, 515 bp, Arabidopsis thaliana columbia
gagatgagtaagtcaggctctatttcaagacccatcttcacaacagaagcatgaatagatctcccttgcttcaaatcctgcaagcaagtgaaagcattgagaacgctgacaagagctacccagtcaggcttcacatccatcttcctcatctgactaaaaatctcaagagcctccataggctcaccgttctgagcataagctgaaacgatagcagtccatgagactatcgtcctctctggcaatggcagtccttcaaacacagttctcgcagatcccaaacgcctacatttcgcatacaaggcaatgagaccgttctgaacaaacacatccgcatcaaatccaagcctgaacacctgagcatgaacgaatctacccatctgaagatgagacaaaccgctgcaagctttaagaagatgagggaaagtgaaagaatcaggagaaacacgagcgagttgcatattggaatacatgagaagagcatcttggaagtgattgttcttgaataaccctgatta

SEQ ID NO: 32261 - DNA, 592 bp, Arabidopsis thaliana columbia
ataatctgccaaaaaaaaaacataagtaatcaattttttttgcctttattcttcttctcaacatatgcatgtgtatgtctattatatgcaagctcttccacacttaattttcaatatgctcaaattagaaggataattaatatctctaataaaaaacactgagtaatctattattttggcaatacaaaaatgacaactcgtatgaattacgttacatatgcatgtatgcttatagacgtgatacgtgcatgaatgttgtctacgtgtatgtatatataagtggagaggaagtaattaccgtcatatttcttcttcatcaagtttttgacgaaaagtaagcaaatgacaagaaatccaacaccagctgttcctcctactattattgccaccgttttgcctgttgttcctgtttttttccatcaaaaaccatttcatcatcctaataaaatatacctaaaaatacatttcctaaactttacgctctcttttctaaagaattaattgttacgaaccgtagcaaactataatgttgataagaaaaaacaatatttattcacataatggaaagaaacagaatcacaattggagctga

SEQ ID NO: 32262 - DNA, 539 bp, Arabidopsis thaliana columbia
tatatgctgtttcatttttcagggccacaaaacggagacagcaatgatgatattgtggagtttgatccaataaagtatcataactgttactgtccttgggttaatgaaaatgtggctgctgctggatgtagcagcaatagctcgggttcttcaggttttgctgaggcagtttgtgggtggcaactaactcttgatgcccttgattcgttccagtcgcttgaaaaccctcaaaaccagacaatggaatcagaatcagctgcatctctgtgcaaggtttgttaccaacttatccgttactttattttcttccttctcaggatgatctgacactaacactaactttgtttcaactcttttgtttgtaggatgatcaccgaactccttcccagaagctcttgaaacgccactcttttatcagcagccatgggaaaaagtaagaataatttgcttgcgaataaaaacaaaagggtacaattgcagatgaaatcaatatatatatactggtgtggtgagcatataagcttgacaacacttggtta

SEQ ID NO: 32263 - DNA, 262 bp, Arabidopsis thaliana columbia
ataagttgtttaacattttagcttcttctatgtttgattcccataatcttccctcaaccaatttttataatttattaaccggaaaaagtcttatttttgtggatgtatgtaatttcaagcataggtttatgtcaaatctaataaaaagtgcatttatgtaaaagaaaaaaacaattaagagcctaaaataatcaaatatctaaataatgtgtcgatgttaacagatcagtctgcaaaacccaagatttgaagttactactgg

SEQ ID NO: 32264 - DNA, 861 bp, Arabidopsis thaliana columbia
aaagttcagcttgaattattggctgaaattttatttggaaaggcattctcaaacctggtcacgtagtcctgtcacctcagcaagtaatgcctctcgttccccatgctcgtaaaatttctgatatctgtaaagatagtaagatcagagtataagacgtttttttaattaaaaaataaagactcttccaaaacagttaataggtaatttaccgttgtagctgctcccggagcttggtgttctccaaggctgaacgtgtcaactctggattcttgtcaatgctgtcgcgaagaagcttgatctctccttttagagttttattttcttcaatgagacactcttttgtcatcaatgaaccagacgtacagaattccatctctccaactttctcttccctaagattaagcattattttaatgcgcttagcatcttcttccatgtctctaacctgtagtaaaaggtcaaaatataagatgaactaaaatgtaacctatttcgtttgcatctcgagatgtctctgtctaggatatatcctttcaaaatacgaaaatgaactgtccttgtaacaaactaaccaagcaatctatacgctcaatctcagcctcggacttctgaagggcagattcagcaatcttttcccttctgagagcaccaatcatattatcgttcatatttttcacctgttatacagttattaagccagttcaataatagagtcgcaagatatccacaaatttgttgcaaaaataccttcactctcagtgaattatgcacctgacagtgacacttgtcttgtcttgttcacctgctactttacatgtaccagagtatctggattctcaagagaagatatgcagctgaaag

SEQ ID NO: 32265 - DNA, 541 bp, Arabidopsis thaliana columbia
taacagatcagtctgcaaaacccaagatttgaagttactactgggcccattaaaagcccaataaggaattcaattcattaatttgttaagactccagaatggcagaatctcttgaccgacgttaagggcactaacgactccgtctccggtcataaacccggcgagtggtgaactgagaaaattgatagccgactacaatggattcgcaacctccggttaacgagtcaaccccgtcgacggcgctgtcaaacttcggagagctagttccattttattcgagttacctttggaatcgccttgcttccttgttgcctacttccaaacccatttttctcgggaaaatctccaatctctatcgccaaacagtttcgagaaaacgaagtatttcatttcctcttcctctaccctccgatttcccaagttcttctacgtaagattctaaattcatgtcttttggtagcttctggttcttttcattgactgctttttgatgatcgttgcttggaactgattactggagtttcgtgtttgtttgatttta

SEQ ID NO: 32266 - DNA, 320 bp, Arabidopsis thaliana columbia
tgctataattgaaaaatacgaacgtcgaaatcactcaaagctcacaccaatctggctttgagtgctaagttagggtttggcattgactttgtagacgtgagattaccatacctaacgaacctatcatttcatgaagtacaaattgagtattaccaaaacatataatatggggtgtcggggtgatgcacataatggactaagtaacaatattcaatggtccgatgttgaaggagagttcaaggacatagatgacagggtaagcgcgtagtaagagtgaaaaacaagccttaacctgtaaacgcgtacgctagttaaataca

SEQ ID NO: 32267 - DNA, 545 bp, Arabidopsis thaliana columbia
gtttgtgataaaacacatcctctcggaaaagagtgtagagcacaacttcctctcgaatgtactaagaccactagactaacgtatagaagctctcaagtaaaatggctacgatccaaagagaatctgaaggtatgtgcaatgaggtcatgaaccatcatgatggtggtgataataacagattaacagcattgacaatttgaaaataatagtaatatgaacgcacaaatcatatttatttcttaaatagaaatgttttacaaaaacgattaatgtctaaattaattcaaggttctacgaatctacataaaggaaagtagaaaggtcagaatttgtatatgtagataagggcaaataaataaataaacagatattttgtagaattgcaaatatatgtgaataatcaaatataatagaacaagttggtcctcttcacatccttctaaaaccctataagtacccacaccctctcttcatatatcttcatctctcactctctcaaagacactgaataaatccttaaaacaaacttttgaaagaaaaaaatg

SEQ ID NO: 32268 - DNA, 574 bp, Arabidopsis thaliana columbia
tgaggaatttcataagatcaagaatgatttttttttaattcactctatgaatcaactatcaagcacaaaagacgagtatagaacaaagtcacaaactgaagtggataaagatagaaatgaaataaaagataggatgagttcgagggtactctaaattgttctaagcgcaacccagcccaagatcctaaaccaaattccagaatcttcaattataactgttcagcagctatacagcaatccaatgacaagccacctagaccaattactttttttcttaggccaaaaagtctaccaatcacacctattcactagtaaatatgcgttcacacatacacattggtccattttttttgtatcatgatgcaagtaccaaatgccaaaaaagaaagaaggaagagaaggacaatctcaccaatcttaggaagatgcagctactcaagttaacaatctgaggaaaatccatatttataagttataccccaaagtatggacaatcttgattcttgagacattagtatataaacattgaggctatatgaaacactactttccactatcagtccccccaaaagaa

SEQ ID NO: 32269 - DNA, 401 bp, Arabidopsis thaliana columbia
ccaacccgattgtgttagagctaaagaggagtcgttgttcacgaaagagatagtgaagcgatctgggaagagatctgggatgctttaaagttttgggagagtaaggactggattggctcatgggaatggtttcttcatcacgcttcgagctcatttgcttgtgaagctgcttcatcgttctccgattaaagctcgtcgccggtgaaaatgagatctcagaattgccgggaagaagaagagctttggatctggatagattcaaacgtaagagcgatggtgaatgcaaaagtagttagttacacggcgattacttgatgcaatccttcgctctcttctgcatattgagtttgttttagttatagagcaaatatatatgtttcgcttctaaaatcgatatgtga

SEQ ID NO: 32270 - DNA, 820 bp, Arabidopsis thaliana columbia
atgatttttgtccaaatgattttaaataaggtacacagaagattgcaggcccagcccaaaaactaatattaatgcttcgtgtttattagcttggttcactcatcatcctatacaaaatttcttggcggtttaagtattccacgtgtcacagtgtagtctcgttgattaactgtctcatatcacatagccgtccgatcttcataaccacataactaaaaaacaaaaaggaaaaataaattactcggcacatacgcggaaaaaaaaaaaaaaagcgaatcgtttacttacccctctttgaaaccgacggtggtatttttcgccggagaagatgaagcagagaacctggccttgtagatctgaaggatctcgattctcctccttatcgtttttgaaacctcacgacaaggataaacggagtagaatttcatcaatcaacaaagcaacggcgaagtcaaccacaagttcaaggtcttcttcttcctcttcttcttcacgtcctccatcgaatgagttcggagatttctcgatgcttccgtatgatatactgatgaagattgctgcaccgtttagtcatccgaatcttcaagcggcgtctttggtatgtaaatcgtggagagacgcgctaaagccgttgcgagagtcgatgttgttgattcggtgggggaaaaagtacaagcacggaagaggaggtgtgcgagcgaatctcgacaaagctcttgattcgtttctgaaaggagctatgcgtggaatcacgctcgctatggtcgacgctgggcttgtgtattgggaaagaggagagaaggagaaagcggtgaatttg

SEQ ID NO: 32271 - DNA, 605 bp, Arabidopsis thaliana columbia
ctttacaaaactcacatactctttccatattctcaattattattatacataacatataaaagattcctccctgttacatcaaaaaaaatatcaaattagtttattagagatcacagatcgaacaaaaagagaagaataagtttttaccgataagagaactaaaaagatcagagattggtgacaaaagcttcttctgtctgtttttaggagctttttcatattatctgaacaaatccgtcggtttggttaggatgacgtggcaaagcccgtagatatttgggtggggacttagaaaaaatggtgattacgttatccgtatgcacgtgagatatggggaagccacggacgtatgtgccactgtgacagcttcttctttcacgacccatcatctctaactcttaaagcttagcttttcctaaccaattattgtatgccacatgtcgtagctaactccggaccaaacaaaaactacaattatccgacttggttagttcgttaattggttttattattttcacatgaactaaaacacataaatagtacttgaatgtgttaattcttataattttacatttttaagaattttattaatgactaatgtgatg

SEQ ID NO: 32272 - DNA, 553 bp, Arabidopsis thaliana columbia
aaatagattattgctgagacaaataaaaatacgcgtttatcattaaggttatgactacatatgcttacatgtacatatatatgcgtgacgtttgcatgcctaattataaactagttataaccaaaacttatttgattggaatcccacaaaaatgggagagaactcacgttaacaaaatatatgctcaagtttaacatattgatcaatgttgtttatttacattagaatcagacgatgtccgattttccgtaatgatcaatgttatcacttcaatttttttatttcactaacatgtaagacatgataacattttatactgtgttaatctttttatgataaaattttagttttatgtacttgattttttttattttctatttactaaatactttgatggtttttctgtgagtatgaaaaagtgttattgttgcaaaatgaaaaaaagtagtatataaccaagattacgaatcaaaactaaatatatgtggacaggaaaatgaatgtacgtacgtcgtaggaattaacaagtatatgggcccattaagaggaaatg

SEQ ID NO: 32273 - DNA, 1366 bp, Arabidopsis thaliana columbia
tctagtaacatccgccagtgtgttgagctaagacttcataaacaacagagaaaaatctcacatcgttacgaacctctggtattggagttatcttcttcctttgaactctccaaaactcagatctgctactgcttagagacgagagagacaaagcgaaagaggcgagtttgtgtccttattaccgattctacccctacttgttggaatgacattaataccccctacatactatcaggcagtagatgggccatcgtgtatatggtattgggccttcaatattgtttagttgtattattgggtatgttgaaaattgagaacaccaatttgacatttttaaactgaattcttttcattcattctctctcatcgaggccaaagcttccaaacaaattccggcaccggtagagccgtttgctcgccggtgccgggagctatcgttcccttgtcgctctcttctcaatggctatgtcatctggtgttctctattctcccgtgttcccatgtttcgcttgtcttttctccctttgtatccaaagattaccttgaccaccatacctctgaacacgttcacttcttgtgctagttctccccttatcttctttgcgacctccgtggtttatccctctcctcggctccccttgaagtcaataccggcatctccctattcccctctggatcggagctttgctttgacgccggagctgttgaagagctttaccttggaagatccaacttctgcagaccgagcctcatcgcaaacaaacttcgtttggttagatcttgtctctgacgccctcaattcggcagctgtaaaccctaagtccgttttgccgtcgccgtcgtcgttggtgacaaagagaagatgcgcttggcggctaaacctaatgctgcctcagggttttcgcattgggcccaacccaagccccttctgtcctccccctaacccattacctaaactattaaagcccatgaagccttctgctgggttaagcccatatcctctaaggcccaggtctgttttcaaatctgttttacaaagcccaaattttttgatgttgttatcatttagggagagtaatggacgctttcctgtgatggtgatgatggatttagcttggattagtagctctctctcacaaaacctagttgatagtctatctcgtttggtccgttttcttcagtgtttgagtctagtcttgaatcgtttggagctattttctctttggaagtgtcctagagtgttgctgccacaccaagtatcgttaatttactatcgagtccctccttttagcacctctacctctgtttgggctggtaatggacgccttgctatcagaatagtggtttgtttaggtgggaatggtag

SEQ ID NO: 32274 - DNA, 480 bp, Arabidopsis thaliana columbia
atctaattaacacctgtataacctagtaacacatatatttatatcaaatcaaaaagaacaaaaaaactttgaagcaataataagaggactcggctatgaagaatgaataaggaagcggagactttgatgaacatttgatggtgcatatatacatattaatgctcttgtggttagggaatcctgacactaagctaagtgcgcatgtagatagatgaaagaaccatcaaccatgcatgaagtccatcctttgcatcattggtattttttttattttataaaacaaatcattggttgtttcaaccgtcaatttttgctttagtgtttacatcaattttttttcaagtctgttcaatactgtttgcattcatgctatagagcaaacaaacaattgaagtcatcatattcaaaaacgaaactattcagtggcaaatatttgatttaccattaacttctcatagagaaacagacttctgaaaatca

SEQ ID NO: 32275 - DNA, 853 bp, Arabidopsis thaliana columbia
gtccgagagatcgactatttaagccagcagattcgtctctatgaccctgaaaattgcttggcaagaaagcttttgaccttcgacatatcaagatctcctttctctgctctctaccttgtcagctacacgttcttgagctgtcctaatgaggttgcaaagtcgtccaggtttgactccatcccatgtctaggcaattcaacgacctcgttcttggctacaactagtttggatctcgcgaaatctatgctgccttcttgtcagatcgtcaagacattagatgttccggtttctcggcgagttattgccaagaaatcaagattctcgactgatgtcaacgataaagacctttggctgaaatgggattctccaagttgtagcgattgtgagagggattttttgagatgtggattcagaagcaacacttctctccaagtcaaatgcttcccttttgaaaattccggtacaaattactcgaattctttctcttcttagttcttataacttacattaattaatagttatgaattaacgacgaatgagttagtcttcataaaaaaagttcaaattggaggaatctttgattatttggggttttcaaataattatccaatgattaaacaactagacaaaaaatctagtaggccattacatttgacattgagccgttgactatatattgattagttaaatattgtttaacacattttttaaaaagatcaaatctccactcttttcaatatgtcatagactgttgtactccgtagataacccttataatacgaattttaaaagactagtggtacatgacttgttggttagtgattgtgttatcacagattcacaaagaaaaaat

SEQ ID NO: 32276 - DNA, 462 bp, Arabidopsis thaliana columbia
tgatgaaaatgattatgcatttcacgaaatttcactaaaaaacaattattatgaacaaattcattttgtttatctaataacaataaaaatcattggactttgattttatacgtcgtgggaaggtcgtcgaagcacgttgcgtttgatcattgcatgcatcgtgaaaattccactaaacatcgtcttttaaaaaaagaaacctttaaaacattacaaatggaacgtgaacctataaaatatgataggtagatctcacactttatttacagtattaaacaatatggaacattgacgttaaattattattttctacttataacaatttacacctcccaaaatttggaaaggataaaccaacaaggcaacaagtatcacaaatgtagctgaaatagatgggcttttaaagtttatggattgggccgtcatgaacacatattccataacataacctaattgggtgct

SEQ ID NO: 32277 - DNA, 519 bp, Arabidopsis thaliana columbia
tcatgacatgaggtatacatgtcattttgcagttaacaagcttgatgtgattagagctgctagtcaagctgacagggcaccaggacgacttcgtgtaactcctgtgactgtggcaaatgggcaaataattcgtgtggctgctgttggtattagcgagtttggagaagctttttcaaactcctcaactctttctctcaggtgggaattgaccagttgcaacaatttggcatactgggacgatgattataactcaaaaatgacaaagtctggctgggagagatttctggctctacgcaatgaatcaggattggtaaatatattaaccaattccctcctcattatttcattcttccgacgttaaattatttatcgttttctatataccatatactgttttgacagtgcactgttcgagccaccgtttctggtattgattattctttcaaaagccaatactcaactctgcttccacaaggttctgaaagtactctcactgatgctgtacgcttacaggtatgc

SEQ ID NO: 32278 - DNA, 488 bp, Arabidopsis thaliana columbia
ggtcaatggcttgtcctctttgaaaaaattgcctatatataacaagagaaataaatgattttaaaatactatagagaatattagtaactaatgatgtttagtgatgggaaaccgtaaactatatgacatacattcatcaagattagcgagtgaaatgaggatgatacagaccgcaattttggatgacgacattgtaacctttttctttggagaaacgttgtattgttatatggtagaaaaccttacatatgtatctctccagcttatgttttgcatatgtatagtctgtatatcccaaatgtcttactcaattcctttgaaatcaacctgacacgaaccgaaccttttacttatccaatcatggatgttcgggttccaaaagaacgtgaaaaaactatgtgtctctgtctataacatctaagagacatacaaataataggtgtatcatactagacctagataaaatattaaatgatgaaaaaagagta

SEQ ID NO: 32279 - DNA, 601 bp, Arabidopsis thaliana columbia
  unsure (1)..(601): unsure at all n locations
gaaaagaaataaaccctaagagaatgatcgaaactaattgatatcggaatcatcaaaatcatcctcgaacttgttgaagaaatcgctgtcttcgggcttcatttgaaagggtgaaattcctccaacttcaaactgcatatccatgggcccgaagtcgtcttcatcgatctccatctgcataggcatcgagtatcctggatactccatctcacccagaaagtcacggtacaccatcggcctcatcgggtcttgttcccaatatctatccatcgtttcgcttcctttgcgtgaaaatcaaacaaaacctaaggataaagagaaagagaggtgttctactttttgagggttaggacacccttaagtaatatccgggacattataaaggcccattagtagaggagattggtccattatacagtcaagataaattaagagatttctttctttatgtgtcatcaacaattagtttttaagatttttttctaaaacaaagattttgtattagattatattcacatatgtagtatctctaaaataacctttctaataattataatgccattatanagaaaaagtatatttatttttattcttatttttg

SEQ ID NO: 32280 - DNA, 541 bp, Arabidopsis thaliana columbia
tagttcatcttttgacccatctgttgattctggcacaggagattttgaagattcaagttctttcgttgtatctatgtctgatattgatgaccaatctgaggtttcgaagtactccggtgttccgttaacctcagaaagctcttcagcagtggcaaatgctgtttccgtgtcatttagtggcacaatctgaggttttgaagtcgaatccaattgtgaagaaacctcaggaagctcagttacagtccccgaggctgcataagcatcgatgcctgataaagaagataaggaatcttccttctgactgttaacatgattttctaaatcagacacattggttggttcagtgttcaggagactctctggatcttcagaatttgtattttccacgcccacaagattactactttctgcatctagaagaataggctcagtggatgagtctaacagagacttagattcagatattattttctcactttctgctgtctcaggatcagtttctgcattgaccatcaaatctgcttcaggagtattttggggg

SEQ ID NO: 32281 - DNA, 559 bp, Arabidopsis thaliana columbia
taagatattcaatcaacaattagaaataaacaaaatataacgttttcaattctaaatcaatcaggaatgacatccaatgagatacaagtacgtagatgggttttggtggaaactggggaccacttctctattactaacatttaacaacgttgacccctctctgacctgttttcttcctcgatgttcgacacgtgtttacattctctacttttatgtcttgaccaagattttttctgtgtcaacattcgtttactatgcattaagtaggatcgagagttgtaatttgggctttaactgttacttacgttacgccgatgaatcttatgtttatgtaatgtgatgatgatattttagttagttagtattaatacaataataattcataacctaactaaaattaaggaaagacagagagaagctcagcttttcgcggaaaattctctgggacgtggcggcaagcaataggatgatgatttgaattatgctgagtccacatcacagaaccaaacaatatcaaaaggttgaaataaacgaagcgcgtgtgtaaccatgacacgtg

SEQ ID NO: 32282 - DNA, 684 bp, Arabidopsis thaliana columbia
tctaaagcacaacctaaacttgagattggcgatgctttaaaaggaaaaaaaatcaaaggaaaccattaatgagccatcaaaaaatattcactaatatgacaagatgcattgtttatttttcttttcagaatcctcagaaactaccactaaactcctcaaggaacaaaaccatatcatgaattaggctggcaatttaactctgagacgtctttcttgtatagagaataaaacatacgcgtgtaaaagaaaacgcgtgaatcgaatgatgagtgttaacgttcgatcgagatgccaccaaatcttttcattaaaatgaattgtggaggacataccacttttaacgaggtcatttccactgggtgacatgtggactctactttgggtggcatgttcatatctttccacatcaccatgtaaacgtgaaaacacccaccacactcacttacatctcaaacacatgtcttcattatcgtacgtagctccaaaaaaaaaaatgaaaactaggtttagtgattctatttcgcaatgtataatatacaacttgtaaaaataaaatatttgaataagcattataaataaacccaaagaggtgttagatttatatacttaattgtagctactaaatagagaatcagagagaatagttttatatcttgcacgaaactgcatggtttttgagacatg

SEQ ID NO: 32283 - DNA, 434 bp, Arabidopsis thaliana columbia
tcttgcaggattattttttaaatttttgaaaaattctattcaatttcaataaaaaatttctgaggatagtcaatgaaaaccaaaaaagccataataataataattataaagtaatatatcaaaacgctcatataatattccacatacatttactgtataatcagaaaactatatagtatagttatcaagggtccctcttaataaaaccaatattattcaactaagatatactttatttatttggagataatttaattttcgtaagcaccatataataaaacaatgtcgcaaattattatcttgtttatgtgataaatatagaaatatataacgagagaaaacaaaaagagtgagtgatagtgattacaaaggtaagccataatttgaatatttaatggatacaccagataagaagaactttgcttcaaagcggc

SEQ ID NO: 32284 - DNA, 520 bp, Arabidopsis thaliana columbia
acatccgcaacaccagttcccctgatatacacccctctgatctgtccataaggtacacacaatgctcgtacatctctcattgctgatttcgacaagtttgaaatccttgccacgattgtcctcggtatatcaatcctcgagataaacaattgtgtgttgcatatgctgattgaatgctccgcaagtgctctctctttgccgtcttccgtctgcaacacaagtacaagatttatctttactgtatctggcattggattttgaggataaaacaagaaaagctacaataaaaccacacctcaaactccacgaaagcatctgttctcgatgaacccaaggtaaacttagatatgttgctcctacagaactttagcgcttctttgatctgatttgaactaaaatcgtgcgtcagtggatgaatcttaactgttcgggctggttccttcacaatgcaacaggcacatctggatcgccaatgagatccggaatgcaaatcctttctaccatgtcttcctgagaagtt

SEQ ID NO: 32285 - DNA, 521 bp, Arabidopsis thaliana columbia
tgctaaatgcaacaagtattaattcagaaacaaatttactacgcaaattcggcaaatgtaaaatgtcaaatatatatagtaattaaacatgttatgtgtgagttgtcgaaatgataaactagtttgttaagtacttcagttagtctttgttcttcatcatgtttctctataactaagtccctttccatatttcatcaatatgcatttatcttattcaaacatcataacattacaacatataactttccttgatattaaaagtgcatacaaagtattaaatctttaaatacctatccgggtgcaataacatattcaagccatcaaacctaatttctaaaagcccgatccgatcgacaacgaaatgttgtcctcggactcgaattacgctagtgatattagcgacgatgcctccgccaccggatcgatagagaatcctatatacaaatgcaagtattgtcctaggaagttcgataaaacacaagcattaggtggtcacaaaatgcacacagaaaggagagaga

SEQ ID NO: 32286 - DNA, 587 bp, Arabidopsis thaliana columbia
agaagctaaggaatgcgccttgcacaagcttgatagcagcaatgcaagacttgctgactttcttgtggcacaaacagaaggcttaaaagagagtttgcaagaggctgaagaaaaattgattttgttgaacactgagaattccacattaagtgagaaagttagctcccttgaagaacaactgaatgaatatgggattcaaacagaagatgcggatgctacttctggtgctctgataacagatcttgaacgtatcaacgaggaactgaaagataaattagccaaaactgaagcaagggctgaggaaacagaatccaagtgcaaaatcctagaagaaagcaaaaaggagcttcaagacgagttggggaatttcagagacaagggcttcactatacataagttagcatcgcttgagaaacacttgagggactcagatctacaactagaacatgcagttgcagctgttgaagcaagtaaagaaaagcagaacttgttatatctactgtttctgatatggaggatgtgatcgaggatctaaaatcaaaagttttgaaggctgaaaacagggctgacattactgaagagaagtt

SEQ ID NO: 32287 - DNA, 105 bp, Arabidopsis thaliana columbia
gtttggcgaactggcctctgggcttcgtgctgcaggcctggttccgcgacgccatcggtacgacgatgggcggcctctacagtgaccgcatcgacatttcgttcc

SEQ ID NO: 32288 - DNA, 518 bp, Arabidopsis thaliana columbia
gctggttcctgcctcgcccaccactcactgggaccacgggacgtagctctgagcagagggcttgagggcaggcatccgccgaaatggtctcgtgggactctaggaggagatggctggcaccttccaccctgattccctcctgccccagcccagtggccaagtgccagccactgccatagacgagcctggggggtgaggtccatgcccatggagaacaggtgagcggcaaaggactggcccttgttttgtgctgttgcccaatgtgttggttagctatggctgcagaacaaactgccccagaatttagtgacttttcgcagcacacgttgactatgtcaaagcctttgtgggtccagaattcaggcaccacggagctgggtctctgacgtgtctgcagtccaggtgctacagggtgtcgtccctcttggttggccacgtggccttggaggattcagccttgaaggcggggctgacaccggtttttgcgaccgtagcagagccagttcctgcatgcgggg

SEQ ID NO: 32289 - DNA, 350 bp, Arabidopsis thaliana columbia
cgatgtgatatagaatccatgttgaagtctcttaaaggggcagcaatagtaatgaatgaagcgcaccagatagagttcgagggaaaggagacagatgttctcctcctgaaatcgcagttgtgcacaagaacagagacattatgaaggcttcgagagaagctgaagatggctgaaatgttgatttatgaagcatcagattgtgcaacatcttctctagtaattgtcaaccgatattctgaggtaaccggagcccatacttttgagttgaagcaagaggattgtcaggttgcggaatctactggaacaagtctttcgctgaagcaacaagtacgagatttggtagctacctg

SEQ ID NO: 32290 - DNA, 659 bp, Arabidopsis thaliana
gatcattgtaacagagcaaactcgttttaagaattcagttactgcagatccaccagataggtatgcaagatggacaatgaaatgcttatcgagtagggaatatgtactatgtttcttcccgtgcacggtataatgaaactaaggaagaatcataaaaaggtaatgcagaaacacaacttgttttaggggaattcgccaagagattagaaacagagtctcagaagagagaaagttcactaaaaacgaagagattgaaagtaacatgtcaatctttcttatgaaataacagcaaacgccataagctcactatgataacaacttcaatcctagattaaaggtatcagtagtctccatcgtcacatactcacatattttttggattcatctagaggatataaaaatatttcgtaaagttttccaaaacgttgataaagaaggttttcataattacttgtaaaaaaaataaaaacatttacaatataactctttgattaattttacggtaaaagccctcataaaccctaaattaaacctcccatcccaaggcacgaacacaatgacgaccgaagaagatatgaggtcatcatcgaagtctccgaagtcgtttttgtctttacccaacgacgttgttcttaactgtctgtctcgtgtctcgagaa

SEQ ID NO: 32291 - DNA, 521 bp, Arabidopsis thaliana columbia
cacagtgatgggactttttgtctttgggaaacaaacacatggacatctgaaccctggtctttgtctagtggatctggatctgtcacggtaagatcgtgagcctataatagtgagatatgcaatagagtattgttaaaagcgttttgttggagaggttaacgtcactagtgtggtatgcatagcttatgtacatgactccattgtactaaagcattcatttccttcttttatgtatgaaattgcaactgtgttccatcttcgtaaatggaccaagcaataatactatactcccttctatgatagggagcgatatgggatcccgaaggacggtttatcttgatttcgttttcgaaatcttcaacactgggctctgttcatttctcatccaagccaccatccttgggtatgcagaaactttgaagtcgttttgcctatactactagaaatacttaccagttagcacactaaatctctgttttggttactttcagatgccatctataccagttgaattgcagaga

SEQ ID NO: 32292 - DNA, 412 bp, Arabidopsis thaliana columbia
ccacgacttttgaattaaaagattgtttcatgtggtacaacgattccaaatattgagttttttttgtttcttttcatttatggattttttttattaataaacacctttactatttgctctggtatggtagaaaaaaaatatgtatcagttataatgaaattttgtggaacacgaataagcaaaattcgtttctgttagtttttcgtaagaaaaggtagatgatttttttagtaacacttacgacgatcacattcacattttttttttataacacagtgcattgactagttaataattggattaagaaaggtttaagagaacgggataacgggaagggacccacgtgaccaaccggcctgcaacaggaaatgatcgatggctcgctcacgccggtcttcgccccttgacccgt

SEQ ID NO: 32293 - DNA, 509 bp, Arabidopsis thaliana columbia
tccattgtgatctgtcactggtgatttaccaaaatcacaatactttttaaataatatcatcaataattagactgagtagttcagctgtatatcatctaatacaaacgatgttaatgctggatctcatcatcattttgatgtatcacaggtgattaccaaaatcttaacgtacatatcatgccatcatacgtaagcatgttcgaaattggccattaataaattctttataattcattagggattcatgatgtcttggtggtcgaccatatgtttacttttcaagaaatcaataaacgaatatagctagtggatatctaacacttgcgcataaacatgaaatgttttacagacaaatacgttatacatatttaagattgtatcacctatataatacatgtacgtgtatatatatgtaatgattgtatatacatgttcgtatatatgtatatcattacaaatcaggccggttggagattctgagacgaccgattcatccccccatagagaca

SEQ ID NO: 32294 - DNA, 431 bp, Arabidopsis thaliana columbia
tcgactctacatctaaaatctttccaaattttgatttagaatatgaaaatattaagaaaattatgtgactgtaatgtattttaatttattgttaaaacataaaattttgaaaaaatatcttaattcactatgacttttgtttgatattttccattttatagattttttgaaatattttcctatgtgacttcgtgggggttttgagtcctagttaagaaaatattttatcgaccacacattaattaaaagatgacttcatcattggttacccaatctggaggagaagagtttacatatataggagacttaaaaaaataataatgtagaaaaacgagctaaacgatccgtcctagtattactcaagtgagaaatagaagagatcgaaaaagaggaaaaagatcacggagctgtcggaaccacattactacaag

SEQ ID NO: 32295 - DNA, 599 bp, Arabidopsis thaliana columbia
tgtaacaaaatatcaagtttgaaagtaataaactgcttgaataagcttcaagttcactacatggtttagaaaggtttaaaatctattactttcaaacgcttttattgtgtaccaatcaatccaacaaagtatgcaatcgtactaatcaatccaacaaagtatacactcacaccggtaacatcaaaaattcacaaattcaaaatttcatgttaccaatcaatccaacaaaatatacaatccctgagaccgagttataatttgttggaatgattggtaccagtgaaattgtgttgtcgtgtgaacatcaacacataggaggtaatatacgtaaatatgctagcaatcaagctaagtatacaaaacacttcatgttgcagtgttctattgaaattttatatatcgaactagaatactatcatggagaatgatcaaatgttgcatatcttcatatccacgaaaaatgagtacacaaacattcgatcatccccatgacagttttctagtttatacttgatagtcccacgatttcatggtggtgcactacacaaaccctagattcccctaaagtttttgtgaaaacgcatatgttcgattttagg

SEQ ID NO: 32296 - DNA, 471 bp, Arabidopsis thaliana columbia
ggtcttacgattggtagacgagttatatttaatacgctttacatcaacactcaaatctactttgaatgaaaggttctaatgctgctacacagctaacctactttgacgtagtcaaaaacacgtcacgtctaattttcaaagaacagaaaatttcaaagtgacgaagacttattaaatttggtttcgttgataaaatacatataaattatgtaaaagtttaaaaccatgaacaaactacaacattcataatcataatcagcaagtccactttagagtcatgactagttcttgttctttgtctcgaccacaacacttgttctttttcttcttcttgttcgtcccatttcttagcttaggacaacaaatctccgtcgacataaacagtgctatatgggaattccctcgaatccattatgtttacccaacaaagcaactttgccaaatcatcccaattctccaaaaacctagaca

SEQ ID NO: 32297 - DNA, 538 bp, Arabidopsis thaliana columbia
agacccaaaatcgtaatactttatgaagaaaaataagaattaaccattctaccactagagtttttagtaaattgatgctcctagtttttaatactaatttgatgcctaaagcccttacttcacggactttaactcctggtcgggccagactgagatcaaatgaagaggactaaaggaagaagaacataaatgaatagagaaaaaatgagaagaaagctgaaatctcatgaacttgtggaaagattctttttagaccactttaattcaatttatttacctattaagaatatcattttttcatatcacctactttactttggctccgactagagaaagtggatttagcagtctaagcggatcaagtagataaagtgaggatcaagcggttttggtggaaagagtgcggatcaagcggttatggcaggtctaaaatgtgtgtgaatggtgaaagaggataaaaaaaacgcatatcaatatgaggtgaatgcatttcacgaaataccattgtccttctagcaaaactctatggatgttaata

SEQ ID NO: 32298 - DNA, 472 bp, Arabidopsis thaliana columbia
ctcctctcttgtctttccgtaacatttgtgatttcaatttcaattgctttacgtagtgtttgctaattttagctcctacagtcttaaccctttgaatccgttttgttctataaacattaacagattggaattggaattttataaacgtgggaagcttgtgagtgtgtacattgagtttattggttgcgattggtaaacgtcaaactcattgtgacgagtggcgaggctcgacttggttgttctttcggaaacagagaaacatcaatcgaattcaccttgtataagagtattaagtaaatacttagttagggatatcaatgtaaattatgaaagttaactctaccctaattctctcatatgttctgtataaatagatgtaaacgatattctttgattaataagattatttcaatccttgtatggtatcagagctatcggtcctaaaaacctaaaaattctccattttttttac

SEQ ID NO: 32299 - DNA, 421 bp, Arabidopsis thaliana columbia
ataagaaagttccaatttttatcatggaaatcaaattaagtttgcgatcaaaacgtgaccattgttgtgactttcaaaacaaaataaaaggggcaatcacgagaagaatctctgaaaactgaactgaaacccatgaatgaaacaaaaaaaaaatcatcctagaaaagaaaaacaacaatggaaaagaataagaacaacaacaaaaattgaattgatttctgttgggaaaaataaaaaaggcgagagagatagagacagaggccgagtgaaaatctataaatattagggtaaaagaaagggatccgcgtgtgtttaaacggtcagtttgttaggcggcccggatcgactgcgtaaagcgcatataacgacgtttttatcctgaaatttttttgttataaactaggagaggagatagaagaaa

SEQ ID NO: 32300 - DNA, 816 bp, Arabidopsis thaliana columbia
caaaatagatgcaactatgcattaaaagaaaaccttgctagtgagttgtgtgtccctctattttataacttataggtctctacattgtatccaagtagcttttaagtcatccacataacaaaacaagtttttaaagttcatactggagcaactaaaataataattattatgaatactgaagttagttaaaaaaattagaaaaagtagttaaactgtatgtaagcatgcttgaacttggatttgaataccaagaaaaaaaaatctataaggggattttttttgttgtcaagggtttttgtttttctttctgttttttttttgttgttaagttttagttgtggaatttcaaagggtttaaccaactagtcttaatgaatttcctatagatggggcatctaaaatctattttaataaggtcgtagactaaagtcagagaaaacacggctagttagttctaggtgtatatatatagcctccttaatacctcaaaacttaatacttgtgagcatttgctttctttcaccattctctcttagtcttcctctctcagttctgatttttttacgaagaagttttgagtttctttttgacaactcacgactcgttgaggtgatctaccgcaaggactaaacaacaaaacatatatttttttgtcccaacaaaaaaagtcaatcatcatgaagttctcaatctcatcactgaagcaggtacaaccaatcttgtgcttcaagaacaagctatctaaggtcaacgtcaactcttttctccatcccaaagaaaaagtcatctttgtgatgggagctacggatcgggtaa

SEQ ID NO: 32301 - DNA, 508 bp, Arabidopsis thaliana columbia
ggaatgggtttagggttctgggaggagagaaataaaaattcgctgctgctttttttttgttttttttttgcgtgggcaggaggtcggtttgaagagaacttccttcttcttttctatttaatactgtcggttcaacaaatttgtcggttcaacaaatttgtcggttaagtaagtcaaaaccgaccatttttgtaagaaaaggtcaaaacccctcttcctctaccggagggtttggtatacagttttgttcctttcatatcgccgccaagcataagtactatacctaatcttccagagaatgtttgatttctcgccaagtaaataaaaaaagggaatcttcaaagattctttgacaggattatgtttgcgattacaagtaaaaaagatatgaatattttttgaaggaaaaacatacaagcacagatattcatagttcatagtacatacaagcacaacctaacgtagaataagatatttacgactacaaataaaaggtattcaaattaat

SEQ ID NO: 32302 - DNA, 473 bp, Arabidopsis thaliana columbia
aaatgccgggatttgctaatctctcgttattgcgagaaaggtgatgaaatgaagatgagggaagtgatgaattcaagtagggagaagctcaagcagatggagaccaccaagattcagcgttggcgccttggctcgtgctctgtatgagtgtatggcttaattcttgttactgcttcaatcacttaataatttatttattttggtttattggggttggaattttttttagggggtatttttgttttaattcttacagtagttcttagttttaaaagcttacttaggagaagacactcatgcagagccagtttatctccgatcaaaccagggttggacttgcataaatgttttcatatataacacaccaaaattttatgatatatcattgcatattatatttatgataaaaatcgacattatattatactactggtatgtaccactctcatataatagtataaagatatatgata

SEQ ID NO: 32303 - DNA, 585 bp, Arabidopsis thaliana columbia
tgttgatcttggattacacgttgccaacttaaaacaatctgcaaaatattcatcagagaaaagacaccgtaagttctttgcttctccttctttatctctgatataacaagtagtgttgtttggacaaaatacatcacttactcagttctgcagtagaacctgtcctgcagtaatgtctggagaaaacaaaagattagtctacctgattagagaaagatgaatcttcaaagaaagtaatgaaaatcattcttagttagttaccctttagtacaaggaagcttgtcgatagtggaaggacaaaaggatccagctgaacagaaaacttcactactactaccaatatcagcccaaatatcagctccaccacaagtatgatttggctgaccagaaggaagctggtaatgatatctgcaaaaacaataatcctgcagcaatcttaccatatgttcaagacaaacttagaaaaatgagcaaaaacaagacttacgggtcgcataatcctgttgttctgttcagattagcttctggacaataagctcccaaaggacaagcttcacatcatagtgaggaacaacattagaaatg

SEQ ID NO: 32304 - DNA, 1121 bp, Arabidopsis thaliana columbia
ctttaaaacaaatcaacacaaccatgggagttatcacaaaaggttagaactcactacgtacaaaatataagtgacctggaatgttccacatgattttctactttaattttttcgtttgatcttcctttgttataaaggtttttctttttctttatcaggtgtaaatcacctcaaagtttaactttccttagaactttctatttttagtaactcttcatgtgtctctcttcccaagtaaatagactatgcgtcctgttacaaacgacacacaatgaggagcctattcttagtctcttctcatagaattatcgatctcgaaaacttcgcagaagaaagagcaagaaagagcaagaaagagcaagaagtcacaagaactaaaagagaacgagagaaaatcaggatctctcatgattctttttcaaccaaaaacaaagatttctgactatcaattgtttgataaatggcagaacaacgacacgaagacaaagcaaaagtgaattatatcctcatgcgcatcgaaaactaaatcatcgacgaagaggaaaagatacaaagttaaaagccataatgaaaaacaacaaaaaggttgggaccgaagattcaacgaaatggatgctagagagcgtcgagatagatccaaaaggcgatagttctgtgaaacaacccgaaagcacaatcaatagcaataatcctgagagtagtggtgctggtggtgggatcttgaagaatgtgtctaagaatctcgccgtgggatcaataatcaggtccatgagcgtaaacaaatggagaaagagcggtaatctcgggtccccgagcacgaggaagagtggaaacctggggcctccactccctgtgtcccaagtaaaaagaccggggccacaaagagtcgagaggactacatctagcgcggctagaggactacaaagtctccggttccttgatcggaccgtcacgggaagagaacgagattcgtggagatcaatcgaaaaccggttcaatcaatttgctgttgacgggaggcttcccaaggataaattcggcgtttgcattggtaaaactataattcatccatttttttacgtaaacctaatttaaaaaactacggttatacgatcctctag

SEQ ID NO: 32305 - DNA, 630 bp, Arabidopsis thaliana columbia
taaatattataactagaaaacaacacaaaagggtaaaagcccaaatgttacatcgatcctcgtgcttctttctttgttgaaggcgattcttagatctactatttccgcctctatttgagctttgtcaaaggtttgtatcttcttgtttgtgatctaggagggaggatttctcaatcaatgtcgtcgaagttttggtttgacggaagaggagaattgaagttgtggttcactgtcaaggatgtcatggaatgcttcaaagatcctcaaggctcatcagttcttcttgtttgcactaactatggcagaagtctgtggaaataaggtgggttttcacttgtttgatgtggtggttaacgacaattctttgagatctgcttggctgacacgaagctcgtcttcaaagctgattagtgagccaccaccctctggatccttcgcgtttggtatccacgatccggttgaagtgtccatgcttggtcaaatcaaagatatctggaaaggtgaagaaagggatatacatgagtgtgtcgggttgctaggtcgggccgtcccagtagatcgactatcgaggtgattaactttgcagaagataaccggtggatcaagtacgtcagaggaaagcgatcagtg

SEQ ID NO: 32306 - DNA, 477 bp, Arabidopsis thaliana columbia
ttaccacagctatattttgttgagtcaacaagccggttattgcagacacctatagacacaaagactgctaggatctgttctgtactgctcacaacttaccattacaaatgagttatctaagtttaagcttaatgttgaaattgggcattaatcctcctaaatgtgccgagtgaacttacacttagcacatttaggaggattgatggacaacttaacatcaagcttagactgagatttgataaatttgctataatggataagccgcttgtattggtatcatcactcatcagtgcctgaaatgaaagaaaatgtcagaagagtgatctctatcattaaatatgcagagaagtatcaaaacaactatcaactgacctcagcaaaatgagttaccagcacaggtcctagcagtctcttggctaaaggataaacaaaaacttgaaagaagaatatgccgagacctaaaaaagaagtgttaca

SEQ ID NO: 32307 - DNA, 514 bp, Arabidopsis thaliana columbia
tcagactctcagttcatacaaggctttcagcctatttttaacttgttaaaattttgactcaaagatacaaaaatatacactcagacgtggggagatgtaatgccataacagcttaaattaataaatttcgttgaagcaactacagaatcttgtaatgaatgctacaaagaagatttaaagttaaacaaatttaaatcatgaaatcgaataattaaataaaatacaaagaaaaaggaaaaaaaaataaaaaaaaaagggagggagacaagatgctgcgatggttcacgtgccaatgtgcctttaacttttcatcaactagttttctttttaattattaataaatcaactcaatttcgcaattttatagttagtgacgtcacttctctctcctcacagagtcgagtatctctcctacgctcttcatttcatttcatttgatagagagagagagagagagagagagagagaaagagcttcgtcttcttcatctccatcattatctccattgacattg

SEQ ID NO: 32308 - DNA, 611 bp, Arabidopsis thaliana columbia
ttaaagctttgtcgagttttatctcttcttttgctatgatattttaagctcaatcttactatttatgccgaattataggatcatggagacagcaccaacgcttcctgattttgccttggcattgaaacccgatgagtaccaacttccttctgttgatgcgtcatggtctgaagccagtctacggactaaaaacacatcatatcacatatagggcaaccaaagatagagcagtgaatagaatgcatatcgacaccttatagagttacaatgccaatggcagccatagaaacacaaatggtatagctctataactaccctagtgattctccaaatgtcagataatatatgggtgtgaccaaagtaccgaattggattagttttcaggtaaaaatatgggaagatgtcgtctgttttctctgtatgttgttgtaattctgtatgtgtagtgcaataaaattcgattctatctgttccacattcattactattacttagacaacaacatctacaccaaacaatagctgactggtaagtgtctgctatgtgctttgtttgcctactaatactacaaggtttggtctacagaagtacatcattacagaataggtaga

SEQ ID NO: 32309 - DNA, 477 bp, Arabidopsis thaliana columbia
  unsure (1)..(477): unsure at all n locations
ggtgtttggccggaagttaaaaagagagaccgttgtgattttgtcatgtaaattagaagaggagatagaagaatcatacaatttagaagcaaaagcaagtttaagctttacaataagagtgatcagccgatcacctatagctataatagtcactctcttttcataatgatcaataaataaagctatctatcttcttctgttttggcaatttctcaattaggggtttaatttaacattttctaaataattggggttaaactgaatttattactcctctcagtggttttgcgtaaatattaaggggttaaattgataatggaaaaaggttggggtcagataaaagatcgaatagcttttataagtgacgtaaatatataaaaacaaaacgcggaaacaattaataatanaatcaaaaataaatcgccgatcaatccatcttcttcttcatttggtattgctgcttacgtcgtcagatct

SEQ ID NO: 32310 - DNA, 601 bp, Arabidopsis thaliana columbia
  unsure (1)..(601): unsure at all n locations
ccaaacgttcatgaaaagtgcagattatatatattatacctttttgcaaacatttataaattttaacatacgttatgaacaaaatatacgccaaggaactaaataaacatatacaaaaacatttccatcgtttttacgtaatttctattaaaaaaatcatatttcagaatactgtatatatataaataatcttataaaagagtttaaataattttatacataagtataagatgtgtataggtacatgtaaatgttaaatataaatactatagtatagtccactactgttaaagcttcaatgggtgtgtaataagtagccttgttatttgtcaacgtggaagaatttgtgtagtaaagtaaaaaactgtgtgtaaaaattttgttgtcgttggggaagattagaaatatgtggttttagtcaaagtcattcttaacaactaaatgtccttttttgtctctctctttttttcttttcttttttcaaaaccttattttgtcaccaactaaatatcctttatagcatttattatcggaaaatattcatgtacttattaactanaaatttaataaatttatttctcaaaaaatataatctaataaa

SEQ ID NO: 32311 - DNA, 474 bp, Arabidopsis thaliana columbia
catcttctctcgtttctcctccagcgaaagtccccgtttcttagactgaatatcatcaacaatagaaagcagcgattcagttgatacgagaatgacgaaaaaaaacttcagagcttcaatgacgaaatccaacaaatgatctgtcaacaaatagtttccagatcgaaaatgtcaaaaatatatacagtcaactcagcgactacactgattgcgagaattggctgctagataaatgctaattcgagaacctatcgattcgcgtcatgcagtccaagtgtttgcggaaattcctcacacaaatttgtaatgaactacggaagatagaaacattactacggatgaacgataagtttaaacaaatttcttcgaagagtaagagaaacacataacgatgactactaaacattcaaacaaatacggcgaatcaatacatccaaaattctcttgtaagtcgaagaatcacaagctaagatc

SEQ ID NO: 32312 - DNA, 625 bp, Arabidopsis thaliana columbia
ccacagcctgaaagaaaattttcaaagattttcccaaccccaataggagagcttgcagtgggattgaatttaccacgattattatattttctgaaaaaaaccttttattcccaacatttgaaatgtttcatatgtggagcaagaattacgatatgaagaatggagaatgagaaaccatataatttaataaatattaacatgaatatcatccacttttattaacacaggatcaaatgactgtttttttgggaagacgatcgacctccatgaaccatgaacattaaatcttgtccacgtggtgtccgtggtagacccatctaatttacgtagctaggcccgtccatggcagagtaggattggacaccaagataaatacaagaatatatttgaagcgaacgatttggcggattatagagttctacaagactacaacagatgatgcatcacttaataataccaaaaaaaaaaacaaatgtcccacttaataatcgagcgacgaccattatttttttctgtaaataaaatgaaaatgaattgcttcatgaattatattactcatttttcctagagatgggaccgtcataaaaagtattacggatatactgatagcaaaacattttttttt

SEQ ID NO: 32313 - DNA, 561 bp, Arabidopsis thaliana columbia
tgacattggactccaagaggcatcatattaagataaaatggcttcaaaaaggtttggtcaatagaaggttctggaaagaaggagagattgtatgtaatgtataacctgtaggagcagcaacggacggaagttttgtcatcgtcgttgacattggaatagcctctgctctgtaggataagcctatctctcatgctttgtcgaaacgaaccatcgaacatactacctcgcctgaaagatccgtcgaacatgctaccccgcctgaaagattccagctttggtgccgccatttctggttcttgattccgatgattgcagaagattgatagaggtgtaaacagagacggaaagactcgggagagattctattatttattgtgcatttgtggtttatgatttctatcaaagacacgatggtgtcatgactgatgaatcatgaactgaaaaaacccagattcccaaatttggaactgttttcgaattttgcaaagaaatggtatgcaaatctggtatgattgctatgcacgtcttagagcacgttttcgtgtctaattacagattgtt

SEQ ID NO: 32314 - DNA, 520 bp, Arabidopsis thaliana columbia
tgacacataatatgtttttgggtggaactttttaactctattatgcaaaaacataactttttgggaataagaaaagttgtaaagcaaccaaaaagctaaatgacatatattttttctttctcttactgcatattctagaatcctactactagatcttatccttccactttttttttttgttacatattaatttgtcttaaccaaaatatacataggaaaacctcatagggacattatatctatttatgtaacattgatggacgacacacacaatggaccatgtgatattttagttcatatatcaataataaagttttgatcattattattataattatatttgctcgaccatgatagtgtatttaacgtcaagtgtgggtccaatttcggtccaaggatgctgactagaaattagcatttttatagttttctcctaataatttactatttaatgcaaacggcctgtgacgactgaattgtctctgtctggcccgtgagcttcacgcagcttttagatatt

SEQ ID NO: 32315 - DNA, 391 bp, Arabidopsis thaliana columbia
catcttaatctgtttaaattatgtcatttgtcagcaaactagaatgtaacttcaagaaaagatcattttgattcgattcgattatttggcttcgttcggttaaaatgtggtacgcgtaactaaaatgtagggtgagggaaagtgtggtggtggagagatatgagctaaggttcttatccagaggaagacctctccttgtgccttttgttgacaagccatctttgtccccaaaagactacatattttcaactgacaagagacccatcatttatttcttataggtcataaccaaaactgaaataatgcagaggatggtgacaaaaacatatgatggtggtggattagagataatttggaaaaagggggcttagatattaggattgatgtgatc

SEQ ID NO: 32316 - DNA, 411 bp, Arabidopsis thaliana columbia
taagtgtgatacaaggatatttcaactgtggcttaccagtaaaacaaattttgcagttgaaggattttaactctatgtgggatttatttacatgtataacttattgttttctttaactctatggtggtttattggttttctcattgttttcatcgtgttagctagtgacggatggatgctttcgatttcatcatcttgttgttacttttttacaaagtcatgcttctcataagtttgtctacacataaatctagagtttgctggaacgttcttacatgaaacttcaatttgttttgcagaggatgcaagaccttcccttcttactccgaaggttgttgcgagaaatgatggatccacaaagaacgcttccactcgtcatcagagctcgtgtttatattgcggttagtttaa

SEQ ID NO: 32317 - DNA, 392 bp, Arabidopsis thaliana columbia
tccagcttttcttccattgtcagttttgaacaaccagcaacgaattttataataaattatgccatttatttctcatttcgttctttaatttttagtcatcaaatttaatcgcaacgaccaatacaagaagaacatggtataatcataccaaatcattgattcaatattaccttattagattttataaaattcattatccattcaacaattgtacctcaacattttcaaatgtacctcaacaagcaattttttctttatttagtttaacctaaacaaggaatttatttttatttttaccataaccatcatgaactttgttgacttgttaaatgtctctatctccttctaacgaaattatcaaaatcaatttctgttccttatactccaaccaa

SEQ ID NO: 32318 - DNA, 583 bp, Arabidopsis thaliana columbia
tattatttgtcaaaatttataattcatttacatgttaatgacatacacgaaaactacatatacaaaatatacaattacgtacccaaacgtacataccaactatagacatatatttttcatgctacaaaccgaggaaactacatatagtaaacaaaatatagtttgaccagactaaatatatttagttggtactaataatacatgataaacaaatacatgtttaaagataataaaaataaaatagagtttttgtggaacacacagaactgagatttgattattgattaaaccaaaaataccgtgcgtaacatggatagtgatctagttgaaaactataatcaaaaacaaaaaaaaaaaacatgaaagggaatttgttcttctttattcaacaatgatcatagttatatcactaaaatatatatacacattacaactttaattcaacaaaaatagtctttaaaccaaaaaggttcaatgaataatcatatgcttaaattagaaaattatacttgtccccaacatgtctcaaccataacactccttacgttgcacactaacccaaccaccgttacgtacacggtta

SEQ ID NO: 32319 - DNA, 469 bp, Arabidopsis thaliana columbia
ctgcgtcgctccaggataaggagtcgccattatttaacaaaacccaagatctggatttaaacaaaaccctaagatccgatgaagatcgagtaaaagcttccaagaaactcaaattaatcagaagaacttcgcacagaaggaactggatagagaaaaagaagaagaagagagtatctctcaattgaatttgaataagaagagatctgaggaaggattgatgaagaagaaggaagtgagatttataaagggtttacagagaagaagggaaatggagagtgatagatctacacgagagagagattaaaagggtttttgtgaacactatagatagggtatggcaattaagaggaggcgctctttattccctttttatctacaaatgtatcttttctttccttttcgctttgatttgccccataagttttgaatgcgtagaaaataaccctgaattcttataataacaatatgg

SEQ ID NO: 32320 - DNA, 617 bp, Arabidopsis thaliana columbia
tcgcctataaaaaatgtaggattttcggttttgaacttttagatattacaaaaaactacattattattcagtaacttactcctgaaatttctataatctctttaaaaattcatagtctgctttaacaatattttaaaaaccgcttcgagtaatattattttcatagaaatatacggtaccctagttaactttttttttctctatatcatttcttaaatggaccactgcattaaattacttgatgcctaccaactagtttaggggatgaaccagcttgttaaaattggtagtccacgtggtattctattgggaagaaatgcagccatgagtttccaatccgtgtgctagttcgatccaagtgaaagttgaacgttgttaatgcaagtggggaaatatcagtggaaacagcgatggccccaaacagatgcatttttttatctgaattgaaagatattacccgacctaattaaagatagagaacatttgcatcataatttcttatattattttcatttttactacttttccatcatttcacttctaccgtattaagtatgtgttaagatgaaattgctctttcttttgtatgtttaaaatttggggattgtaaggttttg

SEQ ID NO: 32321 - DNA, 412 bp, Arabidopsis thaliana columbia
tgttccaatataaacgctagtttattaggtttgaatcaatagtattagtattacacaaattcagtacataattttgatgataaactagtatgatttctgtatcaaacacaatttagtcacttgaatgtgtgagtggtagttttttgagatagtagaattgctaacctcatagagtttgcatggtattaattatacggtcatcacttggtattaattctaattttcacatgattactgtaaacggcacaatggacaaacatgattgttggcataccactcaaggggtacatagtcggattcttaaggacggtatcataactcacgtgcggaagaatactagctcttattggaaacacttgaaggtatgtctatctacttttgattgtcaaggtcgaggattcaaagccgggta

SEQ ID NO: 32322 - DNA, 516 bp, Arabidopsis thaliana columbia
cggtaactggtaaacttccacaagcatagttttttttttttttgttggatactaataaagtagcatcaaactgatcaaagttataggtttcttttcctatgttcctcgtcaagtttgaggtttgtggattcgttaaggacaaaatatagcctttctataaacgaatatattggtcctacccttattacagctaaacacaataaatattttgctaacttaattacattaatacgttgaaaactagtaatacgtacatcgaatgtgaagttgtgaaccaataaaaagaaaaaacatgagagaagaagttgtgaaccatatacagattgaatcatataagatgatatatcactcccaaattgaagttttgagacaacttttatcgtatattatggagaatgcataaatccattgaatttttttaatcaagattttgattttcagtaatgtgtttgtagggtataagaaattaattatgacaataattgacgttctattggtggattgggcttcacgaga

SEQ ID NO: 32323 - DNA, 548 bp, Arabidopsis thaliana columbia
catacctgctgcataattcgtttcttaagatactatatacataagatcacaaaaatgagaaaccaagtttgttggatagaataggcaccgaccttggtcacctgcagatcggtttagggctgcagagacctcttgtctaaccgaacgctgcagctctaactgcatatccatgcaggcttcaagcatcctctgcatctggctcattccttgctgcagtcttgccacgtctcctcttaggtcgttcattacctcccattcctaatgcaaccaagaagagcaatatctacattacaccttttaaccaagcttatgatatgtcattgagcataattaattagctaaggactcgaggctaaaaccctcaatggaaggattacaatttcagaccgatgcatagagtgacgagaccagctagtgtggtgcaaatcttgatgccatattggctggggtggaggcgcgggtggagtgggaagcagttgtgacccattgatgccattaagttggttatcgttcgcacaaatacttggtggtctgtgtcacgtctggag

SEQ ID NO: 32324 - DNA, 568 bp, Arabidopsis thaliana columbia
tatttctcaagttatgaattttctaagtcctctgctgaataataaaagattaattagaaatggtttaaagaaaggagttttgcgttggggtccctggcgaaagatctctagggaattatagacaggtccccggggcactactcatttgagtctacgactctgcagaaaaccccctagggtttctggaaatcgaacccgcggtccctccctaatggaacagtggccgcggagaaataaagaggcggaggggcttaccggcggcgaggcggctccggtgaggtggtcgaggacataggggaggtctcgaggatcacgatgatgtgcgggtcaccgtcggggatggtcggagtcggctggtccacgtgcgcaggcggcgatgctcgtcggcggcgaggaatcctgcctactcacggcgcgatagttcaatcaaacgggtaagagagcttcactgggtgctagggaagacgtgggtgcaagtaatttgaaaatggctttctggattgctcggtccacgcgcggcggcgagcggccgaagtccggcgaggatgatctcgggcctccggtgaag

SEQ ID NO: 32325 - DNA, 410 bp, Arabidopsis thaliana columbia
caagagtctttacaatcgtgtatgaaaggggaaatgattggtgaaagtgtattcaggtttaggcttggggttggatggaatggaaagaaggaaacacaacaacagctagagaactttaccaaagagctctctccattgatgcaaataccgaaagtgcttctcgctgtctacaggtataactaataaattcttctcgctgtcctctcagcgaatgaacataaacattgtaaaaacgagggaataagacttgctagccaaaaacatttgaatcataaattagctggcaagtttgctaaatcattagcatattattggaggatgctgaaacaaattctttgtctctacaggcgtggggagttctcgagcagagagcaggaaacttatctatcatagaagtctagtttagggtg

SEQ ID NO: 32326 - DNA, 485 bp, Arabidopsis thaliana columbia
ttcaataccaagagtttaaattttaaaatcttgaaagtttaaaagagaagtggttggtaccttgtctatttaataggattttccattaagcttcgaccaaagcggcaaactgcacatcaacggccgggacaaaaacatgaaataactttatagcacttaggtttattatactccagtgcaatgttaaagtttccagtgcaatatgttttagtatcattggtactcgagtttcgcgtatcgtattagtctgttgaattaggcttatcatcagtacaatgtctacgaaagtttatactaagttgtaatataagatacgtatatagaaactcgttataatttcttccataaactttcccaagtaccagaaacctttgagatctatgtattgataaaccgcaccaaaaagaaaacagagtcgtgcacaaaatcaaaaaccagaagaacaagaattcaagaatgattaagctctataaagcgacgaattt

SEQ ID NO: 32327 - DNA, 588 bp, Arabidopsis thaliana columbia
actcaatgaacaacataccgagcgattgctccgagataatgacagttttgtttcacctataagattttatggaacagttttggtcacttaactagtcttatggaaccagcttactgaatcgtaagatcaataagagttttgagagatagagggaagaactcacagagaaatgtaagtcttggagagagaggagttgatagaatcgtcaccattgcttctccctccggcgattcctgcaaaaatccaatgtttatcctaaagtttaattttgtagataaattacattttacaccatccattttcagtttattataatttggacccacaattccttttgttaccaatttatccgtgtggtcattggtcaaacaaagttgacgaaaactttacttgtggtcttgtggactcttaaccaacttggtatttttggacaatgactccgagcaaaatttaataaggttaaaagttgatttttattcaacaatataaacttcaaacaaagagagtgcaaccagattctcatcaacaatgctgatgaattaaaattacaatattaatacaagtaatgaggcagaaatggtggtgagt

SEQ ID NO: 32328 - DNA, 569 bp, Arabidopsis thaliana columbia
cataagaattgaatacccccacccaaaccactttaacataaccgaaattaaacacccttattcttaagtataaaaatacataataaatgtcaaacaaccattataaacaaatacagaaaattgaagcaatttccataaaagagtagaatataacctctctatcatttcagaagttttttccatttaatatcaaaatttggtttgtaacaaaatgatgtttacttttcagaaaaaaagaagataataaaccataaacatacacacatttatatataaattacaatatggagttctacaagaagcattacaaacacaactattactgcttcttttactataatacgctgaaaccagaagtactcttcacatctgcttcacagctccttctactttaaacaaacttctaatttcacccctaaagattacacatttaacattgaagaactaaaaaaagacaccactgtcccacgtttcacactctccaacgaacacatcagtaaaaaaacacaaacccatgagaggtaagaaaatttggaattttagtggtctcttaaaaacataaatatata

SEQ ID NO: 32329 - DNA, 508 bp, Arabidopsis thaliana columbia
tggtgagtaaactggttgacattgatggaagagttattgggatcaacttgtaagtctcagtcaattctgcatggttttgtaaacgagatcttgggttcaccatacattcctcagtcagttctgcgaggtttgcctttcagcgagagaaactatgcaaataaacgtgaggagattaaatgttgtgtgggaatccaaagagtcaatattctatagtttgttgaaaaagattataggttcaccaaaggtaatcacaaccgatcttttgaaaacatttcctcgttagtatcaagtcttaagaattgatggataaactttattgataaaagtagattagaaatcaaataatacaattagaaacaatcacatgtgccaagacgatcattgcagaatcctcccttgggacattcaaagctacaatcaacatccctcttgcaaggtggggcttgctgcaaggccctagcggtgccggcattgtttgaacttcgcgcacgaatttcgaatatctcgt

SEQ ID NO: 32330 - DNA, 610 bp, Arabidopsis thaliana columbia
aggagcagctgccacaggaggataagggaccctgcataaggaaggtcgagatctacgcatagatttcctcaggatatgcatgaatatcatggtagtcctggggaaatgggtacttcattccgtgataatcctcacagattccagacaaggagttcagagtatgaagagccatgggatctacccgaagatgactactactaccaggaaatcaagagattgaagacaagatcctcgcagcctgagaggcagctcccagggcatcagctttctggtatagagcaagaaagacgccccttttcaagggcatctgctgattttccccaaaagatgcatttgagcggaactatgaggctggacagctaagatacaagcgattactaagatagcaaatcgagacatgattttgttttcttgtgtgagtaaaggagtgagatgattatgtagaagatgtatcttgtgttgtggtatatataagttgtttagctttgtaatattggccgtattcgtttgaaaagtcaaagttgctaattgcgacttgactaattaaagaagaagagatcaagcaaattggtgctgtacaatggagctgatgcggacttatgatttggat

SEQ ID NO: 32331 - DNA, 619 bp, Arabidopsis thaliana columbia
gtaaatttggacaaaattgtcatttacatattaaattttttaatctttattaaaagtagagaaatgtatatttttcaaataaaaacttaaaaataaggtaattttcaaaatctaaaaaaaaaacacaataactcttctttcataccatgcacatgcaccgcactgaatcattactcttacgtaaccatcaacgacgccgtgaagttatatgtttacttcccgtctgggaattgtcaaaactcagttgtatactaaacgggttattgtttcagtcatgacaattagattgtggacttgtgtttgtatcagttaaatcaatttatctccgtgttttatatgctgatttttgactttttggttcagtagaatggctgattaagaacaagaacagttcttgattgtcttgtgccgcctatcagcatctagatggaaccatctgattagtttagcaaatgcttggtcagtgaacacgggacatcataacaaaggagcagttgtgcaagatgttcgcatgtggttgcctggttatgtatgtttttttatatggatggcaacatcaatggaggtggtgggggacggaggtggtgggaacataatttattgaggtgcagaccaggat

SEQ ID NO: 32332 - DNA, 581 bp, Arabidopsis thaliana columbia
tggtagagaccagagagtgagttctatattttaactatagagtaagatataattttttcttcatcttaagagggaaattaaatggggcattaaaagaagacttattatgacatcttacaaaaaaagtaagcttggtcatatgttattaaggtaatttcttagaatttgtttttttttttttttgtgttgaattacattacaagttatatccaactctctttatccaagtggctgccagctggaatccacttgacacatcggtattctcgtccacgtcaggtcagtctaacgtcttattaaccgccacgtgtctccctgcggccactcacatgtctcacgtcgaattatgggaaaaattaaagtacgacttttcactgtccaatattcttattaaccaaacatagagattgatgcgagttattttttattcgtgactataatattcgattttgtttttgttaaatgatttcatgttctattgttctacctcaattacattatggtacaatggacaaatttctacactactaaacttttgaaagcgaaataaaacatagataattgaatctaatgactaaatg

SEQ ID NO: 32333 - DNA, 536 bp, Arabidopsis thaliana columbia
ctatccagaggagtatttaatattcgctcttcgggattacatttaaataagccaaatcttgtgtatattattatgataggtcaatgactggtgtctttttctttcgtgttaaaactggttcaaaaaaaaaacagaagagaactattttaactacttttcaattattttatctactgtgttatgtgtgtttcgcactcacaatctgtcggtagctactagctattttacgattagaaagtcttttttatttttggcgcttaacctctttccatgttgttatgttaagaaaaaagaaaaacctatgtttatcactgatagtctgatacagtaatcacatgtaacgactaatataggtacgcagttatttaattaaaattccaatgataaaagtgcctttaccgattaattataattagatcatccaatcataggagttaactaattaaggttaggcataaatcctaatgattgagccatcaaaagtcaaagttccaactagcgagacccaaacgaggttatagagttgtagtatgggt

SEQ ID NO: 32334 - DNA, 333 bp, Arabidopsis thaliana columbia
tctaatatttatttaatattaatttactccattatctgaataatctagaatatgtcaaatatccttttattattttgtagctgtcgaaactatggtgaataaaatctcgaggaatatattagaaaacaaaaaagatctagaggaataataatattttaaatatttggggcacagttgtattgtggagcagagaatcggtgctcagtatattatccgaaaatgtcttggttataaatggtgtttcttgtatgattctgcgatattggaatcacacacactgccaatctgacctgtctctctcgcttctcgttcactgtccaattggaaagagat

SEQ ID NO: 32335 - DNA, 550 bp, Arabidopsis thaliana columbia
gaaaagcttcaggaccaacattacttcttatattcctctctatgcagctcctttaaaagcaccaaaatggtataagcgcccggttggcgcatcttttggatttgggggaaagcttgtatcgtgtcacgcaagggcccctgcaaagggtacttcgagcattctatccgaggtaggtatctatgtacatatatttatttatccggttataccgcttttgtcgtcaattctaatttgacttagtgtcatgtttaggtttttttgcacagcctggtaacagaacagagtttggtgagtcgaacttctgaatttgaagctgcaatagaaaatggagatatgacttctctaaggggtttgtgcgagaagaaatctgaagagactgagtatgccatccttgtgattgaaaatgttgatattcgcccttataaaaactcatgagataactcagtttggaccattttatccaccgatttcgcagatccgaagaggagaaagagacatggggcttgctgaaaatcatgttcgaagaggaaggacttcaaggacaaagttg

SEQ ID NO: 32336 - DNA, 408 bp, Arabidopsis thaliana columbia
agccctttcatatattgttgcctagatatcacatactgagccgcagagtaaacaatgcctaaaactcccagaaccctaacttgaaacacgtctgttattattacggctgcaaagctcaagtggcacggtcagcatcggcgacgcgtctgtgtgtttggtggtgtaactccaaacgtacctgttgaatatgatgtgacctggtgctgtgagtataaggagagccaggttcttcaccgcaaaaaaccattcacggcctccaatttcgactccccaacctgtgtttccaccaaaccaaacttcttcccatacagtgtagaccgaggataatgccaaatatgttgaaatggctactggtaccgggaagaatctcggttaatcaccaaacccggaacgagagtgaaacgagag

SEQ ID NO: 32337 - DNA, 568 bp, Arabidopsis thaliana columbia
ctgctctgtttccactgaggctgcgattaacggcgccctttacattatatatcaaaagaaaaactaaaaccctagtgttgttctcgcataaatttattgggcttatttagataggcccatttttacagcatgaaatatttaggcccaactaaagcattctttttcggccttatattttgttgtagctaaaatcagtttttagatgaaacagtgattttaaaaactccactaaggaatattggcgtggggtctttagaaggaatattgttgctgacgtggcgttacattattggtttgtaaaatattactttccaaatgtgaaaaacttaaacaaacagcaaacaaaagctttaaatatacaatcgcatgaggtccttttcatattttaaagaaacactgtgaattacattcacctgcttattaatttcatgtatttaggggatttatgtgttccttgaagttgaccattacagatttgggcagcgtgactagcactctaacaccaccttgcttcctcggcaagaaaatacaaatatccggcagatacttgggcaccaatggtataata

SEQ ID NO: 32338 - DNA, 440 bp, Arabidopsis thaliana columbia
ccttagctttttgtgttgctttgaaagaggaagcaaagaaagttggatgctttggtggtgaatgagcaaagggatttgggattgggttttataaggtctttagggttctggtggaagcaatggagcagaagaagtgttgaattgaagagtagttagttgcttgcctttttactctctccatattaattaattaaagagagatatggagttggcaacataatcatacaagtcaaaagtctttcattgggtctcacctatgggattaagcttaagcaggagttttagataattatattatgaaataggtaaaggcaccgaaaagctttctataactatatttactatcatatgagtcaaaatccaacacatgaaaacatcctaaaaagccttaaaaccctaatcgatacacaacaacttgatctctcaaatgagaagaaaaa

SEQ ID NO: 32339 - DNA, 605 bp, Arabidopsis thaliana columbia
tgtttgtattgcagatttttaaattatacgttcactgaaaacaaaattcagagaaaacaaaagtaagaataaaatgaaacaggacaacaaaactcaaaacataaagaggaagaacaaattgaaaaacacaagacaaccaaaaactcgtacagtgtaccattaccatatgtaaggttttgataataaattaataattagaaaccttagccgaaaaaatacaattaagaaataatgggcattggtgctattttcgagacagcaaactcgtttttttttttgacgcaaatgtgtatttaaaatggcaacagaaaactcgaaatcaattaagcgaccgactaataaatgttatcatctcgaaaaaaagacatgtcatccaagatcacgtatggcatatacagcctaaaacatatgatccgccgcatggtattcgacataattattcattataaccatcatgtgttagttatatcatattcaccggaaactatatgcaatcggttgctctatgctttgccactaactagacccaactcaaaacataatttaccatatctatataaacctggataatgtactcccataatagacaaattcttacaatattt

SEQ ID NO: 32340 - DNA, 405 bp, Arabidopsis thaliana columbia
ggtgtattaatctaagttcatgacttactctttgaataatatggtcactgattcagctgggcgactaattggctactactaagggctagtgtgtttgcgttgagtatcgagttgaacctagcatatacttatataagtcatgatgatggttgtagacttgcctagcatagacatgtgttctaatcaacatcttagcatatgctaagtctcgatcgttctggtgacgaaatgtggtgtgccttcttaaagtatatagaattttgtttcactaattaattgatggcaaagctagtcggaaggagtgtgcatcctacatggctaatcttcctgttagagttaggtacgagtatcgttatggcagagacagtaggtgcgcaggtaacttctgttggataaagcttggga

SEQ ID NO: 32341 - DNA, 253 bp, Arabidopsis thaliana columbia
tcgagctttatttagctgcacgagttatatgagcgagctttaatgaacatgagcttggtttttttgaagtaatatatacaaaaagctaacaatcaaagtatatatatatttttctataaataatagaaatatatattaaaaaatatagaagttacataacaatttctgaaaaaaaatattagtaatatacacaaaaagtcaataatcaaaacataaatatttatataatctataaaaatagaaatatattttt

SEQ ID NO: 32342 - DNA, 370 bp, Arabidopsis thaliana columbia
aaagaaaataatacaaagaataaagaatttgcatgaaatgggagatattctagtggttggggtaaaatggtacagcgtggaatcaaatgtcttcaacaaaatcaaattattttatctcaaaaagatttaaatcccaatttaaataatattacaacttgtcttctcctcttatttcttctctctctctttctgttgaagaagctgaatcagaagagtttttttttgcttcaaaaggagctccggcgaaacttccggagatattaacacttactctgacgagtttttgtctcgtcttacgtctttgctgctgctgttgatggaacttgacgacttggatctcagcggttcttggccgttagatcagatcact

SEQ ID NO: 32343 - DNA, 543 bp, Arabidopsis thaliana columbia
cgttttcagttcaaaattttcagtttttatgaacttctaagtggataaactatagaaacagaataaaaaaccaagtaccgtttgattcctattcgaatttgtgtttttgtgaatcttgcattcttgttattgaatatgttaaatcagaatgggtatttaatcacgtaccctaagttcgacccgtatatgcattatgtggcccaagaagaacccaattagacctgtaaatagcctctttttgtcaaagagctaggatcaagagtctaaatataaaatagaaaagggtaaccatcatagtttgaagtcatcttaaacgtgtcgtacaatacaatatagcttacaagagaaactcattgaaacaatttgattaatccttttgaaacgcttaaatggcttcggctaaccatacgggcaacttaaaatcttcaacaaatattttaaaaacaaataaagatttgacaataacgtcggcgtcgccaactaattaagtatagtactaaaaataaacgtgggagttaaattaaattaattgggtgttatgtg

SEQ ID NO: 32344 - DNA, 281 bp, Arabidopsis thaliana columbia
cccacgaacaagatagagacagtgattgtacgacggtgacaattatacttgatttagtttggagttcgatgaataataacataatgttctcatgtcgtatttgtaactaaagttttgaattctcttaactaagtatgagtccttcaagtctacgaggtgcaagtttgccaacatatctgggacattcataatctacctaccaaattttggcattcagattgattatttccaataatttaatgttaaagtccccatgctttcatcggaatgctactatgtaa

SEQ ID NO: 32345 - DNA, 498 bp, Arabidopsis thaliana columbia
aatgtcccaataaactcgaattgataaaattcaccagaatgagccaggtgttgtgagatttggctacaatctatgagacaacatttgaccttaattaagtctaaaacatcgtttgcaagtagtaaaaaaaacaaggattatgtttgtgacaaacacgacaaaacatttaagaaactttaaacagacaaagatgaaacaggaatcatcaaccatgcgaggatctcttgccacttgatcggctatcatcataacgacttcgacccctgcttgagtattcacgctctctgcttactctatcatcatcatcatcttccttacccgttgctcgtcttccatcacctctgtacctgtctctcccatgcttatactcttcctcatcatccttcacactttctcgtctcggtctgtatctaccctatcatcatctccttcttcctcaatggctcgacctctatacctatcgtcgtcttccttaattgttccatatcttttaacagc

SEQ ID NO: 32346 - DNA, 557 bp, Arabidopsis thaliana columbia
aatttttacaataaatggttgactaactcaaaaatcgggatgaccgttgacctgaccagcttcccatggtcttcggagccaaccctaaccacacgttgacgaggcgctgactcggaatatttagaaacttatcttcttcattttttttccttctaaacatttatgctaattgcctaattggaaataagtttgtattttctatttggaacacaacaaagtaaataaattaaagtagaacaaaataaaacagatctttgtgcggctcacaaattctcaatgtggcgtggcgggtagttttgtttggtgctagtctagccttttaaaataatctttgaacttggtcaaactataaacaaatttgtgggcttcatgttgattttatagaagctgtgtgcagtttctaagtaagctcagaaacaattgggtctaaaacctttcaaaagggcccaaaaatagaagaaaagatttaagggcagtacgacctggaaacaacgattgtgtatgtacatggaggcactatatattgaggtgttttaatatataaatagttaagatgt

SEQ ID NO: 32347 - DNA, 425 bp, Arabidopsis thaliana columbia
  unsure (1)..(425): unsure at all n locations
agcgccacgagatgaacaaaccatacaggggcgcgggagagcgggagccaaagatcggatattgatgcggttagtggcgagacacgcatcaatcaccacatctgcaagggccagagctgcagagacaccgaagaggcagctcaaagccaaagcagcgggcaacttaccaagaacaacaatagcaatcgcagataccaaaccaagaacaccagaaactacaaaatacggcttacttttgtaacctttgatagggaacacatcggtgaagagaccccaaagggggctcatgacccatggaatgtaatataaccccaggtaaagctgcacaaccgatggctgcacttgctggacatctttccagtaatagtctgtgacgactttgaatatcgaaccagagaaccctcggtttacancgtacacaagga

SEQ ID NO: 32348 - DNA, 578 bp, Arabidopsis thaliana columbia
tgatgaatattttactcgcgtaaatgcattaaacaacgagattgtttataccatgggccagtgcgaggcagatcccgaatttaaattaaccttgtccaagtcaagaaatgtagtgaaaacaaattatttcatacttattattctcttccaatgtaatgtgtaaagtttatttatcgtaaacatgaaaatatagataccttgttgttgttttctttaataatggtggacaccaaaatgtactaaaaaacacattaacaaaaacattaaataactccggtctccggacataagaataatctaaaatctcagattcatcaaatactgcagccaaatttaaatgtgaaaggcaagaaaatgagtactattaagtagtactaacacaaagaataaagaaggggtctactacatgtggatgagtaacatgtttgtcaacactggtagttagggattgcattaaatttgccaacatgaattagatgggcagatgaattaatgataattactcactctaaaactttactctctccctctttttattcaattgtttgattcttcagctcatgccaaatggtctatat

SEQ ID NO: 32349 - DNA, 281 bp, Arabidopsis thaliana columbia
cttcctcattctgtcgtttttacagtttctattttatagtctcagatcccaaattaaaaagaaaactaaaattaaaagccattaccatattggaagggcgactgtttggtgcagtcatatttccaccagaagaactcgaaacaggaccctcaaagttagaaaatcttcctcttctttccctatttagaacgagggaatgcagtcttcctagtatgtcaaggcacacaattagaatcttttcttacgcacattaaaaagggaaaacaaaagaaaaaacgaat

SEQ ID NO: 32350 - DNA, 523 bp, Arabidopsis thaliana columbia
ataacaccttatggaagggacgcatttattagataaaaggtcgacgcgggctctggcttgctcttaattagtgcttttgaaagttgagaaacagatatattatgaaaaatatcagtagtagtagtcatcataggctaagagctggcaaagcattagagacacaagtgagttttctctttgcaattattctatgtctgtaatgaattttggttttgacttatcttatgaaatttaatcatagttttagctttttctaatctcattagcactacttagtgcttatggataaatcatttcaagtcatcttcgtacaattaataaaatcaatagcccattcacttgtactgtactagagaccaaaacttaatacatacaaccaaaaatcaatttccttttttattttattttccaacacgctttgaattctgttctaccacatttgtatagtcaattctttatttcaacaaaaaagctgtcattaactatttgctaaaataggtttcaaaattttggaaggtgtaga

SEQ ID NO: 32351 - DNA, 552 bp, Arabidopsis thaliana columbia
tgttgatctttgacttggacaacacgttagccacaaatatactgcatatttcttctccggtgaggaaaacaggtgggatctcggatgcgattcttactgttgcattcttctttcctagcgatttttgttgagccaaagtttcacgaccgctaggactccggataagaatccgctcaattccttggatacttattgagaaggatcctgaatttttgtgatcgacgatgtgagtcttagattcatagtttagaatccatgttgatgtgccctccataattaaaagccttgttgattaaattatgtctgttttggctctaaaacaatcgatctcttctttatttatagaggttcattggagtctccaaattcacttaggtttcaaatttacatttatttagaaaaatagaaaaaatgatgccctaaataaatggaacatgtttaatcaatgattatctaaacacaaaattaaaaaattcgggccaaactgattttttttgttttgcaaatgttttagttgactaagtattatcactaaaacaattgacagatata

SEQ ID NO: 32352 - DNA, 603 bp, Arabidopsis thaliana columbia
cccaaataataaaattaaaaaagcaaaaaaaatatcactgttcttgagggtttgaatcattaattaagcagccattgattagtggaagaaatctattttggaaaaagctaaatctctctattttgacgagaagaaaagccaatgattagataaatccagttaagacgatgatatgattatgattttaatataaagaaaattcgttcttcgaatctattaatggaaacaaaatcaatgaaattaacgctaagaattcaggatattatcttactacaaagtacaaagagctcaattatgatattttcacaccatcaaagaaaacaaaaatattctttataatcagattaccataaaaggaaattgaaaacaacaaaacaaaagattatgaaacaagtaccaaagcttctcttagaagaagaaaacgaccaccgagatttcacttgagcacttaaaccattatccaccgtcttcggagtagccacggagctaaattctcctttaccggcgattctgaaggtacagtatgaatgactcatatatatacgtacgtttttatatacacataatttccagagattttcatcagagagattgatcgagata

SEQ ID NO: 32353 - DNA, 289 bp, Arabidopsis thaliana columbia
tagcggacaaggttgatcgactctaaacattatgggtacgtaattccgcagtggttacagtctactgtcgaggccaaactgctaattaaacgtttgaagtttagagaaatattttgatgatgagtaccacaatcaaagatgataggtgttaatcactgtaaaaatgttgattgaatactacgaatgcagaacatatacatatttttaatctctttggaatttttgtctgtgtttttatcatttttgaatacacgaagagctcagttatatttcatattgtatatgaatt

SEQ ID NO: 32354 - DNA, 463 bp, Arabidopsis thaliana columbia
cagtgatctgaaaaatgctgagacacgagaggctgaatgtcttcaccatctgccattttctatatcctgtcaaaattgatataaaaaatattagcataattgaaccctttattttgcaagaaacagaggaatcttaagatctaccaaagagaattaaattgaaaaagcttcataaacgcatactaatgaagaatcaatgacgatggaacgttatggaaatgtgattaccttagaagttagagaggggatctctgaggaaacgaggagggtggtggtgtggtacgggtgtgtagtttttgagagagaaacggagcgaatgaagaagagaatgtgagccggagaattgaagtttaaaaaaggaaggaataggcccgtaataaatattgatggcgaagatctcagccgttgatttctgaatatcactttgaacgaaggaggacccacgaccagtcacgttgttggt

SEQ ID NO: 32355 - DNA, 526 bp, Arabidopsis thaliana columbia
  unsure (1)..(526): unsure at all n locations
aattaaaattttatttattatttttaagtccaactaaaatctaaaaccataacagaaatactagagatcattgatgacgaaaataaactaagaaaacatcacgaatttaaaataatgaattttgttttttctctctcacaattctattcattctttaaaagcgggattgtgaagtcttcaccaaatctaaaacattaaatgatgaaaaagttctaaaaataagtgaatatagtttgaaaccctagattctattccaaaatcaaatgaaaattttaaaacccatagccggcctgttttaatcgcttcaccagatcgcaagttaatgaagggtttttttgtggatttttctggttttagattgtcgagtattagttctaaacccaaataggaaaaatgtccgggtagcggattaccatgtcggaccggacggtccggatcaggcgtgaaaacaatgcatgtaatcgtattgtgtctaatatagtatttttgatttgtaataatttgaaganaaaagagagtgttgtta

SEQ ID NO: 32356 - DNA, 567 bp, Arabidopsis thaliana columbia
taacattgtattactttgcaggaacacatgccatacttccgactcagaacagctaaagagattctgaggctacgagctgattgaagttgcttgtgctaatgttttttcggctattaggaatactatttttggttgccattgttgatttgttcaaactttaaatcccactccttttaggcagtgaagcactcggctttaaaagcagaggtaaaaactgagtcaagcccagagctcttagctcgttccgttattgtatttttttccttcttcttgttttaaaatgtagatgaagcgttttggatctctatgttggttagtctagctgaagatatatgagatgttgaaaaccttatttatttctctccggtcttgaccagtgcgaacgcaatttaaagtttccatctagtatcggttcgatatattttcctctgttcaatagccaaaattccatgaataatctcttgaaagcaaatgttttcgatatacaaatgtgctgcacaatttcccaatacatacacgaatatgttcaaatatcaacaactgctgtttgtgagtcaaatgttgcaa

SEQ ID NO: 32357 - DNA, 591 bp, Arabidopsis thaliana columbia
tgtttgtgctgtttgcatttatagaggaagaccacatattagaagcttcgtcatcagtaaggcttattactttcagagccatggctttcagacttaacaccagcagagggataaatctggtggtacttatctttctcttgttcattttctacccaagaccatacagaatgagtaggccttactcttgaaccttcttgctcattccctttccatggacgtgacaaacctttctttaccatccattcttcagcttttgaggtgggaacttatggattgcaggctttctatcactggaatctttggagggttttgaaggaaacttgtcatcgtaacatgtgaaaacaccaaaaggagattggataaaatcccctcttggtgtgctagcaccacttgacgctgcgtcgtccctgtggtcagagagagtatcaccgaatacatcatgatctgaatgatgactaccccacaggcactgttatcactgctcgcatttttgacctgactttgttgccaacttggatgctgcaaatttgcactagtcaaatatcaaacagtaagataaaaaggcagaatatgcacatcaattgactacca

SEQ ID NO: 32358 - DNA, 441 bp, Arabidopsis thaliana columbia
actaatctcacggcaacaatgatcaaattcccacctggcgcattttcattggatttaactttcttttacacagacaaaacatttctgcttgtcatttcttctacgtcacaggctgtcgtttttaatgagagcgaaccgactcgcggcaaaggagcgcgtgggtgtcgctcgatggccttttagtgaatacaaagggcaagtaagggtattaatggaatttagttcataacgtatgaagaattatattatttttctgctgctttaattttttttttctttttttttttctcctctctcttctctcttctttcgcgtttcgaaggttggggaaagctttcgcagaagaaaataaaagctagagagagaatgtcaatgtttttttgatgctccgtctggcaattagggtttcttttttctttgatttcgccccttcgagaactg

SEQ ID NO: 32359 - DNA, 567 bp, Arabidopsis thaliana columbia
atctccgtacaacagcggcggcacccaagaccttcgtttaccaagcaatggtgaatctaggtttacaactggtggaccttttaaagtctggcccattaaaatgtcgaaagcccaagtttattaaaggtgatccaaaccttcatacacaaaagcccaggtctgacctaaattattctttgttttttcttagtaaaatactgaatcacttatcggcaccacttgataatggacgtcaaatggaccgttatgtaccagtttttatatgggtgcttaagaattctttgcgaactctgcctttagtttcacctaaggtcttcgatcatgaaatcaattgtttgagtgtgataggtatcttgttctcaattctaataattcgaggttgtgactgttgtcccaaagcgtcacaaattacttatctctgacacattttgctaccaactttaagcaatctctcatcaatagcaacattaagactcatagctatcggtactacacagaagcttccattctttatgaggaaaatcgtgaatattcatcgcttgctcttgaaaataaaagattgatgag

SEQ ID NO: 32360 - DNA, 562 bp, Arabidopsis thaliana columbia
tacaagtaatgattttaacctttttttttttacaattgacaatcttttcacaacaaaaatccacaagaaacgttagacaatggcataaatttatttaaattaatccgtatatattcgccttctatgagaattgaattctataccactgtaaaattcttaaacgagataagattattttcagcatgtaaaaaatggtttgtggtttcaactcatttgggctattagttttacatttaggcttgcaaccttgtcggtttattttgtgtaggcttttggtagatttgggcttgcaaacccaaattaacttgttggccgacatacatttgtttctattacaaatttaacaacaaacgtcaataaatacacgtgaaggaaatgagaacgaccctcttaagtagtactggaaattgaaaaaaagaaatctagaaatgctaacatgtaagtttttgttccaaaaatgcaatttgtatgtagcccaatttcatggccgacctgctttttttttcttcatctttctgaaaaccacaaatatgattacacgtggcctgaaaaagaacgacag

SEQ ID NO: 32361 - DNA, 566 bp, Arabidopsis thaliana columbia
tttctcgacgatttccttaaattaaacaaaatcataattaaataatttatataaaactgggaagaaaacaatggatgtcttgttgaaagatatggatgatcttatataatgaagagaggatgtcgatttagggttaaaattttgaatcttctagtgaaatcttcttttaagctttgagagcaatgctaaaaaaataaatgaaaattttcattttcatatttgaatactcaatcaatgatcattcatattaaatatacataattataaatttgtggaatatgcttgttttaaacgattataatatcagatttagggagtataatcataatttttatatcatattcgaatactcaatcaatcatattaaatacacgtaaatagatcaaattaaataagattcgaaaataattttgtatatttaagttatgaattattttcaaagcggaaattaataaatgttatgaaaattaatatttaaatatcaaaccaaaaatgtattattttttaatgtttaaaaatatttttatattttaattatgagacataaaagatggtttaattaaatg

SEQ ID NO: 32362 - DNA, 579 bp, Arabidopsis thaliana columbia
cattatcgaatagtaacctgaaacggatatagaaaacataagtaaattcaagtccagcacattaccatctgccatctctcttcttcgattccttgatttgggtctccatctccaaatacaaacgagaaaacctagagatgaaccctcacttatttcaagccattatcactcataagcagcaaaagaagaaacatttagcaaagcatgaaaactctcttaagttcaaactctacttacagattcaatgaaattcattccctttccttcatcttctcgagctcgtcgcctgttgtaataattgggatcccagtaccttacataaaaacactagaatatgactacgaggttctgttaaatcaattactgatcctctctattggttgagagtaggagccttttacatcatgaaattaaaattaccaaagcagatcgacagggttgatatagaaattgaatcctgaatcataactgcgcccgcgtcttctttgacgattatcatcctcgcttttaacaaaatccacaaaaggttagtgcaaaatccaaatcaagtccattgatcagaatgatcatatatcttga

SEQ ID NO: 32363 - DNA, 486 bp, Arabidopsis thaliana columbia
catgtctccggtgattagtgaaatccttagatctggtttaactatagactcgtctcttagacgcaggacccatcttgttcaatctttctccgtcgtctttctctactggttctatgttttctcataaatcagctctcctttagccctttattattatatattctataaccataataatatattataactatatactataaacctcccccatgatagactttgggtcctgcgtcttaatcatagtacttaattttctctgtgtgttttaatatgaataataaaactgaaatgggatcttccacaagtggaaattgctcgtcggtttcaaccactggtttagctaactccggttcagaatctgatctccggcaacgtgatctaatcgacgagcggaagagaaagaggaaacagtcgaacagagaatctgcgaggaggtcgaggatgaggaagcagaagcatttggatgatctcactgctcaggtgact

SEQ ID NO: 32364 - DNA, 556 bp, Arabidopsis thaliana columbia
attagttttgaaatttagcatagttaattacaataatttagtcaaaatattagacaagaaacgtataattttcgattggaccgtcacgtggttttggcggttagcaatttggaccgccggtttgtttcgtttacagactacacagtgacccattatggtttgttccggttcaccaaaccccacatgtggctagacttgagttaaaaattggtattggtcaaaatatggcttcttgtccaggagtcttgtatttttctgcctcaatatatacaagaaacactcgattttgtaaagaatactaattactaacaattgatcattcacatgtctcatgtgttatctgttgaagccctaatctttttatatggtaaatgttatgctaaagactaaagttgtatcactgattatgtgtgcatgtctacttgtctagtcgttggtcgaatattcgaaatatatacaatcatgcttacactattcttcactttatgcaaaacattgattagatatataaaaaagccataataatattggtaaacttttattaaatttttatatg

SEQ ID NO: 32365 - DNA, 298 bp, Arabidopsis thaliana columbia
tatcattcgactatttctaagttgtaaactccgacgaaagaagcaagacaatggaacttttccattgactttttctcgactccaaattttgacctttaagtactttttcgggcattttcgtgatttgtgctatattacggacccaaaattactttttcaagcattgttttcgaatatttttcatgcatcatagctcgttaagactatatggggtatccctctatgccgccatacaaaaacgaagcttttgcataaccgagctggtcaagacgcctatacagaccgatatcatcttcag

SEQ ID NO: 32366 - DNA, 534 bp, Arabidopsis thaliana columbia
  unsure (1)..(534): unsure at all n locations
nnnnnnnnnnnctaaagccgatacgaacgccagcacgagatgcgttccagtggaagatccagcctgagatcatggcgtcgaggggcttaccgctcttgcgagcaggcttcactgaagcaaatatttcgtcaagagaaggcatattcagaatcttggttaagcgatccagctctgacgcgcccacgtcgccgaagcctgtgctggggaactcgacgccatgttgcacatgaagtaaaatgaccgcttttcgcaggaaggttagggcgtacgttgatatgaggcggtgtagagcaatgatcacgccgggggttgctgaatccatcgccctctttgacatagcctagttcagttggatgcgaagaccctattcctctgcctacggagtttgccttgagctccgagaccacagtgttgaagaactgccgagtgacctcaaaccgttcgtcagaaagttccatatctaacaagtaatgcgcatcaccattctgggccagctcttcctttagtcctatgggccagacaatgtacgtggtg

SEQ ID NO: 32367 - DNA, 486 bp, Arabidopsis thaliana columbia
taattattgctattttctatagttatgttataagattatattgttatttcctttgttcgtttaggagatgtctttaaatatgtactctttagcaaaaagtcgatcatcaaggaattaggttttacaattttctattggacggctacgccattggacaagattcgtcttgttggagagaagtacattctctaggagagctattgctctattctatatttcagatttgttattcacttaaataaagtttattccaaattcatttttttcttctattcgtaattctctctgatcttaactccatcaattggtccgacctgccaaccaaatgccgtaattagataggatacaaatcatcgttaggagaatagatttgttcgagggaaattgataatatataatatagaggtaaacagttagaaaagggcaaaataaccggaaccaaaatcgaaccgaaccggaccaaatgtgaatatagtttatagaata

SEQ ID NO: 32368 - DNA, 566 bp, Arabidopsis thaliana columbia
tataaataaaatgatgagatcccagtagtactctatcccaaatttgatcgaggaagacaaaacctgttgctcctttttgcttaaggtttgcctcaattcttccagcgcctggactagcatagattcccgctctccagcctcctttagacgattctctaactctgacctcgcttcattgttggtacgctcctcagctaacgcttgagcttcctttgctgcagctaatgcgtttgagtaatagtctttctgagaagtaagttcagcttgatgtttttctatggtctcttgcagcagcttttctgtagctgtcttgtcccttttaatgctttcgaccttattttcttccgactggcaattgaaaggaaaaattaatgaagctaagaagcttaacaaactttgcaaatgctttagttatttagatattaatcctgcctacaagaagactgattttcaaaccagcctttcacaaaagcttctgggaaatcaagaaaacccttcaggcagtttcaccttaatgacgtggttaatgaacaaaaaaaaaaaaatcaattacatgaagctttgtg

SEQ ID NO: 32369 - DNA, 656 bp, Arabidopsis thaliana columbia
gttgtttccgtcgccgtcaatggcggatgagtactggaaccagcagagacagtatcagcttccaatttcgtcgaaccctcacgttcttcctcccaaacgtccccgttccgacttccgtaagctaaaagtttcttctttttttccgctctgtgtgtaattttcattattagacctgaaaggagctgtctttacacttggaatcaactctcaatgtagctcttatgttagtgggcattgttgtgatgatagttatatagaataatgaacagatttttcatctgttataggtctaaattttgcctctttgccatgaaaacaaaaccttttcttattttacttaaaaagatgagctatatgggagctaccattaacatatgattctcttcttaggtttcattttgtatggctcttattcagaacttcttttagtatatatgtatgtcttgaaaattgctctgtactattgtttataggagtcttgatccactttgttcaaattatgtttgcggttgaacggttctgtaaagataagtgtatgtacccaccacattgatgtattagagtagtatagagagcttgttacttgtgtagggtagttttttacatctacttgtatatgacatgtcatgtacatcatatctaagttatgagaaata

SEQ ID NO: 32370 - DNA, 568 bp, Arabidopsis thaliana columbia
ccaagtcagaaagttttcatgcaaagctcaatttacaaaccacagtttaatccatatttgttgcatttcttttctttcttttttgaaaatataacagccttagatctttttgtacaccaatgatttggaattttgtggataattattgaatttccatctctttctaattggctaaaagtcaataacaacaataaggctcaaagacaaattaatggtgggtctctcacgtatgtccacttgcaaaagggacctccttcacggaagcatagtttagtcaatagtcactcaaactctctaaaaattagtttactatatatttttaatctatattcgattccaagagtagttttggttcaaacacatcattctggtcagatggttatttcaattttgctgtttttgagtgtatatatgatgttatgtttgtaaacaaatgaaacttttaattgattacaagaacatgaatagctctaaatatgattaaaaacgaatttatttatttctttggtaaaagaataatgataatatacttatggatccaatcaggttaagttccgttttgcaatta

SEQ ID NO: 32371 - DNA, 525 bp, Arabidopsis thaliana columbia
ccaaagtaacgccccatgcactaggtccttctaatagggtcacatatttatcggtctattcatttacccaaggaaagataaattgctttattatgtttaaccaaaattcagcatctaatatagcttcgaagtcatgaatttgaaaccctttttttgtcaacaatattatattaatcttcgaatgcgattacaaccgaaagaaaccgggtactcgatgccgaaaagtcccggaatgatacataaatgagatagattaaataaacggttacaaccgtagataagattaaatacaaaacatgaatttgaacttaacataggaaacgaactattttaacttgttgtagttgttaaccgaaaagagtttggatattcttacatttaaaactttttggttaccaaaaaagtatttaatacaaagtaatttttatgttgaatgatgtgcaaatgaatatatcctcaaggttatcaatttggaccatacggattcctgtcaagaccaaacatgtgtaggggtgaataaattag

SEQ ID NO: 32372 - DNA, 360 bp, Arabidopsis thaliana columbia
caaaacagttggtcatcaaagacgaggaagtggtagaaatggcggcgcgcggcggagtaggaaaacgatgtccggagagctgtcctgatcgcggaaacgagactcgtcagcacgaatataagttcttcaagtatgcatagtgtctatcgtaccatcggatcttcttgtgttctcgatgcgagattcccaagtgagagagagggagttgtgatatttttctgctgacattttagatatatatggcctatgataatgttattcagacaaacaaagtgtcagactgatgttggcgtccatcattggtaatatcatggaatagttgcagaacggaacctgcagttttgattgacatggaagttg

SEQ ID NO: 32373 - DNA, 1231 bp, Arabidopsis thaliana columbia
caaaccgttatctgtatcacatagagacaaagtagacaacggacttttgcttcttcttcgttattctgtaaaacaaagacaagagatcaaatcaggcaaaacgaatattcaaattagagaatttacactttgggtagtgatttagggatcctaattgccaatttatcaaacttacagaccagttttgaagaaacgtctcgaattgaagaggcaatgcctagagccttatcgaataaatcttcgacttgcacgtctgtttccaatgaaatgtccttcaaaacgttcaggacaattggaactgcaacctttaattgctcgtagtgacgcctctggatcaaaataaatactgaaaccaggaaatttgaataactttttactgcttcagttcacgaagactaaattaatatcttcagtaacaaaactagttagggattcaaacacaaactttaagatattcatacttaagtacaatcaaagcaagagtattactaaaattgcaggtgccaagctaaaattcactttcatgagagaagtctataaattttaggatattcatacttgtgtacaatcatagcaagagtattactaaaactgcaggtgccaggctaaaattcactttcatgataggagtctataaatatcttgacaacgagatatcttcaactggtatcattagagagtccaagcaataaaggagtagaacaagtggagagctgaatgatagcaccgtgcagcatcgagtgcctggttcagagtcagcaggtgatcaaaaagaacttgtaatcttcttatgccaaataccaagaaggaaaaagaaattccagatcaattacctcacaaagaattgaaagcatatcccgtggattgcatgcttccacaaaccgatcaacgatttcctcaactaactgtaaacatctgcttgatatgtctgcaaacttggaagttacttttggcaagtgaaatgacagtgcatctataacatcctgtaataaaatgaatcggggaacaaaatcataagcttggttctctaaacaaaatccttccgtttggctttgaaagcgattcgaaaactgaaaagtacctgatccatttgaggagatgataaaactttcaaaatttcatctaatacttcttcaataacatcgttctccagttcattgttagcatccaaagctacgttctcatacaaagaatccaaacagctgacaagttctgtcacaaaactctcaaa

SEQ ID NO: 32374 - DNA, 487 bp, Arabidopsis thaliana columbia
tagtcatttctaatagcaatctgagcagaaacatcccagacaatagcaatattaccttcctgagcctctcttccactctttctttctttatctggtcgagttccgccataagagcttcagtgtcgtcctcatcatcatcgtcactttcgtcatcactaacaaagataaatagattgtaagatacctttgaaggaactagagtattgaagtcaacaaaaactcgacaagagaatggaacgccagtagttaaacattttccccaatatcaattgtatttttcccaaactatggtctagatgaaaagcaatgaggtacagttaggcttatgtatcagcccccaaccttgacagtcttagccaaatttaaagcacaacatataaaaaactgcaaagaagaagaaaagaatggaagagatgaagaaaaggtacctatcatcgtcacttttgatatcaacatcagaatcatcagcatctacactgcgaggaat

SEQ ID NO: 32375 - DNA, 556 bp, Arabidopsis thaliana columbia
ccatccaaacggtcactaatctcactaagaaacaactgtacacagacttaagataatgtaaaaaatccgaccgttgtgaccccaatttccactaacggtaatgttcttagccaatcacatacatataaatcaaacttacacccaaatccgtcacactcaatttcatctctttctctaatggagttgcaacaatcaaatctcgaaacacctctcaaaacccaacacgaccaccgaaaaatcaccacttcaaaccctgaatcatctccgcctcgacctttcccggaatccagccggaaacatgattctcctcctccccgagcctccaccaacgagccaatgaagaaaatcggaactccggagcgtttaagagtcccaatagctttcaagtacccagagaggtacaggagcccaactgatgcaatgatgtctccagttactaaaggtcttctcgcaaggaccagaaagtcttccggttctcttattcacccagctttaccaaaccaaggtcaatttcatttatataccaaaatcaaacccgggttttatatacatttta

SEQ ID NO: 32376 - DNA, 462 bp, Arabidopsis thaliana columbia
ctctagaggataaaaagatacaaataaaagaaaaagaaaaacaaaacaacagaccggtcaattttatagtgttaataacaaataaaccctaacagtaatcattaatcagcatacacaatctttagatgcataaaacatggaggacaaaaaggctgtgttcaaaattcaaaacctctagattttcagtatagattgtgcactataaatttgttttgattccaataaaaccaaattagtggtgctgtgcaacacattttcttaatcgtttaatactttaatttacaagattaaataactctaacaataatcaacacacacaatcgcaaggagagttagtcattgggaatattcttctttttattttattttattaaggaaacgtcttcttttattggcaagaaaaacaacaacaacgacaacaaacaaagaaatatgaaagaaagaaatcagatttatgaaatg

SEQ ID NO: 32377 - DNA, 502 bp, Arabidopsis thaliana columbia
  unsure (1)..(502): unsure at all n locations
tgaccatttggacttgacttcttggacactcgtcaatggacaactatgtctttgatttgctgcgagtgtgttttattgtttagtaaagttatcaccccttttttttatgattacgatatatttatatggtttcagggagagaatcgttgtatgtagagattatttggggtgaatgaagtagatggagcagatttatacaaaaatttggtgtagaatggatatgactcagtaaaaaaagtttctctatggacacatatgaatggacttgttattatgtacaccgaaaatttattttttgatttttgtttaaatttgcagagatctttacattcaagacaatagattgaggctacgagaatagatcatatgcatcagatctcgtcgtcttcacaacacacaatttcgctaatgtgaatcatattttcacaaaataaaaaaagataacaaaattgtgtttgttaaatanaagtaacaaacctacacaaaatcgaaatctagagag

SEQ ID NO: 32378 - DNA, 634 bp, Arabidopsis thaliana columbia
tccttcgaaatccgtcgattaggtcatttttagtttatcttctcctgttaatggtacttgttttgatcacttcttgttgaatcgaagcgatttcgtttgattttgctattttcttgttggtttcgtttcgttttgagcgccgagtacttggattggtcttcacagatgatcgattcgtcgattatctttcatttgtttggattagttctgtttttcgattctatttcagtttccaattgatgtagcttagactagttggtgatttgagtgttttgatgtgtatttacatgaaatcgatgatggatctatgttcttcgcatatctctgatactttagcctttcgcgttgttagatatttgcctaagatgatattgagttgcattagaacagtgaaccatcgtagaaatgtgtgcttcatttctctgctcggatttgaacagtcattttttatggtttataagattggattctgctggaatgttgaaggatttgtctggtggttattgtatgaaatggttaagtagtgagaataatttatatggcctgttttgagtttggtatatgattgaatgagactctccttttgtttgcatattatagtgacatccgatatggctgaaatcaaggatgaagg

SEQ ID NO: 32379 - DNA, 335 bp, Arabidopsis thaliana columbia
gagtctagaggattacgtgataggagattgtagaaaacttataaaaatctatgatacaaaaggctagattaggctaatatgggctaaatgtaatgtaatgtctatgtgggtgagatttattcgttggtttgacgtcaaaaggaatgtagtcactatacatttatgggacataaacaatactatagattatatagaaatgtataagcttagatagtttacactttgcattgagatggagagacacacgacaaatcggctcatgcactctagccagtaaattggggaccacgacattgcgaactatggcaccccaatacaaattctatatagtatga

SEQ ID NO: 32380 - DNA, 621 bp, Arabidopsis thaliana columbia
tctcaatctctctcctcaaattggatatgagtttttcggtgagcgatctctttcttcctcatggatctggttaactttccagaacagatggtgaatccgtcggaaaatcttgcacaaaactaactgtatatcaaaaatgaggagtggagcccatattttcaatgtcaggatagctactggcttctatgcttttgatgaaaactttaatatcatccatgatgcagatattcatgaaagatggatgttagtgagaatgactgtcagaacccctgctattccgggtgttgcttttgcccaatacgatccaactaggttttaggtcacaatacatttacagctcagttcacgagcattctctcttgcttctttacaaattaagtaatagtaatgtttcatgtggttcatacaaccacggcgaataagatttgcacaacctaataattattgtagctttgttttttatattttcagagttcaaaattgaaccataatttaactagctacataaaaaacaatttcattacaataaaatgagcatatgaagttgtggtacaattgtaattaatagaggtttttcatatgcatttgcatatatctaaaggtcgaatatgacgatgtgga

SEQ ID NO: 32381 - DNA, 524 bp, Arabidopsis thaliana columbia
aaatgtgaaattagccgtcttatgatttatacaaataagaattgaattaagggagagactgatatatacttgttcctaacaatagtttaatagatgtgttgagaaaacacacttgtccgtcggtatagacacttattcaccaatttagaacaatatgtagatgtagttagctagtttatgaactatagttttgctatttagctaattgattttatttagcatttaccactttttttggcattgttgagtactatctataagttgactatacataatacgtgtttaacgtttttttagctgtcataatatagtaatatacaattcgagttggtataataaatatctgatcgcatctaaaaggaaatagtgaatggaacgacttacatagaagtataataatccaactatttgtaacatatctcctccatgcatccagatctgagatttgaaaatcttctcgggaaccggatcggagtgagatcagttatacaatttacaactatatataaatttgaagaatttga

SEQ ID NO: 32382 - DNA, 487 bp, Arabidopsis thaliana columbia
tacaaattagatgtattcgtagcaactaagacagaggagactacgggagaactgacatggaccaagttccgtcgttttcactctaagatttgtataaatgtctcggccgaccatgagaagaaagttttagtgcctcaccatatactcctaccctactacaacatcttacacattgtgggagaggatatatacataagacaagtgaataaagatggagatatcggatgcccaattctccttacttatgttccaagtttggttcaaatccagcaaggtatctagtgctcttggaagaggctagctagtgactttatacttgtcacactaatttgtgcattctctatgcattgtcttgatatataacaggctatgctgttttattatatcgattccagtatcttttttcttcagcgactggattaatataatgttggttatctcttattaaaccagggcatatattgtcgtcagagtcaaattattgtgt

SEQ ID NO: 32383 - DNA, 425 bp, Arabidopsis thaliana columbia
gcgaagagcgatgaaagttttagaaaaaaggttgatgtggtagtttcttagggtggaataatatcttgggatctcataatcgggaaggaaggagcagcttcgattaaatccctgtgccggaaaaactctgagttaaagcctcaatctgcaagtttgttcctttgcctgcttattacgttcgttcataattgaatgtgctgtgacatgcgagtgtacgtacttacttgatgtaactgttgtctgatgttgtacaggctttttggtgactgggtatgaaactttgaataaggcgtctctatggaagagctccaaagagtctgcaatccaggtaatgctgattcgtagagttctagacatgattcgacaatgtgtacgttcactaactctgtacgactgtttcagatagatctgcagagtagtaagac

SEQ ID NO: 32384 - DNA, 659 bp, Arabidopsis thaliana columbia
tactgttaatttaggggtttccatgaaaaaaggaggaaactttccaaaattggttcgttatctcgttgatgtttttaaatttgaattgaagatttggttttggattggttattaatggcttatagtcctgaatatagtgacaaaatctatgtgaaagtcagagactttagccaaaattttctgggtcttgttgacccctcaagacatttattcatatagtttttgaaatttctatataaataatttgacttttgtgaaatgttgtgatgcaagcatttcattgcaactgttttcaatcatacttctcctctgtggtagaagaagaatttagattctgagaatgcgatttcgcatatcttcatgcgtacttgcttaggccttgtactcaattttaacgactgtgaagactgtaaattggtaattagtagcaaaagtttctccacttaagttgtgttattgcggtagttacggtctataatccaatgatgagtaggttataatagttctataatctcttctttggttttctttttccaggtatgattactctggttatggtcagtctactggaaaggttgtattctgagcatctaactttataaaagtgtatctgacagtcttgttatgtgttagagagtccagggattgtttttgatgga

SEQ ID NO: 32385 - DNA, 509 bp, Arabidopsis thaliana columbia
tttcgagctttctctctcttctctctctaaaaaatcttagagaaaagggaaagttttctcttttgtttcgctggcctgatggcattccgacgtttatgtgttttaatatagttgggttttatatctaacatctctgtcgtttttagcagtgatggctggctcttgcctgacagcgttcgaattccatgaccatcgttggccggatctacttttcttatcagtgtatctgatgtttttttttttttttttctttcaataatctcatagatcctctattggaaatttaggtgtttttttgcttaaaggtgtttattatccaatttgatcttttgagtttgcgatttgcaggaatcaatccaaagagttacatcttaagttgcagaaaagaaaacaatttcattgcacactaatattgcttttagctgtaaatctctattttgatgttcgattggtttatgaacaatgaaacctagaagaatcaagcttgcttttataatcaatgatgattt

SEQ ID NO: 32386 - DNA, 617 bp, Arabidopsis thaliana columbia
cttctttcatcgagtatgtggacgccaagttacatttttttcgtttggttttagcgtcggtttagggattgaagttcaaaaaagagatgcttctagtaaaatatcttgtagaattgtagtgccttttagaagaattaccctttggtctcaactcatcaccgaaagcaagaatatttttctctaaattctatacaccataacatcaccattcactataactaaaacaaatggaatgaaatagtagcaagaattaatgtttttcttttcatttaaatttattataattgcaaaaagaaaagttttaccaaaaaacagtcgagtccaataatcaatatgagtaaatggttcgcatttttattttaaaaattgaattttttaagagcttgaaaattgaatttaacaaaaaaaacaaaaaaaggatcggtcaaacaaaacaaaaagggttgaaaattgacttaccaaagtctttataaagttgataaacttttgccttgttataaaaaaaatctactataaacagattgcgcgtctggagataactgatttttttttttttgatatttgagatttattactcacattttctttaaaaaatcaaatcagaaaaaagaagaatg

SEQ ID NO: 32387 - DNA, 504 bp, Arabidopsis thaliana columbia
ggagaggaagtttaaagagaattctaaggcggacaacgagagctaaaagcttggagaagaatcgaagaagcttgagaaggacgagagagacaaagataagccatcgatgtcggaaactgtgttcttcggtttccgagctatccactgatctcggtttctctatatctccggagaataacaaacgaacaagttcccatggccggagctcttccggtcggagaatcagatatcctctcggttcatcgtcatcgtcgctgttcatcatgttgattcgattttgtgttagtatagtactagaatattgtacgaatgcaattatttatgtacgtataactctatttataatgttagaatggaccgtattgtagatttggaatatagttggagttgtggaaaacgagatttgtttttatgtttgcaacagtgatctacaaatttggtttcggaatatgaatttttcacgtgggtttaatgttttggaaaattttaaaatttctgagagtt

SEQ ID NO: 32388 - DNA, 455 bp, Arabidopsis thaliana columbia
  unsure (1)..(455): unsure at all n locations
ctgaacatttatctggttgtaatgaagcaggtgctgcagtagctaggcctggtaaagtagttggatcagtgttacgctataacaactgcggcgcagcacaggcgttgaagctcttgaacaacaacagagaaggatggtcagaaatccagctgctgcgtctcaatacccaaagaggactcaaccttgcaaaagcaacagaggagatgaagattgcgccaccgctgctgaaggtccaagtagattgaagccaaacactcagtatataccacaaaaagtgtctgcagcacaagatactgcaatgagtcgctggtattaaacatgatgttatggttctagttttagctttaccacctcacgtctcagggagagctaaaaagagtatccctttgagtcatccattgtgttatcaagagccgaaacgtgaagacatgcttaagagcganatgagagaagga

SEQ ID NO: 32389 - DNA, 495 bp, Arabidopsis thaliana columbia
caacatgatccaaacacccatagtgtcccattgtaaggactgatgtcaacctcaatcccattactaagccaattgccaaaagcctaccaacagagttacacaaaaatgtcccagttggatattttctacacctaccaagcgggtcatgtatgaagcaagttcaccctctttctgtcgaagtgtggcttcataagcactcggtgtgatgctcttcatgtagtacggactcatagttgcctcaggcatgcttcgcttctcagaaaatttatctgaagaatcaagagaagcttgcagaaaatagctctcctccatgcttccaaggctgcttgcgcttgatagctttctaggcaagcttcctgatgcaatagttaatgaattacagatgtgcaatgcctgacttattaagcagtagtatagatctagatgcatcaccattctcaaaggcagaattttgccttgctataggaagctgttcagagactgccgaggaattga

SEQ ID NO: 32390 - DNA, 534 bp, Arabidopsis thaliana columbia
tacaaacagttagagcaaaccacacaaacaaatagatctaatttgtttcgcagatttcggacaacaacccaaacaaatcttaatcttgaaagcaaatttgtattgagagcaaaccacacaaacaaatagatatgaattctcgaagaaacagttagaagttcctaaaccatccaattgtgtccgacaataaataaaacagtatttttctttgtttcgtaaatttcagataacaaaccaaacaaatcatcttgaaagcaaatttgtactgatagccacgcctaaagcaaatcacacaaacaaatagatctaaattcgcgaagaacaatgacatgcaaaaaaaaaaaactttgccgattcgaatcagtgaaaatcccaaattcagactttaagaaaccaaaatcaaacaacattactgtcgacattcacaaaatttaaaagaaaacaagccagattaaagttagaaacaaatttgtagattcagagacacatgccttcgattagagctcgactcgggcagagatagccaaaattagg

SEQ ID NO: 32391 - DNA, 564 bp, Arabidopsis thaliana columbia
tgttgcttgtaggttcaactctcaaactcccaaactctcaaatgaattgttttgattttattcttcatcagaaattgcccttgagttcttctcttgttaattatgtttgaataacgataactgggcttatctagttgggcctatagtctttcacgatgcatacgcagcccagagaattgaactcgataaaatagattatacatgttctgtgtgatcgttgggtccgaaccaaaccgattctggccaggaaattaaaaccaaaaccaaaccgcttcagaaaccaaacgataccgtttcaatacatcgatatcgactatagcaatttcgccgtaagaaagttttagttacaaaatcgaaccctattctttttttttccgtcaatcgaaccctattcctcactgaccctgacgtttatggcagaggaaggattcatcggaattggagaaagcgaagaagaagcggcagagatcggcgctttctcctacagccaccaccagatctctgacctgcgacgaagaagttgactgaaacaattatttgtttcgtggctggaaccatggggaa

SEQ ID NO: 32392 - DNA, 582 bp, Arabidopsis thaliana columbia
actcaacaacgtaaaatagcagcgacgggacgagagattagtaaaagcgagagactaacccattgtagaatcgaaaacgagagttagagagaggttgaagatgagattggcagagagagattttagagtgagataggtgagtgagaagggttccgtgaagaggttatttaaaagagagaagaacgtggaggaggggtcggaatgatctagtggctgagagtttttcttggccaaaaagtcagatctgattcaatacttttcttaacctaaaagaccaaattgcccttaatcattttccttatttaccgttgtagctctgttattttggcaaatgtcgtcattcctgaggcgagacatggcaactgcatctcacgcgctaatctggaatattctttaaatatttaagacgggtcgggtaagcatgaaacgcagcgtatttggatatgcttttatgcgccgaccagtgtttgactgccacgagttcacgagcggcccattttagtagacgggttccattttctagaacgtaacgcccaaataagattatattttagacaggatgatagcattgtatgtaatctt

SEQ ID NO: 32393 - DNA, 587 bp, Arabidopsis thaliana columbia
atttctggcgtcaatcaatttgctctttacagctccatttggtgatcatctgtctcctaaacttaagcttatgtatgttgatttcagatgtttggattgtcaaaggcggtcgcagagaagcaagctgtggaggcaaagggagtcgagagtcaattgcctcttcagacgacagtctcggagtaaagactagcttctttccttctgcgtttgatgtcgtttctcttgtttaacatcacatataagtttctttgtaaatcaacttttccgacctagagaccagatttgaattcaaacatttcaaatgttattggtttgatctttgttaaacaaacagctggtaacatagtttctattaatcatacaatatacttgcatacataagagtcgtacaacaaagaaacaagagaaatatattgcataacttagcccaaagttccaaaagatatctatattaggttctggataccaatatccaataaagcctcgtatgttgtttgtttcacttgaacagaacaagctgctccggtacacgtttacagatatgattttcaagcttgaagctgcatcatacaagaacatgacttatg

SEQ ID NO: 32394 - DNA, 490 bp, Arabidopsis thaliana columbia
atacgtaacatgaaagtctttaagatttgtcttgtcaccattaaccagcatacgtgtttacatgtggaattaacattgctaatttactgataattcaaattgtacattataaagaaacttcattttttctctggtggcccgtggcacaaccctacattctaacatccattaaagagggttcgaacttaacctaatctagagatgacattttgagtattgtcgcaaataaaacattctgatcataattaacatttagttatatgttagtatggattcaaacctgaggttgatatgatcggatccaaacagtacactacattaagtttacggatcgcaatcaagattgttacgttggcatcaaggtatatataaaatatcttgaaattttttagtaatttttataatgttgtgtacatatgtacacatgcacaactataagctaaataaagtatgtccgtattaccgcttggtagttgaagacttaaagagg

SEQ ID NO: 32395 - DNA, 628 bp, Arabidopsis thaliana columbia
caaaccaaaacaatgttttcttcctatttagttgtggtttagcaacatatgcacgtaaatcacgtatagttggtacgttttcgaagctttccgatgcaccgatgagtatgaccgacaatttcagttgaaactatagcgtttaaagtttagcgttcagagtttgagtcaaacgcgtgggatgaagaattggtgagatctgttaaaaccagtttgtaagctattttaatcacatgtttggaccgataagaagaaatatagacgaggtttaattatgtatgtatgtggtaatggcgattggcgagcacatggtttgcatgtaaaccgcccacacgtgtcagctaccatgcacacgtgtcatctgcatgctgcgttatcccattgtctatctcttcaccctgcaccattatcgtgtttttaccaattatagtatatgcttcctttcaattattgtgttatacgcatcgacattgttttatacccaaaatgcaaaaacagtcgtctatacatgtcttcttcttttacttacatatatgttctattatatataattctctcaaattgcttgtttaagatgatcatattgatatagtaggaaatatgaatatatcatatgttgatggatatatag

SEQ ID NO: 32396 - DNA, 556 bp, Arabidopsis thaliana columbia
gtaacattctttaagagaaggttaatttctctagaagagaagaaaatgttaagagctatatatatagacttgtgtatatcactgaagttaatggatggagtattcttggttcccctgcatttgatctcttcaaagtatcttatggcatttgcttttatgttatatatgatttcaggatatggcagggcttataagcaaggttaatcgctcctcaattggtccgttgcctccgtgctattcaccatctttgtaagattctctttctaatgagcttgtgtttttttatttattagtatgccgatttatacttataacatgccagcaatataaaaagatagaacagaacattttggaatcagcgaaaaggatgataaatgcatctgtaaatgatcgaatatttcatcaagtataatgtgttgaaaggcctggttaaatgactcttttctcttctttttctgtattgttttgttatgatattgcagaaaagcactcatcaagggaatgttaaggaagaaccccgagtatcggccaaacgtatggtttttcatgaaccaga

SEQ ID NO: 32397 - DNA, 553 bp, Arabidopsis thaliana columbia
ttgattaatgaagatttgtatattacttgacaacccatcaaaccttgtcgtggattgagatgagacagcagagaaacgcccatctcttgtttcaatacagcaaccaagcgacgtaccataatccctatctacatttttttctttaaattgtattccttttgtgtgtggttacttgttgtgaatttaacgttttgttcttgtcgtatacgttaggtttgtaaaaactagaaacctttctttctgaaattttaggtgtggaaattaattattattttttggtaaaaaatgagaaataattttatttgtgtaataatatacatatccatgcaagatttgcaaggtaaacaatgacatactttgaagattttttttttgtaccaaagcatgcagttagttacatagacaataatgcattaaatatagggttcaattggacgtatcctttagatagtttttttttttttttgaagaagtagataatctgagagcacaggtgtggtccaacaggttatgtacccacgtgcgaatcagaatggtcagtgggttgtgtatg

SEQ ID NO: 32398 - DNA, 549 bp, Arabidopsis thaliana columbia
gtctttttaattagttaatgcatgctagatttatttaattgaccaatatcacatgtaaaagcaaatttgttaatgttcgtatgtaattttctatttttttttctataataaatgaagggttggtccccctcaccctaccaaaatttttttttgttaattttcctattggttaatcaaaatattatatacatatatatagatataaatataagtatatgataatatgactacttttttaggtttttttatttttataagagaataaaaaggtaaatctttaatgacatatgtaaatatctgattattagacttgacacgtgacaccattatgtgagttagtaactttcaaaatggtactttatataataagatggtgattaaataaaactagggaaatttgcataaataaccaacaaaaaattataaattaggaaactaacatcaaacaaaaaaaaggaacatatattatcaattttttgtattaatgataactttgccctctacactacatacaccttctttttcccctcctctgttgcattcatgctg

SEQ ID NO: 32399 - DNA, 509 bp, Arabidopsis thaliana columbia
ccagcggatttggcaaaaaacctttgtacaactcatattttttttatctttttttagagaggcttgaacaactaataattacttggttccaacttccaaggaaaaataaataaagagaaaattaatgagaaataaagcaagagagattcttgcaataagaattgactttgatgagatagatttgtaaaatcagaaaactatacactataaaagacaacaaattagattgttgtggatgtccaatttaattaaatgcttatgagtatatatgaaaatttagttttctttacctttatgtattaacaaatgtgcactgcaaaagcttttaaaaactagtagaaagtagaatcgatgtcgtattttgggaactacgcacgcacacaagacacaacactccgttttcattaaccccgccgaatgtataaacggcaagacgttttcactagaaggaaactgcgaagacaagtcagcatggacccgatcgagtcgatgcatgtacttagccaaga

SEQ ID NO: 32400 - DNA, 593 bp, Arabidopsis thaliana columbia
aaaaagataaaaattgaaatattttgctttggtgggaactatttttttttacctttttactcaaccggcaaaaattcataaaaatgtctactttttgtaaattcaaagcgtacatacgcgctactgtgaaacgagagatgactgaaaaaagaacggtctcgttttcgttacccaatcacatacatatttgggctgtattgggctatgttgggctgggctttctgaaattttacgatttgggtatctcattaacaatggcttttctcctcccgtcttcttcaattcaaaactgtttgtgatgattactcagcgatatgcgattaaaagcttcaaatttgcagaaacccatcttcttcagctcctactctgcccatgatgtcagattctcttctttcttaacctctcttttgaattcatatgtgggcttaagattgttggtttcatttcatgtctactttattccttttgtaatttgacttttcgctacctgtcaatagcttatggtgaatttggcttgtggtacgctaaagcatcataatctcttcttcattactgctatgttctacttgttggacaaaattcatttattggtg

SEQ ID NO: 32401 - DNA, 505 bp, Arabidopsis thaliana columbia
gctaggttaattaagttgctttgttgtaggtggagatcaagaaagctgaaccacagaaatctctaaaccgttcacctccttcttacggtagtcaccctagaggtcgttcttctaacgatattatgcaagttatggtggaccttacggaggttttgatggagggtatggtcatcttccaggtcccattaggtcacatggaggtcctgctagtagatatgctgggggatatgggtatggtcgtggcagtgtaggccctgaatttggaggaggttataataattatgggggtggtagtttaggaggttaccggaatgaaccaccccttggctattctagtcgttttggaccctatgggagtgggtttggtggtgagggatatggccgtggaggagaaggagcctatttgggatatcctcgtggaggaggggaaggctatgggggatatggtgggcctggttacggctgtgcatatgaatctggtggcccaggtggcagttatgaagga

SEQ ID NO: 32402 - DNA, 556 bp, Arabidopsis thaliana columbia
ccaaaatcaaacaatgtagcacagaagagatgaatctataactaaaccaattatgcaagatcagcttctccaactaatcaaactaattccaatctcaaattcgaaaaatctaccttgacagaaccaagaacaagagtggcatgtctctcctgccactcagaaagatccttccgaacattcgacgcacttgtttccaaatcagaaacttccgacgattcatctaatccacatttaccataacacatttcaaatcctcaattccaaaacaaagataaagcaacaacaacaacaaaacaacaataccttgttcaggaaaagcctggaacgtagcagatgtcaaacctttaacaaactctctcaaatcatcagtaataccaaaactaacaagctcagattcagaaatctcagaaccaccaccaccagatcctgatcctcctaatcctccaggtataatgtcggcaatcgattttatattctggatctgatcagcttgtttcaatgctacgactttgagctgatccgctttcgttgaacctcagcagcgaattcctttgac

SEQ ID NO: 32403 - DNA, 644 bp, Arabidopsis thaliana columbia
aaatagtgggtctatcaagtttcatcagttttatttaacggccacgagaagttatgttaattgctatatgcattactgccattgcatttacacctcttgatcttacgtttttaactttgtaactgactttgtcaataatttttcgaaatgaagattaattttacattcaaatccatctcatggtatgaaaaaaaaaattcccggagcttacgtttcgttttataaaaagatatgttttgtaagtggtccgaaatcttaatcacttttaatttttgcacttttatatttgatgtgtatttgtctactagattggtgaataaagagcatattaattcattgcatttaatcaactttttttcttgtggctgcaaggccttgcttttttttaaaaatatcctgaaataaatttggtttatgtttaatcaaataaaataattatcagaacccacataataatacaagattttcggtaaacttcaaataaataaaggttttaaaaactttttttcggagaaaaactacaagttcaaattttatgttcaacaaggaagcaagcaaattcaaacttgcccaagtgtatcaagttaaaagtacaatattaaggtaagaagaatgaaatcacacaaaaaatatagtgtttaata

SEQ ID NO: 32404 - DNA, 665 bp, Arabidopsis thaliana columbia
cacttggaccaaccaaatttcgccaaacgtcacgagttaataaagcggggcgcgttgcggcggattcttccgacggtttaaaaagttcaccggagcttccgtgttagtcgttgaaaccacctccgtgactctcctgcaagtcgtcgacaagctgcttcttttcttcctaacgatttcagtagtggcggtgcaagcgagcgcctgacaccagaacatgtcttctccttcgttaccacttgactcggaagatgttcggttcgacccggtgggctcgagagtggaactcggtgtcgttgtcgtgacttcgtcggttaaatcaagaacgttgcagacgcggagaaaccctgagagtcctctttgtctcattatgacgtcactaatctacataaaacaaacaaaccatgtgtttgtgttttcagcgacaattacgtgtaaatatgatcgtacacgcgtgtttatattaaaaagcagaaaaacaacaataacagaaagaaattgaattgtgtattttgaaagaatttgaaaaataaatgagacaacaaataaaaacgttccttttttatctgacgacaatttcgtgtactcgtgcatcacaaaatgacatttctaaaaaagaagatcgacccagatgaagacaagtggtaatcggactgggtatgtgatag

SEQ ID NO: 32405 - DNA, 603 bp, Arabidopsis thaliana columbia
catagtcacgacacttacataaattactacgttacttttttatattaaaataaaaaatcataccaaaaaattactaagttaaaactggcaattatatctttgcattactatatattatgttcagaatataagaataataaagaaccaaaaaatgggtgcatgaatgtagtcagttttggcgatgaagagactaaaagagtggtggggtttcacaacgcatatcacatggcctgtcctccaattccaaaataaaggagacaacaacgtttgtcttctcttcctcccaaaaacactctcaccatttttggcttttttcaccttattattatataaatatccgttttggattacaatgtggataaaaaaagttacattagaatttgccagtggtgaagaagaagccacagtagcctgcactgatgcaattgttggcaacctgttactatattattcaattgtgtttgaccaaacaaattataagagaatatactttctacatgaaagcaaagaagataacttatcgtataagataaatgctttttataccctataaatatggctaagcgatgtgtttttcttatgatattgattattgaattgagt

SEQ ID NO: 32406 - DNA, 485 bp, Arabidopsis thaliana columbia
cggagaagcattttacggcagattatcgccgctttatatcgtttattcaccgatttcctcctggatttgcgttcgttatccatcgatgactcatcgtgaatctgcactggatctaagatctgaccataactgacgtgaatcttacttcaggtgagcaactaggaccgaagaggaagagagagaaggccattagaagaacaaactcgtcatcaatttgtcgtcatcaacgactccgatgatcattagatctcgataatgcaaaggcaagggttcaaaaaaaatgaagaattgcgaacgttgataggagaaattgaatagtatagtgagaattaacaccttcatggcactcgccaatgatgtgttggagagagaaagaaattgctcttagtagagggcgactattcttagatctgataacttcaacttaattatagtagattttaatccaacgatcgatattaaccccatatgacttaattggtttg

SEQ ID NO: 32407 - DNA, 505 bp, Arabidopsis thaliana columbia
  unsure (1)..(505): unsure at all n locations
nnnnnnnnnnnnnnnnnnnnctaaaggtgtcctgttagagaaatcttcgtcttggggccggtactaacatggcgagcaaatcatgcggttgcgtttcgtcacgttcccgatcgactctgccgtctctggtttctgaccataggaccaagagaaagggagtttagcagcggtctgagcgaactcagcgtacagctccgctgactctttgtgattttctgatagagtctgcttattgtgcgctcggaaagctgcttcgtagaggggatatacttggattggggcccctaggaagtgtcggctacccaggtctaattctgtgagcttctgtcaaacttgagaaggcggcagtgctaaccctctggccgttctcgatcccagattgaactgtgatcatcaagcttagtccagtgcgatggagggaatttctccgcttttttaaaggcctccactgttgccgttagcatggccatccgctgccatatcacctaggaaaacaaacatgaag

SEQ ID NO: 32408 - DNA, 936 bp, Arabidopsis thaliana columbia
aggtcgagtccgtaaaccggttcctgtcacacaacattcatcagtccctttaagcttccagcctccttcagctaatgctggaagtttgacagaatcaccagtgagcttaattgattcaactcaaagtaatgctggttcctcgatgcccattccttcttttgtgcaaggtaacaaatttgcttccagtggtgtccctcttggtatgatgcagaagccagtttcatcctcctcgaccatacccaatggtccgcagattattgattatttttcttcaccaatcatggggttagtggatgattcatcacaggttgttactcgttcacctgacgtctcttccaatcaatcatactcttccaacccttctcctcttggtcaaacacaactccatactccacctggccttgcttcagtatcctctaacctttctccaccttctgaagcgcagctttctgctccaaatattcagaaaatttaccccagtgcaccccaggctattggtaaagttgtctatgaccctcagtctaatcatcctcaccgatctatacctcatgagttacctgctgtggcttctaattcagctcctgtgattcctggtccattgtcaaaatcgcctgagtcatttttcgatatggatccgtcactgcaatctaggcagcagatggtatataggggtcaagagatgtttgctgcaactaacccggcatcagcgaatgtgccatcacaaagttttgctcccagaaatcatgcaccattgctgcatcttccagtttcagctcatcaggtatctacctatgtaattcttcttctgatgttttcttgtagatatcacacttatgcatgattttctcatgattatcataaaaagcattcatgattgcattggttcttaaatccatgatgtcattgacactagtagtgatacatctagcctctctc

SEQ ID NO: 32409 - DNA, 334 bp, Arabidopsis thaliana columbia
atctctttcaaaaatagtaagactttactagtattaactttcaaacattgtcttaataatacagtataaataatataaacaatataaaaaataaaatgattttaggggaaacaagaaaaacagagtcacaagtcacagcaataaaaaaaattgttaataaattcattaatcatctacatgaagaaaaataaataaaacgtcaacttaattcataggcaaataatgcatatttactttacctttgacaaatgacaaatggattattattaagatgtcgttggctactagtttcaagtttttgctgttgtgtaaagtcaaatattgattttccggt

SEQ ID NO: 32410 - DNA, 468 bp, Arabidopsis thaliana columbia
tgcaaatggaggatgaaaaacaacctatggtacaaaatcgatactgcaaacaaacaagagaaaccataacaggattaggttgaatagtgaaaccataacgaaagtaaatagagttgcaaatacaccaacaagagagatagaatcatccgagggaaatagaagaaaacctggcgacgtagaatcgggggcggcgagaggcggttgcgcaagggagggacggagtagctgaagacggtggcgggagagaaggagggcgtcttggaagcgaacgtaacggctggagtctctgaagagcgagctgacccatttttatagctttggtttcaaactgagctcctatttctgttcactatccggggaaagaggagactctctactatttcatttcgttcccaggttttaattaaggtaaaccaaaccgaaaattcgtaaactaaccgaaaatggatgtttaatcaaattgttgat

SEQ ID NO: 32411 - DNA, 612 bp, Arabidopsis thaliana columbia
  unsure (1)..(612): unsure at all n locations
cgactgaaagaaacaacacaaaacatttgagataacaatacaaaagcaatccttcctctagagagactaaaacaaagtaaagttagagtttttaattacccccatttggtaatgttagaagatgaagtagatgacggtttatcgaattgaatcacgccctcgagaggaacattatcttgacccacgaaaactgtttcatctcctgaagaagggatttgagaagctgaggttgagggttttgagttgacgcttccgtcggggttagagagagcgaggacgacgcggggacgactccggtgagtgtttggtgcagggaggagccatgaatcgggagaagagaaaggagaaggtttggatttggtgatgaatctgacggcggagacaggtccggtgggagtgcgaagaactaacattctcattgtatcttgtcaagccaatcgtccgccacactctcatattcatatcatcaattttcttatcagtataacgaatttaatttttttatgtaaaaaaaaatagaaattatgacagtgtaataaaaagtngtttgctttgtggtgacttaaatataaataatctcgtttcgttttatattataaattgttttgaatt

SEQ ID NO: 32412 - DNA, 522 bp, Arabidopsis thaliana columbia
ttttttgttaagctactagacgagattgaagcttaagcatattataaacaccataaaataaaaatattcaagacatgccttgtaaatttacagaaatgttgttgaattacttaaatatgtaaattgaaggttcacttaatttattcagatgttgattatcatttgcaggtctatactattgaagacagatagaagccagactatgccagaaattcaaaatctgttttattgtattgtgaaaactgaaaagtagtacaagtgagataattttgatcgaatcgccaaattttggtaaaaagaataatataagtaaaaacatggactaaagtagaaacaaaaaacaacacataagaaattactaaaaaaaagatccaccactcactttctcagctgaggtcttcctctctaaaatcaaaattctcagttccctcttcactccaaatttagggtttctcagtttcttctgaacgtctcctcaccttcctcgctttcgagattcaagcttctgggtgtgtatttttt

SEQ ID NO: 32413 - DNA, 534 bp, Arabidopsis thaliana columbia
  unsure (1)..(534): unsure at all n locations
aacattacctaaaaatagaatggtagagagtcgaagtatattgcagcacgagtccatctcgcaagtgatgaaccaagtgaccgtctatccgcaaaaacccaaaaacagccatgtccgcctgggtgtcacttgacatgcgagtatgcgacttagcatttgcatttgtgtattatatatttggacctttggtgtaatgaaaatataatctgaatttgcatcaattttaagttttaatgaatgataaattatagtaatgtataacgtaagaaagcattttaattggaaagtgacgaaaatgatgtttggtattctttgttaagtcgaacatgactggaacatatgagttcccaaaatcgtggcccccacagtgagtgtcggtcgtgggccgtgacctatggacttcaatcacatgagctcctctctccggctctcaccactcatcaccgacacatccaattcatatttgtcttttgaatgtctgaattattttgtatcaacattanaatgtgtgaatacanaaaaaatccaataatt

SEQ ID NO: 32414 - DNA, 602 bp, Arabidopsis thaliana columbia
gcagattagatagacgtgttgatagatcctcgattttctctcttctctcttgtcctcggaatcaacaaaggtaatgtgtcttcttctcttcaatgcgatcggtttcagttttctatcggaagtcaaactgttttgacttctttcggaaattccggtgattcaacgtggtaggatcgttgttaggatggtgttaagagttttgatttttgtttgaatatcaactaatttatacatggatttcacttacttggtgatcttagattctaattaatccttttttcgggatcttagatctatctgattctcatcccaatttgattttccacttgttttgcttccgacttatggattgctagagtaacagatctgctttgaattatgggtaaattatgtttctctaatcctgttatgtccttaagttagtagttagtcagtctcgtaattcatatgatcggccgaattagtgatcagtgacagtgagattatgtgtaggtttatgagccaaattttaggtatgttttgcttttatggaagttcaaatttttgttgtttaggtttcctgatgcattattggaccttatatattaacagatttgtttttg

SEQ ID NO: 32415 - DNA, 481 bp, Arabidopsis thaliana columbia
tgaaaactctttgatgtttacccagaataagcaaacgtgacaaatcatcttttgtttatttagcttaactattactggggtttcttcaatttaaacgtaattgaagtttatccagaagaagtactgatgaattatcttgttaattcagcctaattagttaccgggttttcttcgatttagactgttttagctggttgaatcgtcactttatagatcattagccaatttaagctattaaagttttaaactttttcttctgattcgttgaacgtcattgtccaattcagaccactttactgatttgatcagagagaattgtctttcttcaaagtaattttctacactgatctcattgattacgtcactctctctattgatgtttctttctctataatattggccttaggtttctttgttaacctctccattgaagatatgggggaactaaacggagtcatcattccgactatagacttggaag

SEQ ID NO: 32416 - DNA, 526 bp, Arabidopsis thaliana columbia
ttttgtaatgaaaatacaaaaatcagcggttagttaagaaaatagatatatattccaacgtctaagcttccgagatggcgaaataaatgtctaaagggaagttttcctgtgatcgacgacgatgttttgcaaattgttatttgtaagcgttataggaaaatttgatcagattagcaaatggattgaaaagctgggcccatttgattaacgggtgagaagacgaaattgaaaggacatatcacgcatggattatgtcgggaaattatttgaataaatcctactctttaagtgcaaaaccaattagcataattataaacactaaaattctttagttagaagacaaaaataagaaaagtaaatgtatttattaacaaaatattaagggacactgaaacttgtcaaatgggctgtaggcgttattttcatttcatcatattcattcatattagtccatcaatctaaatgtctacattacataacctcctttataaaataaatccaagcattcaaataatattttgaatga

SEQ ID NO: 32417 - DNA, 1904 bp, Arabidopsis thaliana columbia
tttgatttcatacccattttatggagtgagaattcacagtctaatttgtttaattatgttctcaatgatttttttcttttttttggtcaacaatcatccttaatatatatatatatatatatatgtgaagttgaaataatatgggccgagaggtttgggcctggttctgtttttttgttcctactattaatttaatttatttgttgagatttttcctcgttttttaaaaaaccgatgagagcgtatctagatttcttctctcattcttctctccgatcaaaacgccgccgttgcgtctctgattcttcctttgggtcaactgaggaaaaaacccttcctatgaagaacaacaattggcttcacactctctcttttctcaattttgcttcttacttctttccccggtactcactgattctccccaattttccttatttcgtcgtgcccttagggtttcttacatcgaaagtttggtttttgattatgttgtcccgccattgcatgacgttgttctgttttgttctgtcctaattgcttatttgggtttctgaataatcttcaattggagttttttttttgttcaagctgaagagtttcggtgatcgtcctctagagattgatgctaattttttcaaacattacaaagtttccaaagccaccgcccacttgaaacattcttttggtgattatgattgtttatatcgatttagcattactttacaataagcaagtgattctcttcataaagtatgtagctttactttgtttgatcctactcttttggtaatcttagtttcggatttgcctttctcgcaataacagagcgctttgtaaagttttgcgttttagatgattaacattcctttcttgcgtatttcaggctgattagaaacttgaccgcttgattctcttaaaggaggtcttgcgatggattccgctattgatatcagttctgatagtgatgtcgagatacaagaaactagaaccaggcctcaacatcccccacggatagctgaaggttgcatttctgacctatcaattgttttatttgttttgctgtgaggttagctttatggagttgttgatcttggtgcaggatctcatagaagagatctctctacgctgagaccgcactttcttagtgggagttcttccggtgcaaatggccacactaaaacaggacttacaaatctcgactcacgtaatggttttgaatccaagccactgcctcgggcagaacaccatacacatattccgggaaatgggagtatcgtaacttccagaattcccaatatctctgttggtgattatgagaaattttcatctcaacaagcttttaaaaggacacatccaccaacctttagtcgacctccttttcctcctagacctgatattggtacaagtaacgggaatgcgagtcactttcgtggtggagcacatgatgatctaggcatggggcgtgtgactaacggcactcggatcctacctccatctgtggcgcacggaacatctgcgtctccttcacattttaatggattaagtgatccaatgcataggaatggcataggcgaagaaaggaattcggaaaatgacgagaggctgatctatcaggctgcactacaggtgttcatccttatcccaacttttgacttttgcgattctcatcttagtttttcttttgtgcaatgcacttctctttttcgccagctgtggggttgttgaacttggccattgaatgattggaataggctcgtttcttcctgtttgttttatgtcagaaatgagtaataggtttttaaaggttcggatgtctcaatttctcaatgatgcttgagaccgggtaacatgctgaatttctctgttttagaccatgtgtatggaagcattgttgttcttcctttttg

SEQ ID NO: 32418 - DNA, 508 bp, Arabidopsis thaliana columbia
cccctccactaccacagttgatctgcctaatccagtcgtgttcatgttctttgaccagactcacatcggaggaggttgacgaagatacggccaattcaatcatcgccgaggactcattgttgttattgtttctatttctgctgctatccgtagggattcctaaaggcatcagaagattctcagagaatgtcaccgtcgatgtcggagattcaagctgttggtctccgtttcctgtcacaattttccattgatacgttaccaaaaccaatcaaagttgagagttttttttaagacgatgtgtctcttaccttggtttggtttagtccagtttgttgatgttttttgagtgaagcaatgttgttgaggagctgctgatttgttaaggttgttattgttttggtaatgctgtaaatggagaagctttgattctctagctagccttgcttcagcttcgagtcttgcactctcccattgagccatatgactaagcgtggctcagttctttgat

SEQ ID NO: 32419 - DNA, 142 bp, Arabidopsis thaliana columbia
tgttaagcaaattacaaacgaaataaccaaaaaaaaaacactttcctacatgcatagaaggagacatatcttatcaaattcatttttgaatggcactatctaacaacaactaaggtacgaaaaaatgtcatgagaacacagt

SEQ ID NO: 32420 - DNA, 527 bp, Arabidopsis thaliana columbia
aagccaatttttgtttccatggcagtcattcttgcagaaatcatagctcttatcgctgctggcacggttcatcgggtttgtatcacaacctggtaagtggaaattcactagttctacttggtatatccatttaccctgtttaattacttcattcctctcttgctaaaagcggtgtggtgattgtgatgctgtttcttgatctgcctgcagtttcctgttctctgctgggctattgtacgaggtgaacaagatctctggatacatgctatccaaaaccgagtcaaagtctaagagacactgaacctgataatggaattgatacggcttattattctggacttagatttgtttggcacttgaagatgcaaaaacactttcaacatcatgaattgtgatacttagaaaccctaaattcaaaatccacatcttatgcttgatgtgagtattaggtctgtttcctttgcagcttataatcatagagataatcattttagttgtgtcttatgttcttggagaaactgaattgt

SEQ ID NO: 32421 - DNA, 651 bp, Arabidopsis thaliana columbia
gatgctcacccaaggacctctcccaaagcaaacctcacttcagatccggctaagggaaaactagctacggcggagaagacggtctctggctcaggcaagccatcatccaccaagatccagctaaggaacacccgcagctcgccatctaggatccgaccaaagatccactgttaatctcgtcgcaaagaggtgaaaccaccgatctacagtccgacttctgccgctcaccggagctacagctcacaagctgtcgagcctaaagaatccattccaatccgctagcgtccatgaccagcagacaaggaggaacatcatctcatggctgctgtgaggagagccaccaattcgcattgaaaccatagatccaccacaccacacaccaccggagaagaaaggcgcccactcccgtgtcagccgctaacccaaccttcgtcgatgaagctccttacagaggcggccatggaaaaaccctagatccgaaaaataggttaagaagagagagaagagagaggaacgattgtccttttttccaacacggtatctctactagtcatttacttttgtatgaatttgttaatattgctgatgtgatgcatgaacatgaaaataatactgttttgtcacatgcatactagtatgagagataaatgt

SEQ ID NO: 32422 - DNA, 570 bp, Arabidopsis thaliana columbia
tcgactctaccagataacaaaagacaaatatctaaaaaagatcaaccgttaagggaaaacgaagatctaagcactaaaattgcgcaaaagaaccaggaaccctcacaaagcttccccaaagaaacggaaaacgtcggaaacaccaataagatcggaaagaactcacatcgaagtcaaaccactagcaatccgacagggaggaaagcaagaagccaccagagcgagagacacaactactaatcaaataagcaattattatgacattatatattgaatttctgatatttatgtttgtcttataactatgttaatatctcacacgtactgacagaacaagcagccttactttagaaagtttagaagaagacagaaacaggataatcccaaacattgtgttgggttgcttgaattattagccgacaagttgagttctaaccacttcattcataaataaagaagtcagctgatgaagattatacaacaatctttgtcataaactacgtaaagataatgaagtagctagtcctgtatatattatcttatgtttcctggtactagttctggtgcgac

SEQ ID NO: 32423 - DNA, 416 bp, Arabidopsis thaliana columbia
ttgccgtcttagctcagtggtagagcgcgtggcttttaaccacgtggccgtgggttcgatccccacagacggcgtcgctttgaggtcattttttttttaagaagtcatgtatatttttattgttaaaacctacaagtataacaatcattgagattataactaaaatgaaatatctgggtgtttcagtaatagtattacccaatctcaaactgtaaatgagctaaacatggctgtcactattttaggacagagatgatcatttctaagctctggaagtactatggttatcgttaatggaggataagagtgtgaaatccttagctgctcacccatttcgtacctcgctgtcgttacatccctaatttgtgactcgtaaactcgaagcaacctatccacaaaatgaattaagcttttga

SEQ ID NO: 32424 - DNA, 497 bp, Arabidopsis thaliana columbia
tccccctagtgcatttgctatctcggtttggttggtgaggtgtgatggtgtttgtatttgtgtctctcgttctggtggcttcttgctttcctccctgtcggattgctactggtttgacttcggtgtgaaatctttccgatcttattggtgcttccgacgttcaccgtttctttggggaagctttgtgagagcttttggttcctttgcgcaattttagtgcttaaatcttcgttttttcttaacggttgattttttttagatatttgtttctttgttttcattgctggtctaaatagtttctccgtttctttggggcttagctaccctcttttaagcttaatttctcgagacattttgttggtctgccggcttttatatttgaaatggtatcctactttggtttcttaataaaattctggcgacaaaatttttttttttcgaaagatcttgtcataaatatttcctactgccttttgcaatacgttacaatgttgaca

SEQ ID NO: 32425 - DNA, 511 bp, Arabidopsis thaliana columbia
tagagactctagagtatattagttccagataatgctagtaaaaattatttttcgttatcaaggatgtgacaaagcttgcttaatcaagacccattttacatgacatataaacatgtttcagtggacggacctgaatcttgaggttgcgattgtaaaactaatatttagggttggtgtatttagagttgcaatccttagaacaacaaaatataagagataagctgcgataatatttagaaacataaattgattggagaaaatgttgtacttaaaagttaaaacgttaaaaaaaactacagcttgtaaagtctaaataaactaatcatccccttaatcttgttatagttatggatttgtttaaacgaatttgtccactttgattataacactaagcttgggctaaaaaaccggattcgatacccaaactaataatcagacaataaaaactggattagagcgggttaagattttaggaattttattgggtagaattttaataaactcatgggta

SEQ ID NO: 32426 - DNA, 936 bp, Arabidopsis thaliana columbia
aaatcgaggacttcgagagtgaaaaaacaagtgataggaaaaaggtagttgaaacggttgttccaggattgtttacgttccacattcaaacgtcgtcgttttaggacaacattgggctttgatatgttaaatactgggcttaattattctaaacgacgttcgttccacgacaacattggacttggatctgttaaatgttattttgtttgaatatactgggcctaattatcccaccgacgattcgacttcgatgtgtttttgtttgatgtgttagatactgggcctaattattcctatccggcccatagaagattatagcaaacaattaatgttcttgttgatcttcttcacttcacttcacatgacatgagtactaaacgttcagattctgtattgttgataaactcttgggtcctaatgattattgtttgtagagaaaaatgaagatttaaagtgaacagaacagagacaagaacaatatttactccacaaaatgggaatttatattcatgttatatgtctcttaatgccaatatataatcattagtctcaagtatttatggtaaaatagagtctaaagatagattgggggattcataaattttgaaagcttatgatgaagtggaagccagtgaggaacaaagaaagtcttgactagatcacatcactattctctcactctcgacatcagaagcgtgagattcactctctcattcccaatgcttcgtttgatacacgcacctaatctatagcgttgagaatgagccacacaaagatgatgatgatgatggatggatggatcctcctacaaattgctagatgctagaaagaagtctattagagagatagagagagagcttatatcacagtcaaaagtcagagacttcaaatttaatttcgaattttgaaacctgcctcatcatcccattgtattgt

SEQ ID NO: 32427 - DNA, 698 bp, Arabidopsis thaliana
  unsure (1)..(698): unsure at all n locations
catcaatatcatcatcataaggatagtccaaatcacgtaaggacatggctgatccatatcccgagattcctgatgatgatgaagaggaaggcgccgtgaaaacctccatagtctccgataaacgatcatcaacttcattatcaccatcgtctcctcccatctccgtcactggcattatcgtaatttcggaacggactttacgtacggactcaacaacacgccgccagaacctggtgttggaggtccggcgacgacggagcatgaacatgacgacggagaacatgtgcatcccacgtgatgactttttcttcttcttcatcatggtagtcgtcttgtttatttaatttgctctatctctaattgatcaccattctgatttcttgtctccatcagaaagatgacttaaagttttaaggaaaaacaaaaaatcttctccctggagggagatttttgttttcttgaagaaaagattccgctatttttgtaaacgatagtttttgaaatattgggagttaaataataagattaaattgtttagggattaaaggaagttaggatctttttatcggaggatgagaaaaattgagaatcaagaaaagaaattgagacagcctaaagtagactaattttatataattcatttcatctaagaaaacaaaatttgtctagttgtanatggatccaaagtctatttatag

SEQ ID NO: 32428 - DNA, 574 bp, Arabidopsis thaliana columbia
  unsure (1)..(574): unsure at all n locations
tgataactcaaaccatgaaaaacatgaagatggtgaaatacatgtacatacattaagtaatgggcatcttcagtaagtaattcaactcattatttgaggagcagtcttttgtacccgcaagattatagagacgagaccatcggtatataacatattcgggtatttcattcagatttgaagtttgttacaaatactattgtcgcctttgatcatttttgaactattggtcacacatttaataaagtcttggtcttcgttttcctttgcgttactcttttaaagatttttatatccaactgatcaaaaaatttaaaaatagcatggttttatttttggattatggtgttttagagagctaacctcagtaaataaaagaacatagaccggcgccagataaagacaagtccggcaaaaactctagattgttattttctatgaatataattaattttattccaaacatatatcgtatgaaaaaaaaaatcatttatcattggaggaggcggtgatcaggcgcagtgagaggaggagtcggttaacaanagtggtcttggccagtccaaagcgtcattgt

SEQ ID NO: 32429 - DNA, 524 bp, Arabidopsis thaliana columbia
tttttaatatttgcttgtctttgaaatgttttggagataggatatgttcctaaatttatttatttatcacagtcccgcccaggtgcgatcagaatcttgaagacggctgatctaactggatccgatggcattatctcagagtcctctccaggcgttttcgttcaggtttacttgctctaacatcagggaactagtgaggtgcaccaatatcaatgtagtctcactaaatatctgtttaattacagggattacttgtctatggtagacaagggaaagaagtgtatcgaggaaacttagaccgagatgtctgcagagaggtaagtccacttaggatttagacgtacaacgactcacagaattaattctcacatcctcggcttagttcacaaaccatgcattagaattctggaacccagtctctttgcatcatgtaattctctaccatgttaagcagcaaaaagctacctaagtacctatgatagtgctcaacttattatccgtgtgtatcgtgattgaatactgag

SEQ ID NO: 32430 - DNA, 253 bp, Arabidopsis thaliana columbia
cgtgtcgttcctgcccagcgaccggacaatctcggcccccgcggtgccgttcagtgcctcggcgtcgtcggtgccgtcgacgaaaggcagctcggggatctcttcgccctggtcgaattcctcgtcgtcatcgctggacagaaggctgccgaccgccgcgatccccagcacgccgatcaacaaaagatacatctggttcatcgcgtcccccgccttgagcaatatggttgccgcatcaatgccccagaatctg

SEQ ID NO: 32431 - DNA, 476 bp, Arabidopsis thaliana columbia
tattgtcttgggattattatgtttatcattctccattcttttcctacgatgatgattcttggagtagatttgtgtatctctatatataaagaaaataatgatctaatgttggatttttaactttagatttaacattaactgtggcgaaaaatatataacactattaatttatattagaataataaagagcaaataaataaacatgtatttgtttatgctataaataataaatgttgattaatatatgtttatattattcctaaaaataatgaaaataaattaagacaatttatgattaaatatgctttcatttaattttctttagcaattaatcccttagaattaattctttgatagattttaaaatttcatctacaaattcttgaaaaaggtttggtatctacttttttaatcctaattaactagattagaacatgtccgatgtgcaatagaccgtggtatataacgatgcatgt

SEQ ID NO: 32432 - DNA, 597 bp, Arabidopsis thaliana columbia
  unsure (1)..(597): unsure at all n locations
acattgattcaacaatcataaacggggataaaacacttcatacaaaaaacacaactcagagtgcatgcaattttatccacaagcgcacaagcgacaaagttgattatcgtttgagatcatatctcatacagaacagaatactatactttcaagcgactctgtaaggtagaaccagtattgaagtcaccatgatcagttaattgaacaatggatatggatggattcatttagtcaataaatgaagaggtaaatattagatagacataagtcagagactatgactgacctgattctccaatcgaatattaagagcatcaaagctcgatatgcaaccttgagcagcttcatcctgtgcaattgcttctatctgccagaagttaaagtcatcaatgtcacagaaaagtagcacagatatccatccactgagtgcacacatagcaagaaaagggaatgacaaaggagaaatttatatgttatataaacttgtggcaaagaagagtgaaatccagataatgataactcgtacaaatgaatagaacttgagatatttgatcaacaacagaagaaaagccagagagaaaaagagtccangagagt

SEQ ID NO: 32433 - DNA, 515 bp, Arabidopsis thaliana columbia
tggaacaaggtaaatatgtgtttgtcgaaataaagaaccgtgtaatgtgaacgctttgtcgagcgtgttttgaaaagccaatttcacaccactctttcttagtaaatcattacaatttgatttctatgttaatgtggtcacatcttatgtacgttttccgacaaaaccacgtataggataacagtatccaatatgtatgcatgaactaacttatttacgcacatttttaatagtgttgaactgttttatgcgttgctacactacacgtccttggaaccattcaataatcatttctgtctaaattcattgtttattcgtctccgcggttctaaaaggtaatcgacatcgtctagaccattttctactacgtactacatttcaactctatcttattacatactttctactctattttccatagctctttgttttctattttaatttaaataaaaaaatatatatatatatattctctcgtgccaaataggcttgagatattagagcctctggagacg

SEQ ID NO: 32434 - DNA, 522 bp, Arabidopsis thaliana columbia
actcaggacattcttatgagctcgacattttgagacctttcgatagtagcaaagaaggaatcaccaacacaaagatgattagcacactgaccacaagcctcccaatgcctctctaaccactaaattcaactataagaaaattggcaagtagatcaaaaccttcatgttgattctagacacaagatacaactgattgataagatcacagatcctaatctctcccgaagccaaaaggcgccctctttctcaaatggtcaaagaccctctctacacattctttatcttcaggccttaaagagtctaataaagaaaacgaaaaacgatacttatgaattccacaacttgttgatgctttccatcgtaacaaagacggaatcaccagcacaaagacgattagcacactcaccacaaacaagccttacaatgcctcactaaccactaaagtcaattatcagaaaaaatggaaagtaaatctaaaccttcatgttgatttcagacacaagatgacaatgattgataaga

SEQ ID NO: 32435 - DNA, 428 bp, Arabidopsis thaliana columbia
tgaaaacggtggtttatctgacactaaaactattaaaacacacaatttaacgttctgaacatattcattatagtggaaaatgtatcattcattttttttccaaaacattcatgtattactttcacaaaaaatatttttcaaaagttgcaaaatgtaattcaccaagtagtgatggttcgaaaatctctaaacctaccttagaacaattatatccattatgatcccttatataatagtgttatatatagcttattctagtaagaaatattttccaaaatggataacaagaagtcaagaacacaagagtcggtttgtttagaaggggtcatttgggaatcaaagctatggggcctaaagactcacttaactgttctttatggacccattgtactattcagaagattgaattgggactaagagaacataaa

SEQ ID NO: 32436 - DNA, 500 bp, Arabidopsis thaliana
tctagaggtgattataattgtggtgaagacaatgatagtgatgattatgctgatgaagctgctgtcgagaaagatgataatgatgctgatgatgaagatgttgataatgttgctgatgatgttcctgttgaagatgatgattatgttgaggcttttgattctagagatcatgctaaggctgatgatgatgatgaagatgaaagacagtatctggatgatcgtgagaacccatcttttactctgatccttaatccgaagaagaaaagccaactggtaagtaaaaactgaatgtgaaagagcttttcatttaacatcgttgggttgtgagtttttatgatgttttttttcataaagcagctcatcccagctcgggttatcaaagactatgacttgcacttccctgagagtatcactcttgtcgatccacttgtgaaaaaattcgggacattggagaagcagatcaagattcagacaaatggtagtgtgtttgtcaagggatt

SEQ ID NO: 32437 - DNA, 489 bp, Arabidopsis thaliana columbia
gatgaacttgatgatcaaattttagttaacccaagttaaatttgggttgagttaaatgcttcatttgcttttgcatatgatataaaaggtgatttgggctcatttgagaagcgacacgaagaagagtgagagcaagagcaaaaccacaacaaaaaattgggtgattgttgagttgatgatttgaaatatatcgattgtcttattttagatgcataaatgaatatttgtagtatgatgctaacgtcaaagatttttgaaaaaacactgataacatatatattcaaagaagctaacaattgagccgaaagttgcttaattgttttgagattttactatgcttttccttttgatttagtggtttttttcttagttttggattaagtttaagctttatttcctttgatattatttaaaataataaaaaaacattatatgttatgttataataatatcgtccttatctcatatttgttttttgataaaatgtat

SEQ ID NO: 32438 - DNA, 496 bp, Arabidopsis thaliana columbia
tagaggatccccagtcagatatggatgatgaacacatcagctttgatcactcccacggacgcggagattcgcagatttgccttctcgctttgctttttagttttgtcaacgcttcttgtaccttattggtacgaaccaagagacacttttcacagattcttcttgtgaaatattcattgtcaacttctaaagtcaatggcttttgttataagttctctccaagttggtatatccgaatgagaagagttcttaagaggaccatttttacaccacaataaaaaggccaatgtttactttgagagagattcgaagtggcatttcgatattgggttggattctgttcgatttagtattacagtagtttggtttggttttaatgtaattaacaaaggttattggttcagttcgacttcgaaccaaaccgaacagatcaggttgaagaatactttaaccaggcagttatgtgcatggattatactttggtattgggttggga

SEQ ID NO: 32439 - DNA, 417 bp, Arabidopsis thaliana columbia
gggtaccgaactcatagattagttataagaagagtttgatcccactcgatcactttttcttctcggatcctttcccaccaaaaacacaagcaaaacaacaaagactctctatctatcttctctttcttctttatcgtttattctatatattaacgacattgtaatctaatttgcactgtcttcaacattctctttttctatggctcctctccctttcataccggaacaaacccgttcgcaaacgcgtttatcttcagacacaaagaagaagatcagaaacaagaaaacgtcccaaccatcgcctcaaacgcataagataaagcagaagacggtatcatcaacatcatcatcgtcgtcatggagccagataaagaaccttttgagttgcatacaaatcgtagggccacgagtgcacga

SEQ ID NO: 32440 - DNA, 551 bp, Arabidopsis thaliana columbia
ggtgtggcgcaccttttttgacgcggtcatcatggcggaggtgaaacgacgcccgcttcgcctgccaaaggtgtcgcttgccctgccgaggagttaatgcgacgggacgggcgattcgcggggcggccgttgcgcgtgccgaggtcgttcgaggaacgggcgtttcgtcttcgagtttgaatttcatggtgggttcgggcgaagttttgaatggatctcgcccgggcctttatatacccggaagaggggccggcggtggttctttactctgtcgtttgcgcttgccttctgctttggtttccgcaagctaagagaatagctagagaaaagaaaaccgcacaccttgtcctctccgcctccacccccattcgttcagtgatggctgacaaggtgaccgtcgttccgccgcgcgatccgtggcctttctccagcgtcacggtggacgatctggaggcctcgtcgccgatggtatgctcgtccctctctggtgaccgcagccggagtggacggccctacgagcgaggtcgcccaactccgcgccggggtatgtg

SEQ ID NO: 32441 - DNA, 495 bp, Arabidopsis thaliana columbia
tatcgtcatcttgagatgaaattcccggttatcgataaaaccaagaagatggtgagaaattatttcttcatacacgttatacatagtggtgactggtgataattaatatgaaacttgattgatgttttaacctaggatcttgaaatgttccttggagtacaaggcaaacgatgtgtggatataacaagtaaggctcggaaaagaggagctgagagatctccgtcaatggaaagagaaatagggctttcactttctctagagaaaaaacagaaacaagaagagagcaaagaagctgttcagtctcatcaccaaagatacaatagtagcagcttagatatgaatatgccacgtatcatttcatcttctcaaggtaatagaaaggccagggtgtccgtgagggcgagatgtgagaccgcaacagtgagtttctttatatcatatcttggactcagtttggagattggtaacatgatcatttaataagaaagatgtgtg

SEQ ID NO: 32442 - DNA, 579 bp, Arabidopsis thaliana columbia
gatgaagatatacctttccagtcttcgatctacgttcgtgcgtattgagcttatcgttcttctcgttctcgatcgtcttcgcacacaaggccaagaatatatatatattttttttaatgggaaaaaaataccaaatttacgttttgttttgcatgtgaaggtactttagtttgactctttttgtcgagttattgcttccattcgttaaaatatttttttcaaaatactacaaaatggaaaatttatgacaagcaaatatataaattcttgccaaaaaagtttttttctttgtttttaaaatgattgacaacattttatcttttgacaaaaaaaaagacaaaattttatctaataaaggttacaaattaaacagcttttatttacgaattaaggttacaaattaaacacttagagagtgggctcggttagcctaccttaaccttcctcattgcccgcataggttctacccaccagaccaattaagtcccccagattccacttatgaatcttaagagaagccttgataaaaccaccacaccactgcgcacacatgaacactacatgagtgagtggtgctag

SEQ ID NO: 32443 - DNA, 536 bp, Arabidopsis thaliana columbia
cacattagagggagcgaaatttgagggtgaactgcaagaatttgcaaatcatgcctttagccttcgttgtgtcctggaatgtttgatatctggtggagttgctactgatgcaatagttgacacaatgggttcgggaactttgagcaatgatgaggctgttactcttcttgcagatgttaatttacctgataattccggagattctttaactagccaaattattgaggcttccatggtttcagatgcccctcaagaggttcccttgtcgacagagcatgtccccgaaagcactaagcatgaagcagcttccagtacaccgtctgtcgatactactgccttgactgagaccttcagttccaaccttaaccttcagaatgaggggaagcaattcctgtagagggacccgacaccggtaaaggaaacaagaaaaggaaaaaatatcgcgttgatattctccgttgtgaaagtctggcttctctaacaccagctactctagatcgtttgtttcccgtgactatgatattgttgttcaatga

SEQ ID NO: 32444 - DNA, 526 bp, Arabidopsis thaliana columbia
tcgactctccccatcttgcttgatttctatgcaccttggtgtggacacatcagaatcaaaatcatttgaaaaaaagaggcataaacatccaggatgaactgtgagagtccatcaaactaagcacaaccaaacagtaggactttttgtttatgtgtctcgtccctaccagtggatcccacatcctctatcgggcctattggccacccttatccgactgtcggtccactatgtctgggaggttttcgtgactttttaccgatcctacaaatcaccacatgatctttctctatgctttgtcgtcactcgcatagttccgacaagcagttcccggaaggtcaccaatctttagactttcccagctcaaatatgcttaattgtggagatctctaacgatctttaaccgaaaatataattgcactttggtgatgtaggaccttaaggccctaactcttacctcttcttttattcactaagaccacctcaacggatgggacggtgagagctctaaaaaacaaaaaacaaaaaa

SEQ ID NO: 32445 - DNA, 526 bp, Arabidopsis thaliana columbia
taagtgaaatatgatttctgcaaaacaaatcaaactgattttagtaatcaactgtaagtgtactagctacaatactactgctcacgcaaattgagagtgttggaaagagaagcataaggagaaagaaaagttacataccactctccagaatttccgtacgttgggatctcggcggaagggtccatagccaagaagtcttggaacctttctttttagaaagcggaaaacgtgatacaaaacaaacccgtatatagaacttcgaattagaaaccagaggaaccactgaaaatcttctgtattgcgggacttgaaattcatttctgcttcagactgccattgtaagtaccatgttgagccaacagtctgttctatttcttctggccaagccattcccagacgcagccttaactgtatcagaaaaaagtcataggacaaatagactagacacagggcaacaggaggaaaatatccagcgagcgtacattatacctggtaagggatgataaattcgataactggaaacacg

SEQ ID NO: 32446 - DNA, 457 bp, Arabidopsis thaliana columbia
  unsure (1)..(457): unsure at all n locations
tatcttatatagtttggagctctcaaaaacagaatcactaaacttggaaaaaagagcaaaaaatctgaaatggttataaacaaattaaaagaaatgcaactaaataactttgccacgtaatgtaagacaaataatcaaataattaaagttataaaaaaaaaaagtactgaaagaaagaaattcggaggtctaggattcttcacgctgaagatagaaagcacgactttaaaaatccaatccgtacattcagacacaaacacacaaactctgatcttgtctccgtaggaggtacaacactgatccatactttctcgttttctttttgaccttaaattccacactagaggaagataaaaggtttgagattgcacagctttttatgntatgccggtttattctcttagttatgaatcaggctttgagtttaaggtgcaactcagccgttgatgatggtggc

SEQ ID NO: 32447 - DNA, 490 bp, Arabidopsis thaliana columbia
cccctctccaagcaagttgtgaactttctcccaaggtggctaatttgaagcttaatccttctccaagcccaactcttggatttcatggttacttgcttgagggaaaactggattcgccaaatctctggtcagctgaacaagtaagctgctcattttctatcgccaattttggctttgcttctcagacatgcatagtctacaacaaaaacaaagtgatgtattagtctggagaagtgaaatgagaaaccttaaaaaatgtataaggttagtattgtctatctggtgcagctattaggaaatatggattgaaatcatgcttatgtgagaattttctcatgttttctgatgcgtctagttcattgaatttgggctgggtatcgttctaagtgttatctatttccaatactctttacccaaaacgtgtgtaggggtatcgtacctgatcttaatcaagtacttttatcttggtagcacggactttgaaatgata

SEQ ID NO: 32448 - DNA, 627 bp, Arabidopsis thaliana columbia
aaattttacaatcagcatggaccattaatatttttaactaataggatgcttcaaagcatactttgcacacaaacttgttatggaattctctcatgtacggtattcctgttaataataaaagtgacttagaagcatcacatacttgttgtgcaattctctcccgcacggtattcacgtgttctttgtgtcgtatcttgttgttcttctaaaaaaactatgtctactatatagttgtgatgatctttaccgggcaagctagccattattacttataacagaatctagatcaatataccattaatgaataaatttatgtaatctagctagtagtgactattgtgttttgtgctatagagtaatctatcagaaactttgtcaatattcttactttatctttgaaatatgaaatgtgtgttcaataacggatcaaagagatcatcacaaagaaaatgtagtttgactaattccatcgcaaaatttatagttcattgcacatcctttggaggctatgatcagcaacgcggtcatcacagaattgcttaaaggtgtgagatatttttacgtcaatattgatttacgactaattacaactcagttgaaaaacttgtggagttatggcaatattta

SEQ ID NO: 32449 - DNA, 521 bp, Arabidopsis thaliana columbia
tacaacattctgaacattattagaaattttaccttttaggcagtcttgattcaataaaggtgttaagaatactaaatatggagttcatgaactcaacaaaaaaaacacatccttatttgactcctgaactccacaggtttcaacataaaatttcaacataattcatatataaaccttataaacaaaacgctacaaatagcaatttctaagtccaagtcaatggaaaatatacatgtcctacatcatctcctcaaaaattgtaagttgtaaatccattaaatattaatcaaatgtttattccaagaattccaagctttgtgacagctcattcaattagtttctgcctacattttcccatgtgaaaatccaggaagaacaaaaaaaccagcgaatcacaaaccctagatctgaattcacgaatcacatgaagctagatttgcgtgacgctcgacggaatcatatagagtatgaaggaactcacaaatcagagagaaaccgcgatatatacctttaaaccttgg

SEQ ID NO: 32450 - DNA, 263 bp, Arabidopsis thaliana columbia
atcaatcatttaggatttggattttagcttgtcaatgctctatcatttctactaaatcccgagtttcgaaagccctctcttgtcaaaatggtgctctatggtcagaatccaggttgggatgttgtgattgagcttgaaactatgcaatgtgcttactctatgtgcttagttttgagtcgttgagactcttcagtcttcagaaagctttaaagtagtaaccagtagtctctaatcatgttaagtgtactatgggtatgatcatg

SEQ ID NO: 32451 - DNA, 460 bp, Arabidopsis thaliana columbia
attaacaataataatgggtttacaaaaattatatataatcaaattggccaaatatttatcagttaattttagttagagggcaaaatttgaaaaccacactttggttcttttgacagaaactcacgagatttgtttcttctacctactttgaaattgtgcacacacaaaaaaaaaaaaaactactttgaactgtatgtaatagaataagagccaaaaaatattgcatcaaaaacaaatcttgcagaagaaaaagtgtggaatctctctctctatcacatgtttctgccaccggatgaaactttccggtgacgccttttcccgcgttgtcccggagtcttcttacccggcgtggctctaccaccggctaatcttccacgtggtaaaaccagtggctcgggaagaactctagaagaagctcgaggaggtttcatggtcagcaaaacgtctctatgatatacct

SEQ ID NO: 32452 - DNA, 563 bp, Arabidopsis thaliana columbia
gcgattcaaaatgtattagtgctatatcttttacatttctaaaaagagtttttaaaactaatattcaaccaaccaaatataacgtttacactttagcgaacgttatctaaagttgaagggtatgtcatttatagcaaaaatgcattaaacgttatattataccgctattaatatctcaatttcttgtagtggtttattcgatgtataccatgctatttgataaaatatgcagcaaacctttatatgggcattttgtacgtggcacgattatgtcatgcgctgtggaacaggaataacgtgttaactgacgatgtggaccatgcgaagaacacagtctagttagagaagtaaataagtgaggggagtagattacaatctcctttttcataaccatttcattacactacgcatgaggcctccgaaaaagtaatttatttcttttattaccttacatgacacatgctaaggcatttatatattgcatgttttttatccaaaatccgtgtttaccttaagaagttggttattgtttggaaaatcgtagtagtctgtgattcatgtat

SEQ ID NO: 32453 - DNA, 593 bp, Arabidopsis thaliana columbia
gaacgaagcagacaatacgattacggatctgattaaagcaggcttgaacttggactggttgcgtcagaagtttgatcaggctttggaaaaacagatagcttacgacacacggatcggagaactcgagaaacaggtcaagaagcgaaactcggcagtgacagaacttgaagccgacctggagaaagagaaagctgcagcttcggcttcattgatgttgtttgactgagattttaagatgaagttgtgatttcttgatttgagtcttctccattgtttaatgaggaatagtgtttcctacttctagtctttttatttcagctttcctcatttcagtatcttccttttaggtagagttaaaaaacatatacatatcctatttttaacttgagaaaattaagtgatataagagtttcttggtgaataagtaagactcctctgtttctgttcattttctgctaagtaattgtttcatcctcaactacgttttggtctctgctaatttgtcttcaccacctgcggttttgaatcgaaattaaaattaaagcagagagtaagtgattatgatgaaactgttgaatcaaattttataatat

SEQ ID NO: 32454 - DNA, 503 bp, Arabidopsis thaliana columbia
tcggagggggaccatcctctgatctcttggcaacatgttgatatgattttttattagctcgaaatgggcatttgctgaccttctaaattatgctaaatactatgccataaaacgttttcgagctataatttcagacgtagagttatatgaaagattgtacaatgtatgaactatcggaaactcgatacatgatccactaatttactaaacagaaccatgtaaacagaaaagtcttaattaatcgaatgcatgtgtcttaattaatgctactcgacaaacaatgttggaaaatctacgaatatcatgtgatatcaaccacattaaatttatgttatccttatccgtatccgttctagtaattagatttagttatcattttacttgtctttattaatacatcggatactatctatatataggatcatcaccggttaagtacatctcttaccacaagattgttggagaaatggtttcatcacttaacatcatcgaagtggcacgag

SEQ ID NO: 32455 - DNA, 545 bp, Arabidopsis thaliana columbia
cttcttttctattttgaagtatagacccgttcgggtattttgaaaattatgggttcggataaggttttttgggtcggggtcgggtcggttcttcggattcggctattatgctcgggcctaaaggtaaaccaaaaaattgaaagcaaaaaataaatgtcattgtattttaatgataccataacacaattgttttttaacatatcacaaatttcctatttaattttatcttgaatgcaaattactttatttttcttcaattgaaatttggtttgtaacatatctcacaaatttgaaaatattaattgaaagtattattaaattgtattagaagaattagccattatgtttataacgaagtagtttgatatatttatatatacatattcacaaatcatctttttatatcatatcactatcttcccttttatcatcatttctaacaaaactttatgatctcatgttgcagtagacaattaactatagtagaaacataaacacctttacaattttatgatataacaaatatgtcttgactcttgaaagat

SEQ ID NO: 32456 - DNA, 211 bp, Arabidopsis thaliana columbia
attatgtgatatgatagttttcattgaatatatacctataactataaaaagccaatggagtgtggtgatgatggtataaacataaaaatagtgaaggctgcagccattggaggaaaagtaaagagtgttggatgtgtttttaaatgtgaatttcactgcgaaactctgctccccactacagcttgcgtcaatcggtgctataaagagcgct

SEQ ID NO: 32457 - DNA, 133 bp, Arabidopsis thaliana columbia
cttcatctcgtcgaagccactgcgcacgatgaccttgacgtcctctccccccaggcgccgggccgaacggagcagtccatggccgtgttgccgccgcccagcacgatgacccgcttgcccacctgggtcacgt

SEQ ID NO: 32458 - DNA, 626 bp, Arabidopsis thaliana columbia
aacataattataatccagtaattagaagcccaatatcgttattggcctaacttcaggcccatttgtcttatattcaggcacgacgggacaatgatcgccgtttcttacaaccactctccgattataaaccctagccgcgtcttcttgcaaatttcaatttcaatttcactgagaagttacaatccagaggaaaagattatctttttccttctgggttgagggaaaagatgaagaattctgagaagagaggacgtaaacacaaaaggcaagatgcttcatcggcggaaaacgccggcggcgaagttaaagaagcttcggctaatgaagcatcgttacctcaatcccctgagcctgtttcagcttctgaagccaacccatctccgtcgcgacgcagtcgtgggagaggtaaaaagcgtagattgaacaatgaatcagaagctggtaaccagaggacgtcgtcaccagagcgtagtagatctcgtcttcatcactctgatacgaagaatggtgattgtagcaatgggatgattgtttcaacaactactgaatcgattcccgctgctccgagttgggacactgttgctaaagtttgtccttcaatggatgctgtcgttaaagtctcttgt

SEQ ID NO: 32459 - DNA, 586 bp, Arabidopsis thaliana columbia
tccccatcgtagttatcaaaacttcttcaaatgataatagttaccttgcaaggtacgcaactcttccttagcctggttttgttcagcttccaaacaatgtaggcgctcatctatttccactctgtgttcactgtatccaataagattttctttaaagctctgcaggaaaattcaaaagttaactcggaaaacaaaagttagatcattcgagaaatcgttctgcttttcctaggcataaatgaaatgtaaacatcaatatctgtggcttaaatggtgatggccatatacctcagtgaactgtgccacatccctcaggctcgggccagtttggctactgagagccggtgaatatgtggttgaagccatctttgatttaggtgttaaacccatccttgaataagatgtctcatctctttgaagtatttgagcaggtgtaagctgaatctgtaaatcaagaggacatgttatcaacaaccggcattttctactcattgtaaaaacatattgcaacttgtaagatactcagtcacaacattactcctttaactcagatgaactcgggaaacgagaatggaaaccttgaaag

SEQ ID NO: 32460 - DNA, 456 bp, Arabidopsis thaliana columbia
atttgtgagagatatgaagaaaacacatcgaatgtttcccaagaaaagggaaagaggaataccatttgtagtaataaagtgacttcttgatgactccaccaagatcgatatctggaacaaagttctgtcgttcctcgtgtcgaatcttctacgtttcgaaaagaaactaaacttggctcaggtgtccttaaacaactaccggagaggcaataggcatttcggggtaggataaatttgctctgtttcttgattaaaccagctgcattactgctcttctgtatgcatgtgatttagtatgcttggacaagaaacatcctctgttcctcgtcgctaaccactttttgtaaagtaaatacgcctcgcctggcctctgcaatctggtatatttgtttgctagtatcaaaaatggaacatgatctatagttataccagttgcttgtatactcgacagaaggc

SEQ ID NO: 32461 - DNA, 679 bp, Arabidopsis thaliana columbia
tcaaagttgaagcagttcataagcaatggtcacaaaaatcttacccttgtaccagtagctggtgaagttgtaggatttgctgcagatgttacaaaagaataacttcacaaacaaaagagatgaaaagagggaaaaaaagacttcaaatataaaaaactcactttgttgagtattatctccaccttcaccgcctctccttgtcggggtcttcaatttcgatagataaacaaatttgatcataacgataaaaggaagaaacattggaaaccctaagacggaaaaagatgccgtaccgtagttggacctgccgcctgagaagatgaagcaccggcggcatctacaaatttcagattcgaaatctagggttaacaaaatcgaaataaaaaacctaaaattctgggtaaaatcagaagtaaaaattgaaagagaaagcagatttaagataccagtttgattccgaggttgtgacctggtaacgcgatgcttggttctcgccattgatttttactgctggagaaatcgcaccatgagagagagagaggaatcgtaaaatcggaaaagagaatcgacgaaaactgcgattatgaaagtcacctgctgagaaattcccgctagatacgaaagattagaagattggagcggaacttttactttcccgctcgacactcaaattttgatt

SEQ ID NO: 32462 - DNA, 620 bp, Arabidopsis thaliana columbia
cactcgtggcaaaatgaaaactatataaaatcaacacaaaatggagggaaactaaaatttacgcgctaatgagtaaagttggttaaagcttctttactctcaacatttggacctgacgtcttgtcgtcgttatttatgggcttggtgatgttttattgggcttaaattttgtacatttaaatgcaaataaatatttcgttctaaacaataataacgaaatcgaaaagcccaagacatgttatactcgagagccaacagtcaagctgatttcaacgtatctcgtcacgccacgtagttgattaacagccgaagatcgccgctgataaagaactagattgacggctgacgagttaatacgtctgctctactgtcaaattcacaattcaaagcgaggtagaaaattagagtcagagtcataagagattatgagtaatcaaacgaactttcaccaaattgcgtgtttccattgttgagaatttagcaaatgaaaacacattacaaaagcgaaatagcaaaaaaaggaaatcaaatcttgctacatttactaaaatacctacattgaaattctcaaatctaattccagaaacagattccaaacacaaatctgaaaaccctgatta

SEQ ID NO: 32463 - DNA, 392 bp, Arabidopsis thaliana columbia
ttaatcagaattactcacttcatcatggttactgaaaaaatgtgcttgggcctttatagcaaagcagaatgttgactcagtgtcgtttggattagttacaatattgcccctaaggtttggatttaactttttatctctatgttgtatttatcaagtcgtcgtcgcagtgtggagtggactgaagaatattcaaagtcgtttatcatcgtaagaaatggggcaaaactggtctcaaataataattgctatgtttcttgctctaatctcttatattgccattatgatttataacaaatcttgttctaactaaatctagccgaatgttttgtacatgatacttgtagccaaatgtatttaatacgaatatgaatcataaataaattcaattatat

SEQ ID NO: 32464 - DNA, 587 bp, Arabidopsis thaliana columbia
catatcttagtaattcggatcctatatctagaagatagatgggcaactgacaacacgtcacgattgacgaggtccttaatgaatccaacaccacataattaaagagagctaacattaggataaccatcctctcttctttccgacttccatattttcttgtttttttcaattctctatttagagacaatataattaagaagaaaatgaagactatttctacaaagtaaactcatcttgttttgattgtaatttcaagttactaattcatcagatcatgaagaccattccattgatattcatcgccaccatcataatcttgacatcatttccagccacgatcaaagtcgtcggtgccaaaaaagatctaccattttgcaatgtggagcttctaccttgcgtcctaccttttaaagttcgtggtcacggaagcaaactgcctaatggctgttgtgagaaaatgaaaaagtcaacatcatgtatgtgtagattcctaatggccaaggaacgtgacctgaacgcagctgctcatagaatattctggttttgcaaaatttccgtccctaattgtccaaaaatctagagatata

SEQ ID NO: 32465 - DNA, 522 bp, Arabidopsis thaliana columbia
  unsure (1)..(522): unsure at all n locations
aatctgcaaaactaatcatttgcagccatgctgattcaggaatctctctccggattacatgatagacgttaaaaactagtgtgattcttgattgttacacgtccacgcatcgctgcacgttcaagttacaagaagttaaagttcaatgtgttatgatatgagccagactgcagaacaggcaaaggctgagctcactgtgtttccaaggcaagatcttcagagctctctcatagtctatttgtgtccttttctgtattcttttgtccttggacttcattttcttatataatatttttgtattctgtgactgtgaaccaatgatgaatgttatggccttggattcttttatgtgttgcaattttttcatgccacatttcaaggaaccatcagtttactccatcaagagtatggaaaacatcgaaaaaccttttaaatattgatatataaattagtataactagaaactanaaacgtttttcgataaatgaaataggtgttaaaattctaataacataattggac

SEQ ID NO: 32466 - DNA, 594 bp, Arabidopsis thaliana columbia
ccctgacccatattgttctttcgctgtaattgatatttgggttagttgggctttaattttgtgtaagtggggttcctttcacaattcctttaagagagttaaggatgtccaaaaaaagagaaaatttacaagtttagcctttaaaatatttatatactgaaataaaattgaatttccctccaaaacattttttagtaaaaatatatactttgccatctaaagtaaattaatatatcttatatcaagacataaaatcacaagtcacttaatagaaatcataagaaatacttacgaaatattagaagccttaaccaacaatagtatattcggttatccccaattacattaaaccgaatcaaatgtagaagaagcaaaaccaagcctaaaataaaatttatcagtccctgaaccgctgatttggtgatttccaatttagggtttaattaatgtaactatataaacagaaagtatttgggttagtgatcgctttctccaggagaaagagaaaaaagaaagtttaaagaatctctgacagttacggttatggcgacggcgaatatacgcgacggcgttgtttccgatcaatttgactat

SEQ ID NO: 32467 - DNA, 439 bp, Arabidopsis thaliana columbia
atatgaatagctacaatatttttgtaggtgtagtagttgacttgagaggcctaataactgaacaagtacattatgtttccttttgtcgtttaacaatttttttacatagatatcacttttcaaagaaaacaaactaaaaatcacgatttctgaagtactccttgttaccacattgcacttaaaccaagattccaaatgtgtactgatgagtgatgactgcaaaaataaggatcacatgaatactttaacagctcactgaaaattcaagactaatttgtaaaacctactaattggaaatagatcgagactgtttcctaataaaaaaaccttgactgcattaaatcctcaaaaacaaatttatgattttgttgtaaaataccaccaaatgatcataaattcctaattcatagtctcctcttcctccggctttgggtcgtgt

SEQ ID NO: 32468 - DNA, 248 bp, Arabidopsis thaliana columbia
gttccaaagtgttcaagttatataatctaaaaatgttttatcaccgatttaagtacgcacgaatgtttgaaatttcggagtcgatatcttattgaaatggttacctgggaatattgcctcataagaatcttaggataccgatgaccctgtaaggaagcctagtcatgtctcgccctatattatgagatgctcatcatatcgttgtcatgcgagtgcacacagaatccacggctcctactgcatccggt

SEQ ID NO: 32469 - DNA, 557 bp, Arabidopsis thaliana columbia
gaaacaaatgatgtacaataattaatggttttgttggatcaaatttggccaaaatcgaaactaattggcaattaataggtgtttttcttctcaagggtgtgttgttgaccaaaatatgtttttttgagttagaacgacgtcgtttccttggtccaagttatttagccatgtcacggagactcagaagtctctccctcgccgtcgtcggcaagaattctcagaacttatttttttggttgtgtgacgaatcatgaaaaagagatacgaaaccgaacttataggaagctctcgcggcttttcaatgacctaagatagaaacagcgagaaagatcacagagtctttggaaaatttggtatcagagtacttcaatcgaatccgtcacttctcttaaccctaaattccagagtaacccgtctcattctttccgaccctgatattcattgacgactgtggttgaaggattatgtagagcttatacttaacaacaccgattatcaatgcttacgttaaaaagggagattttttggcggtagaaaagattctgaaggtgatgaag

SEQ ID NO: 32470 - DNA, 406 bp, Arabidopsis thaliana columbia
tgtgttcatgtagatgatgctctctctccttctcaagatgtttcaggaagatatgctggtgagatttcaatatcaatatcaatatatgtttgcctattctggttcttattctgagctcttatgtctatttagttatcattgttgatttgtttgctgatgggaaggtcttagatcagctgcaagaggtactttacatggttatgattgttagtattattagtcacatatcgacactttacctgttgatgtattgatttcgattttctttaggtcccgatttggttagagctggctagtaggctaatgcctaacggtcgcattatggtgaactgtgcgggaatcgaaacagaacttcagaatggaaagcctcagttgttgttagatgactcagccgggatgttgaatt

SEQ ID NO: 32471 - DNA, 720 bp, Arabidopsis thaliana columbia
ttccttaatttttttcagtcaaaagagacgacattatgggcatacatatgccgaaaagcacatggaacccaatgttaagggtctcttagagcacgtgcagtggtgtctatagattatatactatgttcttacatttgatatatcacacattaaaatacaaaagtgatattctgaatctggtcatcttagaactcaggaatatttgaactactttctttcccttcttatttgaagtatatcatattgatgtgattggtaatttgcataataataaataggatttgccattccatcatatgttatttgttgtactaatctattttatgttacatttcgtgccctagtgcctagattattctttttttataatgattatctgactaatagacattaaacctttggtttgacaagatatcttttcttttcgtatagaattcgaaatatttgattttaggttgtactatagagctagagtacgaagtcaaatacattactttgcgtttaatgaggaataaagatgtacaataaataacaatataaacgtaaatgtagagaatgtaggtccacggattgttggagagggatgagagagacagagaaacatctactatatataagtgtaataattgtgtatttatgggaagctctacttttaacaagaccataggcttaacagctatcctttcttggaaatgaaagtaagaagggcacgcttgttgg

SEQ ID NO: 32472 - DNA, 497 bp, Arabidopsis thaliana columbia
  unsure (1)..(497): unsure at all n locations
ttagttttctctcggataacattacaaagactaatgatcagagattcaaagtatcaaaaatacgaagaaacattacaaataaattaagaatactgatcagacacatatagaaacataaacaagttactaaagcgttaaaaaaaaatccagaacctatttccaaataaaaaaagcacgacatctagaaacaaactccacatgaaggcataaacttgaatctagttacaaaatatctacttattctttcaaattatctacgttgaattattgccacaacaaactccactatgtgaaatacagtcaaatgataataagtcatctaacaagccatctattattagacaaagacaataacgacatctagcaacatacatataaaaatacagaacatcaatcaagtgattagacaaaaacaatcatgagacaaactatgtgtaacaaaggcaagcatataaacaattacagagactanaaagaagtcattaacatagaaagac

SEQ ID NO: 32473 - DNA, 507 bp, Arabidopsis thaliana columbia
ttgacctcttgtgatcttattgtgaccgtttgtcgccatcttccccattgagttttggttttgaagggttatgagttcattgttactacttggtaacaaatttgatatatcctccaaggaatactctagcactttcttcaccggatttagactacgtcggaccaaatagtttccaaaccacctggttcccaagcgactttcacacaaaatcaagcaaaccagtgtccccaatgtaatttctagctgcatccctcacttcttgtctcgatatccatcggtattcgactcttttcagtgactctatgaccactttgatagccatttggatccgtttttgagaccatctgcagttggtactatcaatggagatgatttggtttcgggagttactcatgtagttatctcttggaagacgtgaatggagatgaagcatgaacctgaagaggtcactgagagtgatcaatggctcggtggataaactttggtactttgacaagaggattggag

SEQ ID NO: 32474 - DNA, 438 bp, Arabidopsis thaliana columbia
tttgtgaaagtgttttccagaacatgcatgtgtgcatatagaaaatctaaaaaacatataagtccacgtacgatattaataagtttaatttaaatgttacacaattaatcaaaacatattcatttgttttcaagctcaaaaacgttttggttaaatgtaagcctgtatataaaaaaaaaacacaacttgtaaattaatttgatatccaagcattataaatccatgttttttaagaaatagtttctttctatatcgcttgaatcgacgttattttaaaattaatgcatgcgtgtaagtgtagctaaatacttttaaaaggcgaaaataagaactgataaacatttttctataatgcctcataggccactagttataaactagtaatttccatatgtgaaagacccagaactgtgtgtataaataagaatcgtcagccat

SEQ ID NO: 32475 - DNA, 531 bp, Arabidopsis thaliana columbia
gattcattttttatcaaaaaaaactactattaactatttgttatcctcaaggacacgaatgaataaaacttaaatcattaacaagaaaacagatagcgtaaagaatttatttgatcagttattattgacctataaaatttgatttgatttatgtaagggtagtttcgtaaatatccaataaaccatcatcatcttcttattcctggctttcgtctccacccgccgtatatataaaacctgagacgaagcttgatgagaacaatcgggcaaggcgttatagagattacacaacacagatagattacacactgagaaacagagaatggtagctgaggccttgccaaatgccctgaagctccactcgtacttggactccaacccgcagctcttatcgataacgtcgctcctgttgattggtctttactcgatcaaattcccggtgatcgcggtggctccattgccgtaaccagtcttctctgtttttagcggtatttgagatgtttcagtgaattatctcgttttttgatgtgg

SEQ ID NO: 32476 - DNA, 476 bp, Arabidopsis thaliana columbia
tatttaggattttaacttgatgaactctcataaattcataatcgtattaagaaattatgttgtaggtttttttacacaaatatagaaaaagtaacttttaaatattttaattattattttgtttatttaataatactaattctctttctctccttattctataggttaaacatgaatgtctcagatattataaaattttgatacttctaatagttttaagagatattaggacacgaatgtttattgaattataccatattgtagattctttattaaaaagattaattctaattgatatgagtgacaacattttggtagctagctcagtggttcattagttacatgtacagtttttgttttgtttaaatcaccgtgtgatgtacgattatgacatggtaaaccattatgaaggttatcatcaatatagctctctttgagtattccgctaatcttttacagaatgtctaaactctaaa

SEQ ID NO: 32477 - DNA, 443 bp, Arabidopsis thaliana columbia
ggatatgtatttttggtcaaaaatttatctctttgtataaattattttagttacgaaacttcgttgcccaaaatataaaattaaaaaaaaatacgaaactaccttctttatttatttttattcaacaaataaaattaatttaattaaggatagaaaatgaatcgaagtagtgtactagtggtatagttaaagaaaaacgttttatgtaccagcttttatcacaacagctttacattgtaaccatgtttgaataaatcaacgatgaaagtcgttaaaaaaaaaaaacgttttctgtcaacaaatctaattaattaggacggttctaaaaaattaaatagaatttaattacttcccaaatttgtagttatttttttgattcccttgaaattaatagtcttttttttcccacaattttataaggaattttacacggttgttattcc

SEQ ID NO: 32478 - DNA, 497 bp, Arabidopsis thaliana columbia
tccacctccaacaccaagtccttgtcgacttgtcatgaacgttatccctttccattttgcaacatagtgaacctgcgacacaacatttgggttaagcatcaacgcttgttaaaactgttagcatttacatgtccaaagtaaaccaggaaacgtattcacaaccgtactgcgacccgagatcctttcacagcctctgctccattgccaacctttatatcatagtacctgccacaatataaacagaaaccaaacttgtgattattgcgagacagacttgatttttcaatcctgttttgcggtatgagtactgtatcgaattcaaacaaaagatgatgcattggattacggacttgagaccattggggagagtcgtgaaatcgctttccggtaacttggatgcacgtagctgcagagaattgtatgtaagagattgagttttgagtcaagaacacaatgtatgcatagatatatatattgcttacagctcttctactggt

SEQ ID NO: 32479 - DNA, 630 bp, Arabidopsis thaliana columbia
gtgttttggagtcgaatatgacttgatgttatgtgtatgattgagtataagacttaaaccgcaaccggatcttaaaggcctaagaattgtatcgttgttagaagacacaatgccaaagactcatatggactttggctacaccatgaaagcttttagaaggaagaagaaggttggttagtgttttggagtcgaatatgacttgatgtcatgtgtattattgagtataagaacttaaaccgcaacacgatcttataagcctaatgataataagtttttagtcaattattcctaaaacaccaatcatgtcgttgtagtattttaggtgtcaatccaaatgggtgtgatgcaaagagatgagatgtgatcagaagtcactaagtcaagccaagcaataacagttttggggttctaacagtcctaagcgaacatgcagaaaacagaagcaataacagaattactaaaatcactcgaccacaacaggctgatgccagaagtaggatgtggtcgagtaacaggtcgagtaatagacaggatatgaaacagttatactcgctgcacagtctgttgcgagcactgggtgtggcgaatagttggcgagtgatgtaaaaactagaacaggcaatgagacga

SEQ ID NO: 32480 - DNA, 544 bp, Arabidopsis thaliana columbia
  unsure (1)..(544): unsure at all n locations
cccttacagaagtaagagaaagctgggaaaattacatcatcgcgataggaagaaattacggtacgaacacgggaagagcgtcttggttcagcagtagctaagagggctttatcgatgggtttgtgattacgctgctgaagaagctgaaattgtggtaaagctacaaaattggactaggaatgaagcagaaatggaaggaaaaaacacgaaacctgaggcgttttctttgtaatctgagtcagagtcttagaaatctgggaaattcctaaatcctgagattcaataatcaaaattgataaacgaatcagagaaggaggagaagaagaaacgcggtaacgatgaagggtaacttgaaatcgcttgtgattctcttgaagacggagcttgcgagcttcctcataggccatggccattgcagagtttcctaggaggagaaagaaatggcgcttcgtttgaatttcgaaatcacggacttcntcttgttaattaattaataactagttgggcctatttgggctttaactaataaaattgatcatttttt

SEQ ID NO: 32481 - DNA, 618 bp, Arabidopsis thaliana columbia
agagatccagtgtttgatcaaaggatgtggtggcacaaagacctgaaacaccagaatcaaattcacatctttcactttcaaatcaaactcaaaaaaaatctgaaaattgaaatcctagagttttattaccagcatcctgttgctcccgttaatggaagcctccgacgcagccattttttgttctagctcgtatagtccgtcgggaaagtgacgaagaagaagcacccaaattctttaaaataatccagaaattcgaaaatcaaaattcagtttgaatatgcaaaaggcgttactggaaaagtgtgctttggacattagaataaatatatatatatactcgatacctgtgcgagaattggggaggaattaaaggagaggaaagaggaaggattagggtttaggcggctgctgcattgttgtcggggagcaaaacgcagcgtatcagaagaacacctgaaagcgttaccaattgagcacgccattttcgacgagatgtcggaatctggttcgagatttttgcaatgacgatagcgcgggcgaagattaaccggtcgtcactactgtaccgaataactttgggtctacttttacacggcccatggcgttttatattaattt

SEQ ID NO: 32482 - DNA, 484 bp, Arabidopsis thaliana columbia
cctaaaacgcagtgctaatgttatgaactgcagtgctgctttgctaagtttggcggagttggaatttttatggccgaacaaggtaaaacgcaggctaaccttacacttacacatataggtattgtgtgtctttatttggttgcattctgtttttgtgtgtgtggatgcagtttcttcatcaaagttattctggagaagagatatgcaatggcgtatcgggcgattgatgcggttaccactcacttctttagatttcataaggagacgaatgttatacccgtcatttggcaccaaacacttcttgcctttgtgcaatggtaagtaaattaaattgctttatttcgtttcgttttcttatctttagtttcgatactctggttttggttacgagacgtatagacatatcagatcataagtttataataatgcactatttagttttctaaagactctcaaagcacacaccttgaagatttagaattat

SEQ ID NO: 32483 - DNA, 478 bp, Arabidopsis thaliana columbia
tatcatcacccaccattcgaataatctttgggataaacgtcgtttgttgaaatacaactacagaataaaaaaatggtttaagaatatggcaagtgcaacaacacctaaaagtctaaaaacaatatccttgaagcatcttaaatctcttaaaatatatcagatgtgtgacgaataatcaacgcatgctcttgtatccataaacttcaaaagccaatcgaaagtattggataataataataataaatgcagtggaaaaaaaaagatgataaaggaattttcattacacacacacacctacccaaacaagtttttatataaacagtatccaactctcttctttaccctcaaacccaaacacataaaaaaatgagtcaacacaacatcttagaagctctaaatgtccgggtcgtgggtacgggtgatcggatcctgtttttggcccatggattcggtactgaccaatcagcttggcacttga

SEQ ID NO: 32484 - DNA, 558 bp, Arabidopsis thaliana columbia
caaagacaggttgctatttctggaagattgtcgcttttggaaacccattttttggccattagattttccatagctccatcttgccatcagtttgcgcggtgaacactccgaaagattacgatccggttttctcgactcagccaccccggttttttgctgcctaaattaaagaaatctcttgatttctacaatgtttaatgatgagttaaattggtagcaagaactatattttgtttcaacttcaagcagttaaaacttaaaactactgaaacagtttttttttttttttttttttttgtaaaattatgtagatcaaacaatatttgtataaattttccatctttccattttaatccaaaggcttgtaacattaggcctgtttatgaataagtcaagcagtcacttcgcttacactgaaacggtgacgttttccaattgtttcgatcttttagtttagttttctcgttcgtcgtcggtgacagtgagagctcgaatgcagtagcagatgaataagaagaaggccaagagagttccattagtttctgcattcgcatgctt

SEQ ID NO: 32485 - DNA, 605 bp, Arabidopsis thaliana columbia
  unsure (1)..(605): unsure at all n locations
ccatacttgatgtttcgtcatttgatgatgtataaaaccatcataatcctgaaaacttatcactctctttcgaggatctgtatacgaaatcctgcatacacattatcttctgagatatattctaaacaacgatataatttaggtataaatttaaacatagtacaattatgaaagtataaaaaaacagatttcccattataatgatatcaaatcttcttttaccttgagggcaacatttttttgttatttaattaaatttgaaataaacaaattaacatgacatacacaaacttagcgggacaatcaatactaaatagtgcttaaattaaacgaatggtagcgacgtgcccactagttgtcaacgttaacgtcagatatgataatataaatgaacaactatattgatccattattattacacaaaaccaaagtgattttatccaacaataaatttgcattctctccatctctgctaaccgcaacagccatgacttatgtgctagaaggacacgagcatcgtgtatccgacgttaacgaaggttttgaatgcgatgcttgcaatcgatcctacggtgatggnactcatgtggtgaatgcaagttcga

SEQ ID NO: 32486 - DNA, 642 bp, Arabidopsis thaliana columbia
ccctcaactcgcacggtgctgcaccataccaccaaagcaagaggtcttgagctgctcctaagttgattttgtgggggcttgtatcttataatctcaaacatattttggattataaagataatgaatgaatgtagtttccttttcaggttaaacaaggaatggtgatcaaaacagagaagaagggcttgtttattattacaaagggagtaatggagagaaaacgcaagaatccaccgtatatatatcattaacatgatcataggcttcatcatcttgctcgctttcattaacaacatcatatcagtttagctaaatagcatcaattcttaactaagcattctctctgatcctaaaatttttatgaatatgtaatttatgtgtgtgtgtgttgtgtatgaactagagatgaaactaaactgttctcaacctttatatatagcttacagatttggttataggactttactgtgtctgttctcttcaaattgggaatataagttgcttgtggcttgttatctcattttcactgcaaaagagctgctgaatcacccaaaagtagttggatttttaaaaagtgtcccaactcctacaattaaccttaaggaccttttaggccaaccaaaatcttaaggtccttaaaac

SEQ ID NO: 32487 - DNA, 527 bp, Arabidopsis thaliana columbia
ctgtcttttagcttcttaccaacaacaacctctatccatctaaaaaaagtgaaaacatataattggtggtttggttgttgagtgcttacacatttgatggtctaatgttaatgtagtagctctgtgcttgttacagttctatggtccctggctcgagaaatccaatgtggggtgaagagttcaattttcccacagatgaacttcctgctaaggttaaatatcatttactgctttaggaaacttatttcaccttaaagttgtttagactctcatgggaatatgaggcagagggtttatcactaagttcaaacacttgatatctcctagtatgagaatttcgcttatatatgacttggtaaagaaatatgaaaaacacttattcttcaaaatagacatatagattcagtaactttgaaaacatgcacctgttatgtttaccagatacctatttctaacatttactattatatttgttatggcagattaatgtaacaattcatgattgggatatcatttggaaaagtact

SEQ ID NO: 32488 - DNA, 930 bp, Arabidopsis thaliana columbia
tgttgcaataatgcttgattcccttcattctttataattccttttgtaaactatcttaaacagagtatctaagttaagttaacatattaaaaaaattctaatgtaaatttatataatcatcttcattttattggatccaaaaatcttcctcaaatataaacccaaaatcctttttctttgttttggtaaaataagtaaacccaaaatcttcccaaatcaatcaaagcgagaaagagctatgggtgcaagcaatcacgataacgatttcaattctacgacaaactggaaactcgtcgacggtacactcatagacgccatctcatttgaatcctccttcactgcaaaccccgaatctgacgacggaatcatctctgccgccgtcgatcatgtaaccaaatccccgttacttcttctccctccggttcccaacggcgagccttgtgaaattacaagtacggtccttaatttgtcttcgttcttctccgagattctgaaaaatacactccgatccggtgttattaaacctctaattgttagtttgaagtagatcgatagtgttaatacgataaaattgatgataatttttttggtgttttgtgaaatgtgtgtggttttggttgcagttacatttgcacaagaacatgaattaaggcaaatctacatccgaagtagtgcacgagtatacgaagtgtattacacgaaaaagcgacgacatgataaggaatatctgtgtactgttcgatgtggtgttgcaattagagatgaagaagtgcttcagatccctcttacagagtcagctgattctaaaccagtaaaggatttgatcgagaggaaggttgcagataatggtaatggacggacgagcgaagatgattgggttgaagtgaaagctagtgatgattctctgttgaataatgaaaaacaggtaac

SEQ ID NO: 32489 - DNA, 599 bp, Arabidopsis thaliana columbia
caaacaaaacaagttccttcattaaatctaaatgatgactgtacaataaattaacgcaacataccatgtgtataattttttctaaatttagggatgtacacaattgacgaaacatcattttcataatttgattttttaggggaaaatcattaatacatacatacacaaaccaagaaaattttattgtcattgaagagattcatggtcacatcatgaactaaaaatcacagagacggagaaaccaaaccatgtttcttggtcatcaggatctctctgaaagaaaactctgatatgcaacacaccaagaagctattagttagctcataatttagtacgttcaaaaaatacaaattaaacacttaaaaccaaaccagtccttaaaaagatactaaaagcataaacatcacccagcttatattgatcttagattactctacttgcatttgactaactcaaaacaagatttaacatgcctaaatccaacgagctgctgctaaatttctctctattacggctctcatttttttcaacgtccatgccacatttttctgtgtttcataatatctcctttagcgataatcaataacttgagtcttgac

SEQ ID NO: 32490 - DNA, 527 bp, Arabidopsis thaliana columbia
tgaaggaaggaagagaatgaaggtgtttctcaaagtttgggtcttttccttttctttcttctctcctctttccttttttctctttccttacaggtaactattattcctcagcttacacggttccacatatcccggttttattaaaccgaaatccggttaaataaataactataaatcgtttcaaattttcaaactaatacgttatgttaaacttaaacccaatatcaatctacttattatcaccatacttaaatttcatcaactcatattaattacgtatcataacgattttttaattttccggtttagttcggtattttggaatttggacttataacacgcgtagagttttaaatcatttttaaaagttacaaaaatgtgagaaaattgggattggctacgagtaagaaatgcgtcaccaagcgtgagagctacgcgtgccgattggtgagcggtaaagatagtttggcacgtgacttccatccatcattatgagtcacatatactcaaacgtaatcccacgtgac

SEQ ID NO: 32491 - DNA, 493 bp, Arabidopsis thaliana columbia
catttttgtccacaagataattagccaaactttcaaaatcaacgtttctaataattctctttcgatagataagctagccaagtcactcaagacttgaaacacttctttcaacaaatcaatgtggccaaatcaatggattgttgaagctcaatatttacttcgtattaacacattattttcaccataagtctcatataaatatatttctatctctattaagagtaaatatatggccctaaatgttttcccaaaatttgatgccctatttggttttctccattgtggcacggctctgtatttattcgttaaatatagtaaatttgctgttactattaagaaatccaacgaaataaaatagtcaagaagaaaaaataactgaagcttattagttttttattgtttgcttgcttaacatacaaaaacacaaataacagaagattactattgggtagagagtgagagatctctaatcgttccttgactcagagatgaa

SEQ ID NO: 32492 - DNA, 528 bp, Arabidopsis thaliana columbia
gaatattaagtcaggtctgaacttcatttgcatcattatgatttctgtgaaagttcatgagttgtcttttgacaagggaaatgcttgtgcttgtgttttcatgtgctaattgtagaattcaatatgatggaaaagctagacaccaggctaaattatgtattttctattgatattacttggttcaagaggagccaataacaaagctttcatcacatagtaagataaatgaaacataatcacataagaaattttgtatggactaaaagattgcagtattttacatgaagattaagagatggagacaggattcaaacaatggtgcagccacttccgctttcataggtattaactgataccatgtcacggggggtgtagtagcagtaaggaatgaaacaagggtccttcttagggtctggttttgggtctggttttttcggtggtccgacgctgattactactggtttcttattgatcttcttaagctgttctgctacgcagacccggatccatagtaccaccacggttagt

SEQ ID NO: 32493 - DNA, 580 bp, Arabidopsis thaliana columbia
  unsure (1)..(580): unsure at all n locations
ttgtttttgtaggttcaaaagtagatgtttaacaatttttcaatacacaacaatttctatatataaaatcgattggaatatgccggcattaacaaaaacaaatattcataaaattacatgtagcacactgcacatatattaatctaggtaagaataacaagttgaagtcgatgtagagaacacaaatgcaaatgaagtattatatattacacacacacacactctgatatcacatatataactcgtttttaaaactacttttactgttttctatatatatagattatttgcaagcttgcaagaggagtcggaaaattaagaaaattatcctctctcttaacgtctgcgtcctctgcctccacggggtggatcatgtctaccgttagctgtagggtcactgtagtcgttggtgctcacatcaatgaccgttctggcaccgacgtcatttcattttctgtcatgtccatatttggttgtttatatacatttaaacatagtactatactagataaaattggtaacaatantaacaacttttgtatataagactatcgtattattacaactagagtattaagat

SEQ ID NO: 32494 - DNA, 530 bp, Arabidopsis thaliana columbia
cataatttcaaacatcgtccctatcaggttgcttaatgcttatatatgatataatcaatagaagcattgttacatttgcaaatcatagatgatgctagttctgtgacttagtccatgattagttcttattgttttggttgtttttcataggggaatattcagagtctcactgctgctgatttagataagtataatgcagatgcttggcttctttctcctccttgtcaaccttatactagacaaggtgattcatttcactgttgttttctttactatcaacatgacttgcttttggatactaacagtttttttttggttaggccttcagaaacactctggtgatgctcgggctttttcgtttctcaggattcttgagcttatacgcatacaacaaagcctccacaaatgttatttgtagagaatgttgttggatttgaggtatagtgtttgcttatgcttcccagctagagtacttgttctcgatcatcttctttgaagtcggacatttttggttattggtggtgtttgtt

SEQ ID NO: 32495 - DNA, 616 bp, Arabidopsis thaliana columbia
ctaaatcctaaacttgtataagtttgattcctattgtgttttgaggttacatcttgtgtgcagatgtaatcatgttgtttgtgtttgtgtttgtttttgtgttgatttcattgtttcagtgtgtgttgattttgctttatgttggtatctaatgtataaataatggaattatttgagtcgactaaaccggaaaatcaaataagatcaaaccggaaaccaaacataaaccagaaaaaaaaacaaattgaaatcatttcgttcaaacctctgagcattccagcgactgttttaggttgaatcggagatctcttggcggagagacatacaccggctagttcaatcatccctgtaaacccctgaatctttccgttgaagaaactaaagtttaaatacctaagagaacgtttacttatgagagtgatgtgatcgagacttttgtgagtcgaggtttaaagattcagaagataagcgatatgtctcgtgaatcagagaacactgatgatgaaccatcgaaatgtatgtaattcgttccctctatgtaataagctttaagatgcgattgaacacgataatctgtgtataatttagtcctgttggatacttgattaggattagt

SEQ ID NO: 32496 - DNA, 549 bp, Arabidopsis thaliana columbia
gtcaatgcttgtttacaggattctcacctaataactactgttatgccgctttaactgtaactatctactctttcactaaggttcactctaatggaagcatgtcctgtttatgctttgttcttcttccgttggtgactctcctctgataaaaatttccttgatttctgcctagttttgttcatatctgaatctcaaaagaattgctagaacggagaaccaaacaacgacactatatgtacatagattgttttgcatacttctatgtcaggactcaggacacatgtttctgctatgattgtctggtgctgtgtggttacctcttacaaggagttcacttttctgaaatcgaagccctaaacatggcctcgggttctttcagatagatggtgggataaatcttgtgatccagtttcagcagactctgtttcaacatctttttgcccgacagattcttcttcaggtgtcagcaatctagccttatagagttaaagctcgcgacttcctcccagtaaaatcgaatgttaatttggttagggtttagagaggttg

SEQ ID NO: 32497 - DNA, 489 bp, Arabidopsis thaliana columbia
ccgagttaaaacgtatcaccccattttgatgtgatctcaacgagaaggcaccttcaatgtcatcaatacagattacctcacctctgcaatctttcagtctttgacgtgaaggcaaatagtcaccttcagaaattcctattggccatagtgggagattttagatacatccacaatccttcaatagtttgctgttccccttttagtttcacgctggcatgccaatcataatttatcaggtgaacacgagtataaggaagctttccactggatttgataaagttcagcgattcttcaaaatgttgtactaagatacattcctgatttcccttctccacttcttagtaaattaacgcacacaataggtacaaaagcccttttcttctggttttctccaacaggtgcatctagattcctagtagcataatcgcttgcgtaacctttggtaatactctgtactgcctttataaggatccctatctgccacataaa

SEQ ID NO: 32498 - DNA, 813 bp, Arabidopsis thaliana columbia
gtatgagaaactgaaatcatgaacgttaaggaaccaaaaagaacagagaggatgaggttatttactggagaacgtgtgaagccatgaagagttcaggttcacctccccacacgtgtggatcccgaatttgtctgacgtaggtgtcgaaatctccttccacgaacctgatgagaatcatcagaatgagtagatgcaaagaaaaagctgctagtagttcgtaattaataagagatcaacaaatgtgatgtataagtttaagagtagtccatagccagtgaatgaagttgaaaattggtctgaaagcatgaaaaactcaccattctgtttcctgtcttctttggataaactcatcagcaacctatcacattcaaagataacacatagataggaactttgatagatgaaattaagacctaggctttgctgaagcagagagaaaaagtactaacgatgccatatgaatccaattcaacagttactttgatctttggtggcaaagtatgacagataaaaactcttaaccatagatacttaccctggtacgtaattcgtcagcgagttctctctgcatcttctcgcctggagctagtttcccagagcgtaagacgaatccgtgagctacagaacgaaacaaacatctgccatcccccggaatacctaaaaaaccattgtcattttctgatcaaacaacggtcgacataagactaagatgagcaacaatattattggacacttaccaatgatagagtaatcagtataaactcttttcccattgtggaatttccatcagacgaatgatgatgcacgttgtta

SEQ ID NO: 32499 - DNA, 461 bp, Arabidopsis thaliana columbia
taaaaatttgatgaagttgccaaaatagagatattaggatcagagaatatccaaatcgacataagtttgtattcttctagacttggtgtcaatttctctcacatgtgtatgtgttgatgaaaagaaaacgttttgatattttgtgtggaaagcagcaacccaaagaaaaacataaaaaggccggtacgggggagaatcataaatgatgattataaaatcggtttagtaatatcataaacgtaaaaacgacgacgtagcttctttattaaaaccttgttctctccttgctcttgttgttccttaacctcgatttgatttgatttgattcaattgtcgtcgtccggcaaaatcacaagctaacttgtttctcccgagagatatctatcatcacaatctccttccttcgtgttcatcaatctcccgccgcgcttcaggtaaaattacctccaaatctggttgtt

SEQ ID NO: 32500 - DNA, 573 bp, Arabidopsis thaliana columbia
tcaataatttcccgattcaatcatccaaggacatcatacagacctaaacgagagatcagacgcgaaatcaaatagaaataacaataagagaaacaggtaccttgaaagagagaatcgttcgaagagatgtgaagagcgatctaggtttttttttacttttttctgtgagagagatgaagaatcagagcagaagataatacttcgctagaaaatagccttcttatataatggtgaccaaaaccgagttttaattaattggcccaaaaggcccaaaggcccaaaacattatttattttaaatttttttgaacatcggctaaatagttgcttattagtgcaaatgtcgagatatagttgacaagctacttagaaatctgcaatataatgcttattagttattacaatttgaagccaaagagactataaaatgaaacattgagaacaataacaactcataaagaaaaaccaaatcattagaagaaacaaactcaaaatgctaaaggaactcgaaataacaaaacgcacaaccacatttttaaaaaaatgaacaatgaaactaagagaagcttaatta

SEQ ID NO: 32501 - DNA, 572 bp, Arabidopsis thaliana columbia
cagtacacataacacccccaaatggcacaataacattctacggaaattaattaacaatactagcacaatacacataaacaaactcaaatggcacaataatattctacgcaaattaattaactatacactagcacaatacacataaacaaattcaaatggcagatcaaaataaagatattgtttatctcaaacaaaaatcaaaacataatgttgggcaggtaatcgtccatttagtcttgaaatgtttggttcagtaaaagcattgccaatggtaaggaccattaggagttcttaattacaaacatttataacttaactttgcaaaatcaaaagtttagaaaccccatgagttcttatgttttacttagtccaatggtagaacttctaatgaggttcttaaaatttaaatttgtaagaatttgtgtttaaatattttggttaaaaaatttatgtgttttggttctcaacttgtggttatgtgttctggttttaaacatgtggatatggttttgaaatgtgtgcttatgtgtttaagtgacagcacaaggacgatacagaggacaagtgattag

SEQ ID NO: 32502 - DNA, 929 bp, Arabidopsis thaliana columbia
tgcatatattctacgtatggtaatggaggactatgtgcgtttttttttgtatgtgtgtaatattggtagagaggtctatctcaatgactattccattttaatttatggggctccagttggtgggcgatgtagatttgtcccatcgacgcttttcgaccatatgagcgcttgccttgactcttcctgttctcgttgattttgtatgtatacgcttgtaagtatttagaaatgttttgattcctagcctgtatcgatccaacggtcgagctagccgcatgcaacccgacgtgaattagataatgctcataatccgtagtaggtttgcgggaaattgttgtcaaggactcatgttggtttggtatagaggaacatccatcatataatcatttcgagtgtaattctacatttctacctaatattttaccaaagtcgttaactcaaccagggaatttttggttatccgaaaagaagagttttaaagatcccgaggtcgagtattagtaacgtggaagtgactatgaatttcgatacaaaaacttttgctacttaaaaacaaaaataaaataattaaacaaatcgagattaagaaagaaacaaatatccgtgaaaaaaaaagaaacaccgacaccgttaggtgagtagaaaactctttcaaagcactaagtgttgatataatataatatcacaaaagcatcaatcagtcgatcgcaaatagacatttgcgattctataatagaaatgaataaaggtatattagttactatatttgctataatgaacttcttatgaaaactaaaacaaatttttagtgatgcagtcgttatatatgcgcattacacctccaagaatactcaaatacatcgaccatgtacatattatattgttagatctttagagcacactggcggacgagagtcgagtgacctgca

SEQ ID NO: 32503 - DNA, 219 bp, Arabidopsis thaliana columbia
  unsure (1)..(219): unsure at all n locations
acaatagcattctagcggaattagttgacgatactagcacaatacacataaacaagctcaaatggcagaataagagtcgactcaaattaagtaactagagactaagacaatacacgtaaacaaattcaaattgcggatcagaatagagatattgtttatctcgaacaaaagtcaaaacagaatnttnggcatgtaatcatccatttagtcttngaatgt

SEQ ID NO: 32504 - DNA, 576 bp, Arabidopsis thaliana columbia
  unsure (1)..(576): unsure at all n locations
tatttctattaagagctaaagactattgagccatattttactacaatctcgtcttcaccacatctagatcattctgcgaaactacaaaaataatcctagctactttggttaaaaaatcgtttgtaaataatccagagtgattcctaataagagtcgcaatcaccttttgattatcttgtgcgtgttacatacagtatgtgaatgacgttaacaccatcttaaaaggtacaattcatatgcatgaacaagcaatttgtgaaaaataaaatcttttagttttctatatataactatataataaaactatcaaaatgttattaattaagagtaatttaagactattaaaccatattttacatctcttttttacattactatcatctaaagtagttttctagtttttaaaaagatggttgagtctatcataagtctttctgatagtgaatataagagtcacaatcaccttctttttttatatatatatgtgtagtgtggattgcgtatgtgattgaagattgacgtaaacaccatttaaaaagtacgatactanatgcacacgacacaacacaacacaca

SEQ ID NO: 32505 - DNA, 541 bp, Arabidopsis thaliana columbia
taaactcctctcttcaccacatctagtttttgctaaactacgaaaacaatcctagttactttgctaaaagaatcgtttgtaagtcaaagtcttaagtcatccatgagtggatcctaataagagtcacaatcaccttttgattatgtagtgcagctggttatgtacgtatgtgaatgacattaacaccattttaatagtacaattcaatatgatcaactagcaatttgttgaaaaaaatcttatagttttcatctatataacaatataatataaaactatcaaaatgttattaattaagagtaattaagactattgagccatattttacatctcttcattacattactatcgacatggttttgaaaagatggttcatgagtcttattgataaagaattttaagagtcacagtcacctttttattttgttttgtagagtcggttgcacatgtgattgacgattgacgtaaacaccaattaaaaagtacaattctatatgcacacgacacgacacaacccgggctataaataagttaagacatt

SEQ ID NO: 32506 - DNA, 563 bp, Arabidopsis thaliana columbia
tcatttcccaatgctaacgtaatactataatttgttcccttaatcctattccctaacgtgacttgtattgagtgacaagatttggaaactcaatttctccatatgtccaaacacaatgtttaaaacgaccgagtagcgccgactaggtgctcatagacgttgtacaaatccaaccttgccggctgaactatatggtttatgatttgttctctagcattctcgtctaggcgggtcttggcgcattttgtacttttaaccgatgcaaacaaaaatcacgatcatttgaatttatttcatttgtgcaaacagcaaagtgaatatccagagatttctcgacttatgcatttttgtatatacacagacacatacgagaattttaaattgatgagaagaaacacataatatatattaatcatcacttgggagaattagagtctccaccagccaacatggaaaggttagagggaacggatgtgccacgagacatcccgagtccagcgttacgacggtggtaacggcacctgaaggagccagggtgtgtagttggtgcgcataacagtttt

SEQ ID NO: 32507 - DNA, 313 bp, Arabidopsis thaliana columbia
cgatatagaagactcttggacttgtttaatttagggagaaaagaatggaaaagagcagacccatgcatcaacagaaagaggggttgttttatccgtagttaattcctttaccaaataaatctcaacaactttagaggtaattttgatttgaaaggagacgttttagagaccaaacaaatggtggttcatatactttgttcctaatacattttaaacttttttttatcattggaaagtattttaagtatatttgattttttagatcttggagactaaattttagattttggctagaaatctattccaattaaaa

SEQ ID NO: 32508 - DNA, 763 bp, Arabidopsis thaliana columbia
caggtggagattgtaaaatgtccagaagtgggtaatgcagaaagagtgagagttgtgccaacatttaagatatacaaacttgggattcggatgaaagagattgtgtgtccaagcaaggaagcgctggagaaaacagtgaggcactatggcctttagcaaactcaaaacacttaatattcacaaaaacaaaaaaaaggggagaacttgtcagtaatctgatttgattcatttattgctctgttagatttagaaattgaaagagagagattagtaatgtgtaaatagagcagattttggctacctaggtggtgaaaccatataaaataagcagagagaaaaccattcattcatgttgtcaaaacatttttccatcaataaaaaaagtctttgtctacgtattctttgtctctttgattaacactagggtggaattaagtcttaagcagtgttacagtgagaactgtacgctataatacatgcagaccaaatgcgagccatgtgtcttaaacagcaaaacaaaaaatggtgtcgtttcctcaaagcacctcccttctttaacggcatagttctattaacatgtttcagggaccacagtcagactttagacgacgtgcaatttaaacgtattaacaaatgtaaacgattctgagacagagaccagaaagaaaaagacaaagaagataacattaagattcactgtctctgttcttgttacacttccagaaacagagtcagtgacgtttgatacaatgggaagataaga

SEQ ID NO: 32509 - DNA, 354 bp, Arabidopsis thaliana columbia
ccgaagcgtagaagaattatgatttgattgtgacaagtgctatgtttaagggaaacagacacaagtgtggtgatttttcattgcccttaagtgattcttgatgtgattttaatatgacagtgattatttttcaaatactctttgtttattcacatgataattggtatgtttaggtacgatgaaatgagccagaagttcaatgttgaatacattgctggaggtaattcatcttttgagctatcaatagacatttggtgttcatgtgtatttgcagtatttttgatattttcttgatttcgtttggctttcaggtgctacccagaactcaatcaaagtggcccaggtaaaggataa

SEQ ID NO: 32510 - DNA, 586 bp, Arabidopsis thaliana columbia
taagaataagtaataagaatgtaaagaaagtaggctctgtacctcttccttcacacgcgaagttgacatctagattcaatacatagattggctctgctttttgattttattgctccacgttgaatgttccgacttcttctttcttcttcttctgtggaggtttgttgccaaagtcttcctatgtgactatgtcttgtcttgtatgcatactactactagcctcggctcttatgttcaacaattactcctttctttgttttcgtagccatacgaatcatgtatttttcatgaattggcgtgccttccctgggtttttgttgttttcttatgaattgggtcagtttctgtcttccctagcttttaaagctggtttcattatggtttctaataaagaaagaaaaacggcagctttaacttgggtttcggaatcgtttcattcaatgttggctctcttcttcttcgtgtcttgtgactttggaatttcatctgcattctctttcaatcttagggtttttctgtatttggggatgcttttgatccttcaacccaacttgtgtgtcgttagagaatgtgatttggatgtgtg

SEQ ID NO: 32511 - DNA, 625 bp, Arabidopsis thaliana columbia
  unsure (1)..(625): unsure at all n locations
nnnnnnnnnnnnnnnnnnnnctaaagaatgaccctcttgcaagtgcataactttgtggataactcaggaaggaaaaagtggctttcgcgcaccttaggtcagacaaggtgtccgggaaagtcaatgggaagagaaaaatttgttaaaaataactgttcggcgatttcttgaacggcataataggttagataaattgatatagatggcttattaatctttttgctaatgattgcaaaaattgatctaagcacgagtcatcacataatctgatgtatcagttgtggtcaatatataagcgaatgtaagagattgttgatggcgaaatggttgttttctattcggttattgttaaatgctaagccattttgttaatttaccttatattataagaaaattattcatgactttaatttagtttaaatataactgatatccctgaaggttattaacttgaattatgacgcactgatattattcatcagataataacaaaatagccattgcaccgggttgaacaatttacaaaagaaagatattccatatcgtataatgcgattaaatacgccgtcttatagaaaatgatggttagattaatatgcggattactntctacgcaaggagtatt

SEQ ID NO: 32512 - DNA, 553 bp, Arabidopsis thaliana columbia
tgcaaacaaagatcataagagtaagttcttccgtatacataaagtttataaaaagtctatatatattcctctgaagaaagtgagaaaaagtttcgatttgttcccagatactctgatgaggaaactgctcaaaggtctctccaaatggaccggtaagtattaggctattcaataggattcatatgaaatttaaatctgaattgagtgatggtttcaggaatagatgaagtgtaccgacttaaggtcatgcatctacaagccaagaagcttctactgggaatatcagaagaaacattgaccttgggcttgaaggaacgttccgagacagtggatgaagctttactctttgcagtgagatatgggaatgtggatttcttggtggaaatgatcagaaacaactccgagcttctatggtccacgagaacaagctcgagcagtactctgtttctcttggccgtcgagttcagacaagagaaggtgtttaatccctctacggtctggacgacaggaagtacttgttgctcgcagacaaggacagcgacggcaatggtgt

SEQ ID NO: 32513 - DNA, 650 bp, Arabidopsis thaliana columbia
aacaatatgatgagcggtgtagaaaatttgtaattggatttctagcgttctatacaaaacttccacgaagatgtgatcgcttgaatatgacacaacataacacgtaactgagcttggcttgataggtcggctggtatctaatgaggatattattagcaccattgaagataagaagataataacagctgttagcttgtaatatagtttgaaattccttcgaaattgccaacaaatatccgacaacttttctgacaagtttccaacaaatagttgtcattaatttcagacgaattctcctttgtcgaaacatcgttgcaatagcctgaaacaaacgaaattctaacatttttgaacgtcgttagttactatgttttgtggtagttcaacatactacattaatgtttattggtgataaaaatttcgacaacattttaaataaataagataacaaaattttagtgtcaaagtagatacgtacagtaaataattgttttgtcatttatataaaaaaggaatatagaaatagtataattaaggttttgtagtctagttcatgacttatacgagttcatacgacttttttaggcgttgtgtcgtatcttttatgcgtgaagtgacggtccaaagagtttgaattttcgtggaagtga

SEQ ID NO: 32514 - DNA, 587 bp, Arabidopsis thaliana columbia
taagtttcttaagctggtttagtttttcctcgggtatctccgacaaatctgtcttataacaaagaaaaacttggttaatacgaataatcccactacttcctagacacattcccagataaagaataaactcttaccagcatttttaacactttcggacaatatcaccaaacgagtcttttcacaggtaggatcttcagtgatgggcttaattcgcggcatgttaagcatgtatctacaagtaatcaaaccaagaaatttccttttcatcaataagtacacaaaccaaaccacattaaaacacaattcaattctcataagctccgaacttgatttcacaaagttcctaactacttatctataaatgcaattactaacagatgatcctttgcacagtaagttgagttattgaagaaacgtacccattgagaatgcgagatgcgcttttacagagttcacggggaattctaagagcccagagcttgagattgacatcgaacttgctttcatcaaccatggtgctaacggtgtcgttttcaatgtttgaatacagaaagagaaatgtgaagaatcggcggaagagagatgac

SEQ ID NO: 32515 - DNA, 1060 bp, Arabidopsis thaliana columbia
cgactctttggaaattctgatacactctggtcagcttttttctttatcccaagaagttcaagctgacgatttgataaagaaaactgatctttggtttctttagagaaagatttagtttctcctcgagcagcaaactttgctctgtgcaaagatatgcctttggacaaagccatcattgctccaatacaaaacaaagtcaccagcccctgccacgcttttacagtgacatctgaaccacaaggtaagattttagatatattacgaaactaataaaacacaaaaggttaaaaaggaaatctctcaagaaaaaaatgcaactcacaagctgcctcttgggatatttcccgaatgttaaagcattggtcaaccatttctccctgtaacataagataaacaagcaaatgattatcatggtagatctttcccagattgagcaatcctaactcacagagaaagcaaatgataaagaataagaactaaggactcaagtcgagattttctagctaaccagaaatattccaaaacctagacaaatactccaacaatgcaactaagagggaatgtacgaagctcaagctaatgctggcaagtacccggccatgaaggagatgagagagaaagcggaagcgatagagagcaagaatatgaatagaagaacggatttcgaaggacggatgctgttggcggtggaagcggcggcgagagcagggttccggtacacagagaacttggagggcttcggagaaggggacgaaccctgagtagtgttgttaatcttcctcctcacatcagaatccatggcaggaaacgatttctcgagcaaaccaaagagaaggaaaagggttttagggatcgtcggattttcccggctgagagctgctctcagtcgctgcttctggtggacccaccctaatttttattcatacccatcatattatttgaatttttagttttacccccaaactcttattttggattatttattttataacagaattataaaatgtgtaaaaagaaaagaaaatgtggacagttttttcaaattggtctagaagaatga

SEQ ID NO: 32516 - DNA, 515 bp, Arabidopsis thaliana columbia
taagactcttattaaaagctaaccattagtatatttgagatatgacgcggcctgcacccattagaaatcacaaaagtgcatgtcctagaggccgtttacgtagtgcggctagtaaaaagaaaagtaggttatttaatatttttatatcattgcacaatttagcgtttttgaaataatttaagtaaaaattcaaatgttttgttataacacaatagaaattctactactgaatgacaagatttgttaagcatacaaatcttttgcatgtggatgcaaaactcgaagctgcatatatgtgaaagaaagaattttagagttttgagattttattatgtagacatgcatatcttcaatggccgacaagaacacaaatcgattctactaacaaacgaacaaaatgtttgtgagtaagaaaataaaaatggaccgacaatagatggctaggtcgacaaaaatttttattttcttcttctctttagacctgtgttaatagtccaaaatatataattatttgt

SEQ ID NO: 32517 - DNA, 521 bp, Arabidopsis thaliana columbia
ctcttcacaccttattgacagacgattggtcttttaaactatagaattctagatgaatataatacaatagtttgacactaatataatctacaactaatacaattaaaaatgtcgaaaaagtaactataaatctcgaagacagccattgaaatttctgtctttcacatacgtgagggcgtgtttcatatcatccgatgtttcttctaacgggaagtcgcgtcggtccgtacgtaccaccgtggtaacaaataacgctggttatatgccatctagcttttccaaacaaggaatgcttgccgttttctaaaacctgctctgacctcaagtcggcaagcagtgtgctcacttctcagtgtctgtcatttgctctctcatctctcctttcctgcccttaacataatttgatgtttacataaaacagtttgtccattttttgttcttatatattatccttttttttctaatatcaaacttgttatcaatgtgaaaatcggagatatatcatatatttcaataaccaa

SEQ ID NO: 32518 - DNA, 514 bp, Arabidopsis thaliana columbia
cctgattgttgatggttagttgaaagattagtaccaaagaaatggattagtctagattagtgatctaaagccaaatgattagcaagggattgattgtattagcatcttagattcgcatttgatcactcaagtcaataacctttgttggctcttttgttgacttttctagattgctccttttatcattccattttgttcttgtattatgttgggtaattgcgtaccttagacacttatttaaattggtcaattgcctttgttcatattttccattagcattttaggttttcttgtttttatttcacaaatcttgttagtttaaaactcatcctttatttgtttaacttagaaaattttgtgcattcctagtttattgtggattcagcccctaagaacaagtccagtaaaagtttttagtagatttcttagatgggttctaggcgtaggcatttgggtacccgttcgggtttggttcttttttcgggtatcggatctattcgggtaggagattgag

SEQ ID NO: 32519 - DNA, 521 bp, Arabidopsis thaliana columbia
ggtatagaggagaacttaagatggtattatcattgcttaccggtttagagccaaaacaacaaaggctagtattcaaagggaaagaaagagaggatcatgaatatctacacatggttggtgttggggataaagacaaagtgttgttgttagaagatcctggcttcaaagataaaaagcttcttgatcttaacagcatttccactacttgtccgactataatcgtataaacaaaactaaacaaaattgtcaaattagttgttttgtcaatttctttgtgaaataatatcactcaagaaaattaactatagctatggttgtcatgaattaaaatagacattccataatatcattcgactatttctaagttgtaaacaagctaatatgtttacatgttgtaatatagtatatgtcaaagtttaagagctcatgttttaattagctgtttgctgaagaaacatttaaacaagaaaatatgatgccccattaacttctcatttttattatcattattgttcagatga

SEQ ID NO: 32520 - DNA, 622 bp, Arabidopsis thaliana columbia
  unsure (1)..(622): unsure at all n locations
agacttgtcgtgcttgatttttccttgttttcttttagtgaggactaattgtactaaattattatgcatttagccatctttgataccacttgaatcaccgaaatttgagttctgaaactgaggagaggattttgagtgttgagtatatgtgatgtgttgttattaactcatagttcaatatttggactagacagttttgacctggtcaaccatttccaaccataaatgtaagtatgtaacggtacgtacgaataagaaaaacttggaattgaattcaaattcaaatttggcaacttcaccatcaattctcgcaacttttcttcttttctttttgttttctctaagaatccaaggaaaaactcaaaaaaggttaaagggttcgggcacacattcttttactttctcggattttctcggaaaccaaagaaagccaaattcttgggaaaagtttcaaagcatctgggtccaagacaaaagatgaacacttctatatgaacattatacattttgatgtacaacataaggaagaattaatcgaattgataatagaaacgaagcacaatctttttcttctgaatcttatatttacattgttgaatgacaaacganaaaatatatatat

SEQ ID NO: 32521 - DNA, 523 bp, Arabidopsis thaliana columbia
ccctaaacaaaaataatcgtcacaatttttgccactatgtctaatgtatatgtgattgttttacctttaacaaaagaaaatgtgatttatttacctttaacaatatgaaaatttgttttttttaacacaattagtaattttagtgatattttcactcgaatttgttgatagcaaaaggtgtttagaagaccaaaaagcttaacgcatattggctcggctcggccgaataagttagctggacagtacggtggggcacacgaagatccttaaaccgcagcctcagacaaaccttactcgaagcaaaacagtgtttggttcgttcgtgggggtttaaaaaaaaagaaaaaacttttgtatttttttccattaaaatatttttttgttaagaagattcaaaaggagaacgcgttagacacactaagggtgggggcaagggaggagaaactcgccggacagagacggagatccctaaaccgcagcctcagactaaagcttcgcatcttatctccgatccatcgttgac

SEQ ID NO: 32522 - DNA, 572 bp, Arabidopsis thaliana columbia
caaaaaatatttgttagttatatttgcgtcaaaaagtattcgctacttttcctttgttcttttttatactaaaccccgttgaaagaagtaagtaaaagtgtaaacatctttgaaacggtcaccatctcaaaaagtaacatagtaaaagcaaagagaaatgaccaactgtatctagaataaagatattaaatcaaaatacaaattcatcaataaaattaaatttcatattaactcagatattaaatttaaatagacacaccaatttcttaggaagatatatgttttgatgttttcagtttagtcaacagcttatatataaataaaacggtttaaaaaaagttataaaaaggtggtacaacgtaacataactaaccagtccgctttgatatgttttgatgtttatatttatttaatctttaatggccatttgtattatatagtagttttactctcgttaattttataagtgaaatactaaactattttgttcgtacagaaaacaaagagacgaaatatatatagaattaatgttcgagatgtcggggctgggctgggctgggagtggacagtaa

SEQ ID NO: 32523 - DNA, 551 bp, Arabidopsis thaliana columbia
gatttgatttgtcaattaggtagttcttacttcttactacattgatgtcatgcactttcatttagctgtcattttagagaagaaattacaaaaacgttattattttaactaactacttatgtggaatactatctcatttcgggggtacattgttttaacggtggcgataaaaagtgttttgtaacagtgaatagagaataatatactgttgacacatgatagtgtaaaagtgaacattatataacgaacaagtgtgtggtaaatactatcaccagggtaaagtaaagacattgttgtattaatgtgacccatgctgacgaaaatatgtatgtctgtgactcataatgacaaaaattattaatcatacatcatgtcatcactttgccttaatttgttggttaatatagagcatatgttggctaataaaaagcagaagaagaaactatcagaataaaaattacgagaacgttacaaaagtataaaaattagatgcatacatgtgttaaatgttttataaagtgtaatttgtgtggagtatacgatttttgaac

SEQ ID NO: 32524 - DNA, 760 bp, Arabidopsis thaliana columbia
taataagatatgtctccaattctacaaaattataatacaaatttcaaatttctgattttaggtatatacaatctaattattcctcttccatgattcttttacaatcttaccttctcttccgattttagttcgaaatggaatcattagtttctctggcgaatccaataaaaaaaggatatcatcggtatgttctcttcttcttggcaaaaacacattctccaatatgtatcggagattttacttttgtttcttttcattttaacgaaatatgcattagtcttcgtagaagtagcataccagtaaaaagatttttatttttaaccttatcacttcagcgtgggctttctcttatttgcaggcccataaagcgagagagtaaaaaagagataaagtcgctgcgagcgaatcaagttcggataaggtccaatcacaacacagccacgtgcgaatcccaggttattgaacagtaaaacaaacggctcaagtggctcactccaaccgttctcgttaaggcaaatcaagttctgtttctttttctgacttttgataattttggatatattttcctaattatatatagacgacgcctgcgctagatgaatttgttgtgatgcgaacgaaactaacgatgtacgaagcaatcaaagacaatgatgataatgatcatcaatggcgagagaagaaagacattgagtctgctcttcagatttctcgttcttcctctcttcctcccgacaaggaacgattagtttcccttgat

SEQ ID NO: 32525 - DNA, 453 bp, Arabidopsis thaliana columbia
  unsure (1)..(453): unsure at all n locations
taaaaacatataaaacgacaaataaaacattggaataacgattaactttaaatttgactcagataatatttttcctatctattcaattaacagacaccaaaagcaattagatttattttcaaatttatcttcagaagatataaaacacatgtgaaagactttatgttttgttttgtattcttctccagtcaatgaaaaactgccacatataagtctcttagaaaccaaagactacctaagctaaggtgcataccttgcttaatttcacatttttgaattatttttcaacttttttcataaggatttgtgcttagaaactcttaaagattacgaatgaagatggtcttagtacttgttactaaacaatattttataaaatattagggaaaagaataaggaaantataatacatttcattttaaatagtaactgtagtttatgtggaaaatttgg

SEQ ID NO: 32526 - DNA, 879 bp, Arabidopsis thaliana columbia
gactcgatgtgatatgatttttttgttaattgtttccgaattatgctttaacactctaagagtttgaataattgcggcggttggagtggacaaatccgtttaaggattggactgctttttatacaccatttataaaccacagttcatttttctacttttctggatccatactactatagactatagtttatgaatagaagataatctaccttgtcatttattccaatgccatcgtcgagctctgcgagatcgaacgtgttattcttcatgcccgcatgtcatttatcaaacgtggcctcatctcaatcctctacatggttcaagtacaattataggctatggttttgatggtcccaagttacaattatgacatctgagtaatatcgtggctgttttatttgacacgtgttatcatacactccttagagcgagcacttgaaaacattggaaaacagtaaaaacaagcactaaatctttgtcaaacgttggaccaaaaagagcttcaacaaaataattacattgtccatttttagataaaatatttatacgtggtcgatttcctaaataacaaacttcatcacaacgcaaaagaaaataatccacgagttaagtaacaaaagacattgcataagaagccatacttagtagtatacaatgagccaaggctcaaaatgacatttacataaaaccaaacaatcctaagcctctcgggtttttagtaaaacctttccctttgcatcggcctggttctgacccgagagatatcgatatcacctaaagacaaaaccagtttcagtaatcgcaaaggtttttctacaaccaaaaacccaatgatttatatcgaatttttaccgggacgcttcagcttatcgcggatga

SEQ ID NO: 32527 - DNA, 967 bp, Arabidopsis thaliana columbia
tcatatgaccaaaaagtcagtcttttcaccgtgcctgcgctgattgttcagggagatttttatacgtgtttggcggaatggttgatggtcttcttcagcctgcagcatcgtctggtctaaggtttgatggagagcttttcatggtggagcttgttcttggcttctctgacctagaccatcaacaaagaccccgaaaaagcatgtaatagtggtggttccttcttttgtaaattagcagattttgtttaaaagcatatcgagaaaccagaaatggaacccacatgatcaaatctctgattacagaggaacacaaaagatgtgttgaaactggaactttcttatagattctgattcagtttacaatatacaaaattccatgacagtggatgtaaatatgtaatgtaaggacttgtttgaattagatacaaagaatgcagaattttgtgctatgaaaaacaaacttgcttgcctcatgggttgagtatcaatttggttctccacatctctgccatgaccttcctcggggcgggatcatctggacctttgtctctttgtcctgaggtgaagtataactgtccatcccaatacccagccagcgttgtcttcacacggtatggtaatttcccaatcacataccatttctgtagaggaaaggcaaaatcattagctttgtctcttggacaggtttgagtaagaaggctttaggattttaccagtgtatttaagttgaactggaagatttcaccaacgagaaccatctttttggtttcaggatgtttctctgttgtgcctccaacgattacaatggagttattaacgactttccaagcaaattcgatatgggagtccggttttggcatcggcggcataactttccatttcatttcctcatccaacatgtagacatcactgaataccacctgaaccaaacttaaagaacttagttaacagaataatagcttaattt

SEQ ID NO: 32528 - DNA, 480 bp, Arabidopsis thaliana columbia
gtatatttgaaaacatgtaaaaagtcaatgaacaatgatgtttgaaatataacatttggctagtttgataattgttaatttgtatttgaagttttatattttaacatttttctgttgattataaaacgtagaagagagtttgtttaaaggcttagataccttgaggttcaagttgaaaacaaaaaaaagatatcttgaggttttgtaagcgatccacttttccacgagaaaacgcgagattttcacagacccacaagtgcatgcatgacgtcaaaaactaaaaggctaatctgttttgctattattttatcaaggctattattaacatgtatatagtgatatactaatataattccggttaagggctctggaatgtccggtttatgaattaattaagatgtaatcttggttcatttcttggtttaatgtgttgttgctgtataaagatataaatcgcaaagattcttgttacgtaacaga

SEQ ID NO: 32529 - DNA, 510 bp, Arabidopsis thaliana columbia
tcagtaaacgaaataggttaggtgcttcgcaatggctgccaaggttgaaacgggcaattgttcttcggagctccaaacattgaagatgaagattttctaaaaccctacaaacgcaaaatttggtcttccgtcctcggaaagttactcgtttttcattttctccccataaaaagctaattcaactattaacacccaagggtcaccggttttattatggttttcacaccgggttaaggacattaatttggaatcttgaccgacttagctggttgaaccggaccgtttccggtttaagaagaataaagacgcgggcggggttgaattaaattgattttcagaggaaccgaaccttcacctcacgactctctcactgcctcactcaccgtcaccgtcgccgtcgccgtcgccattgctttctacttcgccgtgcctggttagttttcggaatctgattttcatttccatttcgttccttctgaattctcaactttgtctgcgattttcagaggt

SEQ ID NO: 32530 - DNA, 432 bp, Arabidopsis thaliana columbia
aactccttgtggcttctcagatcagatagtggcagccaaaataatgacaagaatttatattacaaacgcaccggttaggttcagtcacactaatcacataaccattttaaaagcaaaacattcgacacccaaaaggcccaaagcctctatctctagttctctacacaacacaatcctcctaattggttttgttcctgactgtacaaaagcagagctccaagaaaaataaaatttctagagctgcagcctaggttcatgatttgttttacacacacagctaagagaaaaaaaagcttcagtttgttagcccaaaaaatgacatgccggcaattatcagaaaccaacccactgtttctgtaagttccttaaagccgcaccattcccgcagaaaaaggagaaggcgggaccgagttatttcacatttctgttgat

SEQ ID NO: 32531 - DNA, 312 bp, Arabidopsis thaliana columbia
agcttttgcagccatggtttcaaggtctctccttcttcttaacgtattctacgaaactcttgacgtcaaatgagattgagtgtcagtataaagttgaagacattaagtgttggggctacttactgatatgcttattagagacgtagtcatgaacaggatggatgtagtattgtggacattaggtcatggtgtgagcagaacttgcattgaccccgtgaacggatgaagctagagtacattgttcgcggagagcaagggaatcttcttgaactcattcagaggattgcaacaaatgaagggactagaggattt

SEQ ID NO: 32532 - DNA, 432 bp, Arabidopsis thaliana columbia
cgtcaccgtttctactttcaataactattgttgttttctacaaagagagatggcgatgttgatgaagatgaagtctctgtttcttgaaccttcttcattcaaaatctcttctaagacgaaacttgtgatgtatccacacgaggaagactctttatctactcaccacaacaagaagcaactcgctgctgcttgattatatttatgcattgggtcgttatcacgttgtgtgatgtaaaacctttttatatatccgagggttcttgattagtgatgttagcttggaatttgttttgtacatctagagattggtttctttactcgatacaagttgaactaaatgcaaatctgataatatttgtgttcatcaaatgatcaaacacataccaaaaacactaaatatacttaaaaatggtacccaaaaaaaggaaggaa

SEQ ID NO: 32533 - DNA, 813 bp, Arabidopsis thaliana columbia
cgtgtcgaagaactgtttctacgtcggaggctgctagaaactctgaagagatctcgaatttgagttgaagtggtcgacctagtgatgtctgtccgaaaagtcgttctttcccggtgatcggacggtagatgtctcgtcggaaagtcgctagtgtgatggaaaaatggctagcggaatttgaatggaaacgcggtgagaaagtgaccgggtagaaaaagactcgccggttgttttgcttttgcatgactttgtccacccaacaatctacttgtaattggacttatatttatagagatgacagtactcgatccaaaacatattcatgaaaaaggaaacaaaaatttattctaccgtgtcatctttatcttcattgaaaaggaaggaaaacaaaaagtttattactaatttaaaatttaattcaaaacaaatcaactttagttaatttttatttcttgatctatctccttcccaagaacaatccgcacatcaggtaatctctctctctaaaatttgcacagttttcaattccaaacaacaacctaaacaatgaaagctcctggaaacaaaacaaaagactccgccatgacactgtgagtgcaaagccaaaattaagatatcatcaaaagtagcattaagatgatgttgaaaatgtcatgaaaaatccagattttgctcgatcgtgttcttgtttcttcagtatgtggcagtagttgagctggcataagagatcacataacaaaagaagaacaatcaatatctgttaaaaggattgcaatttttttatgatccttgataagaaaagagaaacaagag

SEQ ID NO: 32534 - DNA, 489 bp, Arabidopsis thaliana columbia
  unsure (1)..(489): unsure at all n locations
nnnnnnnnnnnnnnnnnnnnnctaaaggctgatcaagcaccattaaggaccgcccaatatcagtcggaaaaaaaaatgtccgcatggacacgcccaatagtctatggacggaccattttgacagctctacagacacaaataggcacgagactacagtgaaaaccgagcaaaccgaaccgaacaaaccgatattttcggattttgaaccgatgatatttgaaatgggtttcggtttttgggtcaattcggttaggcaatccataaccgagcggtttcttcgtttctcttctaatcatcatgttttcaccataacccctatgaagataccctctgcaactacgatagcagaaacaggatgatggagaatctccattgaaaatgttagaatgttagatacgacaacgataaattttttaactaaaacgctaggtttgttgcatttgatgtttctgctaatatggagttgtttgataaaaaaaatatgtgttt

SEQ ID NO: 32535 - DNA, 610 bp, Arabidopsis thaliana columbia
atcccaattttttcatcagattgcaatttatcaacatgagatgatccaccaaatacaaaaccctcattgctgctccgtccaaatccgatctcactaggagttggatcaccggaaaaagatccacggaagtgaaacgggttaaaactctgacccggtaaggaatcagaagtccccgagggcttcaaattctgagactttacttgccttctcaccttagagaatctaggcttagagagaccagaagacgaccgtggaaaaggcgcagaattgaaactcgcgtcagggttattattgctgctgcttcgacccgcaccagagaaggcgggattcaattcgccgaacttgctcattgtagatcctctatgattcaaaaattgaggcaaaagcgaaaatcctcaaggagagaagtaagagaggtcaggtcggcggcgacatgggagatagatagaaagtcgtcgaaatcggaaatggaaagtggatattgaagaagatacaatagaatcaacaagggtattgataaatgttgaatctcttttcaggagatggatcgataaaggagaagaaatcaagaaattttcaaattaatggctggacatcaggagagatattg

SEQ ID NO: 32536 - DNA, 367 bp, Arabidopsis thaliana columbia
tcgactcgataccctcttattataggttctaatcagagaaaaagaagaagagaaacgaacaatcatcagttattacctatgcagtctcatcagtttcctcaagttatagacttatctctattacacaactacaatcatccaccgtcgaatatggttcatacaggactccgattaatttccggcgaagatcaggcacaaaagattagtcacctgtctgaagatgtttttgctgcacatatcaataggcaaagcgaagaacttgatgagtttcttcatgcccaggttttgatttcgtacgagacgatttgggttacgcaaagttttgattttgttttcatcggaaaaagtgtaaaactttttttccttt

SEQ ID NO: 32537 - DNA, 134 bp, Arabidopsis thaliana columbia
tgtactacaaataattggaaaattcttcttgtaatataaataattcaatacagaatttgagatttttaatgtactaatctccattttgtctttatatttttctcttcaacttcaaagatgggaagtaattagaa

SEQ ID NO: 32538 - DNA, 463 bp, Arabidopsis thaliana columbia
agattaatgtgaagtgttcttttcagctttgtcatagaattgcgtgcattctatgtcaacttggtttattagcccactccttttccaacttacaacttcatcggattcttcaacttgaatctcccatacatttcacatataaatatgcatatactaataccacacttgattttaggttttgtaaaagtgaaactaaatcttatcatccataagaattaacatcttttaatgtttttgaaaaaagagaacaattttttctctagttacattcccctcctagctactttagtacccgagtatgataagtataatcaagttggtacccgagtatagatatttcaaaaagagaaagcaagattctatcattgttaagaggaaaatcaacaaatggtggggcttggtggaacttgatttccttctttacaagagtgcaagtttgtctaatgactcatcttgatgtgca

SEQ ID NO: 32539 - DNA, 397 bp, Arabidopsis thaliana columbia
gccagtatgcgtatttgatttttttttggaaccggtgtaggttagattctttcatttagatatgaatcagatttctgaaaatttgttggattcgtgaattctcattgtcttcatgtccattatcgataccctgaatttgtctgaatctccaatatctaagataagtaatgtatgtccttatcttactgaatttgcatgttctgtttttttgtttgatctgttttgttgtttgattatctcttttctgaagatgtaaagagattatggatcaaatgattgttcttcttgtgtttgcttaagaagtatatgtggttttgtagattgatgagtcattaaagaccgtcaatatgacgactactccaacttcatctgggagaagaagcatttcaagtataag

SEQ ID NO: 32540 - DNA, 507 bp, Arabidopsis thaliana columbia
  unsure (1)..(507): unsure at all n locations
ttttaaggaattatattggtcctactattctattttgatgtgttctatattttactatattcaatgggattatggattatagaaatattttgaaaatattatactattatttataaataattcacttagtttcccttcttaagtttcttataaaaaataaatatatcttattcgaaataaatatatttacaatataatnaaaatcatagattgtagatatctaggtggatgatatatgggttaaattagatcatgaatgataaaaatcgagctgtagataaacataagaaggatgaatggtacaatcctggtcaaaaaaaataaaaggaaaagttatatggattaaaatgagaaaatcttcgcttttattgtttattcattatgagattctctaaatgtaaatgagacaatttgtagataatttactaaaaatgtaagaatctgatgatgtacttagatttatgaatccttatccaattggacttataaatattactcattagattg

SEQ ID NO: 32541 - DNA, 1160 bp, Arabidopsis thaliana columbia
cctaatgcaagagagctataatccacataaacatttatcaagcaagctcgacatggattcttaaaacatgggaaacaaattggaaattcagttctgtctaataagaagtggcatgatcatgggtgcatacctcatttgtcagatcaccttccctagaatatgcaagctgattggatcttccaccatacctagagcttgaggatctgatagatgatcagaagccgaattggaataggagaaggtgcacccatatcccatggagaagcagaagacactgcatgtgaagaagggtatggtgataaatcccgttgttaatcttttcccggggttgcaattaatagaaccaaattacaaatattaaaattaaaacacaacatactagttgaacgtggtgtatccagccacggggaggctaaacgagcatcaggtgaagctgcagctaacatgggtgatggagaaggttgaggtcgcctgctgtaactagagcctctgtctccgtgaggactacgttcccattcgtcctgtccatcatcccagtctgacctacctacactccatcaaaaaggccaaataagtgttgtgtttgcaacactcatcacacttatgggaacaaaaaattgaaaatagacaaaattgtatagagataaatgtagtgacatttatgtcaataagctcataaattgatagctttatgagcttcaacaatctttagcatacctggagtcctccaatcgctattgtatctcctacgcttttctccgtgatagtctcggtcagattggcgataagattccctccgtcggtagtgatccatctcatcataagtgtttctctgtcttgaccgcggagtttcacttctgtcacgcctatgttcttctcgatgcctattgctaccacctctttcataactagatgtgcaagataaagtccttggagttatggagatcttcattccaacaggtgaaaaatatgtcagattactaaaagtcaagttgcatgtactcttaaaaatcagttaagtaagtagaaaagatagataacccagggcaaaataatgatttcattattaggatggaattgacttacatctgaagttccagcattctctgtagtcacggtactttctgcaatacaaaaaaataaataaatcacaaatgtca

SEQ ID NO: 32542 - DNA, 1517 bp, Arabidopsis thaliana columbia
tgatgagaatgtcaaattgcttgtatggatctgaatctctagcttcttggcaagcaaatttactctttgagcctattgaatttgaggtatttgttctttacaatcccaactattttggaaacagaaatgtgccaacttataacttacaaagacctgtttttgatctattagggccttggtgcgatcgtacacagaggaatatacgaagctgcaaaaggaatgtatgaacaaatgctacctgaagttaaagcccatattaaaacccatgggaccagcgctaaattccgtttcaccggtcattcattaggtggaagcttatcgctattactaaacctcatgttactcgttcgaggcgaagtacctgcgtcttctttacttccggttataacatatggtgcaccatttgtgctatgtggaggtgaccgtcttcttaagaaactcggattgcctaaaagccatgttcaagctattgttatgcaccgtgacattgttccgagagctttttcttgtaactatccgtaccatgttgctgagcttctcaaagctgttaatggaaacttccgtagccatccttgtcttaacaaacaggtactacaactaccatcccttataaatcgctagctatgctgcagaattcttgtggttaatgacattttccttgcagagtatgttgtattctccgatgggcgagcttctgattcttcaaccagatgagacattctcccccgggcatgaacttcttccttccggaaacggtttataccttctaactagtgattttgaatcgccggatattgaagattcggatgaggagcggttaagagccgcgcagacggttttcttgaacaccccgcatcctctcgacattctcagcgacagatcggcttatgggtccagcggaacaatccaaagagaccatgatatgaactcgtatctgatagcggttaggagtgtaataagagaggaagtgaatcagataaggagagcacaaagggagcatcgccggagtctttggtggccaattctggtggctagagaaagtggaagctcagggattgcggtcagtaacggccaaatcaacggtcaggatttctccgggatgatgcagacaggaagaaagtcgttgcagaggtttagccgccttgtggcgtctcaacatatgccgttgatcgttgttatgttgtttccggttaagttgttgttccttggagctttcaacgtctttagtttccgttgaaaagtttcttttggcgggttatgatcatttgcttataccggttcagaccgaattttggtttgaccggtttagatcattctttattcatatagtatcttgtttgattgtttgttggggccattggaggctttctatgttagatacattggtttcacgcataaaggttgtgaaaaaggaacaaaaggggccagtatttaatatttgtaattataaattgtgcaaaagtattgtcttaacaagtgggaagaaccaatttgattacactctattagtcaacaat

SEQ ID NO: 32543 - DNA, 468 bp, Arabidopsis thaliana columbia
gagttgtctagaatcaaagtgtgaaataatgtcaaattgttcatctgttggatattttccaccaagaaccaaaagaatattcaagttccctgaacttctggcaacattcatgttatatgtatcttcctaattcttcctttaaccttttgtaactcgaattacacagcaagttagtttcaggtctagagataagagaacactgagtgggcgtgtaaggtgcattctcctagtcagctccattgcatccaacatttgtgaatgacacaagttaacaatcctttgcaccatttctgggtgcatatatggaaacttcttcgattgaaacttcccacatgtgcaggtgcgttcgctgtcactgatagaccaagagactgaaagctttcacaaattgccctcaaatcttctgtttctatcgtcatgactccatatctccgaccactgggtcatgagccagagcccactgatttt

SEQ ID NO: 32544 - DNA, 160 bp, Arabidopsis thaliana columbia
atgttacctttgttattcaaatgctgaacttaagcagtgaaataatagaaattatttgaaggaagttattaaggggtttaactattttaagtcaatatttagcttattcatattggtttcctgaagatgtcagaatttattttcagtgtaagacaaatag

SEQ ID NO: 32545 - DNA, 621 bp, Arabidopsis thaliana columbia
  unsure (1)..(621): unsure at all n locations
tgagatgaaaaagatgtgtgcctctcaacttgcttctgaatttcctgaggattgtaagttttatccagcagataccagagatgagttgcataaggtaaatgtttatgactgataattttttatattattttactgagtggttttcaatagttttaatgttcttaattagtagaacatttctgggcttgtttgcagtttatgtggttattcaaggcgcaaaggcttactgtgcctcactggcgaagtcaacgatcatacattgtggctcgcaaggtgtgtgatttatgcttatataagttcattacatttaatctgactctgagaagaaaagggttttatagaaagtagaatatctctgtaatgttgaatggtgcatttaggctgggatgctggtggatgatgaaagctcaggaaagtgcactctacttctctctggttacttgcgtgctccaaactgtctgtaaatcaactggtaatcaagccattctgctatctatatcatgccttgtgctatcccatggatcccttgttaatttagttctcaaattaggtcatgttctggcgttggggatttcaattctccaaattgaagtgctgaagatcattccnttgaatgaaagg

SEQ ID NO: 32546 - DNA, 618 bp, Arabidopsis thaliana columbia
ttttagttttaaaaaacttaataactattacaacttataaattttgaaacatacatgacataatagtttaactaaatacgaggcaaatataaatgaaaacgattagttaaactattgatttgtgcccacttttttccatataagctcgaccaaataagatttcaattgttaagttctagtgttccacatatttttgagatttgaatcatatgtagaatagctaaaatccacttgtgaacttattcatactatcaatatgggtatttaacttatccaagtattgagatagattattaataaaatcattcaagtaacctcttggattagcctgaaatgtttgagaatacgaaaaaatatatgtccactacattacatcctttagagttatactagcgcttgcaagaaaatcctacgttgcttaaaatagcaatggccgttgttcttccagtattcttgagatgtctattcgagaagtgaaattagaagaacgtccaagtcacgttggaccataggtaaggccaaaaagcatcatgcgtttataaactatgtatcaactatcaaatgaatttaaattttaatagaatctcgggagtgtggatctaagggatgatgcagtat

SEQ ID NO: 32547 - DNA, 742 bp, Arabidopsis thaliana columbia
  unsure (1)..(742): unsure at all n locations
aaagttactaacttctatgcttgatgtctagtgagtagtgacttagtttagtaatggaacttaaactatgatatctgtacagttgtactaacgcttccgcatcatatagaatgatagaaaacaaatgtgtatttacggagcgaatctcggagtagtttggatcagtttagtctttttggaaaacaaatcctgtcagatagcttttggatctttcctaaaaacctctaaataaagaatatgaatcgagcccaataaattaggcccatcttatacggcacgtcttatacacgcgctcctacaaacatggataatatccacgcgccaatagagtgcgtggggtcacaacaactcagtatcttatctgtctccagcgtgtcttcctccacgtcacgctttcgtccgacatattattatttaaacagaaaaacaatttactaatgaaaacaaattgacatttgcttacgtggcatatgtttaaccgcattacctgtctgtcggcaagctgaatttttgtgttcggctgcatcgcagttcacgtggatacacaacaaatggatttataaccgtaggatctgatgcctttatatatcaacggataataaaataaggtatttttaacgcgaaaaaaacgcggctaatacgtataaacatctttctgttgcttggaaataatatntgtaatttttcatatttcgtttttaatttggttttattttttcatgtctatttctttggatgagag

SEQ ID NO: 32548 - DNA, 545 bp, Arabidopsis thaliana columbia
ctgaaacatcacaaatttggatgtagagtaattcataagttatagagattaaaaaaaattgtaattttgcaagtattaaagggtttggaaccaagacaacgaaaataatgttagtttattgtgtgaatgtgatgtatttgagaaagaaaagttcttcttacacgtaactattacagagatatcacatcagaggaagatgacaacaaaataatcttttattctatgtatacaaacagaattcactttgaagacatatatagagtcgacatggtttttgctcttttttaagtactaagtgattggtaaccatcttcccgtttctgtctccggtatatcacggcggctattaaaaccacaacagccacaactaccgtcactgcaaaaatggctaaaaagctcaagcttctcgcaggtgcctacaaggaagtgagagatattaacgtcagttaaataatcacatggcaatacactgtatatgtatcgtaaccggtttgaccttaaccgagttctggtaccgggtggagtgattacctcaaaatgttgtt

SEQ ID NO: 32549 - DNA, 888 bp, Arabidopsis thaliana columbia
atgttgtataaaatacttaattgctaatctgtagcaaagtcttgtataatattatattttatgagcacactcaagagtcaagagtcagtgcaaacttcgttcttgctctttctccagaaatttatctaactataaaatttccattcaagaatcagatttatgttagtatcattccagattcctttattagagtagcttttgagccaacgccataattgatttatgattttatttcaagaaaatgaaagcgtgggtgccaagacacctttgccttttattgccacaactccacacacaaatgggactaacacaacaaagaagtacccgttgaaacacaaacattacatcctctagacgaccacggctttctgattttggcgacatccttctgtaatatcttcttatggtagccagttctttgtatcgcggtagaaaagtcgtttgccataggtggaagaaatcatctccttgagaagaggatattgcaacatcaagaagagaagcgatgggaagctggcgagtggcttcagtgggtatacaagcgctggcttgtgacgcattgacgcggaaagcgacgtgataaatgcaacaagcattgaggcaatagagataaacagaatggattgacccaatatcatctttctaggaagtgatacaatgaagtcatcaaaagagtatcttgaggtcagaatgctgaggaatatgagcacagagatgcaggaggcgaagaaggcgagagtgtctgtgaaaatgaacgctctgaaatgtaagtcattaagaataagaggtgacccgaagttccatcaatacctccaggaacagtgaatatggcttgaaaagtgacagttgcaatgagagctgcccgaagctacaagcagtggcagtgta

SEQ ID NO: 32550 - DNA, 737 bp, Arabidopsis thaliana columbia
ttttctcagtatttctctaaccctttttattaacctcatgtatatgtaatatgacgtcctttaacaacaacaaaatatgacgagctggtgattcatcattggtcgcctaaaaaagaaaataacaatttataaaattcataatttgaggttcccatttatccggtttattagatgctatttttgaaattctacacagaacacgacccggtttgatggcacttgtgctgagtagcgaaccggttctactccttagtcctaaatatggttccgtgtaagtgtttctaaactttaaacaacattcgaaggaacccactcctataagacttatggattttgcagttgaatccttgtacttaaaacattttaatttgaataccaaaacttataagaaattatgtagaacccttttaaatgatttcgtaacgatagctacatgttacatattaatttaagttgacaaaaaatatgacaattagtggttgaattgtaaatatatataacatgtagtttttttataaattatctaaagattaatggtcattgaatcattgatcgtgcatcaaagatactacaaaaagaagaaaatcaaatatataaagaaagaaggcgagtgattttatgacaacgagaaacagaacatcactaccaaacatctccagctcagtttcttcaaatagaaacagttaatctctctaaacaattttttgtttctctctccttaaataccagagagtcag

SEQ ID NO: 32551 - DNA, 591 bp, Arabidopsis thaliana columbia
caagttcttgatatacatttattcccgatgggtgaaaaaggccacttttctccatgtgtctctatcattactatcaagtatcaaccctttttcactttatagaattaggcatttctcacgatcagttcctccttccaattattattctgtaacttttgaagtcatttctactccctaatgttacgcgttaaacatttatttataaaaaaagatctaagattttttccaattattccttcaaatttggtatttaattcgtgtaatgaagacaccagatttttccaagtacggttacatatataaactggggagttttgtttgtttaggctgattaaagagacccaagtgcctcctacgctattcttcattttctccggtgaccaatccttttctttttcttctcctctccgtccttaaatagttatataggagcaggcattgttccttgatcaccaagaaatcgctttgacccctatctccttcttctgcaactctttttcagtttcctcaacacaatttctatgcctcgacctactttcctgtccgttgggagagcacggcgatcagtggtggtagctactccattgatta

SEQ ID NO: 32552 - DNA, 691 bp, Arabidopsis thaliana columbia
gtttagttaaaccattctaatgtatttagttcatttacgaactattctaaactttggtttattttatggttaaattttttaagaagactcaaatttttaagagtgttggatggtataatttaagtttacaagaaccgtcaaaatcacctccctcaaattacagtgttcactttgagatgactcaagatgtgctaaaaaattaatcactttcaagactacataaggaataggttgacggtaaatgggaaaacatcttttaaaatatgcttttacaatgaccattttattttatcacatcattatacataatataattaccatgttcggcacgtggtcacagcggtcactttctgcgactccaaaatagacgtcgacggagtttaaattattaaaaagagtcgccacttttgttgaaaggtgacgtcgttgctgttaaaggagtcgccgcaacaaccgccgttttactttctgcttggctcccgtcactgtcattttacataaaccaaggtacccaaatgtaacagaacaatgacatgtcggtgaagaatggactcgtttaatatcagacttcaaatttaggcccatcattacatgaaaaatagataaacagtgcgtttttaaaccatataactcgtataataaatgtttaacattatgcatctaagacaaacaagatagtgggggatgaatg

SEQ ID NO: 32553 - DNA, 191 bp, Arabidopsis thaliana columbia
ttaaatcaccacactctttcttctctgcggcaacggtgaacccagaaggcccaaacatctaaaacatcttctccccagggcttcttctaactcaataagaaagtttaaaactcctgacaaagtctcctgtctttttctcccttcatgttccctccagcgtcttccgtttctatttccctctgtgatgtgaa

SEQ ID NO: 32554 - DNA, 377 bp, Arabidopsis thaliana columbia
cccgtttgaattactatagaaaaccaaagtgaatcaaaatatagactgatgataatcacactttttgacagaacaaagaaaatagcttttgagatagaaaaagaaagaaagaatcggattcatgaaaaataacgttcataatctgaagtatcaagctttcatggattgtctaataacactaaacacagaaattcaccaggaacttattaggtacacatccaaagaaccccagaaaacaagaaaaaaagaaagcctttttagaacctatagaagaggatatctattgtctttgagacaataagagtattgcacgattcaacattagctgaaaccttgtttgtttacctcaaacaatggctggagtcttctctgctagt

SEQ ID NO: 32555 - DNA, 630 bp, Arabidopsis thaliana columbia
ctacagactaattctcccatcaagttgcccaattgtactaacaaacgtcacagagcctctttctggtatcacaactttcgctacaacacaacttaaatcacatttaaaaacgcatccaaactcatagaaaacgctcttttagattcaaagtttctaactttacttaccttgaatcaaccggagaagcaaaccgaagaacccaccattcgcagagaacagattaaggaagaagtcaacgacgaaacctgtgaattccattggtgttcggagaagtctgataatcttacgaaccagaatcgaaaccacgattacccaacggtgatcctctgcttcttcatcaatcgttatcgtgctccattcgcggttatcaggcatctccaagaactttgccttgctcgtttggtcatctctcacaccgtaccggaacaagtctatgtacccacctcggtgcggtcgaacaatcaagtagttcgaaacctgacccggattcgaacccgaacccgaatcgttgtctttgtgcatgtctctgggttttgtatcaatggagactagcttatactatagatatgcatgcatatatattgctctgttttttttttagatttaatttgttgcagagaggagggaagt

SEQ ID NO: 32556 - DNA, 320 bp, Arabidopsis thaliana columbia
aaatataaaaatgatttatgtgtggagaaacaaaccttaaaaaagatatataaaattatttgttcaaaaaaaatgtgaaatagaaattaaagaaagaaaaagagaaaagaaaaacaaattgagaagaaaagaagaaaagcagcgtcgtagagacgcgaggttaaacaacaggtcagagaataggtagagaaaccagaaccctttagcgtctcccaaatcctctcaatcctcggcagctcgatctctcgtcatcggcatcgagctctcgaaaaatgtctcagatggatcccgacgctgtatctaaggccttcgtcgaacat

SEQ ID NO: 32557 - DNA, 827 bp, Arabidopsis thaliana columbia
caattgatgcaatggacgtagctctcacagctggagtctatctctctttctctcacacacatttaatgtgcggtttacagttgaagcaacgatggttacacttcttggtggcttgcttcttcatatactcttttatcttttggtccagtttctattcaatttgtctttttcttctcatcattttgttacggttctatatatctactatcttataagtattttattttgatggtctcatatcacaaattaatccgcattcatttaacattgggtacaattgttggtactgtacaaatgtaaagggctttagggtttaaggctttatgccatgacagagcaagcatatctaaaggctggtcaagaaatctactaagaaaaataataaatatatcataatctataatgtcagcctctctctttaatgccacgagagcaaaattcaccctatgtagtttttcaattcgtttttgttgggaacgcgggaatactcgcaaaatgatcttaatgtacaaaatacttagttaaatagatgtggcaaatgatcgacaaaagaattatcatattcgtatggatgaagaaggttgttacatccatatatgatcattacttgttgctttatcattttatctttcaattaattttgaggtaattgacttgatcttatcatttcatgcagtgtgatcaattaatatatgaattgtgacgagtagaggcctagagggcttatctgacccacctctaatcaaggattgaacctgctaatttttggccgctaccactcattccgagtgctcttgtagatgcgccggtactacgagtgcagggga

SEQ ID NO: 32558 - DNA, 812 bp, Arabidopsis thaliana columbia
tacaatttcctcaatgatctgaatggaaatgtagttggtgtcgtggcaatagcttaatgtatgttttcttaaatattttgattctttattgttggttagttgtgtatcatgccagttcattaatggtcggacaatggttgttctgatttggtttgaccttatatgcaactgggtatttgatgttttactcgaggctttgcaactgttaacttcattaacgtggttgtattcctgtgaatgattcatgtaacttttgaaatgtcatatctgaaatagatatcaaacaagattcttccttttgccagttttcgtatttgactattgagtatcttcgattaaagcttgtccaaatttttttttttttattcatcatatttacttttccacatgaaaaataattacgagagctttgacttaaccaccaaagtaggtgaagaaaaatactgacttttacttgggttgtttcaacttggtcttgaagtaatggtaatttactaacttcgtttgagaaacaaatatgattaatcaaatcatttacgcgcctgacgacggcaacattgtctcgattttgtcatatttagttatttacatgagtcggttaatcggtttgtcgtaaacgagcttaataatgtaaatgtcaactatcacttttatatgatgtcaaatctcataatacatatagtgagaaaaaggttcgttttattttccaacgtcaaaaataaattttaactcttttactcagcgacaaaataaaaaacgagagataaatctccaaaatgctatgacatgcatgcaactaaaccgtaattggt

SEQ ID NO: 32559 - DNA, 520 bp, Arabidopsis thaliana columbia
cgttctcgaatttatacaattggagatccgtttaattttgtcgatttcaagtattgttgttgcagaaccatcgcacgtgtgagttggcacgtgtggaatcaagtggcaaataagaaagatctggaagtgacgcgtggaagcttataacgggcagatgtgagaaggccgttaggagctatatgagtcatgagcagatcatttccatcatcatcgagaatcatttgtaaaaatctaaaaaacccaaaaacaattcatgagctaagtttctctcgtctcgagagttaacgctttatcattttcgtgtttcaggaacatcggagtgaggttacatatttgttcgttgatcggagaagtgaagagtccggtgagcatcggtgacgttactgtattaaaggtatcaaagctgtgtcgtttctcggcaaagatggtgactacgagatcgcaggaagaggatttgaaagggaaaggtgttgagagggaagatccgattgcctcacgcatgtcgaggttggaagagttg

SEQ ID NO: 32560 - DNA, 507 bp, Arabidopsis thaliana columbia
ctatatatgattacacaatatatctcattgcacattgaccaatgatctaattagtctagcatatatagtgtcctagcaaacgtgaaaaccagttgtcaatagtttcacttactatggcatacaatagaactaacgacgtacttttcatggaaaagccaaaccattaacgaaaagcactgtatccaacagctgaatttgtttaacaagtagcattcttaatcttcgcacaaaagctttataagaaatggaggagcttaccaggtctatcaaccaaaattgaaagaacaaggcaatgtcccagtatcaatctttccctctgaacaacagctcttcgttcaacaagagcacctcttgagtcaataaggtatcgctcgcataagggcccacccagtccagtaggatcctcccgattgagttcctaacaccaaagaatttgctatcaatacaataattacatagtaatgccaaagaaaaacaaaaaatatcaagtcacaagatcgtctgaaa

SEQ ID NO: 32561 - DNA, 1907 bp, Arabidopsis thaliana
tggacagcagggaattacttcaatggctggttcgggtgcactaatgggatctgcacaaacgggacaaagcccgggtcctaataatgcctttagtcctcaaacaacgtcaaatgtcgcttcaaaccttggtgtttcacaaccaatgcaagggatgaaccaaggaagtcattctggagcaatgatgcaaggtggaatttccatgaaccaaaacatgatgagtggtcttggtcaaggaaatgtctcctctggaacaggtggaatgatgcctactccaggagttggccaacaagcgcaatcaggaatacaacaacttggtggcagtaacagctcagctcctaatatgcagctatcacagccatcatcgggggctatgcagacttcacaatccaaatatgtgaaagtctgggaggtaatgtcagtttatcttgtctaaaataacggtgatcttgtgctaacttttacttacattttcaaattcatgcagggaaatttatctgggcaaaggcaagggcagcctgttcttatcaccagacttgaggtgtgtttaggggcacttactatgcacttttcttcccctttctgaatttactgggatcacatgcttaagcacatcttcctctgtagaactttgttgaattgttccaagtagatattaactaacgtctttgtttatatttgacagggttaccgaagtgcttctgcctctgattcgtaagtttataactaattgaaatatgaaaactgcttccttactaaaccttgtcaggagagcagtcgactccttaagaaatgattgtagctgctaaactaatttttgctttctctttttgtgcatctccccaggttggcagcaaactggccaccaactatgcagattgttcgtctcatatcccaggaccatatgaataacaagtaatatcttcgtgctatatccttccttaattccaaatggctcatgggtggatgttgatttcatgccactaaatatttcacctgactttgcatcaggcaatatgttggcaaagctgacttccttgtgtttcgggccatgagtcaacatgggttcttaggacaacttcaggataaaaagcttgtgagtattgttgataatttatgccacttgtctccttttccttattgtttcactacaaatttaataacaaaatgatgaatggtgtttactggtttattagatattaggatgaattagatgttaagaatgaaaatctttgaaaaaatatatgtacttacatctgtaaacatgttctcggtgaatctatcaatctcttgctatgttcaccatacacttaacgatgcctacgcttgtatgtagccttgttttgattagcctaatcgtgtgccatactattgtcattttcacgcttagcttttgtggagttgtatatgataactttgtcatcctccgtattgcagtgtgcagtcatccagttgccatcacagacgcttcttctctctgtctctgacaaggcttgccgcttgattggaatgcttttcccaggggtaaggaagtactaagtttaaggtgtctatatatgttttgcttcacattagtgactcttgagggttgttttgtttactcctaggatatggttgtgtttaaaccacaaattccaaatcagcaacagcagcagcaacaacaactccaccagcaacaacaacaacaacagcagatccagcagcagcagcaacaacaacaacacctccaacagcaacagatgccacaactccagcaacaacaacaacaacaccagcagcaacagcaacagcagcatcaattgtcacagctccaacatcatcagcagcaacaacaacaacagcagcaacaacagcagcagcatcaattgacacagcttcaacaccatcatcagcagcagcagcaggcgtcg

SEQ ID NO: 32562 - DNA, 606 bp, Arabidopsis thaliana columbia
atttggaaatatatatgatggatgaagacacgcatatatcggagatgatccaagatatgtcaatccaactagattaggagaaactgtgctacgatagtaagaataagcaaaactgaaataaaacaaccaaaaaataaaaaaaaatatctctatccaaagccattataatgtttgaaagacaaaagaagcaaaatgagacccacaaaatctgacggtcccacaaaaagagaaagagagagagagtctagtattattttaaaagaaaaatgtgaataaaaacgcaaattttcaaattttgtacgaaaaaaatatgaactttcgaaatgtcatttaaatcatttttttttttaaaatttttttgataaaatggtcaaattttgttgactagactatttcgggcatgccgtgaaattttcgtaaacaacgtcgtatttatgagctctaaaacgacgtcgttttgttagaaaaaatgagggaaaaatgcattgattaggttttgaactaaagacttgatgccaaatttagggactctctaccgctgaggtataataacactttaatatatttgtcagccgcatatatatatccactatatatgtgtgtgta

SEQ ID NO: 32563 - DNA, 852 bp, Arabidopsis thaliana columbia
ctagaagatcgaatgttgctgaatcgacacacagctatgttgtggcaatagagctaccaggagccagtatcaatgatataagagtggaggttgacaacacaaagtaatcctgctgatacacatcttttttcaatctgttcccattactcacacagtaaaaatgcattgtgtaacaaaggtacttaccgttctgctgcagcttgactgtgacaggtagacgcacatctatctgtcaaaaagttgatgcaggcaccaaagcttcgatccttggatatcataagcaagaaatactacaaggaccattcaaagtttcctggccactccccagcaatgtgaacaaggataatgtttccgctgaatttatgtaagtagaagctatacttactaacaatctaaccgtatgatcaaacaactattctccttaaatctttcaatcctagagttcatatgatagattctgcctgtaggttttagctagtagtgcacacctaaaaagtagtcgttttagaatccaattttacatcttagtgccagtcagtcattagcttgaattagtttagatagaatttagcaagttttataaagagcactaacatccaatttattattgcgtttgaaacagggatgggattctgagaatagtaattccaaagctttgagggttcatcgttctgaaaccatatatagatacggtaaacattgtgtgtgatatagcagtttgtgtggaaaagaaaaatatcaaatcatgaagaaagtttggtcttttatgtaaaatagtttggtcttttatatatcacagattgtagacaggcattactcaaagtgaagccatgtaaacaatccataaatata

SEQ ID NO: 32564 - DNA, 585 bp, Arabidopsis thaliana columbia
caaaaagcaaaaacccggatcttcatttgcaggccaagaaatccttttgggggacttatggcctctcacgactcaacaagaaaatggcaaaaagaagcaagtagatgctgagtggtgtcgcccagacgaagaccagaaatggagtggttggccttagccttagcataagattcataatcatccatgtaaaaatcctgagttgaagtgttaaaaagacatttccatagagagtaacagaagcattgtagttacaattacagtaattctggaaaatattttacactttggggcttagaccacaaaaacaaaatcgtacaatatatatcttagtatattaccaacaaacagtgcacaagacatcttttagatatctgtgtaatgtgtatacatatgttactctctaagtaaacaaataaaagaatcctatctaataataacttgtgtatgtcttttaaacccgaattggcaaaccatagttgtggaatactctgatccttccatcccaagtcgctgtcacaatcactagcccccacaggtgaggctgccatgcgctcctcaaaagcttcagcttccctctgttgctca

SEQ ID NO: 32565 - DNA, 491 bp, Arabidopsis thaliana columbia
gagcatatggtaaaataagagctcaccctttcatgttggagtttgaagtatcttgaacccgagaaaaaattactgacagctagaatgaagcctccatcataagcggcttcaagtggttgaagggtggcctacagaaacaagatgcaaaaatctataacaaagtcaatccttatagttaactatgaacaaaagaccaagactcctgagaggagcaagcatagtgtttgttcacataactctgatgcaaggtgcagttagttcacctttaatgacaatgcaacatcatgatctttagacaactccaaccgcgctccatatgagggtttcgtttctagtgtatcactctgagaacagacctgcatgaaacaattaaattattcgtttcctgaaaacattatgaaaagcgctaaattcgattttaataacacagactacggagcataagttacacctagattgttcatacgaccttactaagcactagtctaata

SEQ ID NO: 32566 - DNA, 839 bp, Arabidopsis thaliana columbia
gaagattttaatgggcaaacatatcttgtccctcatataaccaacctcacaagcaaaactttatggtgctaaatgatttttagcagattaaaaacagcaaaaaaataaaataaaaaactatacaacaaatgaagtgaagttaagaacacgagcccaccattgtcttttcatagttaaacttaaacactctagattacacctctatatacagttatacacaatcaatgtcgatacacatgtcttatgaagagaccattttcgaaagctagacttagaccctaatataacgtacacttttatcacaatgttgtagaattttagaaaatgttgcttataaatattagtcttcacttgaacaaaatcattcttcaatcattttagtgggttgaagatatttttattgtctgaaaagctagatgagtttcatttttttaaagcattttgtatggaccacgattcatttaattattataaatggagagagaatcttttcagatattgcattaacgatgttacatgtctagatattatgatgtcatacatgtctcccgacctcttgtcaatttcattttttgtctttatcatttcgtctcttgttggttttaaattttgttagtaatagtagaagtgtagagctagagtactagacatagaatacggttaactccagtttttttgaaaacgtaaacgtaaaaaatttattttaaaactggttcgatatactggtccaagatatccgaccataacccaaattttgtcttttatgatttagaaatgttaataaacaataataaaggaaattatttttaaaaatttgaaaaattgctatgaattgtttt

SEQ ID NO: 32567 - DNA, 745 bp, Arabidopsis thaliana columbia
acatagaactgtgttgcacacacacatcctagcagaaacctgatagattcacatcaagcaagatgtgtatcaatctttgactcgtcttccatccgaatatagccctgagccaacagcagatgtctaagacggattgcaacaccggcttcatcaatgatctgattgcagatatcagatcccaatagcttgacagacttaagtaagttcagttcccactccattgcatcttcctaattgttaacacacgaagaatccaagatcactcttcccccttgaatctcattcatgacactagtgttaatgagattccacactgtattggttgtgagatgacgtgaaccgtgtgtttgaggaactggaactgagattgcttgtttcctgagatcagctgaccttcccaccaaccacctgagacaagtaagccatacagactggtcagataccaagctaaacaattgcataccttgttgattgtgaacttgaatggagcctgccagctcattgtgtatatggtaaactcctgaaccgaactcatggcttcacccatatgatcagattctagcagagacactagcgattgatcttctgaagtagattgatcgatctgtgatgcagtgtagcatgactcttctggattccacatgtaacagttatttgcagcacggtgtccttccatctttacaaatccatgtttgtcaaaggctttgcattccgtttgtgtaaagaaaacactcaaaccgtcatc

SEQ ID NO: 32568 - DNA, 574 bp, Arabidopsis thaliana columbia
aattttttggtatatatatatatatatatttactgttttaaatttttaatcaatactgctagtagtttttttttcttttttttggtgtaaatggtaagataacaccaaaatatatttgtctactaaaccgagtaaaatttttatggtttttgtaaaaatccaattgttaacttgttagtgatgctttccaaaaaagcccttacatgatattgtcaaaggggtatctaaatatcatatggtgcgaattggttatgtatatgtagtgtactagtgtgtcgtcgtggacctcgaggtatcatatgtaaccgggtgttgtagatgttgttatattgaaactaaacttttatttggacaagttaaaaaaacaaatcaagcttaatgatggattcatatataatttttttttgtttttttgctaatctacttataatactgcctaaggtatcttaatcataaggatatcatgtcaagatatccattattggtcgcagaaatttaaagagttccaattcctttgcacaaaacggttgcaacaatgttgccgcttaccatttagctaatatggatgtgtaga

SEQ ID NO: 32569 - DNA, 461 bp, Arabidopsis thaliana columbia
gatccccgcatcaattatcattatagggggggaaagaagaaagaatgacccaactgtatgaaggcccattaaaaaagtgggcccaatttctataaacgaccttcgactttatcaataatcaattttaatccaattcaactcaggaaattgctatgatttaactctgagaatcagaagaagaaatctcggtgagcaaaatccctagttttgggatgatgtttccacgactacgattgacgaaggtcttcttctccccgatcatcgccgggaaatggatcgtctttgccgacggtagcagcggcggcggcagttggtagaaatggctactacggtggattgtggtcgtcggccgttattccttccaatgttggtttagctgtcgctgtcaccgtcatgagcgtggcgtcgctttcagcgtctactctcgtaggtatcacacaaaaacgatctgatttatgttc

SEQ ID NO: 32570 - DNA, 551 bp, Arabidopsis thaliana
ttagagttctgcagtcaaaagtgatgtgcaacggattggagttagagggagagagtagatgaagcttgaggcaatttgaatgaaactagataatcctccttctgaagtttctggtggtcgattgataggtacgcaccagaaggccaaccccaatgccaagacctacacagacaccaagaccaattcccacaccaaccctcacaccagcgttgaaccacgacatctcaccatcttcaccatctgcgtactctctattccagtacatgtcgctgtgttctccttcatattcttgtttataacttccatattcagtaacctgcacagaaattaactcccatacttaacaaagaaaaataattaagagacattcatagcgatagtcagagaaagaatacaatcgtcatgcaattacgctaatggtctttttgttccaatcttataaactctttcaaatgtagaatagaggctaatggtcgaagatatagacattgcactatagttaaataatctacggtgagtatgaagatctatctccaataggtattgacact

SEQ ID NO: 32571 - DNA, 778 bp, Arabidopsis thaliana columbia
tcttcttttagtgttctaagccaaaattctgaatgtaatcagatccgcattgttcatgactaatgttatttggttttgtaacagatggaccttcatgcttgtgatcatctactttgcggtacgtcgtaacagcttttcgaataagagtgttaaatccgggtattgtttatgttcattgggttctctgcagatgggtattgtagcttcagtatatggttgtttgatacatttaaaggagctaacacttgaaactgatgaagatgtggtagtagaaaaggtcggagatgagttccggcgaagattagaggtttgtggttgtttcatgcagacaatttttcaggttagtgtcaacagtcacggagtcccaattttttgcttcatacacactttcacacagtaactcttctgtctggtttgtgttaaagacaagtgcaggggctgtagtgctgacggacattgtgttttggttagttatagttcctttcctatcgactactcgctttgggttaaacacggtaagaacgaacatttcagcctatgtttaacaatgaaactactcaagactctactaatcgaatttatgatttgatgcagttgacgatctgcatgcacacggcaaatgcaggcttcctcctgcttgaaacactcctcaatagccttgtaagcaaaaatgaagttaaccaagacaatagattttaagaaaagagcctaaagaaattcgtttgttctgatttcagccattcccttggtttcgaatgggatatttcgtgctagggga

SEQ ID NO: 32572 - DNA, 1388 bp, Arabidopsis thaliana
gcagtataactatgaagagttctccaagcaaatgaaccaagacgatgttaaaactgctaacttttggggattgggtcacagtaacaataaccagctgcacgcgagcaacgggttttctggagctgagattgcccctgagccaatccaaaaccacccttgactggttctgaaggcaatgtattattaaaaccaacccttttgaaatggactaaccttagctcttgatgctaagtagagaggttgtatgatttagacatagcatttgattaaaataaagagggtttgtgtgtattagtaactcttgcaaggcttgtaagcgaatccaaaaactctttacactcataagcattttatttacaggaagcagaaaacaagattcgcattaccagcaacaagctttgtttctttcaatctgaatctcaccaaacacaagaagaagggaaaatgaattctttcaaaatttgaaggcacaaagagattaaaaaaagtacataaaacaaaaattatactagacagcagtattagcttagactatatagcttagagttctgcagtcaaaagtgatgtgcaacggattggagttagagcctagagggagagagagagagtaggcaatttgaatgaaactagataatcctccttctgaagtttctggtggttgattgataggtgcgaaccagcaggccaaccccaatgccaaaaacctacacagacaccaagaccaattcccacaccagcgttgaaccacgacatctcaccatcttcaccatctgcgtactctctattccaatacatgtcgctgtgttctccttcatattcttgtttactgaattggaaataggcccaacaaaatgcgacgaatgttagggcccattaatggaaaacctatatttatatagataagcaattagggattgcgttgccgcttagcttcgtctgaaaaaagggggatcagttccgtcgccgcttcttcgatttttgacgccgccgcttcttcttcttcctcgcaggtacgttctgggtaacttagggattgcgtcgttgtcggaaactgcaaaagcttgtgctgtaggtttcgatttgttgtttttttttttgtctctgtagcttttgaatcttaggtttggttagattcgttaataagataatggaaaagttatgaaatgggttgatttttattaccggatactgccgctgcatcttcattcttttagttttattgtatcaatggcttcgttgtttttataatcacattaggcctctgtcaagttcagtgttatggtgatgtatatttcttgattcatttgcaattctctagacattatttgacattgcatttacatgtgattcctgtgtttgtttagtggtacactgaatgttgatgttta

SEQ ID NO: 32573 - DNA, 429 bp, Arabidopsis thaliana columbia
gacacctattcggcgtaagtatccaataatgcggagacattctggtaactgaaacagagagcatcaaccagatattgagccttcttgattgctaagcttaaccattccatagttactgaataccaaaaataaaaactgtattcacatgaaacctgtatatttgagcgtagtttctggagaagctgtgagagaagtgactgagttgtttgtctaacctccgctgcaagtgcttggataactggcaatcttgacatagagagaagatataatgtttagagctaaagcttgatggttgaggccttaagtaaaagtatcgtgagaaagattacaaaaaactcacttgggatgcagggtagcaagtttcgatacaaatgcttccaggtcaagagcctcatcaaaatttcccattcgtcacgcatctgacaaaga

SEQ ID NO: 32574 - DNA, 525 bp, Arabidopsis thaliana columbia
ggattcaacagcagaagtgggtggataagacttgagatgctcatcacttttcttggccttcagaaagtctgaaatcacactgctgatgatttcatcgagtagagctcttctagctattttcattattccactctgaagatgaacagagagttcttccgaaacttcggatatgaagttcacgccagtcactggctcgtcacaattagcatcaccacatttcaccctccatacaccaattaacgatgctaatgtgattggtctaagcttattttcaccatcacgtatctacaaaacaaaaactcttaagcaaaatgataaacaccagatggcctgatctatcacaaacattagaagaaggggagaaaacatatattctaaccaagtattctaaaatagtaactaaaaacctcaaaactgaaaagaagatgcatgaagaaacaaagctaggcacaaggctacaaagaggcaacaggatcaaaatcattataaattgcatgaaatttaactaatcacaatctttcagaa

SEQ ID NO: 32575 - DNA, 983 bp, Arabidopsis thaliana columbia
caatttatcaacacatgaacttcaaataaaaaaactgaaacaatccaatatttgtttaaaaaaccatacctgagaaggcccctggtgcttatctggatgccacttcaacgcagaagatcggaagctgcaaaacaagaaaccttcaatgaacactctttttcggtttctcgggagcaatggaagcaatttgaagacttacgcattcttaacatcatcaaccttgatgggaccatcaagaggcaatcctagaacaatcctctcagacctaaactcaacgttcaaaggttcatcaaaagactctttattccaacttttgctcctctgagattgagtggtccagctccagccttctctccattcaaatcccgctgtcgagtctttcgaatatgaagccttctgagattgagctgtccagcgttctctccatttgttctcgaatgtattattagcatcagtgccaaaatcatcgtccggattaccttctctgtgccatcctagtataccaaacaaacataagaatacatacagcagaaaagagccaagggttgtatggtactaagaaaaaaagaaaagaaagccactcacgttttgttttcttatctcgaggcttctttcccctgccaggcggagattttttcttcatatgcctatcccggataagcggacttggcccgaaatgccactcattctacgtatacagtacatatgaaaacttgagcaaacacatcctaacaaaaccagaattctatgtgacaacaatggcatgaagaattcacttgaagcggatcattaattcccctgtggaaaaggagtttatcacagtcttcttagcactggtacgacccttctcctttacggtacatgtaaatcttatggaggagttctggaatcaacattttcagcttcagaggagaactaactctcttatgaatacaatttttcaatatatacatcaacaaaggaccacacacacacaaaaaaaa

SEQ ID NO: 32576 - DNA, 494 bp, Arabidopsis thaliana
cttatcaaaccaaggagtttgttttagtggacgttccatagccattcatcaaaccattccacgacgaacctaaaccgttgatataaccaccattgccgtatccaccaccgtcggattttcctgcgcctccgctaccaccaccattggagtagcattgatcttgctgccaatcaagcgataacaacttcggatttggcttcacatccattattgttgctaccctttgatgatcttcttgatgattgtaatggtgatgatcataattagatagcataagtctttggcatgtcgatatatccatgagaccaccaccatttccattgcctcccgtagaaatcccattaaatccaccattgttgttgttgttgttaagacctacaccgtgattcagacccatgtgatgattatgatgatgatgatgatctccgttacttccatgattaaccatgaccaggttgtcattgttcactcccatgagatcaaacttactgtcc

SEQ ID NO: 32577 - DNA, 733 bp, Arabidopsis thaliana columbia
tacttgtatgtacatttttaattagactcataaagtgtcaagtcaacataagatattttctttaaagtttttcatggattaaaaaatattcgtaaattatattcaaaacttaaaatttactaattatatataaaaaaagcatataatcgttagtgtccaaaactgtttaaaacttgtgcaaagtctcttcggttctaatttgttttcaaaatcagagatatttctccaccatagatgaaggacgaaaataatactcattctctcccattcattcaacagtgaggcggaggtggtcgttgcaccatgaaaggatctctgatgatgcacccaagaaggatcaaccgtagacatatgcatggagacgctggagatgtatagggtgagcaaattttgatggatctaggcaaaagtttgatttttcttaaccctagacacgaagattctaaagaagtattcggtgaacaaactctgccaaatttggacagaaaataaactaacaaaggtgattctagattagaaacaaagtagactagcctgaaatgcaaacaaagataaaccagagaagtatccagttaattgcacatatgcgctagaggaaagatttagtaccatgaactgcacacaacaataatagatcgcaaggaggcaagtggaagacacaaagatcattatccaaacaagggtgaatggaggagatgctgctaggtgaggtggtagaaaggaaggacatagg

SEQ ID NO: 32578 - DNA, 693 bp, Arabidopsis thaliana columbia
ccttgactccaaatgaaaaccgaaccgtattatgcagtgcggtttcaatagtaatgaaaatatctgcaaatatatgtgtatatattttcgttactattaaaaccgcaccacattttatccgcggttaaaccgcatgtccattcattcaatgggaaagattattgtgtcaccgttaaaatcagttccacccaatgtagagtttggatttaagtgaagactcacatggttttgaatattggcattggatttatcagtaggttgtaccaaacctcctaagaaaaccttggttcatgtctgaaagagcccatttcgaatgtatggcccgatttttaaaagttggtcgtcaatagcgtatacgcatagacaatagatttacaattggaccgactaaatggacatgtcggctataatattattctcacaagcatatcgcaagacaacgatataaatattaactatttatttctttttattttcgtttgatgtcaactatttttttgattggaccaagtattctgttaaacagataaactaataactaaaacatatatatacataaacacagggatgaatcatgttattttcgtcgtgcaaaataattttccaatataccctcaaggaaatgtcatcccacggccgagaagtagaggtgacatctcatcggcaaaggatatcaagaacgtgaactggcgc

SEQ ID NO: 32579 - DNA, 512 bp, Arabidopsis thaliana columbia
cgccagtatgctctaaaggcacagttatgcattccgcccattcgagatcctgtctatcccaaactcactgctcaaatctctctgggccttccggaaaccaagagctactgaccccgttttcgacggggagtcaaaagacacatcaaggccacaagtcaagaaaaccaagccaggcaccatatccgccgtgtgggtacgagctcccacaccgactcgcccttccaatccagcaacagatagtcaagactccggcaccaatttgccgaccccagtcaccgataatggcaccaagatactgcccgttcttcggggctcaaaaaccggcttatttgagagtataatcaatggcgtacgtcaagggcataaggcttctggccctggacctgggatacgcggggcatcggccttatgccgtgcaaggatgtgggagctctggagagggataactagcgatacctttcagtgcactggtgtcagcgagactggcgccttgaataagaatgatgatagga

SEQ ID NO: 32580 - DNA, 572 bp, Arabidopsis thaliana columbia
ttcatccaaaggtccaattagcctctgaagcccaaatctctctctctctttctctctttctcgctttctcaatctactcgccggagatcggctcgattcctccgtcaccaccgcatctaaccggcgattttcattccgtcttctctacttcacaacgcagagcttcaatttcctccctcgcaggtatttttcacgaaaccctaaactctggatctaatttcgcctggatctaattggggattttagagttttgcctcgattgtttgttaaattgttagcttttggtctactctgcgaaaatacgtttggttcatttactttatgcaattaccatactggatctgctaattctgaaataattcaactcataggacaattttactgggttgataaagttcttaaggtcgtttaggagccaagttcaaatgttttggtttaactcatggaggcaaattaattttgaaaaaaaaacttgaaattgttgtttgtgtttgtgtgtgtgtgtgatttaaagaaaaaagcccgatcttataaacttctgtgttttgtttgaatcagtttcgttatgttga

SEQ ID NO: 32581 - DNA, 573 bp, Arabidopsis thaliana columbia
caaagttgaaaaattgttcaatgattctcgcaaatccctaagacgaaacaacgacaacgacaacaaaatcaaattcctcacataatcagaagaaagatacaaaattgcagccaaaaactatcatgaatcctatgaaaaagaccattccaattcttagaaacgaagattaccaaacgagaaacaaagattgagcaaagttcttttctcgattctcgatactcaacagagaaactcgaaagaaatggtaaagtcaagcttcgtgtgactaatcgatgagccgggtcgggtaaggcctaggagtgacttaatcgggtcggattagtttttgttaaccggaaactaacctaaccgaaatcgcttagccaactgattcgttgacattgtgattattccatgtctcttgagaaaactagagcccagattacaaagttttcaacacaacgaaactgattcaaacaaaacacagaatttaatcaaacaaaaaaaaagatcgggcttttttctttatacacacaaacacaaacacaaacaacaatttcaagttttttcaaaattgatttgctccatgagtga

SEQ ID NO: 32582 - DNA, 575 bp, Arabidopsis thaliana columbia
gatgtctccgatgtcttcctcattgatttgagttcgattcatcttccatcggtttgggagctgttgaatgatatgttcgtgtcgccggatgttctgaaactagggtttcggtttaaacaggatttggtttacttgtcttcgacatttactcaacatggatgtgaaggtggattccaagaggtgatttgcttttgaaagtcttgaactttgcttcgtagtgttagtttaagctaattgtagtcgaattcttatcaaagttttaacctttagctctgttatattctcttgtacttaaagttcttgtgtttggatcacgtgtggtgtttatagataggtaagtattgatttgtgtgtttattgacttctgttgaaagtagattgttgaattgtgtttttcttttatttgcctttttaggttatgttgctttaaaactctatgtttgtgattgttgatgtgaataggtgaaacaatacttggatattacaagcatatacaattatctgcaacataagcggtttgggagaaaggcgccaaaggatatcaagagcttggctgctatatgtaaggaaatgct

SEQ ID NO: 32583 - DNA, 639 bp, Arabidopsis thaliana columbia
ctctgcggaaaaggcttgggattgcttgaaaggcaaatggattttcttctggggagattcgaatcatgttgattcgatcagaaacttgctgaatttcgtcttgggtcatcctgaaatccccgctgtcccgaggaggttcgatatgaagttttcgaatccgaagaacccttcggagactgttaggatcacgagtatctttaacggtcattggaacgagaccaagaactatcagggccttgattcgcttaaagacagggactttagagaattgctcaagaagtacttcaacgaagaaacaaaccgtgttcccgacgtgatgatcgtgaactcgggtctacacgacgggattcactggactagtcttagagcctttgcgaaaggtgctgaaaccgcagctgcgttttggagagaagtttttgacggggtcaaaagcagaggattgcaaccgccagaagtgattttcaggaacacaatcgcgacaggcgggtacgcgagaatgctagcgtttaacccgagcaaaatggaggcgtttaacggagtgtttctcgagaaaatgagggatgcgggattggtcacgagcgtagttgatacttcgatatgacgtatccgtgcactacgataaccgttgcaacgatggag

SEQ ID NO: 32584 - DNA, 584 bp, Arabidopsis thaliana columbia
agtgactttgatgtattaaggaagactatgttctcaacaaaaacccaattactggccttccagctagaccatgtaaaccacacatgctagagatcatcacatcctctttctaagatgttactttgtttaatgcctcttatacatcttctaggcaataaatattgctttgtacttgtcaaatcgggttgttactgtacgctcaaatcgccatgcaattttgccactgtaactaacatctctttgttctcttagtatctccttgaggaagttgctttggagcagatacgattgaaaaaaattcccattcaggtgagtttcttcattctcatgatggttcaactgatggagaacctggagattgactttcccatatacctattttcaggctcagagggaactgtatctcttactctctaggttcattttcttttacaattcaggtaagacatttttctctgaaaagttatcattggaaccaaagcgtttcttctttcactgacaaattgttgtccagtggataaactcgatagcttcttgaggaacttcccagagtttcaaatgcttcttgattggaggactggaga

SEQ ID NO: 32585 - DNA, 924 bp, Arabidopsis thaliana columbia
ctctttatgggttcctatcctttagtcttcattgttggcttgttggtagcgtttatggaatcaactttattctcagtcttttgtggtctagtatcttgaactcttgcctattctatgtcctgccgagtttgcttgtttctcgatccgattcgttctcttgccgtctccagtcttcggtttgttgcgaattgtatgggctcggtccttgtctctacggtttagacttgatcgaggtctctcttttgcattggtgtcttactaggcgtgaaccaatcttggttttgtttgcttcgatttcgccgtttccagaagttgtgtgggatttctagtcgtctcccattcttgctggtatggatgctttggttctctttatttgtgaggtagtcttcatttggtataggaagagtcgctatccggtgtcgtggattttctcgtctccattggctagccactaattcaagcgtttctcgtttttggattgataatttgcaagatgtttggtgctagattctgagttatgagttttaattccctctgatgtttgctttcttagccgtcagtgttttgacttgtttcttttgtagtgttgttatttgctccccattttcttggacttagtttcctatgatatcttgttatccttcgtgttagttttcgggatcatgtattgatcgtcgactccttgtatttcacctagtactcatcaatgaaaattaatcttccagtgaaaaaaaaaaaatgtatataattgttattgaatttctgtgtccagtccatattaagctttttacatatatatatagcatcgaccgcgaactccgtaacaccatctcttctagaagactcggatttcattggcagaggcgtatgctctttggatctgatagttaaaacaccaaatcttgtgtaactttcttgtatata

SEQ ID NO: 32586 - DNA, 824 bp, Arabidopsis thaliana columbia
tcccacctactgattagtacatcagcgttgtctctgcttcggtatgccttgagcagagcaagcaacagttcttcgctatctgggttcagctcaaaagccttctcaagtatactaatctttttctctaaagtctgcaggcgaactcctttctgagattgcatacttgaaaccttgtcttgaaaatcagcaaatgccagccatgcctttgcatcatggggacgttctctcgtcactctgttgaactcccgtgttttattcagcacttcatcctcccatgatgctccaatcattgagtcctttgataaaacatcttcttcgtcactttctggaacagtcacgtcttcctccagtggaatgaaattatcaaaggaagaatccacagcttcacttgcagcagataaacgaatacgcttgaaattcttgttgcgttccatggcagcatgttttgcataccagtatcgggtatcagactttgctctcccctccaaagaatcaatatcaatctctgtgtcaagcatagaactacgtcgattccgcaaataaaacctcagagaacctgaccctggaactctctgagaattgtcaagtttataacgaggaacattcatcctgtattatgcaaacagaagcaaaatttcaatatccctacactcttaaaacgccttgcacagaatacagaaaatgaaatcaaccataactagacaaattataagcaaagtacctgtaaatagagccataagccagattatctggatcaggacgagtgccaagtaataatccttcacaggtttcgaatagtattcatcagatttacgagaacgaga

SEQ ID NO: 32587 - DNA, 564 bp, Arabidopsis thaliana columbia
tacagaggagagaaacgaaaaatagagcacgccaatgaaataatagtgtctaacaaaatagaacatttaggttgaagatggtggaaccaagcaattaaagcttctagttggagatgttcgtacgatgtgtatgaggcaagtttcccactaatagcttcatcgatgagtctcaatgtaccaaactgggtggctagcttgctgatgtcggacgcctccgttttgtctagccaaatgggatagatcgttgcttggaagatcagcctggcaagaaccatgttaatacgatcaataggagatgaattgaggttgtgaagtgtggctctccaatccggattagttcttgtgccgagtagttggtaagtggtcttggacaccacgaagagtacatgcctttacttgacctcattgtcatggaaaagatcttgcataagaaatagaagcattgagacacagaacaaaataatacgatgtcaacgtaaaattgcgaataacgttaaatgtagacatatttactaactaaagtaaagagtcattgttgtattactcaagaagaatttgtctgag

SEQ ID NO: 32588 - DNA, 532 bp, Arabidopsis thaliana columbia
aatatatttctggtgttttacagccttttgtttttacaaagcaacaatatgatatgttatagttgagctattgtataatgttttcttatataaataaatagaatatcctttatcttcttaaagcacaagccatttgaccaataaaaatgtgacatatcatcaaatttaggttaattaatttttaaagaaaaaaattgtaaatacaaagaacatgcgttcctttattttctacgaacctaaaaaatcgaattgcacgttctgacaaaagtaactgccgattaacatatattacgagaaattaataactactccaaatttaaatcacacacgatcacgaaaaaaaatctttccatgatctttcttaactcctccactatctctgtaaaccgacaggtctattaaccttatataaatactcaaaattatttacatcttaccgtcttcttcttgcttccgacttttagtagagaaactcagacaaattcttcttgagttaatacaacaatgactctttactttagttagttaatat

SEQ ID NO: 32589 - DNA, 585 bp, Arabidopsis thaliana columbia
tgcatagtataaaccctaacaagtaactagtatattatattcataattatgaccttacagaaatattaaatctaacagaagtcgtcatatgatatcgatcgatatatcacttaattaatatccaagctgacaacaaatatcacttcatgttcatgattcgaattttataaaatctcgattatcatcaattcatcatctagacaatataatatataaaagaggccatgacataatcatatataagccaaataaaatccaagttcttttcatttattgattataagaaaaacaaaacaataggtctaattaagaaacaatgatataaattaacagtgggtggaggagaatagggattgcgttacacgaatacaaaggttgatacgtagatataaatagctagatgcgagcatacataaagttatacgacattattgagttgcaccgtggtggtaattagccatcatagactgaccttgctcctgctgtggctgctggggtaaaggcggttgggactgtggttgggactgagttatttgcttgttgttgaccttttcctctctctcatagctaacacacgtgacttag

SEQ ID NO: 32590 - DNA, 1961 bp, Arabidopsis thaliana columbia
aacagtacataaaccgacattgtcgccaattcggcgatgaatcactggttagtaagtagtttaatagccacgggagaatcatgcaattaaatactacgagagaaaaatgaaacatgaacgggtttcaaatagaatgcacgtggaggcgtagggtaatcaaagtatgtcggttggtttaaaaattagaaccggttaatgtaataacgtaattgcttctggtttggaatttactgaccgacactatcccgagatcacgaggagaaaaaaagttgggtgatcgatctggaccgtccaataattgaggccccacgaccgctgagtttccatcgaacgttccatgttcagtgagacaacaagaactcgtgtcgacttcttaaggcgaagatgtttatattatgcacatgaacgcacgtgccccacctgacagccgaataagggtccccaccacgtgatccttgcgacgacgtcgttaacggtgccttgtggtggtctctggcggcgcttgcttgacgttaacattctccgggagattgttttgattgtctaggcctgtctctcttgagtgtaactattaacttccgatttgtttcattaatattcaaatattgccccagtttatttacgtgagagttccatacaaatgtaacctttttgtgtcttttttttccatgattgaaaacgttctaacaatattctcatgattcaattcaagttttggttgtagtaatctatcataatttttaaagagtttaggttcgattaagatttttggtaattttatttagcttttgggccaaaaaaatttagatcgttgtaaattgggttatctcgatctaacactatgaaatgataatattgacaatatgaaaggcctaaatcaactttaaagggccaaatgccatgcgtataaaagattaggaataatctatttatactcatttcgatctaaaacctatttacaacagtaccatgaaatttagggctaacaaagtttggtggaggaaggttgattttcctcttcttggagagattgttaacaccatcatcaacagggtcatgtacaaaacagaacaagtctccatgaccaacacagctgcgatatacttgaacatcttctcaaattttgatatctcaacaaggttacattttcagcaatcaatttcagagtttcaataaatatctgacttgaggaagaaagtattgagacttaactaacagatatctcataaccactactaggattacctcgtgatttcacaaaccccagatccgaaacaacctcgagcgacctgttgcaaaacatttcattcaaagtctacaccaagtctatgttacgctgcgtgggatactgattttgcctcctcttcactactttcctctgccttgtctttctcctattgcattaccaaagagaaagcagagtgaaactaatctttccagccttctttactgagtcttctcggagcaagccctctagaggagaggctcggtgtgagtggtaacaccggagtattcggctgttcttcgtctccaccaccattttcatcgtcccaatcatctccccagttattgttccatccatcatcaccactttcttggtcagattttgtcaccaatgcggggttagtgactggcaattccatatctagcctctggtatttgttgttccccgtgacttgttcttgtaaacatgaatgatcaccgggatgatgacaagggagagtacgaggaaggagatcatgatgatgacgatgagtgttcgcgaactgatattgagaatagaaggacgagaaacagaaactgtatcatcgctttctgtttcatgtgctgctgctgccaaatcctttaattcaagcctgcaacgtcctttactggaagctagtacgattgcgctatcgttggaccctcccttcttaatagaaactttcacgttcaaaaaaatttaagcttttagatagaaa

SEQ ID NO: 32591 - DNA, 658 bp, Arabidopsis thaliana columbia
tattttaaatccggtacatgaatttggttatttgtgtctttattttggttctgtttggtgttgcaaaattgtagttcggttttggataaaaagatatcaaaatgtaagatattaagattagttagtttcggttggaccaattttaagtgcagcttgggtaaatgttttgataccgatcggttaattaataactttggtttgggtattgaattttgcagccttaggaagagaagaaacgttgcagaagcttgaagttttggcaatggacggaaataacagaagattgatgtgtgaatgtggcgtacataagtctttgatcttgttcgtagtcaagtgtactagtgaagacgaagacggacgacgtcgtatcaaaggactagatgagtctcttcgtcttcttcacttgatcggtattccatcaaacgacgcaaaaacaatcttgatggaaaacgatcgagttatggaatcgttgacttgggttttacaccaagaagactttctcagtaaggcttatacaattgtgctattgaggaatctaacggaatacacttcctctcatatcgtagagagattgaatcccgagatttttaaagggatcatagggttctcaaggatgttgtaaatagtgttaaccggacgagccctactgtgagagaac

SEQ ID NO: 32592 - DNA, 519 bp, Arabidopsis thaliana columbia
ggttcaccactatgtccgtactcttgcacttatctccgattctttccggctctgcctgctttctgcttttcctttttctaaacaatcacacaataaaagacagagaaattttagtctacaagtagctatattgctacaatttgtctttactaagttttgcttgccttaaattttgtctttcctaaaaagattacaagatgtctttgctaagaagattacattcacactgccatgctttctgctggtccttctatgtgattattcaggtaaaaacgaaaagattacaccttgtctttactaagttcggctttcttaaatccatatgatgtttcttgcaggccaaggtagtagtatcatacccggcaaaactggataaggtaattataaaaatgaaatcttgtaacaaaggtattcaaatatcaacattccatgggtaacatttttcttgacccgttaatctacatggaccactaggtcttatactccaaacacacgggtgatgatgtttacatcaattgt

SEQ ID NO: 32593 - DNA, 468 bp, Arabidopsis thaliana columbia
atggatcttctcgccacgcatagtgctttatgtaagtttacccaatgttttttctaatttaaatagccttcttaattcctcaatcctcattacaacatcatttgcttccatctttattcattgttttttttatcaaacaattcattcaatcattcttcttctgtcttagtattttctccaacaaaaaaggtttttaagattatggaaaacatgtttttttttctgaactcgttcattttttttaccttttctttctctaatagattaggagataaatgaattgataatttagttataatcagcataattgattttaatattaacatcatagtttcacaattgttttttcagatttcataactcaaaattttagagtttagtcagaaaaccaagttgttttctgagtatatatttgggcctctgtcaaaccaaaaacaaatctaaaatttcttaataaaaataagttgt

SEQ ID NO: 32594 - DNA, 857 bp, Arabidopsis thaliana
tgccagttatagcggattctgctgagaaggctttgctttttccttcccttgttgtgttcttatcttcagagacagacacattctcatcttcttcttcttcgtcttcctcttcttgagaagactcatcttcatgttcagtctcaatacactcacctttgtcttggctcttttcgcgctcttgggatcatcaataggtgaatccatgacacacctctggttcagttcagattcaacaatctcatccactgtttccatcttaataacatagagagttttctcttcaaccaagtctttacacttgtcacctacatgtttcctggttttctttagaggaacactcaagctattactctccttctttgtcttcaagcatcgagaacagccttttgaggacattgaggctcttcttaaagccataactgccttcttttgttctgcagcttttgatccgccattcatcttctttctcttcacagtactacgccgaagagcaatctctgcagtttgtgcaacagctttcagctttaaagcagtgacacgcctcttttgttcaacaatctctttagcccttccgcgagacacatagaccgtcttcttcttcttcttctttcgcttagtcgaatcagctaacctagattcagaaacagacactaccttttcatttgttccatctgcatgactcttcttaacatcacaaactccgctagaaaagtttctaacttggctcttcgcatgatcaaagccaccaacagaatcacatctacgagaaggactcaacagcggttttgtcaatgccttcttcctcagtggtgaatccaagtttatagctccagaaaagcttctgctaacccttttgc

SEQ ID NO: 32595 - DNA, 241 bp, Arabidopsis thaliana columbia
taaaagaggtagtaatacaacaagtaatcagataaaatcaacaaaatttcctcaaaaatagtgggaatcaacagttaagtagtaagctcttaagcagagccttattttacctaccaactttcacagtttgggttttgaaacagctgaagcaaaagataaggaaaacaaaagtcagagctttatggcagagtgaatggcgacaagttcaccaacaaggttctcgtaactcaccttctcaaat

SEQ ID NO: 32596 - DNA, 594 bp, Arabidopsis thaliana columbia
gttaaggcgaatgctttgatctcgctgctagacagttgaaagtggctatcaccaatggctatgaattggaaaacgacactctattgtctatcctgggttcctatagttcatcaggcaggcattcagaagcgtttgagttacttgaatttttgaaagagcatgccagtggatctaaaagacttataactgaagctctaattgttctacattgcaaggtgaacaacttaagcgctgctctagatgaatatttcgctgacccatgtgttcatggctggtgttttggcagttccaccatgtatgagactctattacactgctgtgtagcaaatgaacattatgctgaagcttctcaggttttctctgacctgagactatctggctgcgaacgttcagaaagtgtttgtaaaagcatggttgttgtgtattgcaagcttggctttccagagacagctcatcaagtggttaatcaggctgagacaaaaggcttccactttgcttgttcgcctatgtatactgatatcattgaggcttatggaaaccaagaactatggcagaaagcggagagtgtggttggcacctaagcaaagtggacga

SEQ ID NO: 32597 - DNA, 987 bp, Arabidopsis thaliana columbia
caggtcgacacgatcccccttcccattcaacaatagaacagtagcagagagaacaaaggaagtacctttacactagcaatcacatcggttccaccaattctaactctcgctgaaccattagcctagagccaacaaaaacaagagaaagaacatatctgttaaacaactgggaagcaacaatgagaagcggacgagctctaggagattacactacctgcggaataacaccggtttcgacgtagataggacggtaagtcaatcttttccgaccatcagttcgaagatcttgagcaatcccacctttaatgaaatgttgttccccaagagaaagccccatcactaatactacacagagaacgaattagatcaactgctgaggaatttctaccggaatgacaaacttcaaggttcacggattggtgctagggtttaagagacagctcaaacaaagtacacatctttatacagcacaatcaaaacccactaatcttctttaccttcccggagaattcaatagaagacacaactctgaagttttccggtgaccctagcggcaactttggattggttaggttaagagagagacgtgaccactgacaactgccgtagggtttaaagatggcgtgaacataattattgacacttgttaagggtaatttagtcatttaccgacttaccattttttcactgctttttagagttttctcgctcttctggttttttcttcaatctgccgggaagaagtgcgagcttggtgccgatgggtcgttcgaaactagcttctcgtcctgctgaggaagacctgaatccagggttcgtttaaagtttcgttgtttgtccatcttagctcgaagtcttctagggtttcactgttcaattacttacttgtgtttgcgaaaacatttcaatatctggtaaccacttagctgtgtttgattacatgaacaggagttcttttggtacctgtataacaagggaagaagagag

SEQ ID NO: 32598 - DNA, 603 bp, Arabidopsis thaliana columbia
gttcttaccaatctttctcctttgttatacacataaattcataattgcgttatttatacgtaatacgatgtcgttccttttgcccgccaaaaaagtaaagcgttgaagatatgttttactcttttaacattgtcagttgactgttaggtaaatggcaaatcagagtcatcagacattctttgcgtcctcacctatggagaatttcatcaatcaccatcacatcatcatcacttctcatggatgttaaagataccggaatcaaccgctcggatactcctatctccgatcaagaccatgactttcgacaatggaatcactcttcgttagactctaactttctcagtctccgaagccagatattcgaagcgagttatcggagaactgatttgataagagtgaaccatgagttgttccacgagagagatgcacttaggcgaagaaatagtgagcttgaagctggaattttggaagaggttatgattagagaggaaatgaagagagatctggaagtttctaaagaaactgtcagtgaattggaaggagaggcgaaggagaaaaccaaattactatcggatattgcggattatgtacgatctatggaag

SEQ ID NO: 32599 - DNA, 577 bp, Arabidopsis thaliana columbia
  unsure (1)..(577): unsure at all n locations
tctatatttttactacattatctatgtttttatttgctatctccaacaaacttattgaacaaaagatcaaatatgtttattactcactataaactttgtctcaacaacttcaacttatatgggtatgagggatgctcttacaatgttagtggaacataactcgagtctaaaactatgtttgggatgaggatactcgatcgtcaagtgaaaaaagataattttgatctctcatccatttatatggaggttggtttaaagacactatagtcgggagaaggtgtcccatttcgcggtatgaagtcgaagacgactgagatataaggtctacatttggcggtatgaagtcgaagcgacctgagatataaggtctacatttcgcggtatgaagtcgaagcngactgagatataaggtctacatttggcggtatgaatcaagaagacttatttcaagaggggtcttatctgtgacaacaaaaggaaactcttgttgatgctttcttatgcctagtcagtaatcacaatgttctgcatatcaacctccatattaataagaaatattgaaattctttaaaatgta

SEQ ID NO: 32600 - DNA, 545 bp, Arabidopsis thaliana columbia
ctagaggactagtaacggacgcaatttttttttacttacaatactttgaataacaatgaattaaaacgaccaatattagtaaaattttatgattatttctacctaattaatcttaaagaaaataccgtgtaaattgtagtttcaatataaatttgattacattttcttgggctgaattgtttcattaatttggtgcatgtatgtagattgagtattctgcctcctgaagttcaagaaagaaatcgcaatacgaatgcgcaaattgttaagatcacataaaaataaaacatgatctaatactaaagatttcattttttcatatatttaggtttttctaacaatttttggttagttgaaaaacgcctactattgttatgaactacacagttattatccttctaatcataataatatgagcaatactctttttcaaaatattattattatcattgagaaaatcttccgaatatagtaaaaccaagtatgcatgcaaattacagacggattataatcattcatcaacttgcacgtcttagcataattta

SEQ ID NO: 32601 - DNA, 304 bp, Arabidopsis thaliana columbia
taaaacttgttcacatttcatcctctattttcattttcctcttctttttcatttcactcaaattttataaacaaaaacacaattcaccagaaacaagtcttagttaagtcaattgtccaaagcatgctgacgcaggcagtggcctaagcaactaacgagaatctcctttttcttcgtctttgaaagcaactatcgagaatctttataattaaataacgattagcgtacaacactcatttctcacataaatctgttgtcaaaataatataacttgtatttagctacaatatgtgaacattacatt

SEQ ID NO: 32602 - DNA, 976 bp, Arabidopsis thaliana columbia
cttctctctctctctctacagcgaagaacaggacacaaattactctgtgaagcttaaaaaggtataatttttaataaaacccagaaactacaatttctaggcggcagagaaaatttgtttctacttctttttgtttctctttgtcttctcgtctctttatccccaaacccatcaataaaaaaccctaaaagacttcaaatttcttcaagattttgttcatcggaagttttcagatttttagttgtgtaaagtctcttcctttttgttcgattctctttgttttgagtcttatcagagacttattcttcaattccacctctgggtaagtttctatagattctcactagtaatctctgttttttttctcaattagggtttgatcaaagtttcgtttttttctttctgggtttgttcttaacattatgcttttgttttgttaaggtggtgagagttggaaatggagtagatttgcttaatttagatctgtaagtaatcaacagacagtgttgtttggttctagaatgttcgatacggaatctcatcactcagattcatctctttccgtggtgtttacgactctgaagcttatcattgctcagaaagaatacgtctttgctcctacacagagctgagttttataaagtcgtcagttttgtttcttgctttctttgttgattgtggagttgtgaattagtaagagtatggtaccatcagagccgcctaatcctgttgggggtggtgaaaatgttccgccttcgatattaggaggacaaggaggagctcctcttccttctcaaccagcatttccttcacttgtctctccgcgtactcagtttggtaacaatatgagtatgagtatgcttgggaatgctccaaatatatcttctcttctcaataatcagtcttttgtaaatggtaccctggttctatgatttctatggatacaagtggtgctgagtctgacccgatgtctaac

SEQ ID NO: 32603 - DNA, 575 bp, Arabidopsis thaliana columbia
ttctccaatacaatctcattctcctcttgtagcatatccacctgcaagtaaaaatttagtcaacctcaagtccaacagcttctaacaattttcatatacaaggtaaaaatgaccagtagataatccacaagggttaaaaggaaaaagcccacatacttcatcacgaagagctgaagcttctcgctgataccccttatctctcgaatttactaagcgtggtacatcaccaaagtatctgaaaacgctaaatctatgagataataggaactggttttgacaaattccactaaagaaagtgaatagttttcttcacctttgatctctatccttaaatgaatgatcaattggaggaataatcaccggaggtttcaacgatgccttaggtggcatccaaaggggagacgcattcggagttgatgatctactaaacgttgatggccttcctgtcgacgacgaacgcactgaagtcacttgctcagtgatgttcctacctatctaataaaactcataaaaacaaacacaaaaatgagaaaaatcacagcagccaaatctgtttcttaagatctcaattacga

SEQ ID NO: 32604 - DNA, 565 bp, Arabidopsis thaliana columbia
cttaagattttaagcaacacttcaaattttttttttggtttataggtgggacgatgtcaatgagttattggaggagatgctttcaaatagagtatcaaatattcatcaagttattgggcaaatgatcaagggagattatgatgatgactcaaattggcagatagtggaatacgtgttggacaaactcaattcagaaggatgtggtttgggaataaggttttacaatgcacttctggatgctttgtggtggctgggccagaaagagcgagctgcaagagtactcaatgaggcaacaaagcgtggacttttccctgagttattccggaaaaacaaacttgtgtggtctgtcgatgtacataggtagcctaagatccctacactggcttcgtttcatgtgtatgaaatggttgagtaccagtcaatctaattcttggttttcaatgttctgcaggatgtcagagggtggcatgtatacagcactatcggtttggctaaatgatataaatgatatgcttttaaagggagatcttcctcactagctgttgttgttcagtgtaagtatttg

SEQ ID NO: 32605 - DNA, 1065 bp, Arabidopsis thaliana columbia
tggggtctcattgacctcgttgatccgagccagagagtcgtgattcgtgaagcttagctgagacttcaatctggaatgtcctcgtcccccattagaccctccttgcggactataatcactggttggttggttcaacgagaaatctgatttacaaagtaaactatattataatgacattacgtgaaaattatttttaaaaataattcacattcacatccaaaatattagaaaccatataatgtaagtaaataaagagggatttttggataatatggatagttgaattccggttcaggccggtgaccggttaggtgtgggaagtcacatccaggcttggtggaagatattatgattagataacaacgaagcaaagcacgaatcatcaggaccaaggaaaaaataatataaaagtggacagatcagatccaccaactagatctacatcgctttctatttgaataatcttcatcacaaccaatgatatttcgccatctcagcagagaaactattggtcatcaacgaaaaaatccatcctctaaataaataaatgcaacttgagatataggaatcctcgaagatttaaataatatcccaaattaagggtaaccgagccacatttttgctgtattttcaagcacgtggttagggatcaaatggtattttcgtcattccgaaaatacgaggatcacgtcttgcacaagtaccaaccaagctaatttagcaacgaccctaaatatcaaagctcacaatgtcaacttattttatatacatagtcgttaattaacttgtaagaaactagatacttcacagtgagaaataccgaaaataccctcgtggttagattttcatttcacttaaaaacggatctttagttgagcaatgaatgattgaatgactgaaaactatatagctcatattctacattacgatttttggcaaattctaaggaaaaatggtctgaaaatgagtaaacttgtctgtctaaatatatatatctcatcacagttactattcttgagtaaaaaaaggactaactgtctttatctgaggcgaggtaggtgaaga

SEQ ID NO: 32606 - DNA, 537 bp, Arabidopsis thaliana columbia
cacaagcaatctagttagtccaacttggcgggattacacatagagaaactccaaaggaaatgatcagagaacatggcaatgcatcaacttatttggtctgttggattgatacacagagacattaaattagcttctaattctcaactccttggactaaaacatcaagattagatagcaccaacagcggatgcaaccaaccgcataacaatcggttccgcactacaaatactgaactaggattcacttcacaatcatcttcaagaggttaattcatcacactatgctatacttttatacttatccaagctaaaaacaaactcttcttctcaacatcaatatcctcattgttaacacaactagctttaactacacaatcacaaacacttaaactagttaagaaatcattcatttaggatactaaaaacaggaatttatcaacaacatctcagagctgagaacttcaggaactcaatgaaactacaaaagcaatcagcttcatacctaatgcagagatcagtgacatcaagagatagttga

SEQ ID NO: 32607 - DNA, 542 bp, Arabidopsis thaliana columbia
tcaattgacatcgtgacaactataactatctattatacacatcgtttaaaaaaaataaaacaataccattaaaatccaatcgacgtatgtaaatcatcatcgttgacttgccaaaataaataataggaaaccttataaaatttgatgctaactaactcgggcgggtttcatccaaattaaatagaaacattgacggaacatggagtgtccaatacacacaagatccaatcattacttcgaggagtcacttcaaaactccaaataacaatgacccaaacaaatttcattggacaatgaataattaacacattattatccacaatcaggatcgtataaactaaaaacctttaattcggggctagtttagaagtcatcactttcccgtgggtcattttgtaatttacatttcccaaattatctcttttagtttcccgacgatgcctgaaaaatccaaacattagttacagtcggaatttcgaaaaccctaattcagctaaagtttgatcgttgatctaaaagctcgagtgatgaagggaaattgg

SEQ ID NO: 32608 - DNA, 605 bp, Arabidopsis thaliana columbia
tcgtttctttttttttcctggaataaggaaaactggtttttttatccatccatttatatttattcacttgacccaaattggaattcttttttttttttcgacatcaaaataagattgtaccgatcaggaaagcaaaaaaaaatgttatctgaattctcccttgatacgacatgctattttttccattcattcctttcaggatcagtcgtggtcttacaaactctaccgcagatctggacgaatccttttcttcatacaaatgtgtaaaagatgctagtcgcacttaaaagccgagtactctaccgttgagttagcaaccccccccaaaaaaaaaagaacgtactgcaaatatgtagatacaatcagaataaagaaaaaaatacagtcgtgtgtgcgtcagggataaatagatccatttatctatgagagaattatatttggtccatacactgttgtcaatatgattatgaatttttcatatagtcaaaagaatagaaaaacataataaataaaaaagcttaacctcttggttcattagttcatacaatgaatgaaaactaagccagttccagttaaggtaactcaaatctttttatactttttag

SEQ ID NO: 32609 - DNA, 558 bp, Arabidopsis thaliana columbia
ctcaaaaaattaagggccaaagcaattcaatctgcaaaaaagacacgtaaagttgtcacttaccatacaatacaacaaaagcgaaaataaaaaaagttattcaccaaacaaaaacttacgtcgacgtgtaagacaacctcccacccgattttctcatttccttacataacccaacaaaaaatacatattatcaacaccgaatctctcaacacaaacaaaatcacacatctctcttcatctttttgtttcctgcaagaatctgaatctgctttactattgtgtcatcatgatgaacatcgacgatacgacgtctccaatggcccacccgatcggtccatctcagcctccttccgaccaaaccaaacaagatccgccaagtttgccccaagaagcagcttcttctgtttcggccgacaagaaagatctagctttgcttgaagagaaaccgaagcagagtcaagaagaagatagagtggacactgggagagagaggttaaagaagcatcggagagagatcgctggtagggtttggatactggagatatggggacaagaaga

SEQ ID NO: 32610 - DNA, 591 bp, Arabidopsis thaliana columbia
tcttaaatattctgaaatctccaatatagcaaacaagcacccaaatggcaacgacacaaaattgataataggtttttaagatcaattaatccttaaacactatcgtgtcgttgtagtattttaggtgtaaatccactttaggtgtgatgcaaacagatgagatgtgatcggaagccactaagtcaagccaagcaatagcaggttttggagtttttagcagtcctaagtgaacatgtagaaaatagaaattctaacagaattacacaaaacactcgaccacgactggttgaagccagtagcagggacaggtccagtaactgttcgaataacaaacagaaattataacaactataatcgaccgcacaatctactgccacacattgggtgtggtcgagtaagttggtaataataggtagaaaatgtgaaaactaagcaacacaaaaaaaaatggttaaacaatagcaatgaaataaagaaatcaaatggacgagaaattcttaaggatgaggtaacaaatggagtggtctcttagcctctcatatggttacaaagcgcaataagctatcctacatacaagttcacacatattaa

SEQ ID NO: 32611 - DNA, 582 bp, Arabidopsis thaliana columbia
ctagaggatccccaaacaatgagatatattgatctagtgaggatccatatcagtcaaaaagtagtttctgtaaatccagattgaaagactatcaacaagagttttattccttgaatcagttctgcctgcattcacgacatgaaagcatccagcacacagaaacccaaggctttggatagaatcatgaatccatcatattcaaaactagcatatatggagccataagtcgagcttgcactatatcaaccacatcttttgtaagtagtgagatttgacaaattcagatgctaagctcagtgctttatgagcaagaggatcatgatcacccataagcagaagggttaagagagaccaacaatgcaatccaaattcacaagatgcaccaataataaagaacagtgaccaactacttgaaacaatactcaaaatcagggtataaacttttttgcaatcaggcaccattctttgataaaacacaattaaaggattcaaaacgacaacaatggatgattcaaatggaatcattcaattgcatatctcactaaaaggttcacatcatcagaaacatcatagattgaaact

SEQ ID NO: 32612 - DNA, 597 bp, Arabidopsis thaliana columbia
tgataaaatcatttatatataaagattacatttttgcaactctgtctcacactcaagaggacgagccattaaagctccaatgttatctcttcttcttcctaagtcgaatcgattccttcttagaacttttgagatacccaattctctctgttctcttttcttcttcagattgatctcttccgatcatgaatccagtgatttgtctcttccttcttctccatcatcgtcaccttctcaatgtctcgttaaatcggtctgttcattggtttgtacttcctatcttcgtcaaaaccatgtcgtatcatccccacaccgagtcaatctcgacttcgatgctaattctcttacccacgagcaagcgatcactgtggtggcttcactcgcgagcgaatctggttcgatggttgctctgtgcttcttctattgggcagtgggtttcgaaaagttccgacatttcatgagattgtatctcgtaaccgctgattctttgcttgctaatgggaatttgcagaaagctcacgaggttatgcgatgcatgcttagaaatttctcggagattgggagattgaatgagggctgtggtatggttatggatat

SEQ ID NO: 32613 - DNA, 560 bp, Arabidopsis thaliana columbia
taaatgcaatactcgttcccatttttgtataatggaaatttatgaactttcttgtcacttttaaatctgtgatattgattggccaagaagctgtcggaatcctttaatgtacttttaattcattggttatttattcctttatttttgggtgtgtatatacatttatgtttattttctactgtacgtatctatttcttacgcctaatttatgatcaacggctcatattgttcacagtgtttatatttgatctaatttacttgttgccactatttgtttggttagtagacaagcaaaaggtttgttaatcacacatttattaaaatataccagtcggactcatggaaaaaagccagagtttgcttacgttgatgtcaacattatacatcctaaaatacaatgaatttgattggtgataaagaataaaaaggagtgatcatgattcatgacttaagctaaatagagtaagcatatttgttggcgccatggtttacttcttctttgcaagtagattttattccggttttggttaccaagttgcgtaaggactagctactactac

SEQ ID NO: 32614 - DNA, 608 bp, Arabidopsis thaliana columbia
gaaatttggatacgttttgggtcgttagcataccaaacattcaacttatttttatattatttttatgtaaattttattatccatgttttttatttagattataaaaaaagcttttcaaatctttaaaaactagctgtgttttgcatccatcattagtctctagagttcttaatattcaacttgttcttttatcattgttgcatagattttagtattcgaattttcacttttagaatttttaaaacaatatttatcatttcaatagtttctatttgttggtatggataatgtggtgttctggtctgattttttgaaatattttgtttaattttgtctcatttagaattcaaatctctgttttatgcaatttacttgatcagaatttctgaatcgaaaatgtattggctgatactaaaaattaattcggttctcgttttagttacttcggtttaatttgaaactcggaccggttttcgtggattgaactcttccacgtcacctagattttgtgaacgactactataccttagacactggataatttgtcttgttcgtacttgccagagactttcaaaccaaacagaggatataagagataaggaccatgt

SEQ ID NO: 32615 - DNA, 714 bp, Arabidopsis thaliana columbia
ttattggagatgaatcaatttacaattataagtcttcatcataaaagaaaacattatagctccacattcactactaagttcaagcttcttatgagcatatatatataaatcttaggagatgcagaaaataacaaatacatttaggatgttcataaatataatgagatgtatcagaatttccttagaaattatatcaaacttttttgggaatttttttatactttttcaaaagctgaaacaatgagatttactataagccaaagataaatctctacaaaaacactagaaaataactagattatgttaataggaacctaaatatttcaattcggttcctaatttcctaggatccttaaaccaagaaacccgacccaaaaccgacttggaacacataattctagaaccctaaaaaagaaacccatagaccagtcatcactcttccccttcgcttggagctttctcgctaacggaagcttaactctccgttgctgctggtttttgaggagatggaggaattgggtttgaggttggtagctgtgtctgcgtttccttgaacctgaaaatgtcgttaacgacacagaagccattgtcttgttgaaccagaagaaacgtttgtgtaaacttgtacctcacgttatctttcttcctagtcaagtaaccattgacaaagacaataacacgaccgttccccataggattgagaatactccgaca

SEQ ID NO: 32616 - DNA, 399 bp, Arabidopsis thaliana columbia
ttgttaaaaattaagaagaaaaaacttaaagtatttgaaaaagagaatctgagaggagcacgacgagtcgacgactattacttcctctgatcagccatgtccagtggcgattgcttccattgtcatcaaccaggccactgggccaaaaactgtcctctcaaaaccactacgaaacccaccgccgccgcagccccttctccgccggacattcactgtccctgcaacgccggaccttgcaacactgtgacttctaaaactgagaaaaacccaaacaggagattctacacatgcccaagctgtggatatttcaagtggtgtgatcaagtaagtatcaaatctgagccactctctgttcttcctacttgtccttgtggcgcagggccttgtaaaagagtaaca

SEQ ID NO: 32617 - DNA, 519 bp, Arabidopsis thaliana columbia
tataatattaatagtattagactgaatattttagaataatcattgtatatttataaaaaatatgtatgaatatgttttgaaaaagtatagtttttgttatattgaacctcatatgtattgtatatgaaaagatgattggttggatgactctcacctaatataatgtcttcatatgaattgataacacaaacaatgttcagttcagatgaaaaattatcaaacaattgccaaaaattgtcggatgtatattcagtatctcatggtctcgtagtttttggagtatgccaaacttatgaatgtaagttaacaatgttggtattccaaaagataaataatatacaattgttctagtagacggttatcatggatgatctaaatcaccggaaaatgataataatggttttgtatctcaattagctctcaatgccttggtggaactacgtaacatgaatgactctatcttttagttgattaacataatattgtacgttgaatttatgtgttttgctttagattata

SEQ ID NO: 32618 - DNA, 239 bp, Arabidopsis thaliana columbia
tctcgataaagatgtagtatttacataacaattgcaagaaataatactacaaaacttcctatctagtatagacgctgccaaagaaatacatacgacgtttttatccacacgcattgatgagattggtatatatctctgtctctgtcgagtgaaaaataaattaatagagtaataattaaaagctctctctctctatctcccacgatttcctttttccgccggaagaagaagcaaaaaaa

SEQ ID NO: 32619 - DNA, 640 bp, Arabidopsis thaliana columbia
tactcaatggttaagggcttctgagtcttacaaggatatagcaagctgcagttcgataccatcttcgctggaagagtcctcaaataacctagaacccaaaagagaatatcaactttcgtagcacagaatacagtttactcaacaaaaagagcagacaagattggtgaagtttgctatcttagcaactgctaactgctcacgtgtctagtacagtaaactaacctagtttcatgaacgttacaagaaacaaaagccaaacatagagacaggaaaacatacgttgttgatatcccagcagcagaaaataaatcagcccagtgacgggcatcggtttttctggctacattcacaaccacatcatagtactccgggaatttttttattaaatcacaggcttttctcaaaagggataactttttaagatgtccaggtcctgaaatctggttcctatttggatttggcctgaaatttgtaaaagccacatgttcagtacaaaaaatcaaattaggtgaagcaagacaagaaggttaagtataaattacaaagaacagagatacgttataaagattgataggaattggatactagaaactctgcatcaaaacagtaaaagaagcactccagcaatgggagagtgggg

SEQ ID NO: 32620 - DNA, 323 bp, Arabidopsis thaliana columbia
gagtatcccctaaatagttaacattactgctgcaactctatattaattgtagagttatggaaaaacgaaagtacaaactaaaataaagttcgttaaactagaattttaccccggaaaatccactatttttatgatatctcctttaccggagttacacaaatacactatccatatgtctatagcgatctttgtcacatatctactccacccactaaaatatacttctatccgctcaggtttgtgtcgtatcatctatcggccctagttagatcactgatctcatacttccccaatgcgagggcatccttaggattgattatcag

SEQ ID NO: 32621 - DNA, 448 bp, Arabidopsis thaliana columbia
tctctatttttgcatgaagaccacagattacatcctcccgagcgcggatcaacattagtcccgcttctagctccttctcgttcgcttctagctccttatttttggcctttaactgttttctccttgcctccagttctccatctcgggcagccattagagactttgactcttccacttcacgaaggagtgcgtcacggaggtttctttctgcacttgggttctttaaattctcattagacgccattgacgcgtcaagtgaaggccagtatgtgcatagtctctcgcgtacctaaacccacaagaaacagatgagctttgtcaattagtagcataggcggtatacagatatttatgacacaagaactgagctgtcaatagagatcgtagccagttcatacaaaatttcagactgttagggtctatatagagcgataccgcttgtatgaca

SEQ ID NO: 32622 - DNA, 481 bp, Arabidopsis thaliana columbia
ttcaagtttgcttgcttgaccaatgcgtgagattgcatacatatcttgtccgagtaaaaaccgagttgttgaaacaatacagagcagggccttgccaatctgccatttcaggagataggagtgaagacgtcccataatgagtcttatccaaaaggaatgtcacctcagaagctcctgcatcttccgcattttgaaccagctcaaaaagaatcccaggcccatcagcatacatttctagtatgtgtttaagtctggtggtcaacgcctcatgctgtccaaaggcctcagcagccccggataaactaaaattcattgaatcagcactttccgccagcaagactctacgaagagagcgaacaccaagcttctccgctacctcattagatatgttaccgtggacaaacttttgcattgttctttacgcattcaatagcattgtagactctgcactaaacgagctgttaagattgtctgatgcagt

SEQ ID NO: 32623 - DNA, 617 bp, Arabidopsis thaliana columbia
tgaaaggttatgaatggtcaatgatcatattcttagctaaggaaagacaaacgcctctctttctctcggagttgtatcatatgttttttcttacacgttttacatataactactgtacagatgaatacagttcactttccaatgaaaccaaatgatgacatttctacataactatgtgtgcttttcattcccaaacaagcaaaggcatctttgtttctcactgtgtattaacatgtgtgcttttactaaaaagatgtattaaagcaaagcaaatgatgccagcaacaaacagagcgtgccctgagattggtagggccctaagcccatacaactttgttggccctttcagttaagtttagaaaagaatcacttgttcaataaccaatgttaattgttgaaagatgaatttaaccgaagatttctttacaagtttttgacacagtgatcataattttataatgctcacaagtagcagtacgtgactcttgtaagtcaagtagagagacataaatataccagaatattaaacttgtatgatgacaatgacgcatccatttgagccatgcttcattgctctccattcagtgattgggcagcatatgatatgtattgtttta

SEQ ID NO: 32624 - DNA, 567 bp, Arabidopsis thaliana columbia
gcaaactcattgttcggaaatctcaaaaagatatatgaaatactaatctgtcatcaacttgaagaagacaaggcaaacaccaaacagttcatcattgattgcatgtaatagacagtgagaaagctactgacactaggaacattatttatgggaaatgatatcaaataaataaacgtcattttcagagaaataaaattaaataatcaggtacatactccccattcaaaatactcaaaaagaaatttctgttactagattagtaatcaacatgatgatgcacaagtgatcccaacagtacatgatgatgcacaagtgatcccaacagttaatcacggaggcaaagctactgatgctaggcataatatttaggggcaatgatactatatgaaagagcgttacaaactcttcactaagaatattaacactaataaaagtaactttcagagcagtgataaaaaatacgcgcaattaatcacaggctgcataatagtaggctgtatgaaagcttcagatactaggcatagtatttatgggcatttaactatagaaaaataatgtgacagtaga

SEQ ID NO: 32625 - DNA, 510 bp, Arabidopsis thaliana columbia
gatacctcgtattatatcaaagttttaaataagcaattaaaaacagatatatatatcagattaaccatgtaattttctgtttcagtttcatttacacgtttagccagagtcgtgctaatgtatatgaagaccggatgactaaaaaatgtccaatatgtataatacgaaacttttcaaagtaaatacagtaagataacacaaataaaagaacagagaaacaaaaaattagctccaataatacatgtgtgaagctaaaaaaaaagagcattacttgtaacaacgaaaataattcacacatataacattcagaagtttatttttttgtgtttagaacttttccccgttacatactaataattattagcactgcaatacacgtttaccaaatgcacaatcacatagattcgtgctccatatatattgcgattgagagcatcaaagtttagagagtggttcagccatatagcttttgtgatacgcggcctgcattgctggaaacaacatttggct

SEQ ID NO: 32626 - DNA, 1074 bp, Arabidopsis thaliana columbia
tcccattttattcctaattcttttgtctatttgtgaaacaaatttctgatgggtaatattcttgtttactactataggaacttattctctctagttgtttctctttttttagtcgagctgatttcaaggaggaacctgctttcagttggatcactgacctatctgatgaagtaaagatggcaatcagacagtcaaaagttcttttctgcaatggttatgactttgacgatttcagccctagttttattatgtcaacgatagattacgctgccaaagttgggacagctatcttcttcgatcctggaccacggggaaagagtctgtccaagggaactcctgatgagcgtagagcacttgctcatttcttaagaatgagtgatgttcttcttctaacatctgaggaggtacattgtgcatctctcgctaatgctgaaaatttctctactgtgtcaaattattgttgacctctttaatgaattacttaggtggaggctctaactggcatcaggaaccctgttaaagcaggacaagaaattctgaggaacggaaagggaacgaaatgggtgattgtaaagatgggcccaaagggttcaattctagtgacgaaatctagtgtctcagtggcacctgcgtttaaggtacctgcttacagatcataaatatcgttcattttcggcattcacatcaaggtgttgaaaattgaattattatgtatgtatcatagagtaagtaagtttgtgtagtgatctaattttctttacgaaaacatgatcatcatcaggtggaagtggttgacactgttggatgtggagacagttttgtggctgcaattgcattaggttatatacgcaacatgccgcttgttaataccttaacaattgcaaatgcggttggagcagcaactgcaatgggctgtggagcaggtagaaatgttgcaaaaaggcatcaggtggtggatctgatgaaggcctcgaaactcaatgatgaagagaagtttttcgaacaactcctggctgaaaattcagagtcatctagaatcaatcttctttcaaaagggatgataaaggatgggag

SEQ ID NO: 32627 - DNA, 739 bp, Arabidopsis thaliana columbia
gggcctatcaacaaaattatgcatataatcaactcactgagaaaaaatatacttcaaaaccagtactcgccacaaacatagaagcaatcgtgttagcttattaaaccttaaaagtatgttttgaatagtttcagttttcgaaattaagaaacaatctaaacaccaattaagtttgacacgaaatcctcaaattcttaagtctaagtatctatctgcaccaatggagctaacacaaattatctatctccaattcgaaattgagtgaaagagggatcaaattgcagctaatcatcaacatttcaaagtttacggagagaaaactaacagtctccgagcttgttgggagtggtgatagaagctttaacgcagatttcaagaggactcgccgccgtcgccattgtaacaaaccggccaacccttcccggtttagtcgaaccgcaccgcttgataaaaccggcgcggctcactgacgccgataaaacaccggcggtggtgcttggttgaaacctaaggcttatcatatttttcgcagtggtttaatttccaactagtcaactggctcatgactcagataatcagcaaattctcagtggctaagttgactgacacgtggcgaaatataagataatcaagtgaagaccaacatgggcctcaatctctttatattctcagcccattactgttaaagtcttttagccttttaaaaaaaatgatttcttgaatatgctcagtggtagtc

SEQ ID NO: 32628 - DNA, 923 bp, Arabidopsis thaliana columbia
caaaggctagcagaaactttacatggagttcagataattacctatcagtgagcaatggcaatgtgggatcagttaaaagtcctttcttgaagttcttctcgtatttctccaaacctagcttcactagcattgtccttcctcttgtgaaaaatggatcttcagtactcggtttagagaatctttctcccaactaaggaatcaaaccaaaaaaaatgcttatatacagtttccatgagtagagagagttttcaatatgatcactcactttaaaaaacactccttgaaaacagcaaaaccagcagcagtagtgattgcattcataggttgtccttgcaatccttggctcaccaatgagtatgcaaatccagatcctaacgctgccaccactctgcaaacttaaaaccattactttcattctcaatggtaaccaaatcacaaagaatgaaacttacgcagattcaatatcctctttgcctctaatccgcttcataacagaagcaattccagcattcacaccagtaattgcagcaaaattccgagcttggacccaaggaccacccacaagagcctacagattcaaaaaccctaattctcatacctcaattttacaaacatttgaatgaggatagggtttatatagagttgaaacctgagcttgtttcatcgaagctatggcttgagggtcaacgccggcttgaggcatttcaggagagagtgttcccatgagaccaccaatgaaagctccttgtacaccgctcatggtggatacgacggcggcttccaccggaatcgactgtttcgacaaccatgtcttgaaattagtttctacttctttgaatttaacctgaaactgttgaattggattctgctgatcgttgaataaactcgccatcgccatcatttctccgctgcttctcttctga

SEQ ID NO: 32629 - DNA, 808 bp, Arabidopsis thaliana columbia
ccagtttgctcctatcctcaatgcaaaagtcaccagtttcatgaagtttgtcatgtatggagccaagcacttcacagcttggttgtctatctgcattacgtcacaaccaagctgatcctctacgacgtgcatttcccgcctaaattcgcataacatgtgtaaccctaagagcgaccatgccaggaaccatagatgtgatcagtcgtctcccgtagttctctgctctgatgaagtaaaacatgtttggaacttttctttcatccatctggacattatagttgacaaggtaattcactttgtgatgaagctggatcagaagtctgtgctcatagtatctcagtccttggatctcttgtttcaggtcgcgtatctcttgctcaataatcttcagtctctgaagtactgcttctactcctttagcaattccaccgaagctaggatcaactttttccagctcattggtcaccggtacatgattatctgcttcggggttttcgtctgttggaacttgtagttcttgtgctaagttgtgcagatcatggtaccttctttgcaggacttctctgaaatcatcatcagagaggaggttgcgggctaaatcaaatccggctcttagaacagtcttacctgaatctagaacagagtcccatgtgtgttgatagtcatacatagtctctgcaggaactgatgataatgcttcttttagtctgtggagggatacaaactggctttgtcggaatcgcggtggagtcaagtcctggacgcattgtggtcttatgatgtgctcaaggaggattaggggatgagt

SEQ ID NO: 32630 - DNA, 679 bp, Arabidopsis thaliana columbia
tgaaggagcaatatgtgtacttcccaatgcaatggaacaccgagatatggatttacaagggaatatctactcatttggcatacttttgctggaaattgtaagcggaagaccttcttattgccaagacagaggttgcttggttgaatgggtaagaatagcttttctctataagcttaaagctgagtacttataataagtctctctctctctcttagcggtttacgtgttttcatgcgtttgatgctgaggatttgattcaaactcctaaatattgcaggtaagggagaaaaaccttggtgcaccagatgtgatggctagcttggtggatcctgagctcaagcatttcaagcaaaaagaacttgaggcagtatgtgaagtggcaagccaatgtctgaacttggaccagaatgaaaaagacaaggataagctttcttgttcgattcaagcgctttgtgagacactagagagtagaatcactgtgtccatttctgcagaattcaaatcgtcttctctggcgtgggccgagctagcgctggcctcgccttctaacgaagacgacgatgataggagtaaataaaattggctttgttgttatgacattgacatacacttgttcgaacatttttgcgtcaaatttgcattcggttttgatagcaccgaccatgccttggataagtta

SEQ ID NO: 32631 - DNA, 1059 bp, Arabidopsis thaliana columbia
caataaacttgtggttggaagctctgtcaatagcagcacatctccggtccctggaacccccaaggagaagaagcgggaagctcaagtggttgggtctggagctggcaaaagagaaaagagatggagtaggggtaaggtcctgggaacgagtggatgcggcggcgtatgctagcatgagagaggagtgagtagcgcaacagccattgttggagctctctttctttctgggtacaaagaagaagaagaagagtgcgagtctccctaatccactccacgcccaaggggataacaacaccccctattctttctaagctattattctctgcgtggcgggcaccttagctaccgtgttcctagtgacacgtgtcttcttatggaccattagatcttttaacaacccacacgcgtatcctcgtgacctcttctccttctccttcttcttcttccttctcttttctcaaaaatcagatttcgagtttcttctttcccgcccgtaagagaaaccctactctgactctccactccatttgagaggtaagttccgattccttttctctcagcttcaaatttcctgtgctactatttccccaatttcattcatcttctgctgactcattttgggtgtttcactgtagactgagctcgttccgataaggagaggagatgtctaacgtaaccgtctgtgcgcgattcaggccgcgaagctctaaagagatgcgcgatcccagcagagatggtgtctgtgctcgacccatcgacgctgaaaccttcgttttccaagtttgtctactcgacgccgtgtgcttgattaatattgtctctctctctctgtctctcaaactctatctagcgtttttacttgcgtgtaggatgacaaggaagatgaatttacatttagcctcgatagagttttttatgaggactctacccaagctgcggtttatgagtttctggctctccccatcatgagaggtactaattgattccttgatcttctcttctggattttagatctaaacatttgagcaccaatcttatgattttacaatgtaatcaacg

SEQ ID NO: 32632 - DNA, 609 bp, Arabidopsis thaliana columbia
tcctaattctggtatttcacgatgaaatacattgttgttgtccagagcaatccattattgcggcttgcaaggctggaccacaaacaatggagaactaattttttactattactactgcatttgttcacaccacatattggttaaaacttcaaaggttctttgttcgttccagatattttgtgattaaaatttagatcgtctgccagataaggaatttacagctgcaaaagctagaatgtcgattacacttttctattgagtaatttaaattgagtgttaagtagtatacatacctgaagtagtgagggagtccaaacaatttccaggtacttcaaaacttcacaagaagtaacatcaatggtcatcacatttggatcattgggccagtgagcaagagtgtcttcaccaccattccgtccaattacctgggtttatatgatcagtcctctttcttcacatgtccatgacaagagcgcacaaataatcaaagagagaagaagagtgatcttacctgtaagtgtttaagaacagtcgagaaaattggaggactttttaggcgtaatgctgtccacgaaaatccaggtggaatgaatctctgagttgaaagaa

SEQ ID NO: 32633 - DNA, 582 bp, Arabidopsis thaliana columbia
  unsure (1)..(582): unsure at all n locations
aaaattttcgtctaaattagattcaaaactgtatagtaaaatgtttgggactaaccactaaactacagtcacatttttgaaaatgatgactctaaaacaagttataattatttgctgcgtaatacccttgcttcatgggattacgtggagaagaagagtaagtatcaatcaatttattgctagagatttgcaaaagggggaatccgtgtgcagaggtgtctagatgaagccatgagtctacagcggagtttgaatttgcggtggatgagttacggtggagatgacattttccaaacattacaagccttaacacgtgtacctactgagattttgatagaacttgaaattgtttcccaaataaacctcttattcggaagttaggttttggactcaaaatggatgggatgcatcatgaggtatgagatatgttcccaatgtagtctccggcgatgagattctttatcaccatttttatttaacgttaatacttaaatctttgtaagacagaaaaagaataagatgttagtcaagattagaataacgagacctaatttgtgaaattntcagtagctttttgtggag

SEQ ID NO: 32634 - DNA, 186 bp, Arabidopsis thaliana columbia
ggaaaatatagagcctttagacttgaacttccacatactaaaaaaaactaaataagtaaataaatctgtgctaataaataacatacaatacaattagtactatgtagttaagaaattatgctaaagattagttattaagacacatacaggaaaatactttgatagtcttaattatttagataatat

SEQ ID NO: 32635 - DNA, 107 bp, Arabidopsis thaliana columbia
tctgatcagcaaccgggcgaccgtgccaccaataaggccacccagtaccaggccgaagtagctgatgccattgccagttcggaggccgacgccagaccgaacttttc

SEQ ID NO: 32636 - DNA, 583 bp, Arabidopsis thaliana columbia
tctattttataatgtatagccagccaataagttatcatttcaatgagattcatcatgatcccaatgccattctctatataaattgtcgcaaccatgtgatgaaaaaacacaacaacccatctataccatttttctagctaaaattaaactaacacctttctaaattgaaaccattgtcacataacacatggctaacttgaaattcttgctgtgcttgttcttgatctgcgtttccttatcgcgttcatcagcgtctcgaccgatgttcccaaacgcagacgggattaaacgagggcgtatgatgatagaagcagaggaagtgttgaaagcgagtatggagaagctaatggagagaggttttaatgagtccatgagactcagtcctggaggtcccgatcctcgccatcactaagtcttattctcgtagttttgaattcgaggatgtatattttgttcttgatcgagaaccggtttagaagaaaacatatcgatcctctttgtttgttttttttgcgttgtttgttcgttcggtgtaccaatatattgatgtatctgtttcgttacacatttatgatttgtgcat

SEQ ID NO: 32637 - DNA, 586 bp, Arabidopsis thaliana columbia
tgtcacctctttagttaatgtgattgttgtgtcaactcttttctttataacagcaagtgcaagtttcatcgcagcggctgcatcgtgtacgcagtgatgagaaacaccggccttttggacttcgtatcccaacacagactggaaatttatttatttttagaaagtatatattaagaatgttaacatttttatgtgaatacctcaagagtagatatagacttaccatgcaaagggtattaagagaaggtcttcttagctttcgtgaattaggatacttaaatactagtgaagtatcaatcactatgggatgatctatcttcaacactggtaacaaaatactcatgattttagacaaaattccaaattaaaattaacaaggactctactagaaaagttttatttacctatccaagtcatggttcaaactgtgacctaccaaaattgcaccagcagaaagaaacggcctcaatttttcctgcacaataaacataacatcttgaagtgttgtctcttgaaataataaaataaagaagaagattctatatatagattacctgaatatccacagagagagagtggcttttgg

SEQ ID NO: 32638 - DNA, 454 bp, Arabidopsis thaliana columbia
taaatagtagaacaatgcatgcatatatatgtgagaaaaacaatagaaacgaatctagagagaagtaaggaaaaagaaaaggcaagtaaacaaaaaacaagtagctttagcttcacatgaacgattcattcactgcttgcaaagttgaaaatctatggaaaatggaatctcttgtgatatggtactttttgggatactgacaaaggttgatgaatgtgcattgtttacaaaatcgacggttttgatcggctctgaactttctctcagctgactttacgtgtcttttgcaccggcataggtcggcctgctctatattcataattgaattttgtcaaccaagatatttatatattttttgtcgcaggtaagatagttatgtgctgactaaagtagatactgtgtgagaaagagataggttcagttaatgatttgatgttatgacattcggatattg

SEQ ID NO: 32639 - DNA, 305 bp, Arabidopsis thaliana columbia
cacaataaagtttaactctttcatgaaatacttgcgaggatacgtacaaagcagaacgaaagagagtaattcgagcagagaaacttgggttgattttgcagattcaagatacaagttttgagatcaagttttaaatctttacatagagttgttttgtataaaacatagaaggaaaaataagtaaaaagaagatattatgttttgttgaaaagaaaaacctatgatccagcgatgggctacaactcttatctgcatcatcatgatcttagaagattaattgtcttcccccagatattagttttgtt

SEQ ID NO: 32640 - DNA, 553 bp, Arabidopsis thaliana columbia
caactaattatatactgatctttgaccaatgttattaagaggagtatggtaaaaaggaaaaagaaaaaggaagatgaaatctgcaagacacattgggaggttccaaatggatttgctttcctatattttccacgcgtgtgagacgcacgtgccgttgaaggtctgacacactcagaactctgtccagatcaaagcttgtctcatgtggtcccgtttttttgacactggactaggacgcaacgttccacgtttccaacgccgtgagtgttttgcttgagaactacgcgagtggaagagaacggccgttagtattctgacggaggtcgtgctgcctaggtgtggttagctcgtggtgtgcgcagaacataactatatccacgtgtccgtcatgctaacgtggaatttttacagagtggcagatcacacgtggacatgtccgaatggattttgaacttttgaatatgcttctttgcactttctattggttgccgtaaaaagtcaaagaaaacagtgatttaaagaagaaacgacggcaactaatattattgtatta

SEQ ID NO: 32641 - DNA, 545 bp, Arabidopsis thaliana columbia
tcaaacaaagaatttagttctgatgatgcaggagcacctgcagaacaattacaagatttggaagctggaacaactgttgaaaaccagacgagatcagttgataatgtcagatccattggtgtcaaaaggaaggcaagtcgagacaaagcatctgcacgttactccaagagaaagaagatagcaggccaacaatctatttctactgataaatcgctgaatctacacctgatgaaagatatgcggcttgctaatccaaaatgtttgcggatgaagtttttgtgtagacatggggatctcccgtccaaagcagaactgttgaagagattcagtgtgtttgggaaaatagatgcttcaagaactgatgtaaacccaggggaaagctctgcgaaagtagtattcatgcagagcatcgatgcagtgacggcttatcaatttgctaggagcaaaaagtttagactaggaaagtctaaggttacgtaccgcctcgaaccctttgaggaagacaatgaagtaaaaaaagttcctttgcctcagaagccgcaaaa

SEQ ID NO: 32642 - DNA, 554 bp, Arabidopsis thaliana columbia
caactctacctcgacgatgaccctctccgattccagcaagcaactcaaattcgagaaagaacctgaccctgaagttgactgcgaccaaggaaaagagaaccaaagcagaaattgtttgagcaagcatttgcaatacaataaccaaattatgagctttttggatacgaaaaaagaaacgacattcacgtgatgtctgtgtaattgtgggttaaaaggggaaaaagcgtgaatcaggagagaattgagagcaaattacatcgagtttggtccattcaagcgtgtcccaactaccggtaccatccatcttttctgattccgaagaataatcacgcagcgaccttactcgcccagacggtggtctcggcggcgtcatgaaaaaggggggagagaaagagacggtgacgaggcttctggtgatcacctgccgatcaacggagcaaaacgacggatttgtttcgcacaccaatcaattaatacgacactgttttggtttggtacgaagttgtcgttttttccttttgtactttattttgtttagtgttatctatttgtat

SEQ ID NO: 32643 - DNA, 568 bp, Arabidopsis thaliana columbia
tagaggacccccgtcaaagaatacggtcgacgaattaaatagataaaaagaaaaatgatcaaagtaatgtacgaaatggagcgttaaagagtgaaaatttgctttatagttcaaataatctttagtctcgatcttgaatggcaaaatatttcaaatcatattcttttcctaaatatggaagtgctcctaagcaggtgagatattactgattagcactgccaccgagtcatttggtgaagttatcaaactcggtgtattcactatcggcttcgttttctattaaaatgcacacctcaaaatattcagaaaatctttacagttttatctcatttttaatctaaatcaagaatcgataacaatattttcggaccataatctgagcaaaagataaaacacggtaatagttcttttcgtttggttatattttcatgtgaatactgtagtcgtttgggtttttggtccagtccttttagctttcaatgcctctcttcaagttgggtttgatatccttttattggggttaggcctttttagtgtcaatttttgaaattttgtaatcactagatag

SEQ ID NO: 32644 - DNA, 538 bp, Arabidopsis thaliana columbia
catctttgaatattcttctacatgaacctttataatgtcatctatggttgcatgaggaagagtctcttcattcctgcaatctttgtcattgttaggttcttgttcatcatcaaagcttattaggtcaataagatcatcagagggtttcagtgaaaggggcggctttgggttgccgcaacctggactctcgggatcagacacagagactgttttgtctaaaatagctacattattgggttgacacatgaagaaaaggctagataccatcgaacaaattaaactacttagggcggaatacatgagggaaaggtgagacacgatcatcataactagtctacttaatactgaataaacggttgattcagcaactcggtttctaatgtaggagaagaaggtcagaacttgttcccccaatttggttaggagaagcttccatgtcatgatgaacgagaggtggttcacttcttcctgtctataacgatttggtttaagagatttgatatgtcgattatacactagtatgtaatatgaggataga

SEQ ID NO: 32645 - DNA, 384 bp, Arabidopsis thaliana columbia
ccttgaaaatgatatagcatgcgatatgttatgaatatggcatgatgattctaattcaattatgcagtatgcttttataatttaaaatttattactttgaatagaactagattcatctagtctaacgctagtctacaacatagcttatgaagttaggcaaaacagttatgtacatcgcatttgacaaagagaaattacgatagaaataacatgcacctttatgtaaagattttacctagtggtaagtaattcctccattatacaagtatgatatattttaaatgatagaagaagatgaaaacgttggatgataattatatccaacctggtgacctaagcatatgccatgaattttcttcttcatcacatcaagttttttgccaa

SEQ ID NO: 32646 - DNA, 323 bp, Arabidopsis thaliana columbia
gagtcaaccatgccctctcgtaccaagatcctagatagcggtaaatcatttctccagatttaagggttccaataaattgttgtgtgttttatttttcaccattatctgctacagcttctatcactggaggagttgcgtgaaagccgtataactgatcctcatttaccgaggtaagtggtagtgttttccagtgtatgataacttatatcaaaagctcaagttggaccaatcttccaattgtttctgtctttcacgagttatcggaacaaagttgcaactagaaactttgttccatggcctatagagattcgattttgtgagcc

SEQ ID NO: 32647 - DNA, 477 bp, Arabidopsis thaliana columbia
atttagtgtgatgctgcagctatcagttgggccagttcagttctcctcttcacagattatggtgtcttgtatgctatctccgaatttgtatctctatagattctcaatggcaacaataagtgcattatatttgtatttaaaattagggttagatcgcactaaacttattgatagtattagctagctgaaacattattttatatttgcttcttggaattgcatctccggaactgacatcaatacggtgaccaaaaatttggtgcgattagcagtcttgaaggagacaaaattatctttaggaagattgaatcagaggatgtaaagaattatgtaactgaatagattaggagtgagattaaaataaatagagatgatgatacattttatgttcatgaccacaatattaaccctactaatagatgaataatatgaatagtatagattgggtagatgggtgatacgattgatttttgacat

SEQ ID NO: 32648 - DNA, 558 bp, Arabidopsis thaliana columbia
tattaacaaaaactttgaaaaaaaatcttttttgtctttcataaatttaccattatcagtaagtctattaaaatagcaaaagatataaaatcttcaaataaattttaaataaggatattggtaaaaactctctcaagtattggctggtctattttaaacctcaacagaaaaatccctcagataatttcttctcatgaaaatacccctcaactaagttattaataaaataatatgtcaagttagttcataaacaaaaaatattcattcattctataataccttcaaaatcccaatactgaaaaaactaagcctgggcgtttaatccgaatccgataaaccgaaccgcatccgaactgggaaaatcggattaaaaaccgaaccgaatccgctcaattaaccgttcggttattgatttctatatccacggttatcggattttatccgatcgaaccgaaataatatggctatccgaaaccaaccgaagaacttcttctatacactactctttagccttcgaagtctggatcacttcccttatgatgattatcaacaatatga

SEQ ID NO: 32649 - DNA, 351 bp, Arabidopsis thaliana columbia
tctggaggatctccgttagagatgtttttttccgagttttggcttaaaaattggttacatataaaaatagttttaaaattcttttctcaaatctcaattgcgggttttaaatataaaaacagtatctaattttatttttttttttttgcgtgcgtttgttgtgttcttttttttcttttttactgggttttcggccctacctgttattattgcgctctcgggcccggaactctggccttttttgtgtttgttgtgttctgtgtccttttgccctgttctgacctctttttttctctcggttccgtctcatcggtcttgttgtcgggttttaatgggacgtcttcttttttt

SEQ ID NO: 32650 - DNA, 249 bp, Arabidopsis thaliana columbia
tctagaagagatgcctgctaaatgtgtgacaccaaactaaagttgatcacatgatcgaacaaatcccacaaaatcaaaatccaacctcatagaaatagcatgctctgtttcttacttgattaaattatgtatcaaagatcataacatgtaataattaattaatttttattaaggtctggaagtggcattaaaagcataacatgcagttgaattaagtgattaaatgtatgttgtgacagggtctcgtcc

SEQ ID NO: 32651 - DNA, 528 bp, Arabidopsis thaliana columbia
actctatagattctacttctatcttgatctccttctcaagcttttagtcttgacccttctcagcaaaatgagtgggtgtcaactaacaacaacaagggttgtcgtcttaatgttccttcttctgcaaacccttttgataatgcttttgagtttggctctgaatctggttttcttaaccaaatccatgctcctatttcgatggggtttggttctttgacacaattggggaacagggatttgagttctgttcctgatttcttgtctgctcggtcacttcttgcgccggaaagcaacaacaacaacacaatgttgtgtggtggtttcacagctccgttggagttggaaggttttggtagtcctgctaatggtggttttgttgggaacagagcgaaagttctgaagcatttagaggtgttagcatcgtctggtgcacagcctactctgttccagaaacgtgcagctaagcgtcagagctctggaagcaaaatgggaaattcggagagttcgggaatgaggaggttagtgatg

SEQ ID NO: 32652 - DNA, 563 bp, Arabidopsis thaliana columbia
tgctgcttttgacactttaatgccaaatattccaggtttgctggagacaactaagttagatgagaacaagttcggtgggattaggagaaggctgtttctagacaatgaagcttcaggttcgaatggtgcgatcagatttcactctgttgaatcaacttatggtgactcatgtttcactaacaaccaaattacagaagctgtacttgaccatgtcgctgcacctgagcaatgtgccatgatcagactaggagatgctcgtagagcatcgatgtctcatcattctgaagacaatgatacagatggtcctcagtttattcaacatttccgtctgatgttgatgaagattttataagagaagttgaagcagctgagaaccgtgagaatcagcgtcgtagatagtcgaaaggaaaagggaaatgcaaagagagtcaggacgaacctatggtcaaggataataccgatgattccaacatagatggtgtgtgttggtctggttcagatgctaatatttctgatgatgatatttggatctagcatttgatagacatctatgcatttgatga

SEQ ID NO: 32653 - DNA, 922 bp, Arabidopsis thaliana columbia
tgtaataaacccaaaacgcctgctcctttttatttgacggaccagatttagtaagcaataaagccttgaatttcgaaatggatttttttgaaatataattggctccataatgatatcttaaataaaataaaaatgtaggccagttaaacaactaaaatatattttcaaaaagcacataaattatcaaaatcttttcatagtaaaaaaaaaaaaaaaatggataatgactgcattgacatctctattactttgacattgatatactctttgactttgaactgatccatgcatatgataagagaatgtaaagaataaacgcaaaataactatttttgcaactatagaatgagactctaatattttgtttagaacttttatttcgtcaacaaaatgttacagtaactacattgcttttaaagttaaaacatgcgttatctgtaatcataaaagtatgatacatcgttcaaataaacttaaattttgtgtaaaaagttttaaaaacctttcaaacattatgtaaaaaacagaagtggacatagtatatagtctatagttcaatcacaaaactaatataaatttaacattggttttggtcgtctatagtctatacatatggacaatggtcatattggttaacgtaagtaaaatcattagtaatcaccacatctattgtaatcgtacaaaccaaattgttaatgatgattggggaagtggataaaggacgacgaaccaaaggcttgtctgaatttcttctggaaagagaaattaaaacaaaactaaaatatgtggagagagacaaataaaataatacccctgggacttatcagtattgtcagagcaaagcctgagcttcttaataattgaaaataaaattaattaaaacaaaacacataaaaatttctgaaaaatctctctctctctc

SEQ ID NO: 32654 - DNA, 759 bp, Arabidopsis thaliana columbia
cacttatagcagcagccatggttgatcagaagaagaagaagaagatgaactgatgggagatcaaagtcaaaaaaataataagcaaaaaaaaaaagatcaaagaaaaaaagattagcgggagatatatgatgaggttgtgattggatgtgtgtggattgtgtgaagggcaatgtgaggccaagtgttagagaggataagttatttctgcttatcattgtcctaatttagcctttcatgcgcctgttgttcacatttcagtcctacatcaaaaaaaaaactgttcacacatccatctcacaatctggtagttactgggctagctaatgggctcaagcacttattgatgggcctcttatgacatctattttgacatggagtcatccctccctcacttgttacctttcttgttgtcttcaaagtttacacacatacatagagctctcatcccaaattacacgaaatagttcaaaagaagctcaaataatcaatgatatcgtctctgcagatatatgaatctgtacagaaaagatcagccagagaaattcaactacaaaaagctcaaaagcctttttgtttttgatttacacgggtaaagtattacacaacaaggtattctgcgttcgctggtcacgaaatcagaatcgaaataatgaatcaattgaaattgtaacccttgatcctctttgctggtaaaggtccagtcctctctttgcctcctgcaacaaagcttctaagctctccagctgcgttacccatgac

SEQ ID NO: 32655 - DNA, 636 bp, Arabidopsis thaliana columbia
tgccgactcttttgctgcatcttgcctaatttttgtcactggcctaactctgcttgttttcaaggttatttttttacaaaaaaatcgaacatatacgattcggagcacaatggagaagtgtttcgatactaaacttttagaggtaatatttggagtattgtttcatttaaccaatataattcgttagacgtaactgagatacgaaactaaaacgtgtgggaagtgaattttggatgataaaaaagattctacaacaaaaaaagggagagagattagttaaggaaaacaaagagtacaatatattgtttagcacttaagaaggtatacagacaagaaaatcattttcatttagctatgtatttaattgtatttgtagagctttaataaaagtgaaactatgtattaggtagagaaggtgcaggaaaattagaggaacttggaccagaacttgaaggaggcagaggttgttccattggtgaatgtcaaatatgttactctctcttcttgtcctcgctcgagaaatgaccgttggcctgaactttgcaacaactttgtataactccaataatttatcagatcctcttctgctttattcgccacagtgtcagctggtgacagagaagaggagggggagga

SEQ ID NO: 32656 - DNA, 635 bp, Arabidopsis thaliana columbia
cgactctatcatctagtaaaggatgtcatatagatgacttatgtacgcaactatgcattttcatattttattcttaaaaaagtatcggttcgtagtaaagtctgaattaagttttttacttttgtccttggaagagtacggaagaagacactaatctacccttgatttaaggagacaaacatatcattaaaaggagattatgtttattgattttagattataccctaaacattatccaattaaaatagaaacagttactttaattgacttttaggctgtatcggtcgtagactcgtagatagcagtagataccatgaaactgaagctaatccactcaccattccgtcggttcttctacctatgtaacttcaaattatttcacatggcctacacatagactatagtatacatttatctaagaccatgcgttatatgattatgataagaatggagctcgtaaatagtatatcagataaagttgaatgacaaaaatagttgatcggtaacataatattatacttgattaattgagacatatattgaggataagctagagttaccatatcctataactattctacttagattagtactctcgtatgaatcatatgttacattttatatcactttgataa

SEQ ID NO: 32657 - DNA, 789 bp, Arabidopsis thaliana columbia
ctggattggagagttgtaaaattctaactgtattaccgattttttcagctcgaaatatgagttacatatattgtaaatactaaattttacataattgtttctaaaatcttaatacaatcatatcaactatcttttttttttttttttgacaatcaatcatattaactatctaataaaagtataaaactacaacctctaaactttctttttctaaatttcttcgtttttaacttcttaaataatacaatcatatcaactatctaataaaactacaacctaaacttcttttctaaaacatcttttttttttaacccaaaatcaatacacaaaaggtgctttctctttgctatgaaatctctattcttctcaaaaaaatatttacatagttttcatcacctacattgtctctaatagtccaagttaggaatataatctgtattttccgaaaccgttgcaactctctctctataagaagttttgaaacatctgaaaccaccaaacactctcgacaggcctcactgcgacgaaccgtttcgatcgcgacccttcagttgtcgtctcccccaaacgaaaccctagcaaattcttccgagtctgctttcgcactaggtaggattctctcgctttggtaagcctattcttcgccgtcgcctaaatttcgagcgcttgatgaaaatgcttagaattaagtagccttgtaattcttaattaatcacgatttgtgctactcctcttttttatgtagccatgatatatccgcaagatgctcgtgattcggagactgatgta

SEQ ID NO: 32658 - DNA, 560 bp, Arabidopsis thaliana columbia
tggaaggataaccttagtatatgcttaaagtctctaatattgttcccaggctttctagctttagatgatgtggtgtggctctctgactcattagtggatttatattgttttcatagttgttatgtcactcttctcaccgcttacctgtacttttaggtataacctattacgtaagaaattcccagccacttcgttcactggtgcaccagttctgtccgatgctgggtttgacttactgaacaagctcctaacgtacgatcctgaaagggtaatagaaaatatatatctgttgcatgcatgttaatccagtatgcaccttaattgttccttgacttttggatctctgtggcttcttctgcagagaataactgttaatgaagctctaaagcatgattggttccgcgaagtccctctgccaaaatccaaagatttcatgcctacttttcctgctcaacatgcccaagacaggtactgaggtctatctaaactgaaacgatcagtggttgactttaattctgtctcttactttttcttctatgcctaggcgtgggaggagaatg

SEQ ID NO: 32659 - DNA, 517 bp, Arabidopsis thaliana columbia
catgtgacgaccttacatgattgcctgacgtctctacactctttctttggacccttaattaatcagccgtctcgagttcgcattattaccaataaataattaaccaccgaaacttaaaaaactaatctggtctaaatacgttgcattacagttgaacatgcagttcttcttatataaagtatgatttaaattcttctgattttataatgaccacagtttaatgaaagtcatcaacccatttataattgaaaattttcaatttaattctccttaaattccaacctcttccattattatttacttgacctctagctattattcacttgatctcgacccagatgtttcttaaacaaatattgagttagtaatttgttaccatcatcatatgattttaccattttcatatactttggtttagttacattaattttaattttgcattttggaattctaattgtactacaagatccagtttacatatgagtacaaagttttaattctagataatggtcatatg

SEQ ID NO: 32660 - DNA, 444 bp, Arabidopsis thaliana columbia
gatgtttgcggttgattggagaggagtatgaagagttggggttcacgtcgtgttttgatggtcctccaaggattattccaatcctcatcagctgaagtttaaatctccggtggccaaactaaatccaaaaaatctctcccgacgaattttggcaaaaggcgtacggtacaaccaaaggcgggcagatgtagaactttcatggaggagctgaattatttgctgaccggcaaaaaattctccggtgaagaggattgcgtcgtgtcggtgaagccgtgaaggtgctgtgaaacgttgatctaccctgcaatttccacgttgcatacacgtgtcgtcatcttatctattttaatgtttgcaattagtgggcttttgacctgcagttgtactctgttatgaagcatatttgggcttgttaatgaaaaatctgtttgacgacaaaaaaaa

SEQ ID NO: 32661 - DNA, 580 bp, Arabidopsis thaliana columbia
actaggaaggaggactgatgttagaatggtacagacctgattaagaaaacgtcttaacccatgcatttctatcaactccgagccaggctgctgaaaaccatggtaatctcgaagaagatatcttctctttaatatccagttcaaaagtcctggcagcatcatgcaaagactgaataagttcaccacagctatattcatcttgtagtgatccactgagtttggccctcatctcctgaacatcatcgctagctcttgacccattaacagccactccatcttcagcagatgcaaggagaaaaggctgggtagtcctccgtgaactcattttcttgtttccaaaaagttttctctgaagaaagtagttcttatcatcataggtcacaaacaattgagtcctggaatttccgcagcagtttgatatataatccaattgtagcactcttctgcacgaaatcaaggttccaacggacatccaagggtttgaacagctacaataccacgattaatcagaaaaattccacgaaaagagcataaaatcgaagattatcgagagaaatgtaagctattggtttacttgacg

SEQ ID NO: 32662 - DNA, 491 bp, Arabidopsis thaliana columbia
ggtcgactcatcagcaggcttaccttcgccgcaaaactatactccaaactcttaataagcctcgcaggtccgtttttttctttccgaactgattccactcgtttactaagttttcagcgagttctatagcatctgtttggtgctatatcgaatttgatagttgtatagtctggtgatcacaatgtctaagtagaatttggaaagcatttggaaatacttgaattgaattggactattgtgttacttgtgtttgccatttcagctccggtaatcgccttgatgaatctgaccttgctaagaggatagttcatcaatgggaaggaggtgattttatgatgatatctatttttcccaattctctataaagatggtgttgtgtgtatattgattggaattggtgtgacagcttctctcgaagtgcgacaagcatacaagcagtttattggagctgtagtggaattgattgatcgggaagttccattcagatgagt

SEQ ID NO: 32663 - DNA, 445 bp, Arabidopsis thaliana columbia
cgataaggagaagatagatacgattattggagttagctagatgtcaatttgttctcttatctatgagttttatgctcttttgttttcataactattttcacaaatcaaattttcttttaaaattcatatcacttcaattctggatctataagactgtagttttgtattagtttttttcgttttaattttctcttttggtaaaagatctatccgatccgtttccttacgttaaaagtaatcatgacgaagtcttaatctcaaacaccaaaaccttaaccaaagtaacgaatcttttatcttttaaaaatttataaacgaactcatagtatatcataaagtttgagtggtctcatagtaaaattgtaatttaatcattattatttcttttgtccaaaaaaaaaaaatcattaatatttaggtggaaaaaaaaaaaaaaaaaaattct

SEQ ID NO: 32664 - DNA, 589 bp, Arabidopsis thaliana columbia
ttccaggtacatctcgaatacatctttaggcacatgtgatagacccaactctatcgttcgaattggtgttccatatggagttcttccaactggtaaatgttgtatccctcctccaaaaaagtactcattcccatagacaactattcctgtatgcctggaaaaaggatacataactcacatgttatctacctggtttaacatcaaagtaatatcctaaaagagtaaaaagcaaaacacctaaacaataagcaggttaattcatatttctcaaggaaaaccacactcggttgatattaaaagcagaagcttagacacatttacatacaccaaccagtcatgccaatatcttttacattgggttaactgcaaccatgttcaacagctaaaacaataatatcaaaccctatgaatggcactacacaggacaaatgttcaaaacaaatttggcatatacaacacaacagatcaaatacgaacatgtgacagagatttgactcaccatacaccttcaataacctttcccaggagtgattgtgagagctggcgtgcaagccttggcttaaatcatagacattcaatgttaccttat

SEQ ID NO: 32665 - DNA, 571 bp, Arabidopsis thaliana columbia
  unsure (1)..(571): unsure at all n locations
nnnnnnnnnnnnnnnnnnnnctaaaggtttacgacaccccaaagtgaatgggttaattaggctataagcccgctacttacaatcggtcatttttggagcgtgtgtggtggtgttactttctcgaagacaacgatatcaccaatccaccattacaggctcgcccactcaaacaaccgtcatcaagactctcatcgcaactagactcaagataaaaatggctcgcacagaggaagcagagcactggttcaacgccgtctacgcagccgtgcgcgagatccctgccggaaaggtaacctcctacgggcatatcgctctcttactaggtgaacgtacgctctcccacctcaaaggccgggagcattgacagcagctgtcaggatgagaactgatatatagagcagccaaacgcccccgccaagtaggtatctgcctcaagcacctcccttccccggagagcggggagtatttcacagcgggaacgtgccgtggagcgggtagtgaacccaaggggatgattctcatcggtgtgtttgactcttttaatatgcggtgtgagaatatgcatgagaga

SEQ ID NO: 32666 - DNA, 559 bp, Arabidopsis thaliana columbia
ataaagtcatgtaaaggcctaaaacaggatccacatatgtaggttcggcccaaaacgtattttgtatctcctttaaaattttgatggttagcagaaatcagaatatcagtatgtgacttttcaaaaacaaatattccttaagagtaaactcttccactgggtgtattgaagccatcaaacaaataagcttttttggcaggtgttgtaacaaaggaaattggggaataagaagcacaacattatgggtaagtgtttccggtagttatttgatgtagaatttgtattaagataatgaatctagttattaaccagtcagcatagttcgtaccggcctataaaccgcatttacttgtggagtttatcataattaggggatttgtgtcgaatggaaaaacaatattaaaaatgttatagtgatacccatttgttttctttgaagtttctctcctagacctagtgtagagtggctcgcaattttatgcgatgtaacatgcgaatatcgttaccgtctaattaaaaacttatgtcaagtagtcaaataaagaaccctagaagtaga

SEQ ID NO: 32667 - DNA, 552 bp, Arabidopsis thaliana columbia
tggtccttcttatcttcctctgcttctacctttaatgtccagagagaaagcttcgacgacatagctgagccagtgtcatctcgcactaagtcagctcatgaggtgtctgaatctagcaaattacatgagagaggtaaagttgaatctggttcgaaatctaaagaggggaaaaaagttggaggttcgtctgttcataaacatgaaaccaagaaaaagaaagagcatgctgtgtctcatccacataagaagaaggatgtgccaaagcctgtggttgaagaagttgtggttaaggaggatcaagaacatgaagaggcggaatctgacgattctgatcagtctaataaggaagatggagaagaaggaactgagtcagatggcaatgaaggagaatctgatggaaatggagatggaagtgtggatgattcaagtgcatcagttgatgaagaagtggaagaaaagaatgaggaagtaactgtaaacgagataagtaaaaagaggaagaggaaaggtccggtgtttgatcctaagctgagtatagctggagattgtgta

SEQ ID NO: 32668 - DNA, 511 bp, Arabidopsis thaliana columbia
ctgatgaagatacaaactcaacaataatggaatcaataagagttttctcaggttgcatcaactaatgaaacaaatttaaagttggaaaaaaaaacaaaatcagttgaagtctaaaataaagttgagaacgtttgattaatttcgaacatcgagatttaacagtggttgggtaaatattatgaaagtgaaggaataacaaaaaaaaacatgtagaagttgatagaggaggatgatattttggaaatgaaagagatgggagaggaggagtggtgagaactgaagataaggaaaaaggggaaaaggacaaaaggatgaccacacacacagacacaagtgaacaaagacagacgcacctgcctcctcttccttcttctttctaatattattcattttcatttgtaaagaaacgactttttcaaaaggtgttaggtagatgcaatagaagcttctatcagtttttcttctttctttttttttatgttatagtttgtgagtcttgtgactctttttg

SEQ ID NO: 32669 - DNA, 952 bp, Arabidopsis thaliana columbia
ggataaagtcacatgtacaactaaccattttaatatgtgaaacatatgacaattgattattagataaattagtgaagttttgttacaaattatttagaacatactaggagaatattattttaactatatcataataagtagataacatatatatctaatacattgtaatggtttaatcatattcaacatttgcaataagtttgatgatatgtcttatacattgtaatgatttaatcatattaacatttgcaataagtttgatgatagtaatatatttcatggcaatcatattaaaaaaaatattttttattatagttaattcaatggcgaacaataaactaaaattatagtactcaaaatttcatattaagaacactaatatcacaacgttttatgtatttataagcacagccgatcatgtatacgaaataattgtgtgggtcctggggccgcgtgtatctcaagaccggtcctctctcaacaagagaagaaataaatttcaatctccaataaccataaatgttttaggacatatttgaaatagttaacaccataaaatgattaaatggaagaccagaagcaaagatttcatttttgttaatatttaccaaaatagatgactaaaattaattagggattcttcccaaaagataattgtatgacagtggagcaaggattgtataatatgtgtttaccttttaaaaattcctaaaagtggtttgattaatttcccacaaataatcaacctcccattagtatccttcccaaaatgaaaacaatcaatattcttaaattttaaattgcattgaattcaccttaccttttaattttgcctttcaatgtttgacttctttatatgattagatatacctatatatatataaatctatctcctttaatagaaagattttactaaaaaatcctgaactagattcatgcatgatgacagagt

SEQ ID NO: 32670 - DNA, 546 bp, Arabidopsis thaliana columbia
tgtactctcaaacaagatgatcgtcgacgctatctatctgtccttatttgactgaaatagaaagtagaaacatagtagctgacagttccaatgacgtaagagagtgtctcgagatccacacttgttcttgacaatgtccagagttatagccgccactaaattcggttcttcttgtataaaaggcttaacctttccacttgtctgagagaccacttctcttatccctctcaccttctcacttggcaccgttgcagagagagaaccaaacatggtaaacaaagacgaccggattagaccggttcatgaagccgacggtgaaccgctttttgagactaggagaagaaccggtagagtgattgcgtaccggtttttctcagcctcggttttcgtgtgtatctgtttgatttggttctacagaattggtgagattggtgataccgtaccgttttagatcgattaatctggtttgttatgtttattgtggagatttggttcggtttatattgggtagtcacacaatcttcccggtggaatccggtttggcga

SEQ ID NO: 32671 - DNA, 489 bp, Arabidopsis thaliana columbia
attccaaagctataaactcttaatttttgaaaccatatgaaccattaaaataaatttgtaatttccagacttatataatttgtaatcagaatttaacccctcttatcccatgttattttctattttgttagttttcatttatgtttgttacgtatattcttgttgtatttttttcacaaattttcaaagacaatagcaaaaaggtacttccttagtttttgttgaatttcgtatacaaaagaaaaactataaaatttcattacttggtttctgttttttattgagaatatgtagaaattatccaaagaaatgaaaagaattaagtaacttagcatgagttatagtgatttaatttgttaagagggtagatgaaatgatctaataaaacctttgtttttttttgttttttttttgaatgtaatgttaaattatattcacaaagaaaaggtgtctttggtacaacaaagtgcaacgttagctgaaaagagg

SEQ ID NO: 32672 - DNA, 481 bp, Arabidopsis thaliana columbia
taaaaacgttagtcatgcaatgtttggggttctcgttagcaatgtagcaattagcatattgttttcttttttgataaaatagcatatgtttttcatccttaacattgattttcttggtatttgatttcgatccttgctaaagataacatttactgattcatatatatatataactctttatataaatacaagtacatatatcaaaattttgtttagtaattataaattttctattgttggttaacttggttttttggaaacttattttagctatccgttagatcctttcggtaggctatggtcgtcgtcagcgtccggagacaacaccgcactgaccgatctatcgacctcagccccatctatagacatcaccggggcgtctaacaagccgccagagattgttatgtccaaggcattgtcaggagacggcttaatcatctccgacctgcctctcccctcaactgctacactggtatatttg

SEQ ID NO: 32673 - DNA, 540 bp, Arabidopsis thaliana columbia
gtatatacaagaactagcatatctccattttcagtgttacccgctgtagtgatcatggtttcaattgggatcgcttgctggtaggatgatgatactctctctgtaattttttgcatacttaaaatagcatttcaatagaaggtactgataaaccacttgtgaagcaaagactgcaagcttcatgtaacacatatgtttccgtttcactaatgaatttgttccaagtgtaggctgattttgtgtgtgtttcttctattttggtaaagttatatatttgtaatcgaagaatatgtttacaaattgatatttaaagtaaatttgacaactaaaaacctttggtttttaacaagttgagaagataagaaataagagagaacgcctttttttctgtgtccagaaccacttgactccctagagctgcctagttcaaacaaatgacaaatgtgaaacgcaaatttcaatttttgagcttcattaatgtcatattggtataacaataatcattagtgattatccactagtttttgattttatttatat

SEQ ID NO: 32674 - DNA, 403 bp, Arabidopsis thaliana columbia
cttcaatgagcttaatccgactgtcgataaatatcacaagaattgattttatagtgttaacaaaaagaattgattttatagattttatttaagaaatttttttaaaaacaatcattatcattatttaacagattttttttaaatggaatcaaaatgatagaacttctacaatatatacttttcggaatgaaatttaaattaaattatgatattgatttggtgacattcatctttaagaaattgtctttagagtaaatttggaaaaataacctctttatgagttactaggttatgagaaattgttccaaagctttgatgcccgtaatatacgaatgtgaaatcgactacttgcaaaagaggcaattgctataaaggatctgcaaataatcgatcttttgaagga

SEQ ID NO: 32675 - DNA, 565 bp, Arabidopsis thaliana columbia
  unsure (1)..(565): unsure at all n locations
gtaggaataaatgacagacttgtatggattcttcagctagcagaagaagaagagatacgaaggctgaggaaagagttggtccctaaggcacaaccaatgccatactttgatcgaccattcattcccaaaaggtaaatagaaactcctgaatttctggtttcttgttgatagattgatgaaccatttcgaagactatcagatcgactattctaagtgttgttgttttccattgttgcttaaaggtcgaacaagcacccgacggtacctcgagatcccaagtttaatataccgcaacacaagaagataagatgctgcagtacatcgtcttggagtgacactggatcttacatgagcgacctcttataccaacaagacctctaaacaagctttgcattcaataatcttgttccttgtccatatcatctctttataaacaacatcttacattttctttgaagcaaccaattagttggaacttgcaagatttgggttcctcgtacttgtccatctttgtaacatgaacatcanagataaacaaagaagaagcaaggtatatatctgatga

SEQ ID NO: 32676 - DNA, 456 bp, Arabidopsis thaliana columbia
tgtgcatgacaatgcagatttttttcctcttaaacttggaatttaaattaacgagatccaattatttgactcaaactgtttctcattggctaacaatgtgactcaaaagctagttgatgtttttgaaaaaaaatcatagtagagccgtcgagcagtttttgttgttcctggacaaaacactttttttttaaccataaaaattattgttaataaaatcgaccaatgtctttcgcttttctggtttgtccaagaaaaaaaaaaagtcttttgcttttcctatagccataaataaaaaaggccacagtcaaatagtcttaatttgcgctatttgttagcttcttatactcttgatatgatatcagatacggtatgattagtagataaacgcgtttattatctagcctaaatagtttttcacaacttatcgatgtcgctaaaattcaacaggatgcacag

SEQ ID NO: 32677 - DNA, 604 bp, Arabidopsis thaliana columbia
  unsure (1)..(604): unsure at all n locations
gagatgattgtgtcaacagagttccgccacaactctaaggaggtcgaccgtaagaattttcagtacatcgagtatttgcttcggttaggtactaaacagcttgatcaactcaaaagccctgccatagttagcctctcctcgatcaaggtcgttacatctaaaacctgataccttattttatagcttgttgctctagtgaccatagataacaaagctgaggaaattgattcgttttcctctttttacattgagttatgtatgtatgatgatggatgttcaaggtccattataaaataaagagaattgtgatcacaattgaatatatatatacactttcacacaattatgtgcatctgctaatagtctagagattgcaatcattcaatatgagaagcaatgtatcagatttcatctttgtaagagtaccagtcaatggtgtagtgctccgttgccaatggtcttgctttacatgtgaatgcgacacattgtttttttccggattcagttttgcctatagttctgtctacttagtgctatttggctcagattttgtatacttatatgctaagcattacctagtgtgcacattgngataagagtgtag

SEQ ID NO: 32678 - DNA, 297 bp, Arabidopsis thaliana columbia
tgcctcaacatttcgagagaagttcaagcgacacgtttataagagccaagtattgattcgcttctatgttcgcttttgcttcctcatctgctactacactactttagcttggatctctattgcttctgttcgtgtgtgttttagatacagtgagaagagatgggtttcaacgggagcgattcaaccggctcctagagttagccagctaagctgcaaagttagtcacttggtatagagtggatataaacctgaaactccacagaaagctagaactccttcacttgacggagagatcct

SEQ ID NO: 32679 - DNA, 546 bp, Arabidopsis thaliana columbia
tatcaccattgaaacactaagaagcagttaaagtcaagatttagaacccaaaccttatctgggggagacatagagagttcgtccatgagggccttgcgttctccacgagaaggagggggcaattcgtgaacactgagaacaatgtcgacgcagagattacccaaggttgagacatctataggtttctcgaccaccgcgacatctccagtttccccgagagaacagatggaggaggagccatcggcgtatatatccggagatacatcagcggcgctgctccggcacgcgaggaaacagatctggtcacatgagggactctagcgaatggcgggaggagaggattagggctttgggtggagaaattggagagggataacgcatagtgaggagagaaggagtgaaattttagggaaaaagcgtggtgatacattcagagaaacccaggaaaaaagaatgaagaagaaagagagttgattttgaatctgcttcgtcgttctctctcagcttctccttcgtcttcaatcttcttgcaatgagatactttat

SEQ ID NO: 32680 - DNA, 545 bp, Arabidopsis thaliana columbia
actctagaggatccccaagattataacttttataaccattttcaatgtattccacactgactgaaattaacaaccaatgctcctcagtggtctaaagaaaaaacaaaattaaccagctttttactagtagcagaaactatgaagcaaggatctaaacgaaacttgagctaatacaatctgaaactctagagaaatccaaagtcacaacttttagctctcaaaacagtgaaagtttcatcctttcttgctcagaaaacaatcgaagtttcacaaaataatcaaaacagagagaaacatcataaccctccaaaattaaagcttgaatcgtgagattagtagaatttgtggatgattcaatcttacactcttataaacctaacccccaactaaaaaaatctgattttcccagaaacacacaaaaatttgagaaacttatttgactaaccgagaaagtgggcattgcgagaacatgttgagaggaggctttcctagagacaaagcgtgattgatgagtcctaaacgacaccgtttgttacgagcgtatg

SEQ ID NO: 32681 - DNA, 622 bp, Arabidopsis thaliana columbia
ttcaatctcaaatttacataaacaattgagagaaatttatggatttattaattatatagcgattcatattcaaatttaacaataattttggtatttatttctcgtaattgatactgcggtttcaatcctaatttatctaaactaaaaactctcttatttggtctttttgtacctctccttcctttttttttttttttttttaaattttctgtcaattgtacatttgttatgacatttgttggctaagtggcggacccacgttatgagtggtggcaagtgcccaattaacaaataaattaaacttaatggtagagataaaaagtttagtggcgtaatgttttggagtttgctaaaaagttctcaagaggagttcgacaccacgaggtaatacagtcccccactattttttttcctgggtacgaaggtaaaatgaaaagatcttatcatcttcaataacaatattcttacataatcatccttcataaaatgagattcaaaatgataaattggaataagaacttaagcaatcgataaagagacaaatacatgtgtgataacataaagcagaagaagcataattgttttgtttctctatgcaagttcatctgaggagtatttgtgg

SEQ ID NO: 32682 - DNA, 485 bp, Arabidopsis thaliana columbia
atgactagctgctctaccttcctttggctctcttggagtgcagtctcgagctctccaatccgtttctcaagacgtgaattgataactttatgcaaccgcaagctcaattcgcgaggtgagacagcatagtttcctgactcaggtgtggagttaccacttgggtcttggttggactcagtttcatctaaacgcttccctttaacccgatcagctctcagttcaccctgtgcaaattctacctcacaatccggctccatctgcaacaaaaatcaaaattgaactttgaatatcttgtttgagtttttggtggtgattcaggcaaggcaaagtaaagagcatagttaaaagtgtagacaacacacctctattatatcagagagtcttgtctcaatgttggaggaattcatgttaatttctagcctttcaagttccgcttcaagctctgcttcaatattacttatagattctgaactctcagctgcctt

SEQ ID NO: 32683 - DNA, 603 bp, Arabidopsis thaliana columbia
ttgttgtgttttcgttttggaaatgaataacagagctttagattatcctcgggagaaggatggagcgcgcgttcagatgagattatcatacagcccgactgctcaattttttctttttcttgtacaatggactgattgtaagcttgctggtttcctcggtttactcagagttcttatttatatggtactgtcctctttgttttacttactacatccttcttcatactcttctttgtgattgtttgattaacctgttgagttatatttgggttcagacttatgcagatgggaaaacaaccatgtcggtttacgaaagaaaagccagtattagagagttccaaggtatgcttatatatatggcgatgatattatttctggtaaacaagattgatatcgtttaattcttatgagctttttaatattttcgttatgttttagctgtgatattaccatctttgtcacaactacaaaggggtgttacagacatagatgacagcaaacaaaaagaggtatgcaagatgcgatacagaaagaaggatgagagcgaaatgtcggagattgagatcgagagggaagaagaatgtggaatctgtatggagatga

SEQ ID NO: 32684 - DNA, 444 bp, Arabidopsis thaliana columbia
gatatgtgtatgtttgaccatgattttggtttaccaaggaaaatgttagcttaatgattgaaagttaaagaataatactactatcaagagtgaggtcataaatgtaagtgtaaataatcagcacaaatgcgtatatggaaatagcacgaaaataaggcgtaaatcaattatcaaaacgtacacagtcgtcgagtcgtgaccacttgaatacaggtgtaaactactgtagggactctccacgtgtctttaagttttccatttttggctgtaaccatactacaaagcccacttagcaaccctaacgtgtacggaatttacacggggcaactatatgaatggtttccttgtgattgttgtcggtattgctgagctggcatagtcgagtgactatcgattcctctcctatcattacttttagcagttttatcgtttatcggttttatt

SEQ ID NO: 32685 - DNA, 398 bp, Arabidopsis thaliana columbia
agacttgaatcctctataaccgagttatgcttaactcagcctccctcgtgttttctctctgactttgtctctttcccaagagaggcaaacccaaaaaaaaaaacaaaatctaatttttatatcttctcgtgatctctcttctttgatttttcgaaattttcgttgttgttaatcttctgggtatctaaatccatgtactttctccgtcatgaaactcaaagtattaatctttttctcgttttccttcattttcccggaaaataacttgttcttggtgatgaagaactaatgatgatgtttgttgtttttgtttttcaaaggttggtcaaaccaaaaacctcaggaggtttttcaaagaagaagctcagtttagcagcagcagcttcaatggcggattc

SEQ ID NO: 32686 - DNA, 630 bp, Arabidopsis thaliana columbia
tccctcaaaaaaagtttcttttttatattaaatttgatcaaattgatgcactaaactttaattaaaagaaaattagctcaacggttactaatccaattcttaattttttgtcacgctctctaatagtacccgccattaacacaaccattgcgtgttgtcttctctcttactctcaggttctcaacaacaaaaggaggaaaacaaaatcagaagctatcgtaatcagttctcatctctatgaccggactatccgtagagaaaaccgggtcgacccggtccactgtcttcttcatcatctttaatctatccatttttaggtactccgcttcactgggtttttgaatttgattttggtttttgagtgggtggtgtttgagtgatcgatcaatcacaaaagtttcgtctttttcagtttatcgattgaagcaaggtcgaggcaacaacatgctagctttcctccaagaggatggaattcgtacgattccttttgttggactatctctgaagctgagttcttgcagagtgctgaaattgttctaagcgtcttcttctcatggttatcaggaattgtgagtttcttatcttagaatgtaaagtttagggtttaatgcttgtgttgtgtgtgtgatt

SEQ ID NO: 32687 - DNA, 542 bp, Arabidopsis thaliana columbia
ttagaaaactttcaaatcctacttagttattgagtcagtttcttaaacctacctgaaccgaatgaaatttgaataaaaaatgtattttggttccttaatggaaccaaccaaaatactcaaacaccttgagctaatttaataactgaaaacgaaaaaagcatataagtagtatttaaaaaatctatcgtggaaagggaattctgtatatgtattggaagccttgtgtaatgtcgagttcagaccaccaaataattgctacaactctgtgaaatccattggtgcttaaaatacactaaggctacacagtatctcttctttgatgtagccgtgaggatatttgaggattacacatcccaaaaaacaaacattgagttgatattcgacggcgacgaattcatttattattagtaacaataataattttctctgtctagtttccgtttgtttccatttccatggctagagtaacaagaatgacgaaaaataaataaatagagaatcgacttttagtggtagaattaagttggcaccaataaaaaaag

SEQ ID NO: 32688 - DNA, 507 bp, Arabidopsis thaliana columbia
aaggctaattcggtttggtttgttccaaaacttggatccaaaccagaatcatttcataggacacattagaatttgaatacttttggcgctggattcttatatgcattgttacatattggcgtttactttctccaaatgcttatatccaattagatgagtaagtttggtcttcttaacatcacttatgaatagattttgaccaacacaatctctgtaaacttgttggtctttttgaattagctttttttcgctagagtgaaaattattcatcaaactttcaatagataatctgtaacttcggattcatcaattatacaagtaatcaggagatcgaaatctgatcaatatcatctactaaagcactacactacagcttgatggattatgttcgaagttaccacattctctgtttctgatggtgctacgtctgcgacccacattgttcgaccctggggtgagtttgcgccagaactgcaaaactgcagcaagaggaacagtcagagtttt

SEQ ID NO: 32689 - DNA, 520 bp, Arabidopsis thaliana columbia
ggaaaccagtcaatccttaacacgttggagacggtatttaaccgagttttacctttcttgtttagtctgtttgatagtgtgcttcgtattgtgtagcagttgtttgtttgttgtcatattgattgattcagaaattgttcttttgtcaaagagtgtgtcttcacaacttgtcgccagagttgatctgatgcatatctaaatgaaacgtaaacatatagtctgaccttagaccaaacccaaagttccatcagatttggatcttggtaatcagaccaatgacatcaatgcaacttcgtgtagtttcagattttagctatgatcacaacacaaaataaataatcaatcagacttaaaacagccacttcactatcagaatcaagtcgaagccagtagccggctaaagtctgaacatccttgaacatattaaaagagaaaaaggcgtgaatgcaacattgactaatctctttttggagcctcacaccagtatttgatttaggatatctttctacctatcaattgg

SEQ ID NO: 32690 - DNA, 528 bp, Arabidopsis thaliana columbia
actctagagtatgtttaatctttcatgttcacggatctcagattttagttatcctcgatgggctactagtgaatactttgcatataaattgatctctaacttacatcttttctgatttcaagttcagtgctcacttgttgcaagatgagttcttcgtccactttagaaatattattgatgtcgttgacttggattacaagaaaagagagtattacaaaaaaaatcaaaacagagagactacatgaacattaaagacatgaaacactaagcaacacgaggcaaagcgacaacactatataatatatatgaacataaacaaacagtcatcaataaaaagacaaaagatcaatgtaaacatcccaattaacaagacgaaactcaactacaactgacctaagaacaaacgctctcatgatgatgatcacaaaaaccataggttttaattcataggttttaaaaaaatgtttttctttcattcaaaatgcgcatttatctctatttttataatgatcaacataattttagttt

SEQ ID NO: 32691 - DNA, 567 bp, Arabidopsis thaliana columbia
tatctttttgtttctaatttcgaagttttacatgtttctaataatcgaaagtagcgtaattgaaagcagagtactatatgtatcaaattgagaattatggggtaataaagagatgattgattaatacggggtcaaaaacataaaaagagtaaaacttgtcctggtttatctctcgtgcctcagctttttttttttttttttttgaatttgtatattttttttttgttttggttttatctccgacaaagaggcagtgagtaggggtagggctttccttttttcccgacgattcgttccctcgcgcttcgtcgtctgacatcagcgcacgttagccaccgtcgtcgatatcatacgcccaccaccgccgtaggtaattttgcgcccttcctacacgccgtttcgagctgatttaaaagcgaaaacgaaaccctaactcgtcgattttccatcacttaagctctgcgtttgttcgacgctggttttatcaaggatcgaatctgagaattgattgtttaattttggtgtttttgattcaggggagattcttggattgatttccagtttttg

SEQ ID NO: 32692 - DNA, 491 bp, Arabidopsis thaliana columbia
ggaaagaaggaaagagtttcctttagtctttaacaagaaacgagcgaagtgaatgagaggagaaggcatttttttataggtgagaggagagaatatgcgattcgcagattacggtggagatcgcgtgatccgtagttaatacggcttggattttcttgtagtcacatcatttacacaaataaaaacatgatgaattttagtcacatcatttggttaaatagtatttaaaagcttgtaaaattattataattatgttttcaataaattatgaatactataatattataaattataatatcatcgacaggtgagtttgtgtgatgattataaaaagtaattaattaaatttttttaaaaagtaaaagacataaataaggatgaaatcggttaggttcatattgatgactaaagaataaaacacaattgtaaacaattaattattaattttaagagtttatggttttatacgataactatgtgtgatatttttt

SEQ ID NO: 32693 - DNA, 609 bp, Arabidopsis thaliana columbia
ctctagtaacgtgcgccatcttgacaccggttgattccaaatcgagtagctagaatatagtcaccgctttttatgtgtgtttgtcactttcaaacatcaagttcgtcatcacggtataattataccaaaactataagctttcgttacgttactatacatacccgaactcaagttttttcatgttcatacccaaaattgtagataatgtcgaaaatctacattgatcgatcgtcaaatcattatcaaaccataaacaatgccaagtcatctcctgagtcacatatatatgatgcgtctagctagagcattgttgttactatgttgcataaaaacggtcggttcaattcttcattcttctcttctactaatgttgttttgctcaatttcttactctaaacacctagttttacaaaagaggtctagtaacctgttaacactaaaaaaaaacatccacaactctatgtttttcttctcaagtcaaacactcttgaacattgttactactatgcttcttattagacattccaagaaaaatttaattatcacttgtatagcataggaatcaaattgagcattgacaattaaagtgttgtagactttaaacctagt

SEQ ID NO: 32694 - DNA, 583 bp, Arabidopsis thaliana columbia
tacgattccaatttgactccactaaaaacagacaacagaacgtttttgttcctgacagtttatcacgaagaaaaacaatggattgaccttttttacgccctgagactacgcatagaaggttatgatgtggatcatagtgggtacttgatcgagcttctgcagaattcatccaaaagttgatagaagaaagtgactttgcgtctaaaaatgtgggctgcatcagttcagatagttgatattaagataattcaagtaaccagctttgcaaaaacaagagttgaaagaagtatgcataccgtctggatatcttgtctcagaatcttaagtagaaccttctcttctttctcatcattcagaattggaaactggaaaaagaaatacatattcatgtaagttcaacacaaaggcaaacatattcatacacgagaagcacaatagataaaactgaatatcatctgaacctgtgctaggtatatttgtccaggtctatagtcctcacacataggatttaaatctgcagacttagcatcaacaccagaaccattccctttgcctctcatatgctgcttgcagaatctgataa

SEQ ID NO: 32695 - DNA, 654 bp, Arabidopsis thaliana columbia
atcaatgaagttgttcctctatatactctacttatatcaatgccacttgttatattatcatatataaactaatattaacgttgacaaatcttaactaatacaactagtgggcacgtcgttggtctttgtttaatttaaacgctaatgtcaatggttctgttcgggttgtgtctgccatgttacatttttttacttcgacttctttattttcatttatcttatctcttctaactctcaactagtcgtctttattgtttataagtcaaataatagcaaatcattaccctatagataaagaaagattttattttattgtatcaatccagatcatcgaaggaagaaatcaaagtcatgacagctaaccttgagccgactatatggtactttcgaggttaggcattgaaatgagtataatacacgtacgtgatatgaccaaaaaaatattgaagtgacgtcaatgatatttttgttttagactaatttttttatatatagttttgtaaaaattattcatttagatatctattttaacagagagagtaaaagaaatttgcattttaaaaatgatagaaagttaaagctaattaaacaataaaaaaacaagtattattgaacttagaggtttttgtttgcaaaccacgtctcatacaaagt

SEQ ID NO: 32696 - DNA, 423 bp, Arabidopsis thaliana columbia
aaccccaagcattatcaaacgcagctgaagtaatcgcttgaacaaactctctggaaatcaatacaaccatcgccgtctcgatcagcttctttgatcattcccgttaactcctccgccgtcaacgcgtgacctagcttcgccatcgaatgggctaactccgccggccgtgatgtaaccgtttccatcgcggtcaaacattctaaagatggctttaagctgatcatccgtgtaaggacacttgaccagatctggctcgacgagtgcgacgaactcggagaactcgaccagtccgttgttattccgatctgctttctggatcaatgtgtcgagttggtcttgactcggctttagaccgagagagcttagaagtgagcctaactcgagctccgtcaaacttccatccttgttctggtcaaatgatcg

SEQ ID NO: 32697 - DNA, 450 bp, Arabidopsis thaliana columbia
tcatcccctagaggatcccctgctagattttgattcatgatatatgactaaatgttatacataactgttattagcagcgagatgagattcttacatatgtccctttgtaattagatgaaaagtgatagaagctattatatataaagacttggtttcaccctttcggttcatctatcctaccctagccgtcacgcgtgaagatcgaattgtgagtcctctccggcgatcgagaaagttttgattcccgatcgcgcaaaagtatctcatatctcgatgatttcatcaactcctgcatttataaatttcccttcagtttcttgatttgttgccttttgattaggcttttgcataattactttcatacaattcagatcctgtgtagatatgtaacacgactgaggaacaattcttttgtatcggttacaaatccttgatttcgtgtaggtgcat

SEQ ID NO: 32698 - DNA, 587 bp, Arabidopsis thaliana columbia
  unsure (1)..(587): unsure at all n locations
cgtacatttcaatatttcatatagtttgtaaactgaatatacggttcacacttttgtatactctttttaataagtagttatattgtgtaaaacatagttagtatattttaatggaatattcctttattttgatttttatagatctagctatcgtggagaagtgaattttttttcaanaaaatgagtgagaaattttctaatgacagatgcatttattatagtttgcaagtagtaccgcaccagacgcaccttgtctgaagggagtaaatccgagaacacgactttgtccaatctaaaaagtcaaactagttaaaatattgtctattggtctttgatttaatgtaactcaatttgttggtctttaggaaatagtactaaactctttaggtgacagctaaagcatgtctggtatggtaatggtatcctatgattagcaaagtctcgccttaacaaataagaataaaagggagtaacctaagaatatatgcagatctaaaaactcttcactttctccttcatttgctagaaaaaacaaaaaacaaatggaagaaatccattgaagttaagttctcgtgctatactggtgt

SEQ ID NO: 32699 - DNA, 519 bp, Arabidopsis thaliana columbia
cccaaagttttattattcatctccttttcaagctttcttggaatgtttgttagcattgtaaaaacgtccaatgcctttgaaagccttagatagcttcaaaaggttaggcctcgcaattcccaaatgcatcttccctgttgagaacttcaaagcttgtaaacaacaaagttgctgatgatcaatcccatcatcatcttcctcctccactataacttccttctctatactctttgtcttcatcatcgacttcgtcttcttcttgagcttcttcttctcttcttcggtttgctgcttcttctctgtttgtgtctcgtaagtctcccacagctgatccatgccttgtccaacgtcagcattgtgtcgttcttcaaatagcttgcaagccaatgttctcctccattctttctcttttctcattgatccaaagctttggagagaaacattatcttcttcttcgttcttagtcactacatttcttttaccttctccttctccgagaaaattgctcagttttgggag

SEQ ID NO: 32700 - DNA, 438 bp, Arabidopsis thaliana columbia
catcagaaccagcaccataaccgccatagccaccaaaaccgacatcatcttcgtagtttggctgatgaacacgtttgtcagtacggtctacatgcacacgccgatcacgatccacattcgccatgtcgattgatatgatataaaactataaagtaaaggctaagagcaaacaaattaaagggggtatatagagataagtctacgagaacgtacatataaatgggattgaaatatatttgttggtaataaaaaggagatatggagtgaagagaagacgacacgtaagaatgtgttgaagggagaggtgtggctttgcatgatttccaagtttcattttttacctgatcatcttttcgttcttctctccaccgtacaaaaacaaacaaaacattcattttaacaattgctctcctctcgatgcacttaattagcttgtgt

SEQ ID NO: 32701 - DNA, 617 bp, Arabidopsis thaliana columbia
aaattatactaactttaaaaagataaattgtccccgcggtatacccagattaaaatctaattcttcttaatttccgaagatatatatggaaacatatttttgacttttggcaaaataaaaaaaatgcgactcgtggatctcgtggcgtttatttctattgagacagataacaataatgatgacttcttttaagcttaaaaaatacgttatcacactttgagtttgagcacgtcgagcctactacactcgtgagacgtgtgtggatcagatcagatcagatctcctccttacgcggctgatccaatataaaaatattgtaaatcaattagaaagatggaaaaatccaagattaatatattgcaaactgaatttcaaaaagggaaaattccaagattagcattacatgggctggatcagttgattggtaaggcctaaatgccaaatcactaaaagttaggacgcaatctatcccaggtttgccaaagccgagccaaattaatacattccaacaatccttttttcatatactttcatttttttatcagtatgatcatgaccaccaattaaccaatttttacttacaaaacgtaatacgtatttcaaaaacgttttattta

SEQ ID NO: 32702 - DNA, 599 bp, Arabidopsis thaliana columbia
cttctcgtgatttgattctgggtttcgttgattggtttttttcgaggggtttgtttgttttatccttttttatttctataagatcaatttctcattgagaagaatacgatggcagcagggggtgttgatgtttccagaagttccgttgctgtcaaaaaagactacgacttttacaggaatggttctcgtgatgtgtatgttcgacagagtggtagagatgacgagaggcgtcaaatcaaaaggcctagtgaccatgatctcaggaggaatgatgggcgtcaccgatcacggttggcatatgagaaaggggaactacgggaggaagcagaggttcagagaccctctgagaaaaggaggaagttttcacccatcgtgtggaatgcagaaaaagtgggtagagctccatctagggagaagaccaagtctcctttccctgttccgactacaactgtgatatccaatcaggctgttgctggtaagactacttcaaacgatcaagtgaatgccttgatgtcgccagaacctagttatcttgctccagtgcagccttcagaagccctgctggctgtgaacatcctgttgatgatttggaggagggt

SEQ ID NO: 32703 - DNA, 583 bp, Arabidopsis thaliana columbia
ccagcggacgagtgttggcttgcatcggacaaaatcaaactttgatacagtatatgttctagcatagtgtttataactgaaatgaagatagtaatatcaagaaaccaatgcaaaacaaactcaatatgtgttggaacaaatattagcaatccccaaaggtagagagaatctcggttaccttgcaaagcgctcagagcagttgctgcacaggcagagttttcaaaatcaacaaaacacagaacagtaggatctccactcctctgcataaaaccccttagaaagtcaatattaatgaaattatgggactgagtgttttcattttcaacaattcttcaaattggaaccagtgaatcttacgtgttttgaatcttgggtcacaagtcttacttctctatatcccacaaaaggccgaaatatatctagacttcagttaaggacaatgaatagctcaaacattcttaagtgaggaaattaataattgtaatgagtcattaggtaggatacgggatacttccttcttgagcaattagaaggaagtcttcaacatacagagtgttggatcatctggaggtagaggatgtgg

SEQ ID NO: 32704 - DNA, 540 bp, Arabidopsis thaliana columbia
tgttttttacgacattatttttttccaaataaaaaatagtcagccattacaaacttttatatcaacctaaatgaccatatcttaatttactttggtttttcatatgctaatataatttctagatttgttggaacctttcaagtgaatttagaaacttgggtcacttgacaatactctaatagcattttctttggttaaagaacagtatttatttttttccttttggaaactctcaagtgaataggttcctcatacacgaattaccggtttttattttcctcatgtaaaagctatgttcatctctctttttttgtttgttaaagatcatctctcttttttatttttcttttttcgtttttgactctcctttcattttgtaagcttcgaatagttatcctaataaactagctagtatatatacatatatgtaatctagataaatatttttctaaccatcaataaatttcatagtacacatatatatctctcgtgactttggtgccactctcctatatacttagagaaaaatgaaacatgcat

SEQ ID NO: 32705 - DNA, 553 bp, Arabidopsis thaliana columbia
ccctttgccgtacgaccattccttaatgcctctggacaatttactttcatggtaattattctatcactattcaagccttgtttaaaaagttctattcaatctttgccaaagtggattttcatacttgtcttctagagaaatctcaatttcacaaaaatatgtagcagtggattattgggtttttggctttgctgtaggttcatttcttcttttcaactcaatttccgaagcagcaaccaactctgatgctgcaaagttgtcaggtatcaaaactatttgtaaacgaactaagtagaaggcttcgactttctctttatttatttaggtataaaaattgacaagctttttatatgcagcatttaaaccaatcgagtgtgccagtgaaatcgaatctcctcactgagtacccatggagtccaagatgggaagtgggacgcatggctgagcgactgtggttagtctctatggactctttcttagatgtcttatttaactaattctccttctgaacatttaaaattttacttttttgcagtgacttcctgaccgacga

SEQ ID NO: 32706 - DNA, 392 bp, Arabidopsis thaliana columbia
tttaaaaagaaagcaaataaataaaatagaaaacatgtagaaaaatcatgatatttttgcccttcattatgaaaatatacagatggatggatctctgtgtttggcacaatggcaacaaaaacgaagatctataatgaaagaaaacaaaaaacaaaaacgaagaggcaaaagcgccaatccggtaactgaatcaaagccactccttccatatctttgttcatttaaataaacgcttatcttatcatcttcaaaagtattttttttgcctctaaacattacttgccctacaaaataaaagaggacgtcggttataaacggacactaaaaagattatgtcgtttattcaaccgacttgctaagggccaacataagttatatatatagcctggaaa

SEQ ID NO: 32707 - DNA, 446 bp, Arabidopsis thaliana columbia
ttttttttttttttaatcacaacatacgaaaggttaacttgaagaacacaactacaaacatgtgaaaacattaggaatgtttatttggagaaatagtacgtcttgtttcaacacgagcttgtgcagcagtgctagttcggtactcatggtgaaaagaagttttggtgaaggtttttctttgtttctttttagattaagaacagagaagacaatctcctatagctgaagcagagattgtaagatcgaacacaaaaccctttagtagttaggtttaggctcttgataccatgtcaagaatctatagaagttgtgaaagaagactcttattgattacggtagaagacaatacctttatatacaagatagcttagacctagttgatctatacaacattagcagtatgtaaatgggctaagggcctcagaacctagcacaatagaaaagac

SEQ ID NO: 32708 - DNA, 485 bp, Arabidopsis thaliana columbia
cgtgttacgtttctttgttgataaaaccttgagatactcctcaaatatcttaatctctcaattaagcaagagacatacacgtttatttatccggtttgattagtcgatgtcacgagatccacgtccggagctagattctgtccagcaagttatactatgaatgatcaatgttttctcaagctcaagatctttacaagaggagagaaaattttcggatacaaagtagaatgaagaagaaaactatttcatgccttaaacagattcaacagcaatgcccatgaatgattctcaacatctatgtatctggatctggccacattctgctttcttattaattgaaatctgaaaataactcattattctaggccatggacgagtctcaggcttaatattacaataacttttaccagttgattagtagaacgggaacatccttagacctaaattatcaacccgggaagtataagctgctagtagccgtagta

SEQ ID NO: 32709 - DNA, 522 bp, Arabidopsis thaliana columbia
ctctacatttgattattcaaagactttctcaaagtcaaaacttcttgcagtgataacgtcttttttgttcctaaacgtcacgtgtttggccttttgagagaaccggattttctattttgtcggttccatttgagatttggatcaaatttgttttaacaagtaataaaagcccaagtgatagatagaaaccactttcgaggttttgagagtgacataaaaacgaggactatatgggcttattccaggcctgagctaaatttaaggcccaatcgtttgttattaattatagacattaaatgtcccaaacgaaaactaaaagagatggaaaaaaaaaaaaaaaaaaaacgaaacctttaagaaaaagccctagcagtctgttcttctcaactcaagtttgggcgaaccaccatgaaagtaatcttctacgcttttagtgttttttctaataagcttaacttttgttagagctcatctcaaattttaatggtatacccaattgtaatgcaattttttaaaaatatt

SEQ ID NO: 32710 - DNA, 497 bp, Arabidopsis thaliana columbia
ttcttgttttctctgtttttttcttatagaaacattaacacttgtgaagtgggaccaaatcatttcacgaggagtactagtaaccctttttaacaacgcaacggtaccgatatcttccacgtggccaatagtaaacggttctagagatgtaaataaggaggcacttttgctcagacacataatgacagaatcgtgttatagagagaaacggtgttttattgagacacgtcacacaccttctctttacctgcggctgtgacagctgcctgcatctttcccgtatttttcagatatttctctctttttctttttttctcgtaaactaaaaatcctccgacggctccgcctttgccacgccatttttgaacttattattaagcttcctgtttccttttatacaaaaatgatcacatagtgagtaacgccacacgctacaaatttaccatttcgaaaaagactaatacatctcttttcaatctatgtttatattaaaaaaa

SEQ ID NO: 32711 - DNA, 460 bp, Arabidopsis thaliana columbia
tcgcgtatatattctgttactgtacaccctcaccttctttatgttaattgtttgacgaatataaatccccccccctccatcgcttatcactggctaacacatggttcgccttcatgaatccttgataatgatttgcacgtacgtcgactaccgtacatcccatgtctgatcatgtcttcaggtcaaccaaatagaaacataccagacataagtcaataaatcaagcgttccaaatctataggcacgtttttccccatttgtcttcatcacgatcggtgatccgatcacttaagtaaagagacgattttctaaatgttgaggttataaaaaagaaaaggattgcgtgaagctagagggtgtgtgtgattttatatttgctgagtaaaatattagcggataagataaaagagtaaattgagtattggtggataaggattaaggagagagggcaagtgtattg

SEQ ID NO: 32712 - DNA, 163 bp, Arabidopsis thaliana columbia
gaatgacgaaagcaaaagagttctccatgtacaaagtatatcttgctgggcacctagctgcattggaccttacagtcaggtgaatgaaatctcatcattgatttctaaatagtcttcagattgactagcaaagtcagatacttacagtatcatcgagttcggg

SEQ ID NO: 32713 - DNA, 472 bp, Arabidopsis thaliana columbia
aaaccgtcaaagattatcattggtatccaactattgcatgctcttcatatccaactattgcatgctcttcaactctcatcaacaacttttattttgacaaatgttgcgtcattcttacaagtttgccatataaaagaagcttatctatagctgcaaaccaggagccccgaaacaatggtttcatatgctgagctcttgtttgaatcaaatagactgtagaggagaaatcggcaaaaaaaaaaagaaaaaaaaagacaaagttgtaaatgtttagatcaggatttaagccaggattacaaagacgccatccggctttgtggtagaccaacaacacagctgttcttggaacctcaacacagaccaccaaaacagttcttgctcccaccagagaataccttacctactgttttactataatgctctagccttggagtttggaaaagattattaaaagttcataaacaacggagtg

SEQ ID NO: 32714 - DNA, 547 bp, Arabidopsis thaliana columbia
cctagagatgatgattcaactatccaatacaatagaaatgacgggaaaccgggtttcatttcgttttacaatcctcggaataaaactgaggatatcattatcccccctgaaactcaaagtccatggggacgcctgctctggctcattggtcctgcagtcttagtctcctctttcattttacctccagtttacttacgaagaatagtctcagcagtttttgaagattctttgctcacaggttcgtcttgcttctcccttttccgatttactcgtcacgttttcttcgaaaattgcagagacaaagtcattgtatctttcttcctctatttgcagacttcctcatcctgttcttcaccgaggctctcttctactgcggagtcgctgcatttcttctgataatagaccgctcaagaaaaggatccggaaaagttccccagaaccgaatcaatccttctcagttaggacaaagaatctcctctgtagcaacattagtgctgagtctcatgattccaatggtgacaatgggattcgtctggccatggactgg

SEQ ID NO: 32715 - DNA, 379 bp, Arabidopsis thaliana columbia
tagaagaactcaacgccacagggcagtgcagctcagctctgggcagacctcttcctgaccccctcccccccccaccatacctctccccaccccccgctttccagtcaatgacagaccgacacagaacacataattcaactgccatacccatcatacgaccctgataatagacaactctccacgaaacacaaacagaatcttggagccagcaactcccctcaaaatgaatgcggtatgtgacgtgtgggaagaggtaaagtatgaagaaaaataagaaagctcatccctactgagtcaatgtctctgtaaatgttcagaagggtctaaaattggtagtactcaaggatagttatatgtttagtgaaagtaagaaggtgat

SEQ ID NO: 32716 - DNA, 401 bp, Arabidopsis thaliana columbia
tgaaaagtatgcttgctatttgtaatacccatcacatatagctttggggaaaacagagctttaagctttcaagaacacaagagctgtctctttgtgtagaaaaggcaaagagtgaagtgatccgatgattctccagagtaattggcttttcttatatgattagatgctcaagcactatctctacttatattttgatactaaatccgtactgattatctaacctttggttggctcgcaataataacttctggcacttattctctgcatgttattaactttatttcatattattattactaatagagtggtacctaagtttatgattgacacatgagacgtcaagttcacgctattcatgttaggcacggcagcttccagacgagaactattggcggatggac

SEQ ID NO: 32717 - DNA, 528 bp, Arabidopsis thaliana columbia
gaacctgttgcagcgtatgatgagacacagcatcttgaacctcgcatggaaagtcaaaaccaaccttcacatgaaaatcccatcgttcatgagattccatcagatgttgaaggtccaacagaagaattagctcatagggaagcaaaccctccaacaaaggaacctcaaaaagaacctgatgtggtttctgtgtctgttagtcatgaggtgaagaagtctgttatacggatcaaggtcagaccatctggggcaaccagcagagcggaaggatcagcacgaactatagaaagatctcaagggattgtggtacgccatgatatagaccgaggtcaaactagttcagcttcagtggacgccccacagagaatctcaactgacgctgtgagcataagcaatcagaatcacgtggaggaagtaaattagtgtcacgatgttggttctcgcatgactgcaagcatcggcagtgtaaaatttgcaagcgaagcgagtatttttgggaaagagttgcaatgcactgctgagtctggg

SEQ ID NO: 32718 - DNA, 160 bp, Arabidopsis thaliana columbia
tatatatatagtaatatatatagaaataaaaaaaaaaataaaaagaaacatcacaatataaatatagtacaattaaaataaaaaaactctcgctagaaacatcattaaaaagattaaccagtctgaacaaaacaactcatacacataagcagagaagctc

SEQ ID NO: 32719 - DNA, 520 bp, Arabidopsis thaliana columbia
aagagctatcataacttcagcgtttcacaagagcaatgataacaagccatatccaagagtgagtgtatatatatgttttcaacaagaaagattttcattttacaagatgactcagaataagcttaccttgactctaatcgcctcgtaagttccatagacagcacctgaacacaacaaaaacaagtcttaatatcatctccataaccaaaacccgtgcccaaattcccaaaatcggatacatttaaaaggcgattagattgtaattctagggtttaggttttttttttccagaatgtaaaggaaatcgaaagcgtacctactgcgcctgcaagagcggcgccaacggagactccggcagtgattttggccaaacagctatttttcgccatcttcttctttttagagacaattcgtttcttgtgtcggagaatagttttttacggttgccctcgccgcttttaaggtttttaactttgaagtttttgcttacgcaatggattgattttgcctttcgctacaa

SEQ ID NO: 32720 - DNA, 494 bp, Arabidopsis thaliana columbia
gcattatgctagaaagcatgaagcaataagccatcctgtgtatcaaagtatgcagacagactggctagaatccgagcatcccatgaactgatggttcgatcaatgcgaagagttacaatccaacatcttgcccatgaccatgatcttccatgatctgaagggcaaataaagcatcccatctgtattaatgtatgtatataatctgacttggaaaaagaaaagactctattgctgtatgaattctgcaattagaatttgaatcgtttgtatgcatgtacttaaaaaattctgactttgtatggatgtggtatctgcatggttagtcttcttttgcattgctacgcaccccgtggttggaccatgaggatcgtgccctgttctgtgaacctccggccttggctgctcgttgcctcccgctgggctttgagctgtgccgcgatgcggtcgtagtgagcttctcttcggcctgtggcttcttcgcttcttcgggggtc

SEQ ID NO: 32721 - DNA, 342 bp, Arabidopsis thaliana columbia
gagacaaattcaacatcaagattgggactagcaggaatccacaccgctttctcggggtaaaacttaggaaactctcactctgtctcagttcttgtgtagtgacgccactcaaaactgtcgattttcaagctatccagaatctgtctcgcatcgctggttctctgtaagaggccatgtcaaatagccaatcttggctcagctttcagccatggattgggttttactgtagttcctctgaacctcatccatgtcccaacttgaagcaacttaaacagggcagtgagatcaattctagccgtactcgtcgattcactgcaagctgtgatgtgcctttttaagaga

SEQ ID NO: 32722 - DNA, 480 bp, Arabidopsis thaliana columbia
gatgtatgagaaggcaattcaaggagtgacagagaccaaagaatctatgtgttcatgtaacatgaacttgaaggcagtctcactggctgccacatttgctctgggtcagctcgagtcacacattgggtagacttttgagcttgtgcatacaggtcctagtgtgaattttctggctatatcactagtccctgtttgtgtttgcttttgttagaaactttggtgttgcggagaagacactgaccgacgcattgacaaagactgaggaacattacggtactgtgtggtgcggttttttggtcatcgattctcaatgactaaatctccagactaacggaatctgccttttatatcatccttcatttgatcaggagacaatcatcctaaggttggtgtgattttaacgctgtggctctgatgtatggaaacaaagcaaagcaagaacgctcaagttctatcttgattcaagaggtgagagataag

SEQ ID NO: 32723 - DNA, 591 bp, Arabidopsis thaliana columbia
tgaaaactcccgatatatatcctatgtcctctaaacttcatggccacattcctgatattgctaatatatttttgcagtgaggatacacagagaaatgagaagagagacaagtgtaatcacagaaacaagtttgtctcattgtctgaaactgtcacaggttgtgctgcgcatcctctcaacggcatgatcgtagctggaactcaggtattcaagtttgcttaaattatcttaatctattttaggtttttatattagttttagtagttctcggctaacaaaacaaaccagtgaaacaaatgggcttgttgtctggtagtagtagtaatagaatagtgtaattggcattgtgcattatatctggtaaagacaaagtgtcaatagtgataagtcactatttgaatggaaatggtgattctgcagaattcgtctttgctgttgatcgctcagatgcattgctcatcttcatcagaaactgcagaaggtgaattgtagcatctactagctggactcggcgtaggtttgtacatagaaatcaccacgagattatgtatgaatatataagttttgcttaaatggatgttcaaaaagagt

SEQ ID NO: 32724 - DNA, 502 bp, Arabidopsis thaliana columbia
gaagagaagggttaccgcccagtggattgggttgctttttcaggatccgatttcgtcgatgtgcctagtcggagcaactagctttccgggagatctgttgtgggttggtgcatcggagggatggttttgatgatgaaaaccggtctctttcgttggagattcccgatcttcgttggtgaccacgaaacggtagctcttgagcccgccggatttaaggctccggtcctctgctggcatctatcaacgagcagagagcttttctttttttccggcaatgttgtcgattaaccacttttgtaactggactgttttttgttgtaggctttggccaagcccatttgagaagaattatattataatcttaagaaaaaaaaaaaaaaaactaatcttaagaaaaatactatttccacctaaatgaattatctctatatttaatatctacgtaccttatttgcaagtgggctgaagacttcagttagacgagacgatagaaattattatt

SEQ ID NO: 32725 - DNA, 520 bp, Arabidopsis thaliana columbia
ttaaaacttgataatctttattgtttgtgattacatattgctgggagaacattaattgcaacctcgatgtggtctactttaacaagattgtataggtaaagatcgtatctatatgcaactcaaattctatatatacgtttgagatggaaaaatcgaagttgtataattgatgtgaacattgatgatttattctgaaattggtagaacatcttagcaatcttggtgtagctatatccaaagaggttcaagctatcctctcaaaatctcattgcctcacaagtttgatcaacttaatgaaacactttaggtacggtaggtactctatatcagcttcgatgaagtcattgttgcagcaagctctaagaagaggagagttgtgtgattgtagtaggtctcataagattcaagttgattaaacatgagtgaaggtcagataaaagggatgatgacttgtatatcatgaactaggtcaagaactaagactaaaatcacaatgttgttttttggaagacagaaagac

SEQ ID NO: 32726 - DNA, 496 bp, Arabidopsis thaliana columbia
aatctcattcaaattctggttctaaagtcggaaacttgactcaaattttggagtgaagaagttatacctgccatcgaataaggcatcgaagacgaaggaaacaagataatgaccagggttaagatcgtcagctacgagcctcaccgtagctttattcacattgacatcgttcttaaccttcttagcggtctgatgctccacataaggtgcaggcggttccataaccgcaaccggagtcggaccgaaataaaccggcctcatcatcggattaaacccattgtgatgataaccggtgaaatacggaggagcttgttgcgggtagtattggttttgatggtagttttgaccgtacggtcggtaactaatctgcgacggaggaggctgagaagaagacggtggctgagccggtggtcgaggaagagagagctgtggagttgaaactgggtaattgtgagagtagctatactcgttttgaggcggcggttgttgtggtgga

SEQ ID NO: 32727 - DNA, 577 bp, Arabidopsis thaliana columbia
tcagagtagagacatgggcttttgtggtttgttctaatagttatcagaagatacaaattccactttcgtctcgttcgtacaatggcgacagtacggacataacctagcacgtgtgcctcagcccaccatttctaacttcatctgtaggatattctctcaacttttgtacgttccttcttcttttcacgctttttatatatatactattttaatgattttttaccgtaaagggaaacaattcagagggacaatatcttcactccaatttgttctagcgtgtccctttaattccaatttccaaactaatgattacgttagacgtgtaaggatagccttgtagcttagtggttcttttttctttttctttcaggttctaataatcaataaatgatggcaccaattgaaccgtgaagaaacgtcctatgagcgaatggcgcgaatgtgttgtcttcacgaatcatacgagagtaaacattgttcataaccagatttggtatcgggagcgtatgttattaaaccgttacttattaagactgaagagagactttgacctcttatatcttctcattttattata

SEQ ID NO: 32728 - DNA, 509 bp, Arabidopsis thaliana columbia
cccttcaatattgtaaagttcatgttttattcttttttgtcaatgtaacttcattgacttgttcaagaagaccttgaaccgaaatagttaaatcaaaaatctgttaacggaaccaacacaatctaacggcgttaacattcagataagggataatttcgtcaaaatcaaaaacaccctccgctccaagcaaacacctgagaatccaccagtggcatatttggaaactcatatcaaaccacatgaaccaagtgaaatcttcacttgaatacgtgtcactctattaaccaacaagatcataaaaaccccgtcatcagtcaacatccaacggttctaaatcactccgtttcgcaataatgtagtagccacgtcagagttaccagtacagacgagctcaccggaacaatctcaccgtcgacggcttatctaaaacaaggccaaagttaatttcccgaaaactataaatactcatcttttttttccctctttcattttcttgccctagattaaaa

SEQ ID NO: 32729 - DNA, 654 bp, Arabidopsis thaliana columbia
gtgtagaacgaataaactagtgaaaaatcaggtaagcgttgaaaaaactggtgattcattaaagtaagtaaataaaatcaacgaagagatcttttagacaatagtcaactcactaaacaatgtcagaactgatttcacaatgtgcgaacggattcatactgacacacaacttattggctttctgtgaggcattccatcgaacactttatgtgcgttttatctgtttcggtagacgaatttgttcctgagatttgtgaatctgatcgaatcgaagctgcagtgaggtagacgaatgaataaacaatgcatgggtgagaaatcacatggataatttcttcaagatcacgtactctggaagatgagatatcacaaaatacttgatgcatgtcagagattaatgagattagcttgcgttacaatttacagaggaagaatcatatgcaatcgaatcgttggcgcgcgtttacagtgttattcgctgacgccgacactgtgagaattgatgacgcgacaacagtttcaaaatagtttttggcttttataatattataaacagtccaatcagatgagtgtaatcgtatttttttctatcacaagtgtggtttattaatattatagagccaaaattaacaggccaataattcacataaactg

SEQ ID NO: 32730 - DNA, 461 bp, Arabidopsis thaliana columbia
gacgcaatggcgggtatcttggaatggttgggtccattagctcacaacatgataaaatggcaatctgagcggagttacgagcaccaaagcttggtttcaaggacgcacatagttcttgcacaaacccttttctttgcaaaccagcagaagacataagccatcattaccgagcttctcgtaggcctcaattatgtctggagatttggcagagaactcaatgccaaggctcttcaggagtgtaccagtagtaaaacccttgagaaatgcttggacacagataactagtgaagctctccaagacgacacacacaagtctggatatgtactacctcgttgacctaaaccggcactggatctcacccactgggtaaaccataccgtgggcgcgccttgtatcctatgcagcttggatcaaaccagagtacggaaaggtgctcgatgaattacatgagaggtattat

SEQ ID NO: 32731 - DNA, 778 bp, Arabidopsis thaliana columbia
gtttatccaaaccgattggctagcttaagaggtctgatgaggatggttggtaagcaggtctaaaagggttctttctataaaaccctaccaggtgtaagtgatagagattgctcagagctccctaattgcaatgtattcccccagatcagttagggttacaagtaagtgtagacgattcctacgacggattaggaagagtgctttctataatcgctttgatcttgaaatcatacgagccgagagatagttgtacaatagcttctttcgtctccatttccaccatgtcggaacccgaacaaccttccttttcatctgattttctgtaaaaccagtgagattttattaggagaaagaaggatgaagaatgaaatagttttttttttgggaagcatcactcacttttgttttcgatcagacgtgcttccaactctgagagtaatttggagtagctgatagcaagtgatggccagaactccagttggatattcagtacatcaagaacagtttgcaggccggctactgaaggcgtggtggcgatgggcaactcgttctccggattttcacccagaagcacctttatagattaagcgggatcatgaatctccataactatatgcagattttaaaggatatcaagtttgaaatagagactaaccttgatcactgctgttgcagaagcagatatggagcgaagattgtagctgcaaatgaaaacaggagattatcaaaagctgctccttacaaaccaagaggctactccaaaaaactgcaaaacaca

SEQ ID NO: 32732 - DNA, 439 bp, Arabidopsis thaliana columbia
acttgtctcctccggccaaccttaacccttaagcgaacggtgttcctttgcggattgcgatcgttccgtcgatcccttcatcgcccgatctaaatctctaatcggtaaatttatatttcggattgttccaactcttttgcttgatttttttgtttctcgttttccgtttctgtttatgattttgtacgattggagataagttagttattttattcacgggaatatatgatcggtgattttagtggtttatcggagagatctagaggtttatgattccgttttgattgtttgaattacttctctcttctctttttggatttctgaatgtatattattaaagctgaatggtccattaatgactattgaatcgtgacaaattcaagcagattagagaatttggaatcactaatgtcattttggtcaatgagagttgttgatt

SEQ ID NO: 32733 - DNA, 532 bp, Arabidopsis thaliana columbia
caaccgaccaaatctttttttgctagcctctagttgaatgagccagctaatggcttcggatccatgtccacaatgtatgtgatgatatccaggtaatgatgttccatccaaacaaactgtaattaatacacagagaccttacattcaacaccgttatgtttttacatttcagatggacattacgtaatgtacctcacattactaagaactggattgaagaaagaatggttaaaagtaggaaaaaggaacagacgactctagaaaatgatgaaagttaaatgcaaaaacttgcagtgtgttattgaaagagtggatctttgtgttgaatgagaaagaagaaggtaaaaagcaaattctcaacacaattttcataacatgggaagatcaaaaagagttttcattcatcacttaaccactcttccatctggaatcgataataagacaataagacaatggtcagcacaccagataacgcatcagtttttccgccatttgcatcagttcaggaaagtagtctgaagtgcatgtcatt

SEQ ID NO: 32734 - DNA, 1045 bp, Arabidopsis thaliana columbia
ctaacagtattggagggaaaagagaaggtgaaacgggaaagaaagggatcgtcagtggcggcgggagggcaaccaaggtgaatctcgctcatcacctcaatctctgaatcctcctccattttcgacaataacacgttccagatggagatgtaacgaaagttggattttaagcatcaaaagagtgagtttggattaaagtggcggcggcggaataagtttgttttttttacaaaagaattcacacacagacgacgacaacaacaaatagaccaatttttctttgggggtatctaattgactaatgatgatgattcacagaggagaaaatcaatatcgggagagggcatcgacgcgagcggcgacctcatcaaaatcggggacgcaggaggagggcttatgctgccacgaggctgttcgacgactcattctcctaaaaccctctccgcttgctttccccatcgactctgatgctctcatcatgttcttactctctactttcaatttcaatgcttccccttccgtttccgcttcaggtggcgggtttgcgaatcttcgtctcactgatctcggctttggttttccgcccgtcggcgattctgttttagccaacatacatattatcatcagtgccaaataaaataaaagtaatctttacttaaagatagattactcaccggtgtccatgagatgagatgtagtcatcttctccggaagactttcctgtttttcgatcttgggtttggtgtaaggcgcaggagtcatgaatctgtagtagaaaggtttcatttcaggatcatcctccgggccagtcatacaactcccgcttgtactcatggagtcttcttcgcttgtactcattatggacttgttgctgtcatccatcgagtcttctctgccatggaacgaaaggctgcttctcttttccatggtcttttcgggttcgctgttggtctctctgtttttggttctcagtttcgtctgcttatgaatgagagagctggctcaaacaaatggaaagatgtattaaagcagcaaagagggtacg

SEQ ID NO: 32735 - DNA, 559 bp, Arabidopsis thaliana columbia
ttttaatgaaataaattatagcttaatcatacactcaaacaaaaataacgtggaggttaaaataatatttcttttcactacaaacattagccaacctagctaagtcgtccattcttcaatttgcttgctttcatgtattgtttagatttaagatcattttctttttggtattttatagatccaagggcaatatggtcatttatagtgattcaggtttgagggagccggagaagtataagtgagaagttgggtccattccggacggtcgcgggctcgcggcttaaacggtgttgctgaagtcagcttatgtcatgctgacagccggatcttgcactcttcgtctatatttacatatatacccctctttgagataccaactttaaaactatttatatctcaacaaatattttcgattttagtagtagttttttttaatttttggtttcgatgaattatgtcagtaatttgtgaaagtgagagagaacacgaataatatggggattcgtcttgtgcctgcatgagagagagggacaaaagaattgtatgcctcttgttttga

SEQ ID NO: 32736 - DNA, 450 bp, Arabidopsis thaliana columbia
gataaattgacgtttattttcactgctttcaagcagaagtccgtcaagaagatcttttaggcgtctgttgcaatcatttataagctttgtcatttgcactatcaagccacgaattacaatgagggcctccagaacatgagacagtaaattgtctctcatgaatctgccacactcaaaacattagacaggtatgaagaagtcaatggcagatcaatagatttaatgatgagaaaattacctggaacgaatatttggaacctctaagaactttccaaggagttctaagagcttgtggagggtaaatccctgtgaaatgtcaatctgaagactcctttctagagattcaatgtatcccacctcttgggagatcaatttacagattgttgtcagacaaccccggacagttaagaaaagaagtgcatcttgtgtctcaatcattttgaagagtag

SEQ ID NO: 32737 - DNA, 460 bp, Arabidopsis thaliana columbia
cccaattaatcgaatctgtatacaatccatttttacatttttctttaatttatttactgaattttttaattttcatattttataaaacattttgtcctttcgaatgattaaaatgtttccaatttgaatttaatcatattttacaaattgttttatgcaaattcaaaaacaaaaacattaaaaaaaaaattatagctcaattattccactacattgtatttgagagaaaacagcccaaagtaaatgaaaggcccaaacccacagagaaattataaagctcaaagcccaaatttaaagtggtccacttgatttataagtcggtccagctaatatataacacacaaactttactttggttacctttttttcaaacctctctcctcgaccctttaatttctaatcaccgaccaaaattgatcggaaacctagagctcttcgtattgctccgcaccatgcatat

SEQ ID NO: 32738 - DNA, 261 bp, Arabidopsis thaliana columbia
acgttccggtgtgaagagtgtgtgtgagcgatattgttgagattgattgtagccgtccgaggtcctagctaatctactccctctatcactacctgtagtgcgcagatggacccgcgcgcgctgcagattaggcggctaccatctgatccttgataaggctggctactatctgtacacgcatgtgacgagtgatccatccatcgtcgacgcttatcccttataaacctcccacactctatgaacatatagtagcatgccgta

SEQ ID NO: 32739 - DNA, 487 bp, Arabidopsis thaliana columbia
  unsure (1)..(487): unsure at all n locations
ttacttgggtccattacaaactataaactttcaatgcagttcaaactagacaatttatatgaagtattcaagaattggcttttagatagcataaagaagaaaatggctagaatgcaaatagagaggtatactcatatttatgatttcaaattagatgttatcctanaatatctagttgtttaaaatataaaaagcaatattcaagatattcttcatatgtaggaagtacgaagactttgatcaaaattgcttcattttaggataatttggcagatttgaatatcaagaaacagtttcatatttaatagaccatagcgatattgaagcgtcttcatttataatgggccttataaaaccaatctagcccatatcactaccaacccatttattacatctgaatctaaatcaaccaaacctgtattattaaatcggattcaaaattctgacccgtaattgattcactaacctataaattgaatcttttttt

SEQ ID NO: 32740 - DNA, 432 bp, Arabidopsis thaliana columbia
tttaacgtcgttatagcatcaaatttgtcacatactctcgcatgtctataatgtagtttaaatttctattaattcgtctgatatatatatatatatatacaaagttgttaacaatatgattatcactaccccataaacaaagttggtcttttctgtttttccaaccagtgaaagtctctttttcaaaacctagattgacaatcccacacgtaattaataactgactagcaaaatattagttcacatttctgtgagaaatttggtttgtttcctaaactgctccatgagagtaaaaatatagagcaagaacaaaaacataactttagatgtcaaagtagagcatagagaccaaaacaaaaagttacaactatatctctgatttcttattgtgcggtgtaatgatatgagtcacttcacaagccaatcatcatg

SEQ ID NO: 32741 - DNA, 576 bp, Arabidopsis thaliana columbia
cgctcaaaactaaatcggaaaaaaactacataaataagatatggaaaatgatactaacacaaactagtaagtaagtagtcactacatattctggtcccatgaatatggcttacatagtacatacattgtgagattaaatgaatatgatatataatacaagcatataagcatgtgcatgactatgaagtgggaatacatttagtgcctttatatgcaacttgacagaattaccaattatgtgaatagtgaaacttatattgcgtcttggccttttcacatccgtgacatgatccctcaaatctatatcttcttgcggcatatgcttatatataaacatatgacttcgtctatagatttatatccagataattaattctctcataatatcttctccacaatttcaactcttctaaagtctaaaccatgaagttactctcaaagacctttttgatattaactctcaccttcttcttctttggcattgcactagcgaaacagagctttgaaccagagatcgaagctttgaaatccttcaagaatggtatttccacgaccctttaggagtattacagattg

SEQ ID NO: 32742 - DNA, 494 bp, Arabidopsis thaliana columbia
aagatggagaaaagatgctaaattccacttcggcttgaagtaacgctgtggccagctcctggtaaccagcctgccactcaaacctgcagaggctaactagcatatcgactagaacgagttcctgttggatggcagcagaatccaatggttcagatgttgtatccacctgcataatccaataaatagaattagaccttacaatgtcaaactgctattaatgagaatatcaataatgccagcgattaaagatagtggggaaacaccaaacgacttgtgacagtaaacagtacgtaatgaagtgattcatcaacccttatcagttagcaccataaaataagaacctgcctatgtcgcttgctgcaagcagaagaaagagcctggatcgcataagaatacagcctcctcacttctgatactttgaatctggagaactccccttgaacaacacataaaaactccctccataatttgtagcttgcggaattctgcataag

SEQ ID NO: 32743 - DNA, 565 bp, Arabidopsis thaliana columbia
tatattggcttttatttatataccgttgaatttattctaacttggatgaaccatgagtggtgaagcacgcacagaggcacatgccattgagacccacgagacagaggcgttggattaaaaatatatgattttcgactctatcttagacttactaaacattcatacgttacttgatttaaactatatttaatactgcctcgaaaaaattgtctcgaacatgtcactttttttccagacataagaatacaaaaaacatcaaaatccacattttcaattttgacaataaaaggaaactagaacggtagagcaagcaataaggtcagcgtaaacgggtgacatgtggtggttgattgagcacgacgacgttttagataattacaagacagaagttgtcgtctttcaccggcgtcgaagaacgttcaaacaaagacgattataatttagctaacagacaaactcaaaataactcttaacgtctacgttcatttcatgaccattttcatttggctaaatttcagaacatgtgacttggtgaaaatgtgaccaaggagatccttattatgat

SEQ ID NO: 32744 - DNA, 518 bp, Arabidopsis thaliana columbia
tccccgtattatcctttgatgaaaaatatttgggagattttgacgtaaaataattatgagataatgtatgtgcatataaattttagaaaaaaacatctagaaatttgttcggagaatcggagtagttgtttattttgctttagttcaactagtaataagagtaaattgtaatgcgatctaagccacggtccattcataaacctttaatttgaaccacgaggcacaagcaacctctcactgaaacaacaatgaaagaaaggatagacaccctaacacattagcttagggtgacttaacttctccgccggtttgctgatgtagatcctccacacctctatactccgtcgtatccacaggctgttgcacatccttcaattccactgcgaccttatcctcttgaattctgccgtcatcatcatcgcccgtaaccgcatcgctaatgttttgacccgtttccttagccgctttccacgcaccatccatcgcatccttcatgttatcaccgtgctgacggctgc

SEQ ID NO: 32745 - DNA, 480 bp, Arabidopsis thaliana columbia
tcaacatctgattgatagactcgacacatggcacaatcctatgagttactaatattaaaaacggtactttatataaaaagatatagtatctttttagaatatattagcatctagtttttacatagaaaaaagaatatgtcattttgcaaatcaaaacttataaagaggacattttccaaatttactcttgataacttttctaatattttttagtttataaatatctttttcatttttctttcctttttttcctcaaagtttatagatatttttcttctttgattgttttcataattaatccgtaatctacttagatagtatgtacatatttatatggaattaatgccttccgttattctatattttttaacattatatagagttaatacaaaacacctctataatataaaacttgaaacatggaatcaataatcacatataacttctggttatcaatcgatcagatcaacattggtcgca

SEQ ID NO: 32746 - DNA, 501 bp, Arabidopsis thaliana columbia
taaaagcacaaggagactggttcataatcttaactatgaatcagatttgatggtttgagctaagagtttgtatccctaagtcccatcaaagtttgagttatgaagttgataaaatgaaaacgatcaaaacataaaattcaccatagcccacaaccaaaacaaataaatgatcttaaacagaaccatcaatcaatattgactgccagaagatcaatttttaaaggacatacttcggttcccggatgccggaaaagcttgacgccgttttccttgaccaaactctgactgctcctgtgtagaccccttcttctgacctgctgcagcttctctctttccttgtcttcccttgtgtccttccccaaatttcacctctttccttgcagcttcataatcaaaaggctctatgtttaaaaactcggtctgcttttgggccttcttgctcttattcatggatttaaagcacttctgaaagtttgtggacaactccgagagagacattgg

SEQ ID NO: 32747 - DNA, 465 bp, Arabidopsis thaliana columbia
ggtcgatctagaggtctagaggtaacgcgctcgcaactactgaagatagtggtgtcgctatctttagatgtgataaacataaagtcgtgtcggtatccttgaaaagttgaaattagtgcgtattagcattgtttatccctaaaggcacatatatattgttccttactttcaaacgacatatatttcttcagaaccttttgctataatatgtctgaataatcattacaatatagtatatacacacaaaacttattgatactatgcattctctttggctatgttggaaaattcacttgcatgacttgtataaacttctaagttatgcatgcgttttaaataatcaagttactactataaattaagatacaggtatgtatagcaattaattaaaaactaattaatacagtttagtaatgaataatgatataaacattatacagtacagtgtcgctgtttcagtaatga

SEQ ID NO: 32748 - DNA, 535 bp, Arabidopsis thaliana columbia
gactttacccatcagactggttcacttctactctagaaaacttgtcagaatgaaaaactaaagaaaactgaaacatacattccgcaaaagctttcattttgctcggtcacaaccgcgcttattagctcacaatcaaagaaagtataacatactattgtaacggcgacaacttctatagccatgttctttcagaagaacataaacactcaaaagtagtattcatataagaatagcttagaagaacaatacacatcccaaacctctctctctctctctctcaatctctacacaccaaagttagagcaatgcagagatttctaagcaacacaatgagatgtatctcacagtcacaggacaagaatcagtttctccaattagtagaaatgctaatagacacaacatctttaaaattaccaattcctataaaagttcctgatgatccatacattctcactacacttttagcaaaacaagattttgatttgagaacagagtaaaatttgcaattgtgaacaaaatgagaaattttacttta

SEQ ID NO: 32749 - DNA, 575 bp, Arabidopsis thaliana columbia
tactcaaatgagacttccaagatagtgcaatgactgtatatgaaaatgtcataaataggttgaatcctttacgatgtgaatgtgaataacatatgccagtgctgtgctttattgaatatccatttaaccattcctaatttctgaaatactgcaagacaaaacaaaaaatgataagagtagacgaaggacaaagcttgagtatcgaaaagaaggtctaagaatgaaacaagagctatgtccgcgatactttcaagataccattaacaatcatagacctttttctgtaggattgtagttgagttgtcagctcaactaacgaacaacttagaccggttagtgtactatgggaggagttatatagagaaccgaagtgaataggatcgcgatactgagttgagaaagggtttggaagagtagcatagtaattaatgttcatagttcccagttcatagttaataaaggatttggtttgttcttagttcataattaatgttctgtatcttattaaaggagagcatgagacttaccatttttgaatttgacttggatctgttgcgattttgatttggtgaaga

SEQ ID NO: 32750 - DNA, 543 bp, Arabidopsis thaliana columbia
cccaaagggtatatcacttatgatagtcaaaaaataaaccactatggttaactggtttaattgaataattttccaatgaaaaatgacgtggatgtaatcatatttcgtttgattaacagataatcgaaccgacaaaatagtgttaagtgaactcaactaatttaccctgtacttcctgacacagtaattgaagctagaattttttttttcactgaagctcagtttcatgtaattaattatgttaatgtccatcttgtggatatatatattgaagaagatatgagagcaataacatttctaacacaacgagtagttataaatgttcttaattaattgaaaagatataataaatacaaattgtcaacaaaaatgtaaaaaaagttaaataagtaaacaagatatttcagttttacaccgtacacttttcccggccaaatacagatgaatcgccgtcacacaaaacagagcaagacggcgaacagagcaaagaggagagaattctgtaaacgagccgagcctgaatatccctgaggaggagtatga

SEQ ID NO: 32751 - DNA, 417 bp, Arabidopsis thaliana columbia
tgaacaagtctgtctcttgacttactcttctcactatgattgtggtcgccatgactcatctttcgagaaggtaattgcgaattaccagacaactctggttgcttttgaggtgacacagcagcctcaatgctcgctctcgctggaggtagattagcattcttcagtagtgccctcatcagtaacacttgtcggtcttctaagaacactaagctgagggtgtgagacagaggttgctgcgtttctagcgagcaaggtagccgaatttcctggccaaagcggaacattcccagggttccaggtctcagactcagagcagaagttgataaaccagtcgcttggactactgaatgatgtggcggtggcacaccccttaggatattggggatgtatacggtagttgacaaaactgaatgagag

SEQ ID NO: 32752 - DNA, 620 bp, Arabidopsis thaliana columbia
tgtagaaatgcagtttttcctagttctatatgtagaatgcaattacaaaaccttattaccggaaattctagaaactcttgagacaatgaacatgaaaataaaatccagttttagttttaattttatggggaaatatgtttggataatgacaaaattctacattagggaacgcataatcctgaaagatcacatgaattacatgtcccttattatcccttacacgaaaaccattctgattcacgtaatcccttgctaattttaataaataaaccgttttagtttagatgagaaacttatctgaaattcatataatataatttatacaaaagtgattcataaaattatagtagtgttccaaataaataaagaaattaagagaataattctcaagcaactaatgtcactttcaagtgtttgtagcctctgcttttctcaccacctcatcaaacactcaaatatcaacaaccaaataattgaaactttttgcccactttttctattttaccattttcaaccctaaattttacttacatcaattaaatcccaaaaatcagaatgttcagattttaatcccataagatcaactgcttaataacagaacaacactcttcgaaaaaaga

SEQ ID NO: 32753 - DNA, 511 bp, Arabidopsis thaliana columbia
caagggtttaaggctaatacacacaaaagagcgtcttcaagcgatggccacaatcttcttcttctgcttaagctttccttctcaggcagacccacttgcttgaaactagctcggaacgataacgacaaaattcgccaccataaaccctatttttaatctccgactctgtcgtcacttctccttcaagctgggtagattaagttcgcttatggccatgggggtttctcttacttcccacaataaccctcttcttcgccacttatctccttcctcttcctgggtttctcgttcctcctctcgcctctcttcttctccactcccttccttcctctttccttgccgtcgaacccttcttcaaaggtttgcactttttttcacctttcgtgggttttagtaaattttgagactacacttgattatcgattactatgctctgttctatgctaaattttacttgattgtcgttactatgctctgttgtatgccaatttaccttatttttgactaattt

SEQ ID NO: 32754 - DNA, 463 bp, Arabidopsis thaliana columbia
acgaaacatccaaaatctgtaattcgttcaagtaaaagctctgcgtgtttaaattcaaaaagggcgaagaaaagaacaagcttgccctccctcctcttaaaaatgaaagcaaaagacattacacaaaagactcacaatgcgacatgcaaatcaacagaacagtatcagtaactggtaaatgaccagagagcagcaggaaagtcaaaatcagcatataaacctagagagacaataatcatcctatttgactgccatacgcttttccacaccaggcatggaggcataatcagaagacaaataagaccttctctaaagcagattctctagtatgattaacaagattttaactcaccagaaggtgtagacgctagcaataaggtgatctaagcctctctctctctctccaccagaactgaggtcgagtaactagctaccttgtcatttacgagagtttttgacttct

SEQ ID NO: 32755 - DNA, 297 bp, Arabidopsis thaliana columbia
ggaagtttgacgtaagttattgaaagagaaaaacaaaaggcagatatatgagactgtggaagagaccaaaaagttaatttatggggaacttcattataagtatttttgtagcatatgcagaaatacgtatattcttagcatataattatggtagtatgatgattgaatactagtagtatcagattataaagaatattgaattcatccaaaaagctgcagagactttccgttctgtcggcacagctgctacgtacgatcgatccgttagctctgtgtcatacttgtgatagctgaatt

SEQ ID NO: 32756 - DNA, 517 bp, Arabidopsis thaliana columbia
tattgcaactagctcatttccttgtttagttttcttgcaactttgagttgacgaggtgtttttggagtttcgtatgtgttatctgcgagcttttaaaactaaacaagcttgatttagcttctcttttatgtgcttctgtcataatgttcttgcatattcatgttggggagagctttggagaagttggttatctccatttatgattccttgtaattgatgtactatgcatgtgaacttgtatgcaaagtgggtagaactctgtattaaaacaaaacgagcttggaatttcttcttgtatgtgtgattcttggcaaaaaagaattgaaaagttcaaacgaaggaatgaatttgatgacgaactcccaaatgttgccgtcagccacaaagttattctcgtcggtggtcactgaaattttgtgcttggacatgaaagaaatggaaatgtcggatacacggtccctagaaatagtgtaaagggcctgttaaatatttagagtgctaatgggccgacctggag

SEQ ID NO: 32757 - DNA, 440 bp, Arabidopsis thaliana columbia
tcactacctttctttatctgggtttgttctgaatctgttaaagtaaacaggtctagagatcatgttgggatgaagagaagagacgtcatgttacagatagcttcctctgttttcttccttccattggccatttcacctgcatttgcagagacaagtattgttgattctatgtgtttttgatgatattgattccttgagaatttctaataacaacttcttttgaatctcagatgcatcagaagctttccgtgtgtacacagatgaaacgaacaaattcgagatatcaatcccacaaggtaatctaatcaaactctgttttcagatacttatgatagtggcgaaatcattatgagtgatgaatgaatttgatctgcattcacataaagattggcaagtcgggcaagcagaacctaatggattcaagtcaatcacagcttttt

SEQ ID NO: 32758 - DNA, 220 bp, Arabidopsis thaliana columbia
ccctcatataccattatttttatattggccatgcatgtgtataagtggaagatagaacaatattaaaacaatattattgtgtttggtcctatttattactctctgctctcttcctgaagcttcttcatctttttgtttgacaagaagaggtagagaagaagatgtctcaatcaatctcctccagcacaaaggcagaagaagttgttagtgtagatgtgag

SEQ ID NO: 32759 - DNA, 1048 bp, Arabidopsis thaliana columbia
tagctcttgtttttgtaacactttctggtttgtagactatggttgattttggaatttttagatttttgattgcattagtacgatctgattatctaatttcgatgattgtcgacgtaatttgacttgggcattgagaatttccaaactttctctgactgaaatttcatttttccttcatggaaatgattcttcctagttacttgttttgtctgtcttccatttccagtgaatacgcttttgacaggaggaccatactaagtcttggaaaaccctcttcatagtgggtttgatctacaatgatgtatcagacaattcccacggcaccaaccattcgtggtggaactccaacagagagtggtgattacgttgtgactttggatcagattccacggtggagtgatgttgagcagagatcatctttggaggatgagacaggagatccagaacattcgaatcctcgtacgcaaaccctttggcttcgtcttccgaagcagggagcagcgggaatgggatggtatctaagtttcctgttgatcacgagataaactctagaatatacctttggagaggggaaccttggaaccttgaggttgatgctgttgtaaattcgacaaatgaggtaagatgatttcaaggaattatatttgcttgcgagtaagtaagtttctcttaatgtgcgtctgatgatatggttaaaatttcttggtattggaggacagaacttggatgaggcacatagcagtcctggtctacatgtggctgctggaccgtggccttgcagagcaatgtgctacattggtataaacactttctttcgctaatttctaaaacaagatttttatatatactattgaaaaaaacattatattatgtattgtcttctattgttgcgtgaaagaggatttttcgcttattctttgtttcttggcagggtggatgcaggacagggatggcgaaagtaacaaatgcctatgatctccagcgaggtaattggtgatggagaagacggtttaaaataaattctttacttattagaggacccttttag

SEQ ID NO: 32760 - DNA, 465 bp, Arabidopsis thaliana columbia
taaaaaaatcagtatgtcaggtttacagcctaaactaaatatatgtttgaattaatttagaaaagagggttaaaaaaattgatgttgtcaatcaaagtaaatctttgtggactccatgcaatatcttaaggacaattcagagtggctactgtcaactataattaccaattttcaataactgtatatcatgtcgttagctattcatagaagcacatattatatgaatgtcaaaagtcttcactcttttggttaagaaatcaaaattcaaagaggcagagacaaattattgttacattcttaaaattaatttgcttcagaaattaagagtataatatcaataaatggaaccaaaattcaaaacaatattttactaagaaattgcaccaaaatttagatattattttacagccaaagaagtaaatattaccaaatttacaacgcatggaagcttggaaaatgaggaac

SEQ ID NO: 32761 - DNA, 565 bp, Arabidopsis thaliana columbia
tgaactaaggcattgttaataaaaaaaatcatataatcttttcatttaagataaaaatgtacagattttttaatgcaaaattgggaagttgtctctaacaaaactctcgtagatgggaggagatcagaactcaaaagcagggccaatctggaatataggttttgtttggggtttttatataaattttaaaacatgagaccaaaatttaaatttcagaaatagtgatctatttttgcaataaagatcttaaaaatctatggaggctctaggcccatattataatatatgggcttaaaaactctaatagacatgtcacaagcttcgacttttgggtgacacaatatgagaaatgagtgtccctcgccaaaacaaaaaaatgaagtttatcaattttatgtatatattgattatatttgtataatatactcatcttcttgctgtagaaatttatctgacatgttttgttaatccaacctttatcatccgctaactatcttagaaaccattaaagagaaacaaatcttataaaccattacatatgggcaaaacattggaatttcatttg

SEQ ID NO: 32762 - DNA, 471 bp, Arabidopsis thaliana columbia
gtgtcttgtgtattgtcgtttattttttagaattttctttttctgatgggatttttaccaaataatatgttgaacttgtaatatcttgtggactcggattgtgcaatgtttcaccaattctatagatatttttcccttttcatgtatactttgttaaatctttaatagatcaatttgaacattacaacctcacaattgaatattgatatgtatattgatcttcttttttgttttcgtcttcgtctgttttcatcattgtgatatgtatattgattaactgatggtttttgttttatagttaatttgtattaagcttttaaacgtataaaatatcactggacgattgatcacattgcgttttcggtttacgctattaagttttataaatgatattaagatatgcgtttcttgaaaataaatgtttcatctcatcgtatacctgaaacgtggtatgttatgattaatttatga

SEQ ID NO: 32763 - DNA, 528 bp, Arabidopsis thaliana columbia
gtcgttctagaggtgcgaatatgtatccaaaattgctgacttttcgaattgggcagatttcacttcatatgcagaacaagataaactttctgatcatgtgatgataaatattgtttagccaacgcatcacacatttctttgagtagtttctacttatggttaagtttcagcatcaatagtcaatagccaacaatatttggacagtcttctttaaatactccaacaactagtttgccttggcaattaatgtaacttaaagtctagccaactctttggtattagcttcgttattttatacatttcttaaaaccattttattcacatttcttgaccacttggattccaacatagtggccagccatgctgcaccacctcgtcaaaattaccacaataatttgatttggtcaaatcatcatttttttggaaaacaacaacaaaaaaacttaaactttgtataataaggaccctggggttaaaagtataattattactatgtaacaaatcaaagtctaagatggaaaatactat

SEQ ID NO: 32764 - DNA, 347 bp, Arabidopsis thaliana columbia
atcactgattaatctttgacgttttcttaatcgaatatgaattaagtgttgtttcttctgtatcaaatccaggttagaggatgaaccgagcagccaaatcttcagaagttcagaaccacctagtccgaatcataatcagaatcaaaacagcaaggtgtggcagtggctccctaaggttagcatcaagatccagacctaataccttgagcatcatcaatctacagagttctacctccacattcagcggcatcttcgatcgcatctatagtaaccactaagctcgatctactgaaacaacatatctcgtcgctgatgatatcatacacacaagtaaaatgtctatatga

SEQ ID NO: 32765 - DNA, 591 bp, Arabidopsis thaliana columbia
gaacaaagggccgtgtagcatgaatcataatgcttgaaagaaagttagtaagtatctgcaccatccacaaaaggaataattttcccaccgtaaaaacgatttagtatgccaaagttttccacaaagagatgaacgcacctcacggccagcaagagttagcagtactgtccccagacccccagccgttagccatttttgggtagagaagcctaacagttccataaacaatgaagcagcagcaacccacgcagcagtgtaaacagcttttccagcaaaactgaaacccatctggcataacaataaatagataaacatttttccgaataaacccttagctggagagtcataaagatatcatcatctaatctcaagcatcagccaactgagtttttgtacatctatgtcgaaagactttattccttcagagcaactaaaaatataaatgcaaattgcatattcacaaagacaatagaagtttggatttggaggacaaaatgcttattctttcatgagagacacaatctgaaacatattcaaacttctcccctacagttgaggcattagaacatataggcagctgcaggtgttgtg

SEQ ID NO: 32766 - DNA, 621 bp, Arabidopsis thaliana columbia
agcttcctgaaaatcaatcaaagaggctataacaatcgaatcaaaaatacatgaatctgtgaagaaaaacgaagaagaaggtgtgaacatacgagatgctgcaatagagcacgaatcccaggacgaacatgactggcatcaacggaatcaaacggagggaaatcgaagtcctgcaagagaggattcgaggaaagagtctcgtcggagagacgtgattccacggcggcacggcggcggaagacatggacggaggagaggagaaggggcggaaagaggaggaggagagagaggtggaagtggtggatctaggaggagggagacaaaaagagaaagaagaagaccagatggggcaaggatatgatttacgaaaagttgagggacgaaaatgacaagaagaagatgagaaatatttgggttttggcgatcgacgaagaagattgagagaggctcgagacgttggagtcgcattaacatgtttgctattacaagcgttgccattattcttattctcttcatttttatttttattttttcttattttctttgagattttttgggtttggatttgactaagtgtgactacatgcgattatgttgtgaggttcaaagtcgatgatatgt

SEQ ID NO: 32767 - DNA, 484 bp, Arabidopsis thaliana columbia
attttttgtgcattctaatttggtttaaatcataaatctctcagttatttattatcatgctttgtgaagttatgagcttgggctatacattattattacagcccactaaatattttggtatatcaccatacgataagaaccttacatacatctacgaaagcccatcaaccctttgaccaacttgagcattatatttctcgcattgaacataggacgattttggttttctatagtcgatattttgttggaaatagaattttataaatcttctgttattggaaaaacacattttgtccaattttattgtaattatgttatttgacatagtgaagtagattagaatacaagtattttgtaacaatttaataaatataattccctcagacgtaagacttcggtttacaggggttgattacaaaccaaactagaaataaaggtagctcggtagctaaaacacaattggtctgattcaaagaatgtatgt

SEQ ID NO: 32768 - DNA, 430 bp, Arabidopsis thaliana columbia
tagtagctctaagctataactctaggtagtttgtgttacggacaaaacctatctcaacgttatgatatatagaacaattagcaaagtacattaatgctataaaatcctagcagactaggaagaaaaacaccgtattaattgtttttgaatccaacaacatttacattgacgaacaaatgaagaaattcaggaaaaaaaccaatgcaacaatgagtacttcgttttgtggccggtattcctttggctcaacatttacgattaagaaaacgtaacaaaatatattctacaacaagaaaaattgaaaaatgaatgtaccaagattcaactttggaaaaaagaccaagaagataaagttgatatttataaagtgaagagcaaagggaagaagcggtcgatcacttgttctgtagggcttccatgcacatgctat

SEQ ID NO: 32769 - DNA, 494 bp, Arabidopsis thaliana columbia
tcatttttataattttgtcgaatctctctctctctcttcaacccctcttctcaatctagggttagggtttcgattctgctagaggttttttttctcccaacttatacttctaagccctctcgtcataagccttgttgactcttcttcttaatttgaagaacttcgtaggctaagcatgtcgtgattatcccaaatttctggtaaatttgatttctgctacttctactcgtcattttattctgaattcgtctttgcgttcgaattatttcaagcaattagcttcatcttcgtgtgaaatttcaatgttttaggatttgatttggtgtcataaagaacttatttttctcgtgattttgcatcttcttttaagtttttctgggctggtttcatggctcctttatcgtttcacgtgaatttcagtgtcgattcgattgggattttgagaatagttggggacgtttctgtattgcaaaagaatctgtgaatctttttta

SEQ ID NO: 32770 - DNA, 474 bp, Arabidopsis thaliana columbia
  unsure (1)..(474): unsure at all n locations
ttttttaataaatttttttttctctcgagatttgataggaaacatctaaaagtgaaagaattaggacttatgacaaatgccagactgagagagttgcagttaattgtaaaatgacttatgaattattagataaagatataaaccggataagtatgaatgtgattatccatcactcatctctatccacaagatatggatgatgtttatccaatacttcatccctaagatatggatgatgtttatccattacttcttctttaagatatggatgatgtttatccattacttattcgctaagtaatttacttcctagctaagtaaaccctactatatataactcatttcattcatttgtaagttatagagaaaatagagaganaagagaagagaaatagaaagcaataagaaaactctggttttgagttttattctctctagtctttattctccttcttactttaatctttatacacg

SEQ ID NO: 32771 - DNA, 474 bp, Arabidopsis thaliana columbia
tacgcttcatgataaaaatattcatgatataaaaatctaaaataccgatgccgactgaacccaatgataccagaaaaagaatggagaaagctttaaatataatatttaatttatattcatgatacgataattccatcttctaccaaatataaaatcattgaactttttcgggaacttttctcttattagtgggaagaatagtagcaagtgccaagtgagatgctcatttggtcaacctttgcaagtaagaaaaataaaagtagagagaattgtgccatcataatttcccacattatttttttatttctttcaggaaaagaattaccaagaacataaaatcatttctttaaaataatatacatcattcctttgattaataactattagccatccacccacccatcaatttcttaaaaatagagaatcgaaagaatacttttcttctccttcttaagaagccccattggcttcatc

SEQ ID NO: 32772 - DNA, 680 bp, Arabidopsis thaliana columbia
actccacatattatagttttgcaaaatttctataaaatatgatattatttaactcccccactcattacacattaaaaaaacattacatcatataacaataataaaacataacacattttattttaaacaacaccattagtgttataaaagattaaagtaagacaaaataatgaagactagagagaataaaactcgaaacaagagttttcttattgctttctctttctcttctattttctctgtgttttctctgtaacttacaaatgaatgaaatgagctatatatagtagagcttacttagcgaagaagtaattgataaacatcatccatatcttagagaagaaataatggataaacatcatccatatcttagagaagaagtaatggataaacataatccatatattagggatagagatgagtgatgaataatcacatccatacttatccggttaataacactcccccttgagtatccatcacttttgatgagttacgtactgcctcgttaaaaacattatcatggaaaaacccattgggataaaaaccatgacaaggaaaaaagagtacagtgacgtgaactccccctcgaagacacttcacaggtctcgtagatgacgcattccaatgctttgaacatgctttctaaatgtagaagttggaagcgcctttatgaatag

SEQ ID NO: 32773 - DNA, 564 bp, Arabidopsis thaliana columbia
tattattattatacataaacaattatctatctcccctccacatatcactatttccctttatgaacttttgatgtttactcatttttgttggtctttgatttctgattgcatgttcccaactcttgaccttttaatggtgataatgaagaaagaagtcgtagaactaccttatctctttacccatactacgtttcaaaagactagttttaaagtctctaagatctagtgaaaagaaaagtgcaagcaagtatagccacaaacagaagaagataaacaacaacaaaaatataacaagataagtttaaaccaacattaaaaagaatataagacgagtctttgtctcattttggtggcgttggcgtctactacactaacggatgacacaatctattgtttgtcttactgttgcaattgacgtttgtaacggctggtttaataaacacattttggttaatgctaaattcaaaaagttattacaatattagttatgtatgtactttctcattattgtcttatgttaactctatgttacgtttaggacataatcagagttgcttgtatctg

SEQ ID NO: 32774 - DNA, 513 bp, Arabidopsis thaliana columbia
cgtaaaaagctacattttacttaattttaagaaacattgaggaaacaaaactttaatcaggttcatcccttctgcttgtagctaatcactgcctaatacgtaacattcactgtgtacaacggagcgccgtcacttatttgtttccttctttttctggtaacacctaaacctttggactgagaaagagggtcacaagtcggtcaacgcgatttttaatttgtttgaccactcttactgaattagctggcacgccacgtcatcttctgacgctgacatgtcagcgttaaacacacgtccacatcgacgttattcagcgcctagtagacgttttccactgaagctatcaaattaattatttacaacatttatttatttctaatcacaaaatatagaatttaacaacatttatttctatttataactgacacatattgatgtacttaaaatttaacaataaaaacgtataatgatcgactaaggatttataaggatattgttgctcaacaaatgaca

SEQ ID NO: 32775 - DNA, 577 bp, Arabidopsis thaliana columbia
gactatatgtttagttttaatagtttaaagcatatatatatatagaaaacgaaatcctttatacatctagttattattataggtttttttgctcatgcactatataaatcaatagtccattggaaaaataaaaatcaatagtctatagtccaatcaactaagaatacaaatcaaaacgagtcgaggtacttggactgaaaacaaaatatttgggtcgggccttttaaccgttttcttctgcgcatataaaggattttctattaagaaatgagcagaagaaaatggctttttttcttctcaaggacaagttccgttgttcaaatgcatgcatacatttgcacgttaatatacatatttttgtttttgttttaatcgaataatagataatagtcatttcttagttaactgcttgttggttttactaatgcatttttcacagaaatcaaacctttttttaattgtttattttttggtttcaattacaagcaagcatggtttatttttattacagaaaacaagatacgtagccagaagtttttttttatttctatcttacaataacataagcaaacatgtt

SEQ ID NO: 32776 - DNA, 629 bp, Arabidopsis thaliana columbia
cttgataatgcacatgcaccctctaacctccagaaatataatagttttcaaaattcaatacatacaccatgaggtgatatatatatttaaatgcatgagggatataaattttaattaccacatgtgagaacattttcttgtatatatggacagttgcaattatgatttcttcttttcaaatatttgatgcttaagatagaaagatatataaggttcctactaacgtccacaatctgatggattcaaatgtcgatagtatatacatatattagcaaagacctcaattcttttctttttttttgaatctaaattgagatgttatgaaattgtgtgtatgtgtatcttacaacgcaaccacacaaattcttgtttttaccaaccatttttataaactacaaacatgaaaaccaaacaaaacgaaaggtttatggagaactttgatttgcattttgttaaagaatttaatgaaaagttcgaaatagaaagtatttttagaaaaaaataaaaatattttggagcaattgatgtctatatcgcagctgaaataagtaactaagattatgagggtaggataggtttacatcggcatgtatggtgtgactagcctacatcacaatagaggagatgga

SEQ ID NO: 32777 - DNA, 528 bp, Arabidopsis thaliana columbia
taagtttgttcattttagaagtctgttacaaatcactaaaaaaatatgaaaatgttgaaattactagtctttccaacacatctaaaatagaattataagttttaaacgttataaaaaccatttacaacggtcactagctagcattacaaaataacggtatttaaaccgttaacaatggttaataactagaatcataaagttttaagcgaaaatctaaactaagttctttttaatatgaaattaattatatataaaaaaagttttctttcttattatccatatctatagataacatctacagaaaagaaaaactaaattttacatagatagacaaaatatcgattttgtttaccttcttatattatctctgtatgtacagacaacatatacatacacagtgaaacttcaaaatttaatttatatattttctattaattgggacagccacatattaattaggaaacggtaaaaagaatagaaaagttttccaacaatccttaatcccctaattattccgtgccagtaaaa

SEQ ID NO: 32778 - DNA, 323 bp, Arabidopsis thaliana columbia
  unsure (1)..(323): unsure at all n locations
nnnnnnnnnnnnnnnnnnnnnnnnnnctaaagacaaaccgtaaagagatggcaactagcgtactgatggaaatgggagcgctgagagagtgtctcaagcttgtggactagggaccttatccagggcaagcacctcatggttggatcgtagtctcatgtagccactccattaacgcgtacctggaagggcccagagcaatacagtgctgattttttaacgtggttgtgattgattgactcaggatgtacagcctgaataatttgaagatttatgttgatacatgggacgtccccgagtggggaagatatggtctgtcagtgtcg

SEQ ID NO: 32779 - DNA, 572 bp, Arabidopsis thaliana columbia
ggtggaacagtttccattaaaactgtaaaaacactaatctataatcaattccagagtatgaacatgtgaaacaagagtatcaagcaatcgaaacatagacaaagttttcaaatttcagcgatcaaagccaccagaacataaaatcgaatctgtatatattcattcgtacatctttaaactcaagagaagagcaaaaagtacaaaatcgaatcatgggaaatcgaaatccatatcacaaagaataattcggaacagagtgagactcaccggctaagagtggagacaatttacaaaattccaaagcttggatcttggacctagctaagctagcttactttgctttctctctgctttcagtcccgacaccgtcgtcgacgagatttaggatctgtctggctttggatccatttactcaaacgacgtcggttaaccagctaaaaggattcaaatcaaattcatgattccaaaccggccggtttaataaacgaacaaaccttttttgtcgtgacgctgcaatagcgttttgcaatcacgcgctatcgaaaacgcgagttcgagattttgttaaaggt

SEQ ID NO: 32780 - DNA, 506 bp, Arabidopsis thaliana columbia
agtttttctttattttagctgtagtgtcggctgaaccaatgaaactcaacttttcactaatctgttatgttctaatgcaaatgtctaatcttgatatcggttaagtccggtttttatttttaagtgtttaggatagactacaattgaaagccttttttcacaacaagcaagagaagatcaaaatgaaaagagtcatattccgattacacttttagtcattgaagaatactacaaggtaataacaagaatcagatttgtgaatcttcaagcaacaactagaaatcgacttaaaaaaagtcgagacatatgaggctttttgtcacaactccaagaagaaagattcaaactgaactcattcatcaccggcaaatctgacatgttttcctgtcggtgtaggaaagcctttcaaacgcaacactcctggagattgatctttggcctccacaatctcttcatcttcactgtcatacacaaatctagtgtgttccctgcaaagtcagtctcta

SEQ ID NO: 32781 - DNA, 811 bp, Arabidopsis thaliana columbia
tgcatgtcatcttcattttcgggtctacttgaccttactacatacctggaaaactgaaatgacatgtgatccacttgtgccattctatctttacaagatttatttactcactagatactcgaattcgcagtttaacttccgtggaatgatctcttcctgctttgaacctcatttaactccatatattgagttggaagagaaaacacttatggatgacctggagaaaattgttcaggtaatataatatttttcgcttcacgagattattttgttccaaggtttgtcaagttatcctagttttcgtttcgttctgtcaggaggaatcatgggatgttgaggatggaagccaaaataatgttttatctagtagcacacaggtgagtacctaggcaagtttcttgaagaagggttaataatagttataactttttacagatatttacattcttattcaatgtattaaatgattgacgacgtccactaggtattaattggcaggggtaattagattctttatatagatgtgtagaatctctacttgttacattgaacctacaacttgatcatacccactgagctggatagaaattttggattatgtccagggtgatgtttgttgtcgtagtagaaaaagtattcgtgtgaatctggatattatactgaagatgaatttcgaaatgtatcgctcgtgcatagtgaactatcaatgtcactagattagccagcaagaacttactaacattcacatacaaactatatccgtcacgttatagcttaacgtctgttaccatttgaaataccttgtttgcag

SEQ ID NO: 32782 - DNA, 340 bp, Arabidopsis thaliana columbia
ccagggtctgctcccacctccttcgacatggtggcagtggcggctaccgttgtgcagaaaagacttgcggcggacgaaaaaaccctaatcactctcgaaatcgccctactttgctgacgtgacatccagatgttctagaaaccgttagaagattgataggggtgggacggttatgcagctcgctgatgcttggaatcaaggtacaacaaattcacatgtttcggatatatcgatgatgaagatttatgtggcgaatgtgccgtttgatatgccggcggataagttagtgaatcagtttttggcttatgaaacagaaacatataactaatatatatatata

SEQ ID NO: 32783 - DNA, 677 bp, Arabidopsis thaliana columbia
cgacgaagcaaaaagagcaataaaacgaatcgggtcggattctacacaaataacgaagcatccagattccagtttagtaaagtgggtccaatcagaatctttaaagcccaaagtaaaagcccattattattggaccagattagtttaagttgctccaaaccaaaccggcagtcaaatcaattaaaccatgtcctaatcaatagtacccaatttagacccggtccaaacgttaccgtttatgagtgtgcgcaactagcagctgccactgtcagtgccaaattggtaatttcattgacctagctttgactgagtatcaccacagtgacgtggctttttcacaattataaaaaaaatgatcatattctagacatggaggtaaagtaaagcaaagaatctgcatttttgtattttctctaaggaacaattacaaaatcttgataccttgtgagatcataaagaaggtcgttaactcgttatctattatatttatataccttgaattcttgatacgtttgtttacctttttttctattgataatacgtttgaagtttgttttactgttacacattgattttatatgtgttcccaaaaccgtttaagtttcagagtccggagcagtaactcgtaattcactaatactggtatcaaatgttgttatttatgggtaaagcataaa

SEQ ID NO: 32784 - DNA, 466 bp, Arabidopsis thaliana columbia
cctgtggattataatttcagtggactaattagcgacgaaaatataaattttaacaaacaaatatattaaaacagaaaaaaacatttgtggtgaataaaattaaaattctaaatgacattccatttacgataatttaaaacggaaaataatatttatattactacatatgtatgtgtgtaattgaactacgcaaatgagtttattaggatttttaatgatttttacaaaaaattacttaagtgatcgtatattagtagctgggaaaaagaccccaatataacaaaatagaaataagttgtaaaatgtatttgattgaggattatacaaaccttaagttttagacgtttgtttggagtgcacttcacttcaaaatacttaataacgtgagaacagaagaaaatttggtcatgtgacaagactcttgttgatgggatatcatcaaattgacagtaaagcaggcaaatgg

SEQ ID NO: 32785 - DNA, 559 bp, Arabidopsis thaliana columbia
tgatccgcgcagaagtactgcattacatatctgcgatatccacatatcaacatttgtcaaatcaaagatataacaaccagatccatagtggagggtttaagctacctcaaatccactagatttagagatacattttgtgaagtgaccaaaacaagcttaacaacagtactggggtgtaaagggacacgttgattacaaaaacagaacacctaccgcactacgttgctgattcaaaccaccattacatcgaacacggagataaccatttgtctccttcgtaggagctgcaaaaaggaatcagaagaagattcatatcattatttcaagcttggaatgccctaagacttttagattagcatcgagttaaatctttacagctcaaaacacgagatgaacatacgaggccagtcagatcgtggtgcagaagacggtctccaaccaccagatttagcactctcccagagctcttccacgtttatctgctcaaaaatatcatatagaatccatcaacggttagatcaataaagactcactaagattatcatctataaacatgagg

SEQ ID NO: 32786 - DNA, 576 bp, Arabidopsis thaliana columbia
  unsure (1)..(576): unsure at all n locations
tcatagcgacgttgctttttgatccgaacaccaaaagcaaagacgcgaacgcaagaggacaacaacaacttccgggttaagagaataaagccacagctctaataagagttagaagaccttataagcatctccaccgccgcttacaaatcctgaggtgtcacaccgatccatcttcaaataaaagttcaaatcaaatctaacagagctgattcgaaagttgctcacaaaccaaaattagttcttctcaatcttcacgcaaggattacggtagcagctaaccatcctgcttcatataacagataataaacaagtgagtggcagtaaaccgcaatagagcagtgaaaaattcaattgggttaccaaatctacagaacacagatcatttaacacctcaaatctacagaacacttaacatctccagaacacacatagtttaggacaaacaccataaaccaagattaaaaagcacaacctttttattcgttagtaaccacaacatgaaacaaaacaagagatctanaaaaacagattgagaaatgaagaattttttgtcaaagagatcaccacaaatgatgg

SEQ ID NO: 32787 - DNA, 569 bp, Arabidopsis thaliana columbia
tcgtaatcgttgttgtggatcgccattcgctatcgcaagcaagtgttaaacgaataggacccaactagccgactccattaagatatgaaagagaccaaaaatagcccactagaatgatctattaaccaattaaatagatcattctaaatgtagttaatgcttaattaatcatatgattatgttttgtcttaaaactacaaattccaaaccctacaaccagtgtcgcctccgtgttgctttcacatgttagatattttttcgtttttttcccccatttttgtgtgtgtgagaaatatcttcattatgcaaatcccattggccacttgatttttaagtgctttttaaaaaaaaaaacgtctcctttttctctatataaaccccaattacataacaatcaatactagaaaacatatcattatcacactttcataaagctcataacatacataaaaaatgggtgaatcttttagattattcaatcatcatcacttcctcacaacttttctcataatcatagccatgctcaaattggttcatcaacaacaacaacaactacaacaacaacaaca

SEQ ID NO: 32788 - DNA, 548 bp, Arabidopsis thaliana columbia
cactctagattattctaattacaagcattacattaaacagagcaatcaaatattatgcgatcaatgtgaatcgtgattgtatcactaacattatatatgacttttgtaatgactagttgtgttgttggtttatatctgattcaaaatctgaagttggtttggttaagtcaattgaagattgaagcagtcggttatctctggttaagggatttctgattaaaccggaaattgaagaagagaagtcaaagactctaactgcagtggagggtttgactattatataaagagtaacagagtctgttacgattatcatcttcttcatctgttttcttctttgaagttttcttgtatcgagagagagagaacttgagagaatcaccattgttgtaagctcggtttgagctgtactcttcataaagcttagtggatttgccggattgattcggctccggatgtaggcttgatcacactgatcttgctgaaccgggtaaacaaatcgtgtgtctttgttcttcgttttctgttctctgatcttgcataagttgaga

SEQ ID NO: 32789 - DNA, 614 bp, Arabidopsis thaliana columbia
tccctcacttgatgagctcatgggaggtgatgatgctgttggttctaaggatgagttgtgaagaatccaaggggattttgctacttttgggatctgaaccgctgaatgtatttcacccttttttatttttgaaaagaaagtaagagcatttcaagagatagaacatgtacggattttgtattacgatagacacataacagagaatctatgctggagttatattagagttcattgctagtttttcagtggagtttcatgttatccttgaagcaatccacaacatgcatgtcgatttgaggattttagtacctatatcggatttcttcttatatcaactaagcactatgaagtatcaatcctcttacttctggcaatatgaacaggcaatcattgactagtattcttggttctagcactatctattagatagaagagatattatttgaagaaacccactggtataacgaccaaatttaagtcgaaccctttggcagcaactctttagtatccatatccaagatacattaaacatcagataaattcaaaggaataggagaattcacattctgattcagcggtgagaataggcaaagccgagaatagcatacgggatg

SEQ ID NO: 32790 - DNA, 643 bp, Arabidopsis thaliana columbia
tgttggtctctaaatattttaaattaccattcaaaaataattcatttttcatattcaaattgttgccaacacatgtctttatatactcttcatattcatttttgttatctttattgtcaaatttttatgattatggtcgtcgttactatcaccgttctacctttattatactcttcttcttcttccccttcctctgtcttgtcattttcttcttcattctctccatctttttcaatgtaaaacatttgttattatgtggttgaaaagagaataaatttaaacttactaactttaaccaaacataactccataaacctatggataagtttgactccattattctgaatttaaataagttaatgtcaacgtgattaacgtttgagtgtatatgagaagtgccatgtcctctcatgactctataaattaaagtattagtttcatgtatgaatagctatttataatttagaacggaacacagaaagagcaaacgtcatattcttaagaaacaagaaagatagagcttccttcaacatcctccccttccatcaaaatactttcatacttggttttaatcgagattaaagtaatgattaacatcaaatgtaacgcctgtgaaccagaaaatcggttagggtttgtttta

SEQ ID NO: 32791 - DNA, 592 bp, Arabidopsis thaliana columbia
atggtccttcatgagatacgcccaccacatgttcgacgaaattcctaaaccagctttcttggcgcacatttatgtaatagaatccaattgttatgtgagctgtttggagaacctaatagctaatgagattcagcggcaagtgggtaagtacttgctctttccatatcattgttgctgacacattctgctttatagttcctctttgttcaatggttattattagggcctaaaggttatcactttcagctggatactagagcctacgcttaatactctgtgaatcataagaccaaatgccctgttgttgataaaatccatccataactgctcttgaaacttaaataccctttaaagatgtgttctttttcagttttcacttcctgcagttatctcttgaaattttttggcagcattcagctagtgaagaagttctctgttaaatccgctatccatattctgttttcttgctgcatttgtgagccagtggacgtgaaagccaaggtgcattgcaattctagctctttttttttgtattttaactgtgtataacaaatgtagtaatgggaaactgttaaaaattgaagggaaaatg

SEQ ID NO: 32792 - DNA, 497 bp, Arabidopsis thaliana columbia
caatcattgttcgggtataagattcaagcagatactgctaagtatgtctggaaaattttcgaattacacttaagattataatacagagacagagagagagagagtcgatccatagcgaaattcaaaaggaaaggaccgattacaagcaacaaaatcaacagaaacgagacgatcgccacgaaaacccagaatcaccgacaattactgtgagaaaactgacgattcgcaaataaagaaaggaaggttgtatctctaaccttgacgacgagtgcgttacgagtagactccatcggtaacggagatcagatcagctggagagaattaaaaggcaagcgagaagaaacctaattgaagagaaagagtatctagcgagaaaaagagagaatcggggagagatttatcttagaagaagcgtacccgtaatccgcttttctcgtaaacaaccaagaatttagacggtcgcgttttatactatagatcattacacagaatattta

SEQ ID NO: 32793 - DNA, 542 bp, Arabidopsis thaliana columbia
caatcggcgtatccgctttcggcttcaccactcgttgatacttatccatctgaatcaaccccaaaatggaaaatcaatgagaaaactagggtttttgtcgaatccttgtaacaaaacacacagagacaaaaaccagtaaaaggaataaaatcgggatttatcttcaaaatttcatcatagcttgatgcttttttaccttaaggagttgttgtggttagatctttcgaaagagacgaagattgagataaaacgaaaatggtggttttgttgcccaggaagagccctcgttgtacggctttgtttcttctccttgatacgccctaagggaagaagaatttgatgcaaagcctctctgatatatatcagccgcactacttctcttccacacacacacgttgcactaccctaatcaggtttcggttcaagattttgctctaaaccaacttaaactgaacctagataattcaaactggaccgatataataaccgtattaccacctccatcttcagtcgtaaaaagagatttgatcaacgattagctg

SEQ ID NO: 32794 - DNA, 633 bp, Arabidopsis thaliana columbia
tttctatctcacctagaataacttgcttttctttttcgttttggacaagtatgcaataagagatatttactcatgtgctcttacagagagtctaggcttagctctctgtctgaagaagcacttttatcttagtattgttgaactctatgtagtatttaacgtaggagagactttatgattctgctactttgttctggacgttcttgttttcgctattattaggtgaagtagaataacacccttgtttcagctttctttctagtgctgtctgatattctcctctcgcaccttttcttagctttgtatcttgtttttgcttgcctcttgtaccattggtcattcttttaagtttattgcgacaggtttttgtcacattgctgaaaattgcagtgtaggtttcaccaagtttttcaagaccaatttctttctggtttgtcatcttgtagaatattcctcttcatcctctcaatggagacattgttgtacctatactttgtcaaattaacttactccttgcagtgattgatgacactagaagtctgaaagtttttctgtttgtcaggttcacaacttgcatgaagagagttagttacattattgactgtatgttcttaatctcagtgttgaggagta

SEQ ID NO: 32795 - DNA, 687 bp, Arabidopsis thaliana columbia
ctcctatggctcagaatcagttgaagctgatcaagccctatatccctactgctttttagtgataatattcaataccaaagctcctgtggattttaatcatcagatccaacatggaatctatgataatctcagtttggatccaaatcatcagtatccgtttcaagatgatccattcatggagatgttgatggaatatccttatgaacaagtgggttatgctgcagagcatgcacacatccctttcatgaacggaaactactacaactaccaccaaccaccaaccgttggtcttactaccaccggtcacatgccttccaacaacgccaccaccaccaccaccaccaacaccaccgttgtgtgatgtgtttcagtagtttgcatttgtgttttgtccatttcaaaagaccaatctctaataatgtcttttcttttcagttaattgttgtaagagttgaaggttttacctttaagtcagttatatttttatgtattgggtaatgtatttctgcgccgtagagccggatatttcaattatatttgaagaagtttggtcataaatttgtttttactttgttttttgttcttaaaatacataactaaatagatctgctaaaatcaaatatatcttgtttcatagagaatcttactttggatatattattcgcatagacatcaatgctctgtata

SEQ ID NO: 32796 - DNA, 463 bp, Arabidopsis thaliana columbia
gtatggctctagctgcatcaggtccatgagtaaacacatgtattgttctagcgaaacatcgtagaaccggaatattatcgattaaggacagatccaacactactgatggggtcgtttcacatgcttgaataagaactcggtttactctggttaatgaaaaagccattgaagaaaagattgacttgattaaagaaaagattggcttaggagttgtgtgacatttctggtggtagaagactgctatacttatatattgtgtgagatattggtgaagtcttatctatgggacagcttcgctttgaagtggactataattaggtgatgtagggctcgcttttgctaacattttacacttctcataagaaatatatctatctagacttaaacaatagcaatgcaaaataattaaaatctgtgaatatatgtcaaaagtcaaaactagtacatgtctgttaacacgtat

SEQ ID NO: 32797 - DNA, 567 bp, Arabidopsis thaliana columbia
ttgcatgctgtgcagaaacaaattggggcacactatagtctttcaataattctggagcagcttctccaaactacatgaaatgttgaatccttcaaatattctcaccacaaagtttcggtactactacaactctatcactgacgtgaatgaagtctaatataaatgacaaaactgtttctcgtaccttgtcatcgaaaacgtatagaggatcttcatcccgctgagttttcatatatgcgatgtaatccttgaacttcatggaaattttgttggggctcctctgagatattctaaacgggacttcaccatatttctctgagagttggtcgatagtccacgtattactggctggccaagaatcagcaaggccagaaagcaaaacctaaatcatagacaggaacaacatcacatatctgaaaatgttttaacagatcaaaatctcatgtactagcaaagattggaactttacaggtttcttggcgtcgtattccttagaaaactcatccaaggagatatttctcctacgttccacattcccattatcaaaagagaacccgtcaagagatg

SEQ ID NO: 32798 - DNA, 513 bp, Arabidopsis thaliana columbia
tgctagctcatccaaaattgaagagattttctaaattccgtctcactgtagattctcttcacaaccaggaataatttgcaacagctagtatttttgtgtgtgaggcttactttttcttaataccaacaggttaagatatggcaagatcgtaagacacaaccacttgtagtattgagacctcatgatggacttccagtcaattctgccatatttgtgacatccccggaaagacctgatcacatcatacttatcacgggggttagtttgctcaaattattacttacttttctcattgctatataatgttatttggccctgctttgttgaattcacattttagaattgttgcttttgtttctgctaagttgctaacgcatacactgttggcaatgttcttctcgtagggtcctctaaatcgagaaatcaagatttgggtctccgctggggaagaagggtggcttctacccgctgatactgaatcgtggagatgtcccagacacttgatttgaaaag

SEQ ID NO: 32799 - DNA, 401 bp, Arabidopsis thaliana columbia
cctgcaaaaaaaagaaaaggatttcgttcccatattcgaaatctcttaccttttatctccagatcttttagatccgtaattccctactattgattatacccaaacttttactcttatcttcctcgtttgattcttatgcttccttttatgaattgatttcttcataaagtcatcatctttggattgaattcgactcattaatcaatccgttaaccaataaccaccttgacagtttcttctccgaggattccagattacaattctagtggagctgtaattggattcagatctaactcaagttagtgttactgttgtgtctattggatgcaatcgtgttgtgatattgaatatatttctgatgggagaagggactaattgtttggagatgccaaaggagagaa

SEQ ID NO: 32800 - DNA, 564 bp, Arabidopsis thaliana columbia
ggtggtgtgatccccgctgatgcagggcccgctggaaaactcaacatattagcattttccgatctattcactaaaatagatggtttaggcactgaaccaactgaaggtaattcggtaggcttcattccagatgtttctaacgtgctttcaacaaggtttgcctcccgtgacacagtagaatctgacttctcaaaacccacattctctcttggaggtggcatgcacaagaataagtctaatgtatactgctggattgctagagtctgaacacaatacactttaacaaatggttcttctgggtgatcatttgtcccaataaaactcaatataggcatagtgactgtaaactcggacaagtaatccatcagcgtttccactggagatgagccatagtccaaatgcacggaatatatggcgttccttctcgcatttgcaagcaaaagcaggcctgcttcagacaatgctatgacttggttgaaaaatgccttttcagcttgtggctcagttgaacttttcaaatcaagtgtctgggtacactccacgattcagtatcagcgggtagaa

SEQ ID NO: 32801 - DNA, 598 bp, Arabidopsis thaliana columbia
cagagaacttgtttaacccttctagtttctctaaattttcctggcgtgcaggccttaatctggtccaaaatgagtacaggtctccccatagagatctcgtcatctatgaagagccaaaactatgttactttctgcagactggatattgatattcacaggtacccatctgaatacatgagcagcttctcgaaagcggatatcaatctaattttttatgtttgggcatttgacataatagctatgaatccttcggattttccacgccgtataattgtcttcaaatggttaaaattttcaggaacattcctcatattcatctgcacgaaaagaagggcaacaaagagaaatggcatggggctgaaatacaggtggttatcgaaggaaactggacaacatacagagtacgtggtctagctcgtccttctgctgtatattatttcttaagtgttcattagacatatatgcacgcaaacttgtttaacacattttatttttttgttgtaccagtcaaagatcttgcactatatgcgccaaatggctgtcattactccttatgcgcagtttctgtttagatttatatcagagacaccagagtaag

SEQ ID NO: 32802 - DNA, 594 bp, Arabidopsis thaliana columbia
ctgcctattttacttgtactaattaaataaacattgaaagaaagctgtaaggaagaatatgtagataaaagacaaaaagtaaaatgagagtggaatccaatgtggacttcaactagatgtcatattttgtatttttctaatatcaatgtttaacgcatatttggatgtaacgttgggtgtcgaataattttgctttatattcttcactttaacgtcctaacatgaaccaagcacatggtggtcttggaagatgaactataaatatcaagaaaatgatgtataatgggtgatccaaaccaaagcacatataatctctagagttaaagtgggtcgaataatctctagagtttgtggaacgcatagtatctttgccatttaacgtacgtacgtatctagaaccaataatgataaaaactgtagtggattaattactcgaaactcaaaagtcttattcccaacatcaagataagtggtaaattttaatactggaataaaccattatcccacgaaagagaatattataaagtttatatattggttgactttgtgttaaataatgatgggattatattaagaaaaacttgttaaatgaat

SEQ ID NO: 32803 - DNA, 583 bp, Arabidopsis thaliana columbia
gaagcggatatatttttgccgagataaactctgttcgtgaacaagtgtgtggtgtgttttgtgacatacctgtcaaagaggagaagagaacataccagtcaaagaggagaagggaacatattaaacatgttctcctaaacaaacaaaccacaaatatcctcaatcactgacaatacataatgtttcatttttagaaaatttaaccttgaagcaaattaaagcatctgacaaaagcaaccaaggtttaaagtatacaacttcaaaagagattgacccttaaacatcaaaaagaaaaccaaatcttctttgttccatcctttattccaattacacaaaggtaattaaaaagaagaaaagaacgagaaagaaagagaccttagaccatctccaatgtatagctctatataagttttattttagaggaagtttccctccaatgtatccccatatattataattttgcaatattctcataaaatatgatattatttaaaatagaaactaattatatattagaacaacattacaacatataacaataatacaatattacgaagtttattttatacgacaccattagagt

SEQ ID NO: 32804 - DNA, 481 bp, Arabidopsis thaliana columbia
tctgcttcctgagttcttgttatagtagtaactagtgaggaacaggacagagtaaggaaacagagcacttctttatcttctgagtttgttagagaaaactaacaatattttcagcttattcatttgatccaaatgttcacactttgggtcttatttggccctgatgcagaaacgagtgatagacggtgaggatcttttcgtcaacaagaccgaagctcattccgtagtgtggctgatctatgggaccatgaagactaaaccgaacccgagaatcaaacataactatgtaaggaatgtgtttgttgtaacttgtaagatatcaaatgtacattttctgaaaataaaagaaagcagtctcccgtataacctaaaaactgtatacaaatgctctatgccattaaacctcctcgacgacagaggagagttgttgttgtacggccaaaaccgatgcagaaagcttgagatctctggaaacgagcag

SEQ ID NO: 32805 - DNA, 351 bp, Arabidopsis thaliana columbia
cgagtttacgccttacgctaacaagggtcatgatcacgttggtgaccgatctcgaaggtagcagtccggccactacagagttcatgactttctttacacagttcaagtcttacatgtccttcatcgagacaacgtcggcctctcgaatgaatgttgatgccgagatgacagctaaatgtgacggtctgttcaagggcatgtctgcattgactgctagtaaaggcgtcagatcagtaagtcattaccctgggtactattgcatgtgatagtcatgcgttcatagcggtgtggctttaagtgccgtctgtgttgcgaccaggcggatgctgggagtatgaagatgaccatgtt

SEQ ID NO: 32806 - DNA, 1043 bp, Arabidopsis thaliana columbia
tatgataaaaggcggaaaatgcgaaaaatggcagccgcaaccgttaccaccggagaaaattgtcagtactcctcgaggttcatctaattgttcgtttgcttactcggatgaatccgtataaaaaattttacaggagttcgattagggtgatgacatttataaaatgtgtgtgtgaatatttatttgttgtcgatgatttgttagaatcagggaaagaaagatctaagcttagcttattgttttggtttgtgagttttaattttattttttcttgcaaacgagttgaagaaagaatgtattgtaaaataatttcaatagcttgaagtggtttattttattattttttattttcaaaataataatataaacataaataattggagatattggttaactttgctaaaccgaaaattcatagatccaagaattatccatgttcaatagtccattttgtctgaacattgcagaaactaaagtttgaggaagagaaagattagtttgaacattgatccacaattctattatatcaaaaaatagaacatgatgagttactatttataaaatttttgaaggtatttgcttttgtaatttttgaagaatttaagatacaaatactggatgagaaaggccgggagtgtttggagttacatacagaagaaagattcgttcttctttattaaaatttttattcaattatcaaattatataatctttggatgtttgctaattttgtgaaatttataagagaggctttcgacgtgggatcacgtggacccacgcgccacccatcacatgatcatgtgttgtctgaataacaatgactttccagccaacaatcaccaatttttatcatctaaatacaataaataatatttttggttatataatataagattgaagatgactcgaggctcacataacctttttaagctatcaaaaaaaaaaaaaaaactttgtgtgcacacaataataagattgcacatgccttaaccaaatgtaagaacgacagttttcagttttgtgggtgttgttctctttgttgt

SEQ ID NO: 32807 - DNA, 550 bp, Arabidopsis thaliana columbia
gaccatgcctcgagttctcgatctcttgtctccatctaagaaccctaatttatcttcactcctccgtctcccctgatgttgagatcatcaataaccctttgcgtcgcttctctccggctttctttggcttttccggtcaccggactctgccatggtttctgctgctgaatcctcttcctccacgtcaacgcttcttcttccatgtgcgtttgccaacagttttgcttttatgaggttattacaaaaaactcatcacttctctgccgtctctgaggacgacgacaacaacaaagacattcacttaggatctgatcatcatcaggcaaaagataataatcatcaccaagtttttaggagagagtgtagtttcatggccgatcaagaagagccgaggagtactacttctaggttaagctccaaggaggacgaccacgacaacaatagcaataacaacaatattaataataataacaacaacgaagccgaagatcatgagatgagacaacaagggtggctccggttaagcttaggtcacgaggaggacgttaaa

SEQ ID NO: 32808 - DNA, 415 bp, Arabidopsis thaliana columbia
aataaactttacttccaattaagtttagccagactagacaacaaaatttatggcaaggaaattagatacttaagataaaacggttctttgatatcataactaaggaggattaaagattacggatgatcttgcggaatctcggaacccttcgatctcgatagatttgagtcagccaccacgcatgtggtggacttggcagacgccctgttttagaagtagagcattagtgtgtgatttggcgacatatagacgacatgagtaccgtacaatcacgctccactacataccaatagacaaccaatgtaccatgcgagttcttgcacttccatgtcgattacacggctgagactgtagagctacaatatgatgtggtgaatggtgcgatgcacagtttctggaaagccacagttgagag

SEQ ID NO: 32809 - DNA, 493 bp, Arabidopsis thaliana columbia
cctcccactttcttcttctttctctcgacgaatgttcttcgatctttgcgctctctcaagtctgtggaatcattagtctcggtatgtaatttctttccgatagttagctaaacttgaaaagatatggtttcgattgaaattgtcaagcgaaagtttgtttgaatttgattgtgtgtgttctaagtgcgatactgtggtagctgatgatgattatgatcaggtttaatgtgaaggactcgctcgcgcccattgcgatgggatttgaattatttttttagtagacttttcaataaatttggttacatagttttggaaagaaatcattaaatgtgaatcactgcggaaaaaaagaaagaaacaacaaaacggtcattgttgaggtgatacagtataataaatatatagcgggattttgtcggatgaaattgaaagtaacatttacggaagattttgtttcctttttttgtacgttagttcaaatttcaaaacttct

SEQ ID NO: 32810 - DNA, 599 bp, Arabidopsis thaliana columbia
  unsure (1)..(599): unsure at all n locations
gggaattgtatgatccacgtcgtggaacttgaggcagtttatatggattaggcttacctatatatatccatatcctttcgactttacgttctaaaatgaaaaaaaaaaaagattttctgaattgttttgaaattatatttctgaagtgttttaatttgaaattatattaggtttaaggatcttcaactaaatgaatttataattattttatttccctctcggaatatgattatggtaatacttttctgtaaataccacaattcttccaaatgatagttcgtgctgtttgtgaacaggcacgactttgaccctagaaattctcttctttgcatcaaatctttgttttcgaattaaaattggatataacaagtccatgttttgtttcatacgcttacaaagctaataatatcaagtcaactttatgattttatcatagtttcaagaacaagtaacattaaaagatgatgtttgttgttcagatttatagattcaacttgttattgatgaaatcatctgattgttcaattctgaaacaacaacacatattatatatatcactcacnctctgaattggtatatatatcaggacgtacatgttt

SEQ ID NO: 32811 - DNA, 996 bp, Arabidopsis thaliana columbia
gactctagatctctgaatttcttctttgtcttgcctcttacaaacgccggtatgttcagccttaagatatatcgatttcgtttacctgtttgatctttgatgaaagtttcttgcttatggactttgtgacagaacagctggtattcacttcttacaagctcctgttcttcacccggtttgtacctttgagctgaacaggtttttgtgtattagtgaaagtaaatcgttctgaaattgtttttttttttttaaattcaacagatggctgaagggttattcaactttgtaatagcttggacactcatgtttgctccattgctatacacagaccgaaagagaaatcgatacaaaagctctcttgacgtcttatggagtctcatgatgttccttacaaacagtaaatacaactttagtttttatttaagaagttcagtttctctggaaagcaaccctctaaactagattattggttctgttgatctcatgttgcaaacagcgtttctaatcccatacatggctttacggctcaatgacgctgacccagatgataaaccaagcaaaaggtctcaacttggtgaagtgatgaccaaaggtgcaccaatagttggtctgaccggagctacggtgtgtctgatatcagcattgtggtctctctacggtcgagcagatggtgatttcggtggaatcatggacagatggcagtatctgattggttatttgggatcggagagactagcttacgcgtttatatgggatatatgtctgtacacaatctttcagccatggttgattggagagaacctgcaaaatgtgaagaagaacaagattgaattggtgaagtatctaaggtttgttcctgtttttggtttacttgcatatcatttgtgtctcaatctcgaagatgaatcaatttaatttgttagtatacacacatattgtcgttgtacttataacaaatgtaattatattatggaaattttgttatgtcatttttag

SEQ ID NO: 32812 - DNA, 510 bp, Arabidopsis thaliana columbia
ggtacatgttcatacatataaacacgcattaattatttaattaatcagagcattatatggaagagaatccatagataaacatacagacaaattatttccttttcatcttattctagaaaaatccaattaaagctacttattatagtcgtatagcctatagtttatataaaaccaaaattgtttttaacttataaaatatctttaaaataaaataaaaagagaaaaaaaaagccattttcattttttcatcatcttcgtcttctccattatctctctacccaaatctggcagagaaaaacaaaagaagaagaagaagaaaaactttcgatatggataagagctgtaactcctccggcgattcctccgccgtatccgcctctgcaacgagtagtaccggtaacaatacaacgaacagagatcattacctgagacaactcaataagctgtctcataagatatcaaaaccgacgaactcttcctcctccgtctccgtcgcgaatcgtgaaattg

SEQ ID NO: 32813 - DNA, 586 bp, Arabidopsis thaliana columbia
  unsure (1)..(586): unsure at all n locations
catagcgcaatactcttttgaatgtctattattactgagcagcagtacagattaccgaaagagagatgaataagagattgagaaaaaaggaaggccatatgtctcggtcactaaaatgcaaattaccttggttctgagtgggtcaggtttgcggtgagtaaaagtgagaaagtaaagagctgcaacatgacaatcattcccaattatacgataatagcatcgatagaagtcagaggcggaaatcgttcaataaaagcaaaggcctaataagaagaagcacacaaagtatatgcaatttgcataacgaaaaaacccagaaagaaaacataacaagtttttttttaaaaaggaaaatttggcaagaaacgctaggacaagacagatcatgaagaggattgcctgtaagaggagacgcttcgtaggaatcgccatgttttgtctgaagagcaattaagcaagcagttggcgtttatttaatcttggcgtagtagttagttgcagagagattcgattgttgactanaattgaattggagagtaagtaaggagagtcgggagcacgaggcaagacgaggacggtgatgatg

SEQ ID NO: 32814 - DNA, 509 bp, Arabidopsis thaliana columbia
atgtgaatgaggttgaggaaatcaaatacgttcccaaggaaaacgagagctttgaagaagaagaagaaaaagaaactgattctgaaaatgaagtttcttcttcagagggcagtgaaggggacaaaagagttactaaaaaggaggtccagcatcaaaaaggaagcttaatgttctctcctccattgccactaaaaatggagccttgaccagtgagtcatgaaagaatccaagtcttctaaagttctttgcttatgactagactagtttaattccaaaacctgcattttggcatgttctgtgaacccaataagataacctttttttagttgtagaacttgtaacataactgcattgtgagtgttttcttggtttgatcattcatgtttctgtttatctctactctctaggccattttcgagtcaagtcttcgtcatagataaatgctattctttgagtgatggttgctctgtttctgtagaaaccagtttgactaggcagatcaattggag

SEQ ID NO: 32815 - DNA, 388 bp, Arabidopsis thaliana columbia
gatgcataggcttgcggacataacaattccggagctaggtttcatcgttgcgatcacggtctgatgagccaatcaacactaaagaaggacctctaatcggtctctagcaagtttagcccccaattaagtattgtactgatgtactcgtgatggatggatataggctgcatattgggaaattatagtgtattgtacctgtgtcgtgttgtgtgtatgtgggactatagcatcctgagtttgtcatgtccagacgtagtaacttgtaagcaattacttatggtattgttcacgtcgtattaacgtatctaatgtgtggctcgagtttggttttgaatctgtgtcaaaactaggataatgtacgcgttaaaccaggcccaagtttgaaagt

SEQ ID NO: 32816 - DNA, 532 bp, Arabidopsis thaliana columbia
tgccttcgaaggattgtcagttattcttggttttgttggtcgaattatttatttattcataaaatagtatttttgacttgcggtttaattattatgttattggttggtttaattagatatttatgggaatatttaattatattttaaaaaaaaatgggtcgggttgtttcaatttggtatcagagcgattacggttctaggatgtgtagaaaaattaattgatgaattattttcctgatgattgatgtgggatgagctagggtgttagcatattgaggattgattatggagtgtttagtcaattgtgtgttgttggagtcctagcatcatcttctccgagccttaaatgagatccacagtaagttgtttgtgatatattcgtttgttttagtttcttagccatttgttcttgtgatataaatgagccttaattgtcgcggtaggggacgagtcttcgagggtactggcgagagtgatgccacagtgcacagttgacagagtgtgggtcgcacctgagtttgtggagccgggg

SEQ ID NO: 32817 - DNA, 569 bp, Arabidopsis thaliana columbia
atctaatacaaatattagagtattcatttgtatgagtattcttctcccaatgcaccacgtccccatctcgatctcaatctttttgcttctcaagtttttctgcagccggatatccaaaatcatccgcagcctcaagtttagggtttaggataatcagagacaattgatgtttaccgtatctagaaaagttttggttactctatcatgtcaatcgtttatagccaattttactaggtggttctaatgtggtgtggatcaattctcgttagataatgtttcagctttaagcccataagaatgaaatgatgacttgcatgttatgtactaaccaagaagttgaccaaatgttctacttgacgatgatttgagggtacttgtctcagattgtggtttagcctctggttcaggtaaatcaagagcttgatccaatatttttaactaaaacgctgcgtttaaacctttacaagattacttaatctaaccgttggatcatatcattaacgagagccatcgacggttacgattcttcgactagaggattaagtgatatttgaccaaatgacacgaac

SEQ ID NO: 32818 - DNA, 637 bp, Arabidopsis thaliana columbia
atttcaacacttgtttactgttttttctctgtgaaaattgtcacggatccttcgtttttttttatatactcatagcaaaaataatctcatccccagatttcttacccatctatctatcttcttctctgtctcttaagggttctgggttttagctgtttgggttttatttggtttcgtttctcacttattgttttgtcttttccaagaacaggaacagtgaaaggttcggttttttgggtttcgatctgataatcaacaagaaaaaagggtttgatttatgtcggctgggtttgaatcgactgtgattttgtctttgattcatatctcttctccgatttcatcatcatcttccccatcatcgtcgtctttgaaatcttgtcttctcaacgctcttcacttctgctgtaataagcagaggcttgttctggagactccttctctttccatgcgcttaagacccaaaaggtattatctttatccttcatctttctctcttctctctttacatttatgtaccttctccgatctgagagtttgttgtttgatttttgcacaggacttgttctagtgttgaagtctttgggggtttcacataaagcagcaaaagttttcttttttcataagtcgctgagagttt

SEQ ID NO: 32819 - DNA, 551 bp, Arabidopsis thaliana columbia
tctcatattattatggtactgcatcatgtggttgggccacacttgctccaactaccgtatcttatcatttaattcttatttaataccagactggtgggctacagggtcttggccttagacctctaagctcgcctaatgcagtttccagtattggttatgatcagcttattcagcagtatcagcaacatcaaaatcaatcccagttccctgtgcaacagatgtcatcaatcaaccaatttagagattctgagatgaaatcgacacagtcagaggcagatcctttttgcttgcttggcttgttagacgtactaaacaggagcaaccctgaattgacctcacttgctcttggcatcgacttgacgacgctaggattggatttgaattcaactggaaatctctacaagacatttgcgtctccttggacaaatgaaccggcaaagagcgaggtcgagttcacagtaccaaattgttactacgccacagaacctccgcctctaactgtaagttcgtctgttgttgcgagtagtactacaaagtatttctcgattttg

SEQ ID NO: 32820 - DNA, 295 bp, Arabidopsis thaliana columbia
aattttagtcgttttactaatcacaaattattgatggaatccgatttgcagaaaactatttatcatattttttaatatgaattatgaacattcttaaaatactagttctggtgttttcaattaattcactctcttttttatatattttttcattttattctaatttttttgttgtttctacaattttaaaatgctaaaatcatattctctatattttatgtattattcacaattttgcctccttcctctctccctctctctttccctctttccctccctctctccctctctctct

SEQ ID NO: 32821 - DNA, 513 bp, Arabidopsis thaliana columbia
ccgactcatcccccaattgcctgcacctagagctccacatggactaggggtagaagtgtataaagggaagcaacgttatttcaggtgtctacaatcttaatattacacttctcatgaagcataaacaaattgccgcgaacaacaaaccaggacatttcaatgttcagtgtagaaattttaccctagtgttctcatcggatatgaagtcgggagtgatgctcggtgacaagaaaattgaatgtcactcatcttttctaaatttgaaagagccttttccttgattgttcttagatttttcatgttattattattaactactacattttcaaataaatacatcccaaaccattgttatcagaatcatttgttagatttacactgactactaactcacaatcctcagattaaatatgtttaaatatggatgaacaagattcaactcatgagggtacaagtaaaagtaaaatattttttgatagaaattgttacattacatacaaaacttattaagat

SEQ ID NO: 32822 - DNA, 608 bp, Arabidopsis thaliana columbia
cccattccttgcttaaaccccattattcacttctcacttttgcgttttttgcttggagtagaacttgagatggatgattttcttacacgcatcccaagaactgaccaaatgagatggtatagtttatcgacatattagaggacccaaaggaagcccaagatagagtcatatgagaagtccattagcccatataactagggttttagctagtagagattcatttaaatttgtgtttataaaatcaatgtaaacaaccttgagagttggaaacaactctcccttcatctaatgaaatatcaaatctagaatcatttgtgatcttggtgacaaactaaagtctttccctttcctttacttcacatttcaataaagcttttaagctatctaatttcaatcttagatttctatgttaataagctcatttgagcataaaccattgttggtttggttctcctacatagttttctccaggcttgcttttctctaagagaaagaggaacaaaatgagcttgaaactatcttcgggcacactccattttaaacgtactcacaacctctcaaaaaatcgaatgacatagggggtcgaatacttaagagattgaattttg

SEQ ID NO: 32823 - DNA, 490 bp, Arabidopsis thaliana columbia
cgactctagagtaagtttctcttctaaccataatgtgatccgcttcaattttgggttggtggagccgtatacacgcactgattaattcagtttcttttttcaaccatagcgtgtgtgtgaaacaaaaaaaaagtatatgcatgctcatcctgcaatctctataacaataaaatttacccatatttgcggatcaaaagtttcgtgtgtcaaaagttgtacgcatatgtctcgtgcaataacgttgatgagggaaacaaaaaataaaatttgaatgccgttgtcgtattaaggaaaaaaaagtcaatgtgtttcaaccaccctgcatgaaaaatatcataaagtgccgcatagacgaaagtaacaacgagaagatggaccatgacgacattaaataaatgatacacaatacaaaataataggaaccgccgaatccaattattgttggtaaaaaaaaaaaaaactaaacgttaattaattcggaagtaattat

SEQ ID NO: 32824 - DNA, 582 bp, Arabidopsis thaliana columbia
tctacgaccatttccacgagagaatgttgtgagccctaagttcacacttctatcgagcacaatgtagcccacaacgaaaaccctagtgtagagatgatcggaagtttcacactactactgtatagtaaagacaatggactcgggactgagtgggtacagatcataagcagattcagaggatgaaggaatcgtcacgatataatcagatgacaaagaagatggcttgaagcgcaagttatcactgtacactccagggtctgatatgatctgttccatctcagtctctcctttaagattttgtgataaagagtatctaaacttagaaaatacatgtgtttctacatcattgaattacgctttcatgtccatttgatgtccccaagtaaatcgatgtgtatgagttcaatcgtagtgagaaaaagatagtttgattcaaaaagcactagcgatacatgtgtgttttggatgtatgtaaattgagatgatggtaaggttccagacaactttaatgatataactacgtagttaactttcggataactcactagctctcattaagtaggcaatgtacatagcttttga

SEQ ID NO: 32825 - DNA, 878 bp, Arabidopsis thaliana columbia
atttctgagctactctgtcaagtgtcaaccatcgtcttcttcctcctcctcttcagaaacaaagatcaacatgggccaatatttaaaactatgggctgaaatataaactaatgggcctgtgatattaaaatatgggctgaaatataaaataatgggcctatgatattttagtgatgatcatgtgcatgacacgtgcgtaacggtctcaaagaaaatttgaattcgtacctgagcggcgcttataattttaatttccataatggttttaagttttgcctttcttgttttttaattgttgacctctcaaaataaacaaaagtcccccttctctctttctctctctctcttcaaaatttgaattctcaaaaatcgcatttcctgagaattttcttctcgaaaattaccctagctcctccgtttctggattggatctacattttcgtggtgttgatttgaggtttcgtttctggattagatccgtaaccagaggttttctgggtttctgctcggcggttatggagagcacagagtgcgttagggttgccgtcaacatccgtccgttaattacaccggagcttttgaacggatgcacagattgcatcaccgtggctcccaaagagccacaggtaattcaattggaagggtttttcgttttttctgcgtttatgtcttctgagagtttttcagttttgataagattcgtgggattatatattggttaaattcgggaaatcaaatttatgcgcgaatgagaaataacgtttattcttcatcagttaatagttttgctgtaagattcgaattttgaaacatttgggatttgtgttcacatagaactgattcggttcaattcgggaaatcaattgatgcgtgaatgt

SEQ ID NO: 32826 - DNA, 641 bp, Arabidopsis thaliana columbia
cgagtttaaacgagcatgcttaattcgggtttggtcgggataaagttttaactgacgactacagctctacttgtgacttgtaagtggccggccctgaaattttgggggcctaaaaattttctaagggtaaatattaaacaaatttacttttcaaaatttataaactgaaacttaaatgaaagtcattactaaaaaagtttgggtacccacatgccacatgcagatctagacttccctttttgattttcctttagttcgatttttttctctcgaaagcttctgtgatttagttaataacaaaaaaaaaagactcttgataataacttcttcttacttgctcttaagaacttataatgagatattgtgtgtcggtcgttttgacttcaagagacttgtggattttggtatatgtgttccatttctaacctatagagaaatcagatcagaggatgtttatgcaattaggatctttccaagcaccatgtgtataaccttttgtttgtggattccaaattactttatgaatagggatgtctcttggatgaattaaaacatttttaattaaagatggtagaaacgcaagaaggtaaagaaacaggagttcaaatatcataatgattgagagctaagtgtgacagaag

SEQ ID NO: 32827 - DNA, 523 bp, Arabidopsis thaliana columbia
gatttatgttacaaaaactatgttaatcacaaaaccatagtttttgggtggtttatctagtgttcactattttatcagcatagaaatcgaaaactatatattttctatttattttcatttttattaaaatgagttaatcttaagaaatttcttattcttattatgcttaaacattaacttactagcccacttggtccttctctagcacatcaatctttatatatatgcgggtccatggaaaaatggttaaagagttcatcaatatttaaacatgttatttgtctatgtaagtgttgtagtacattcatttcttctaaactctcccgaatgattcaaacatacataagcatatattttatatcttaatgatgtgttctttgtttgcatatattatcaacttattgatgttgtctttagcctatattattatcttattgatgtgttctttgtttgaatatgttattattatattatcttatattgatacgttctttgtttgcatatataatcatcttattgattt

SEQ ID NO: 32828 - DNA, 440 bp, Arabidopsis thaliana columbia
  unsure (1)..(440): unsure at all n locations
gcacattcgttgcgttactgtggttagatcattatagtgagaggtaatcttttgacaattagtttttttttataatggatctatgaaattggagagctagccgatattgatacaaatcctcatagattgatgtagttaggtaaactcgactcttgtcaagatccgggccacaagtcattatccgtagagagagaaatgccgtctacttcaaaatcctagttctttttctcttgcattctcttttcgttttgccaattcactctaaccaccgatttcagacattccctctaaaaacccgtttgtaaatttattgttgtaacctcgatacaatcgttggagcgtaatttgattttgaacataatttaacacaaatatagtttagtcttccgtaaaggatntgttcactccaacaacaagagatgatgatacgatgtgagtac

SEQ ID NO: 32829 - DNA, 506 bp, Arabidopsis thaliana columbia
ctctgttagctttctttcaccctacatattacaactaaatatatatatatgaagtattttaatttatggaggtaaggtggatatatcatatatgcaatgataaaaacttggctgctcaatcaaaagttttattttattttattttgttaacaaaggatagtttgggcttgaaaattaaatttaaatatcttattgatcaacattcaacacacaacactaattcttgctagacataaacaaaacaaaagttttcaccgcaaaactacgttgcagaagataccaaaactattacatgtacttaacaactatatagtaaaaaaaataaaatatattctggtgagtgttatcatcgataatacgctcatcaaaatttgttattgcactaaagctttccatcatttctgatatcggccaagcgaaaataataaatggttatacatgatcaattatttagcagtcaatatttcatcaacacaacgtatactcttatataaatgtactttttg

SEQ ID NO: 32830 - DNA, 637 bp, Arabidopsis thaliana columbia
cccaataccacagttcatactccgacaaagccggtttgagataagtagatcaaagttcttcaagattttggaagcaaaccacaagaccctaagactagctaataccaggattcgtagagaatatatgcaatgccaattcaccagagatgttacctctctctcatggagtccacgaccatggagtaaaggaagacgactcaagcattgaattgggcttaacataatggttttaaaaactgacctggagatattagccttagaagttttggacaaggtaatgggcttgggctttctttgagagataaggcccaaaattgaaactaggtccaatggggaaaaccctagtttcattttggagagccaagacgggagaggggtgcggcggttgtccgatgctggcgaagagatatgcggtgaatagatcatctccgatgagagtagaaacagcggaaacaaacgatgaccgtagtccaaatataaggcaaagctccatagatgacaagcctttccggtgcgaaacttcatataccaaatgaatggtcccgtgcgccgtcgacgcctccttcaagcaaggtgcactgacggttcaagctggtgtgaggatcatcaaggttgtaatgaatttcaaataattgaa

SEQ ID NO: 32831 - DNA, 462 bp, Arabidopsis thaliana columbia
tataagtaaatgtgatgtagttgcgtccagtataaaatccaatctagatttaaatgatccataattagttgctttgaagaatatggctacgcataaaatatgttaaatattgatattgcaaccttatagagatcataggggaagtggaggtcggctgcattagttgacatttaacgaaggagtggcaagtcaaattacattttccacatatccacttattaattatgtgtttggtgcaattctcattaattgtgcttgaatatatcatccctccagctacctcaaaatcaaagcgtagaagtagttatcatttgattatgtatcttactttcatcacgaaaatgtaataatctatatggtatactataatatatgttggaaagaagatgaatacttatgatggacagaaggtcatctaaacctattgttaaagtaaacaatatttgattaattgaatattta

SEQ ID NO: 32832 - DNA, 564 bp, Arabidopsis thaliana columbia
catctaagaaaaaataatattatttttacattagttattggttaaattcttttcacattagtcgctgtgtaaattacctcgcacacacacaagaccataatcacaagtgtgaagtcacaacgaatatctattgagtttgagcctcttcatccatcatatgaaaacgatcacaatgaaatgttgttgtaaacttgtacgtatccattcctcatttccttgagattatttaatatagttacatgtagtatatagtgtccccttatgacgatttcatttctcaatgaaacaatcataagataagcaataccatattaattttgtttataattaataaggaagatgatgaagatcaggatcaggtttatcaacaccgtcaacgttcctaagccaaaacgtcatgtcgaaggaggcagcaccattagggacatcttccatcaccgactcttgtcccggcggaaagaatattccggtgcgtgggtgtgggcccagctctcctcttcgccgctaaatttgagattatggtcggaaatatcttcagagtagtcgacgatcatcgggtttgat

SEQ ID NO: 32833 - DNA, 569 bp, Arabidopsis thaliana columbia
cgcagtttcgagattcaggagcgcatcggttcttttccccgcatagtagttcatacaccaggttgatggaacaatgcagttcacaaccccaagcaaaaagccaagtaagataacaacggaaatagcagctgcaagtgaggcataaccaagaataacccgatgaaacagatcgcctgaagttacacggtcaccatcaacaagaccaatgaattcaccagaacttagctgtttcacatcaaaatgatgctgcctaaccccgttccaagaatttttacctttacgcgacgcttccaaagagaaagggacttcaacttctctgtactcttccttggaaagaacctcaatcttagaaacacgtatccttttgccgtaattttcacacaatcttgaccaacacgataaagactcccgtcatatagaaacgctctgcctccgtgtcttgctccaatacttcttttacgattgtagataggattcttcttgtgtggcttcatgtcctaaaggagacgactatccaaatttctagttgccattttcttcgcccaaaacagtatgactgatcgattagc

SEQ ID NO: 32834 - DNA, 636 bp, Arabidopsis thaliana columbia
gaatctaagtttaggaatcgttatatgaaaaagtatgaataaatcaggaacttaaaagaaaaaatctgatagctattgtatagactatatatatactctatttacagtctcgagctatgaaatgaaaatgtataaagtttacggtttagaaatttatcatcagatctgcagtaatatattttcttttaagaaaaaataaatctataaggtcaaaaccattgtgtcatggagttgaacgaaaattgactcaatactcttaaaattatattactttttcttacattttacacttgacttaatttttcttgatatgacgtcaatgtgcgtctatatgtatgtataaacacacatgcatgttttcctctcaaatccaaaaaaaaagaagaagatacatagttttatgcataatcaaaggtaccacattgaattgataatcaacatgcttaattagagcatctttaatggggggttttaaacaagtttcttaacaaagaataaacaaattatatgatttaaatattcataagtctcttaactttgatgaaacctaggcaaattatctcttagttaagagataattggttttggtttcactaaatttaagagatccataataaaaaatattatttatctata

SEQ ID NO: 32835 - DNA, 417 bp, Arabidopsis thaliana columbia
atatttttctgtatacatatgtatagtgttgaataatttccaaggacagatataattagtttgcattaggcccaaaggcgtaatggatcaaagactcaaagtatagtgggcttttttataatatagtccacgtcataaaacttaaatcagaaacgacgtaattaccaatctctaacgaccaatcaccgagaggctttcgatacaaccaaagtcctttaacatggcggttaagcacggcgtcgacggcgacggcagcgaaatcgaatcgagaactctggcggtagatcgaaaaagcggtttctgcgaatcaacatcgatattctacagcaaacgtgagccaatggctctcccgccaaaccaatttctcgacgtcacgtgtttgattgcatcacagcctcatcgcggcaaaaccgtatt

SEQ ID NO: 32836 - DNA, 597 bp, Arabidopsis thaliana columbia
ccgctatacttcacttagatatcgcatcgatgccggcattcctgccgtatccgctgctccttcacctccaccgccgccaccgccagcaacggcggaagagcggagtaagccagcagccgaggagcaaaccaagaagtgaagtaaaaaaaagggtaaaactacattcttcgttttagctttaacactatgtaatatcattaattttgaaaacatgttcctttttttgttatgtaccttagtctacggacattgatttcggaatttcctcagatgttttatgattatttatgtctttcaaaagaaagaacaaaagcaaagttctttgtcaacttttaactttaaataaatccgttgagattaaagagcaacggcattaaccaaaaaaaacaccaagatttactttatccttatagcaacaaaataagaggaacattcacgtaaaaagtaaatcatttaatacaatggacttttggtaaagtaggccaaaacataagagcatccttaatgggggattttaacaagtttcttacaaagaataaaaaatttatatgatttaaatattcataagtctcttaactttgatgaatctaggcaaat

SEQ ID NO: 32837 - DNA, 534 bp, Arabidopsis thaliana columbia
aatgtaagagttaactggctaatcttcacatcacatcttatagacatacctcagaccttatcgtcctgatatcactagtgattgaaagtattattgatctgcaaaaaaaggaagagaaaagatatgagcgcgaataatagtattcagtgatcccaattcttctgcttcagatgagcaaaaggaggtaattgacagaaaactgacttttccgggctgtcaatccaaacatccggtctctctttggagtgattagtgacctgatagaagcttggtggagccttctttgggtgctcattttttctgaaagacaagtaaaatgaaaaaagaggcagtgttctcattcttagaatatcataccacaaaaacatattattttatatttgttttgttttaatgagatgagaaagcaagtaaatgattacgtctttcacctgaaataaggcttcagtttgcttacaagagtgttaagctcatcatcagaaagcccagtgccaactctacaaaaggacataaatctgcaaaaaagagaatagc

SEQ ID NO: 32838 - DNA, 483 bp, Arabidopsis thaliana columbia
taaacatttaaacgtaaaattataaagttgctactgaattacgtagtattagatttgcaaaattccttcttctttgaaattctctttcttttggcctttttacgtttccaaaaaacttgcaacggaaaaaacatgtaccaaactaataatagaagtggaagcagaatatgtgtataaacgaaaccttactaaaaacgttattaaaacatagcgtgattttacttctcactttttcacttcacgctttcgaaaccttttcctttagatcccaatcacatgtatgatgtatgaagctgcgtttcttttagccgtccatcacccaaaagccaaaaaaacaaaaataattccaattatttaaaaaaatctctagtagctagataggttcaaatatctaatttcaatctagaaattttaatatagacagaaaagaaaactatctgaatccagactgtattctctaagcaaagtagagatgcgaataaa

SEQ ID NO: 32839 - DNA, 559 bp, Arabidopsis thaliana columbia
ctccggtgaacaacgagatggtgaataacgacatggacaattcaaactctttgtttgtcaatagctcatatattaagggcaatgccaacgctaaatttgcggaaaatgtcgaaaacaaaacctgaggtactctctccaactttgtagtaaactccttgtagcaagcggaaggaggagcggtgaaaaaaagatatctgagtagcgtcactgcgtagaatgttgtgacactgaccgcaccgtccctaaaggactgagacgatgaatctccaggtggccagagaagattgagtgatttggagaggccaaaaagtgagagtagagtcattatataccatattcctctgcaaacaaacacatccatatcactaatcttcttctccatcgtgtgtgtgtttttactaggactatggggtttcggagatttaatagtcgtcgtgaattcgtttttcgatttcttttatttagttagttaaatctgcttttatccagaagaatgtggtatatctctattattagttaaaagtggttagaagattttcataatcacaacaaacaaaag

SEQ ID NO: 32840 - DNA, 359 bp, Arabidopsis thaliana columbia
ctcctttttttctctctcccgcgccgtgggcaggtccccggccggcccagccgcccctgcgcccgcccctgggcccaataggccagccgtgcctccctctctttccctattcccctaaccctcgcgctctggcccctcattttctccctccccacctagcccgccgcccctacgccctacccggcccctgccctaggtagccgccgccgccccctgcttggcgcgccgccccctgccgccggccgcccctcgccgtcgatccccgacgccggtaagcgccccctactcgctctctcctccctgccccagccccgcgagcctttccccatggccggttcggtgcctccctgccccagccg

SEQ ID NO: 32841 - DNA, 823 bp, Arabidopsis thaliana columbia
tatcaatttgatatttatgtatatgaaattacaagatgtttgatataatgccacgtttattttgtcttttaaacagattcatgtgtttgaattttcacatctattatcttaattaagtccacaaggctttgtattggaatttgcagggacaaatcaacttatgcaaataatatgactcttgagagaccattgatgcatgtttcattattagcgaatgtgccagtcttttaagtttcaggtatgcggatttgattgtatgatttctagtgtttttcatgttttttttttgttatatataatgtctaatgggctatttctagatagagcatatacaaaatcgcaaaaacccaatccacaaacttcaatacaataaacaaagcagctcaaaactaaagccatctcaaatttacaaaccgaatttaactaaccaagattgaaaaccctaatctcaatcaaaaaacatgatcgagccgccgtccaaaactgcagattctcgctgaaataggacagccaaacgagatggtgatccaaaatttgttgccatgccgccactgtagagttgttttgagaaggaggaagagagccgatctcgtttttgttgaagagatccttgctcagtcatgaaagagagaaaatagtagggaatagaaaacagagaccttcgacgttggcttcgctttgccggatcaaatatacctcccccatcgacaaagatctcgtggaaccgccacaattttcggtctcagatctatctacttgtctctctcgttcttcgccgtagatctcccttttctactctgcatcgctacaccgcatgtggagc

SEQ ID NO: 32842 - DNA, 551 bp, Arabidopsis thaliana
tgtcggtgcctacccatgttttaagtatgctctttggatcatcttcgattagcgtctggaaattcttgatgactggataaactttctttattaatgggcttgagaaatgtagcggcggtggcggtggaggaggaagtggccgtggtggcggtggtgatggtgttatataatgatgataaggagggggaggatagtgttcaggctccggagatggggatggaggagggagtgactgtggtggcggcgggggtggtggcgtttgaggaggaggaggcagcggaagatagtcttctggctccggagatggcgcaggagaattgtaattggtgctatcactgccaccgccgatgatgatttcgagagattttctgtaggtgttgtggttgtttccggtggctagaattgaaagaaagtgaacagacagaatcaagaaaatggaaggataataatttggggccattgctgatagattgatgagagccttgaggattggcttaggcagagctacatatagagaaagtgactgaaaatgatgagaagtcaatgcacat

SEQ ID NO: 32843 - DNA, 560 bp, Arabidopsis thaliana columbia
cagtcagagcaatgataaagaatgctcttggtgtatttaccgcagagatgacaatttgggtcggtgtgatgaggagctccggttgtgagaagtttaagacaatgtccatcatgagaaggatggtcgaatatctccggtatgttgaacaaaaatgcacaaatgtggtgaatagaaaagtcgcattcattgcatatatagccaacaccgtagccaacagcagtccgtcgatcgcaagcagcacactggtgaaaaggagtgttgacgatgaatagatcatgcgcatgtccgcgaaatttaaaaaccgggaaggttgcggtatccatatttatgtttggatagtagcactttggttttgtgttctaatggatcaatatagtcgtgtttctatatactctagttatagcaatgctacttgttacattatcagatactacattaattttgacgttgacatgtctatagtaaattagtaatacaactagtgggcacgtacgtcgttattatttgtttgatttgtatagtaatcaaccatgttagttagttactacgacttttattta

SEQ ID NO: 32844 - DNA, 486 bp, Arabidopsis thaliana columbia
ctctagagaaatatatgtatatatatttatataaacaaatttatgataataataatgatatgatcatatatttacataaattagatacaatacggtattaatcccttatgatgagagaacgctatgacgaaaaaaggttttccaaaagtgagaccagaagaaagtgaatacaatttatgaatagttgcactaccacaatcaagattgttttcatcgtcgtgacgtaggcaattactttggtgcatgatttgaacattttctttggaggaggaatcttcatctttagtttcttcgatttcgagagagagaatagaagattaaagtctcggagaaaaatgatgtgtttgcgcaattggggaaaaacaatttgagaaaaattagtaaataacattcttttaaatgcgaagttattacatgtgtgtcatccccagatttacggtatttttttaccactttttatttttaaatgggatattttaataaatt

SEQ ID NO: 32845 - DNA, 571 bp, Arabidopsis thaliana columbia
ctaactactttgaacaaataagttcaattagactaacgaaacaataaaaatgcagatatttattattttattaaatattaaatatattacacagcagggaacaatcctgggactcccggttcagtttacgcttgaaaagcccacatacttttagcacgaccttggctgtccaattgttcttggacttatatttgaaaacttaacacgacctaaacaaagctatggaataatctcggttttcttagaaacaatgtagatctcaaacattcatcaatcagtattcatgattttagcaaatccaagttatttactctaaatatctagtactaatagtctaatagtgtaaaaaatgattaaaagcattacaaatctaagtagattcaagatccataactatatttaaggaaagacaaaaaaaaacaccctatcaaataagtaggtagagacagtagagtgtatttatacataaattataataaaattaaggttagtaatttaaactacaacgatttgttaattttaatgatttgttttataggcttttaataacatgctagttacgaatagtttt

SEQ ID NO: 32846 - DNA, 710 bp, Arabidopsis thaliana columbia
tctcattgacaattttaaatttttgtttagagaatctcattcttacaaaatgttacataatgcagcgtatcgttaagtgaattagttttcggctaatatattcattttaaatgattttgattgaattttctataattatgttaccaatccttttatttgtgtacttttaaattttgagattactatctgatgctgaaattatttgacataaatcgaatgtcaggtttacaatcactaattaaaaaagtaattaaactgaaattatctgatgctgaaattattttgatgctgaacactttcctagtttcctttgacccaccttctctataaactctcttcgctaggcattttgcacactccaaacatctctcacatatccaaaaaaaagaaaaaacatcgttctgtagacgttttttaatttctttctttagcttcttattattattatacgttccaatcctatcgaaatagaatacgttcgaattcgatggttgtatttaatttgtcaatgttcaggttttggaagaggccatcacccaatgtagggccgggagatcttgagattggtctcggcggcggttactcatcatccctcgccgatgatgatgttgtaattccacaccctccggtagctgaagatgtccaagcgagttggaagccggtattgaccctgaagctgcacttgagaatattgcccacacgatttggag

SEQ ID NO: 32847 - DNA, 472 bp, Arabidopsis thaliana columbia
tggaccttacccttcacttttttttttattcaccacacgcgcttagctatcttctccccctcactgtctgctctaggtcgagattttttagggtttatctccggatttgggttagcgaaatcgagctcacggggttgtctcgattattcctttttaggttgcttgaatctgaagctaatcttgggttaattggattgttagaatcgagacctaaatccttcgattggatcagagaaaatatgtcgcgcgttctcacttgcccaccgcttgtgtttgcaagaaaccacgttggcgttcaaaacttggtcgaatcgactaaggttcgttgagctacagatctggtttcttgcttcagttttttttgtgtgattgatttctacggatttcgtaaaacctgattttggattcgtttttggggaaacttatttcaatgtagtaatctttgaatttgggttacacttcttgtgggtat

SEQ ID NO: 32848 - DNA, 536 bp, Arabidopsis thaliana columbia
atcccccgtcggttgtgttcatctaaaacgacgctcattttgttgttggtttttctaaacagtaagtattgggcctttattgggcttttaaatttactccatttcttaaggattagtgaacatcgtgccgtttttctgttaattgatctcactctcacattgtgatcttattcattgtattcaaaattcaactattcattgttcaacagtatagagaatgtcacggttcgaacctcacatgatcgatataggtcggttttcaattagtatcgaattatataaattcatcttatatgaatgtcatcattatgggtttgttgtgaaatgaagtttatgtcaagacctcaaacctcacacacagattgtagctaccaaccgggtcgtggttaggtggtgcagtggtggcaatagtcttgcatactagatttaaagatatacttcttctataatgtctagaacgtagactgtatatgaacctaactccaaggatatatatgtcatacttgtattatattggtggataatagagaagagat

SEQ ID NO: 32849 - DNA, 595 bp, Arabidopsis thaliana columbia
gaatgtgatttttatccacacataaccttgagtactaaatacgaattttgtaaaaatgaatcttttctttggaataagtttacttcaaaatttacagtgaaaaaattataaaagatccactgaaccaatcaaatattgtatctattaccgtatatcatcgaccggtttaaaataatttgtaataggtaaataacagaacgacgtcgttttagagaaccgtgtaaaccctttgtagttaaaccctttccgccgcgaacttcatctctctgctttttcttctccatcgcgaaaataaaaaatcagtgagagagatggcgaggtcgagaagaaagtacaggaactctagggctaaagttcgcgttgctcttcctaagaagaaccctaatatctttaaaccagctttcaacttccctcccaagctccgcgctctcatgggagacgatgtccctgaatgggacgatcaagctagcgttatccagaactacaaatcctttggcgtcatctctaaccctaatttgcttggtatcgagctcgtaccgccatatgattcaggatgattcctcaacgttcctccactgtagagcaccgactgatg

SEQ ID NO: 32850 - DNA, 529 bp, Arabidopsis thaliana columbia
cgactctagacaaagtcaatgaaggatttaaagattagaaacctaaacgatgttaaaaggtcatgacaatttatattcgagttatttaggtcggtttatgggaaaaaagctgaaaaatctccatttaattttaatttgcctatttaatatccgtgctactaaatttgtccaaaatacctaaattagtttttatgtcttttaaatatttttattttttattttttttgacaaaatcagacatccgaattaacgagcgttaacagtggtaacaaaatcgttatttgcagttaaaacttaatcatgtgatgtttattagttatatacaattgttttttctaatgcatacgaatatatcgttttagtcaagtagttatatgagagtttattatcttcatgaacacgagtacgagtcccatatccgatgtttttttgttgcacttgatacttgtcttgaaagaaaactgtcacagaatcacaatctacgaaattccgagagaaatatctaagtgcaccacttagaaacgtagtg

SEQ ID NO: 32851 - DNA, 570 bp, Arabidopsis thaliana columbia
tggatacgatcaaccaataagacgatcctgagttgaattatctccgtcgcgtgaaggaacactcagataatcagggcgatgtaataaacgttaattacaagaacaatcggaacctcactatggttttggatcggagactgggaaacgaaactgtcagtcctctttcgtggccatcgttcgatcaagtgtgcttctgcgaaagaggcagagacgatcggcgaatataagatccgaatcctttaaacccgaccgtttgaaattgaaccgttgggctacgataatgattttaactttcctttttctactcaaccggcccattaaagcccaacatatgccttccaaaattacgttatagtttaggcccataaaagatccattaaaccaaatggaacaacaaattatcaaatacaaaatccattaaaaattaacatgaaacatagtcataatcatcaccacatgcacatagtttttggtttttttagtttacagatcttacaaatcataactttgtttgccagtaaacttaacttcaatgggactaacattttcccaatagatctcatgttgaga

SEQ ID NO: 32852 - DNA, 335 bp, Arabidopsis thaliana columbia
tctagaggccgtcatcttcttcaacttacacatgaatgtagaaggcaggtgagtggcatgtctcgatggattgtgtttgtcgagcattgagcacgacgcagctcgataacgtgaactgaggtggattcacctcttggaagacattgaagcggtgaccatggctctgatacactggcagcactcgcgggagtgatgcgtgctccagtgagttaggaagtctcagtctgcacgaggtagatgggagtccgtataatacgttttcgggagcctctcatggatcacggagctgtatttgggcaaatacacaggggaatgtatgaagctgtacaatgtgg

SEQ ID NO: 32853 - DNA, 688 bp, Arabidopsis thaliana columbia
cataaacacactaggtgacaacatataactaacgctatctgtagaatatcttcacacacactgcatgtcccaaacatccaaatttgcaggatgcaggtagcaattaatatctactctaaaacattcaatagctagacaatcggttccttgaatcatccaaatctatttccacaaaccgataaaactattgacaaacatagaccaagaacaaagaagatgtgagggaagaatatgcgtagattccagtatcaacttccaagctattcccttctactcatatgttattcgtactataatgaagtattgaaggaccaaagtaatgaagtaatgaaggaccaaagtaatgaagtatacctcaagcttagcagatagcttggcgatggggatgcacacaaggaaaacgccgaacatagcaatggcggtgttccgacgccaatgtttgggcctacagttaggcccaccagtcatactccagactttggctctgaaatcgcctccttctgctccatgtccatgatcacctcctcccatttttcctagatcggatcaattacttccaccaaaaactgattccttttcctaattcgacaatgaatatagccagatcgatatcagtgacatagaatcaaaatgatgtcaaccctagcctctctaacgtttccaaatgatcacaaaattccacaagtga

SEQ ID NO: 32854 - DNA, 464 bp, Arabidopsis thaliana columbia
aagatggagacaaccagaagaagaagaagaaagaaaacacttttgaaggcctctggatcatcagaaacccaagctttccccgagtatatatatacacgaatctgtccagggcgcggcgcagcgagtcgttttgttcttttgtgtactaaactcattttatatttttcctaacttgacatacttgaaaacagagagccatctcgagacactgaaaagctttgtccatcttttgctgtgagccttaccaccgaccgaagcattcttctgtgacatgaaatcgtcaagcgcactctgcaactcagattgcggttcttctaagcctagaatgtgagagcagttccagagattgtcgtagtcttcatataaaccatgtggagtaacatgcatgtcaacatcatcactgtgcttgcactacattctgctgtgttgtgaagacttgcacaaaaccgtatccgtcaaactgg

SEQ ID NO: 32855 - DNA, 566 bp, Arabidopsis thaliana columbia
tcaagagaacggttgttcttttggatttatacaagtaaagttcgacactgactttattcacaaattactcttagattatatgatatatatgttgatttggttgatgctttctaagcaaatttaacaaactattttactaatccttgactttttgtcggctaccattggtatattatatatatagataataaaataagagctagagaaaacatctttataaacgaattacaaatttggaaattagtcaaaagggttagctgtaaacaaaatttgggtacacaaacttaattgagtacccataaaaccctaaccctcaagaaccatttaaccagtctgagaataccttcgccgtaaatatagaaagaactccttgcgtcacctaaattcttctaccaaaaggccccctctaaattgatcctattacttccaagacaagaaagaaataaaaattgagagtagagattaaaatagttactattcagacccattccttgtgccgcaagaaagagatccttgtttactcattccacatagtgaaacaccaccagggtttgaccctgaacaga

SEQ ID NO: 32856 - DNA, 438 bp, Arabidopsis thaliana columbia
aatcgatagtgacaatctcaggtgagattgataccaagacattagacaagtacccaaggttaggtctctcgctttcccttaaaccttgaagagctacacataccaatggaagttaggtttaacaatggagactaccctttctgtctcctatgacattgtttagagttgagttggttattgaataatgaatccctcggctaatctccttatttctgataattctttttcggatttgtttcttttggggctcacgcttaataggaacagttatatcgctcttttctgagagtttttttttattgttttgttaagagaaacaaaccttatgtgaaactagaatcaatcaaagactcaagttggaaaagaatcagagataggtcttctacacatgtacatcaaatgtgaaaactgttcagtcggataattgcatttgagata

SEQ ID NO: 32857 - DNA, 565 bp, Arabidopsis thaliana columbia
gcaagtcttaacaaaggcgtagactctcacaagtttctgaaagacttaagtctacatcttcgtgtgtacaatgtatatatgaatagcatctatatttttgtattcacggtaatgtcaacatattacaataggcgaatttaggggattatctctatagaggctatctaatttacaattatgcttcaactcgctttttcttaagaattgcgttcgaattcaacatatgtctaatcataaagttagtaatattttcctaattaaactttactaatcttttttttagtttaagaaaataccaactttctagccaatatcaaaagtgtttttcattattgattcatttatgtatattaattatgagtataataaattatcaagtcatcattttctttctttattagactactaagtaccaaccattaattagttgggggttttgtgactaagagggtatatgtgttagtgtcggttgtcactctaagtaaatagtgtatacatttacattcatagtaaacgaacgattaacaatcttagtattatcataatatcaattttgatgtgaatt

SEQ ID NO: 32858 - DNA, 234 bp, Arabidopsis thaliana columbia
ggtatcttgacctgcatatcattattgttgaacagagatcttgcaacagcacattaataattaagacggagcaaagtcatacggttgccccgtgagcatgacacacttatatggagctgacgattgataaaatatgatgaggacccgtctggagtacatgacttgcgcacatacgattcgccgcttcacagaacatgctgcattcagactatcaactgctaacccgagttgcat

SEQ ID NO: 32859 - DNA, 553 bp, Arabidopsis thaliana columbia
agcaagaaggtacaactagttttgtctcaattaaaggaatgtaccttagacatttgagcaatctttcagcagctgaagcctctaacaaagcttgtgaggcagctctaatagccgtatctctctgtctcagaatttcctgccaaattcgcaaggaagctctctttagaaccaataaaaacccgtttttatgattgatcaaaatctatcagtattattacctttccgagatttacaacttttggaggaagtgaatcccagagaatctctgtctctgtccagcttcgtttccttgatatcggatctgaggattcaaaggtattgcttttaggtggaagaaggtttttactcttattacttctacttccatagcttaagcttttagaccatcttggagatggtgaaacacaacatctcttcttcttgttctactacttgacttctcctctatccctccatagcttcggatagaaagagaaggtgaagtctgaaaagatatcgaaaagaaacagatgtcagataatctcgcgtgcaggagatgttcttcgaaaagtta

SEQ ID NO: 32860 - DNA, 490 bp, Arabidopsis thaliana columbia
tccatcggtttctttaaatcatccagactcattgaggaattctaactcatttgtgaccattacttttagcgaatagattcacaatttctcatatacaagaagttgtgttataatattaccatgcatacttcaaataaattatcttaactttaacatttaagcatgcatgttgaatatttattaaaaatctaagatcattaataatccattatatacataatagaacaatgtttgacactaatttatcaatttacaaactgttatagttatgtgtgattacaaactgtatatcgtccgtatagcatatttttgtcatgctactaattcaaatctgtatgatgtataaactttcttataaattatgaatctatattccaatattatattcccgcacaaagcatattatgataatctagcagtagttgcattattggttattacaacataattatatctatggatcttggtgacttttaaagtttaggcacga

SEQ ID NO: 32861 - DNA, 336 bp, Arabidopsis thaliana columbia
ctcatttcctgagatgcataaactcagactttgacaaagttagagccactttgaaaggttctatgaagctaagggtactgaaaaaccttcccttttaactgatatcatttctctgcaagtttcattttgctgatggacttgttattctacttcccagtttgaagcaagcgatgatccgttggaaaagattaccacagccgaagctattagactattggttgactattaccacacttctgattactactacacagcaaaggctaaggttgaggagatatcccaatttgtaagtactctttgttccgttctcgagcttttgttaggacgagtcacttg

SEQ ID NO: 32862 - DNA, 557 bp, Arabidopsis thaliana columbia
aagttgcgataagaaacactgattccgaaatcacaaagcccgagaatttgcgtggttaccacaatattgaagcactacaatcatcatcgttgttgccacgagcatatctattcgaaatcagtcctcaacacctcgtcatagaaaccatatcatataagacgtggtcatcgtttttgcatgttgccaagacatgcaaacttgtttcctttttccgaacaagaaaacatattatataaaacgtacaaaaattaatttgatcgtatataagttttttgcgggttgtacattatatatttatatttactcataattagtagaaaagagtacatttggttgccaacgaaaacatacttttttctcttttctactaataataatgaaagtacaacttttctctgcttgacttgtccacaatggccaatgggtagtgttgtactaaataatattgtgaagactttgttagaatgataaacggcataatgtatagagatggattcaaaactcgaatatttcaattgttttctattgaaagtgtagactagcctttgcaatatata

SEQ ID NO: 32863 - DNA, 573 bp, Arabidopsis thaliana columbia
gctaaaagatttatgccattgttcaaagtatcgctatatccccacaagccacctcatgcagctgtcgccaatcgggtccttttcactgatgctgaggatgagtaagttccttcctttttcttggtctactctactaattttgtcgaaaatttattcctagtgctgtttgaatgcagattactagctcttggaataatggaatataactcagactggaaggcaataaagcagcggtttcttcctagtaaaggcgagcatcaggtaatcatcactggattcctgcagaactaggaatggtttttcggttactaagtaatcagttggtgttttattggattgctctcattatcgtagttcgcgtaagggttattctgaccacagtctctgaagtatttagataaaaatatgaagattttaaaattcagctgctatcttgacaaaaacttctcgtccatgcaattcctgttgcagatgatgtagttctttcagttttctgctttcatgccagaaacttatggattggtgtactgatgttttcaatattttaaacatattaagttttatgtagacatg

SEQ ID NO: 32864 - DNA, 427 bp, Arabidopsis thaliana columbia
tttctaattgcacataggtaaagtcttatgctggattttaaaaaatttaaaactctagggaccaagcttttaaagactcgaaaaaatcccaaaagctttctttctctcccgagcacctgaaaaatcaaaaccgcatcggcgcgtgaacaacactctcctcaggaaatgctaaaacgacagcgaatcttccctcgccaccaataaatttctgccacgtaaccgtcgtttccctcgattttcttcccctttccataaacccctctaaaaacccttcttttagggtttcaatctcatccatctacaacctctagctcttcgatttcacgtcactcttcactcaataaaaaagctactgcttcaaagctggctacttcttcaatttactctcattcgtttgcgttgatgtacaaaacaaaaaccaaaatgg

SEQ ID NO: 32865 - DNA, 463 bp, Arabidopsis thaliana columbia
aaaggctctgttgaaagcattagttaaaaaaagaattttgtttaatgttttgcaggaagggtgcttgtgtcatcactagagttttggcgtaaccaaattcctgtttatgatatggtttgtgatttgatttccttaacactagaccaaccatgggaacagagtctttaacattgtctgggtttgcaggatcggaaccttatccaagtaaaggatggtagtgagactaactccgctccatctaaaggttagttctttaaagctgttttttgatgaaaacggctttcactatataatacaatatttgttgtttttttctttcttcttcttgataggaaaaggatcggattctcgaaagcgaagaaacttgaaaatcaaataaactatttcaaactttcgtaattaataagtaggtttattatggtctctgaccctgtaatcataattaataagtaggtttgttatg

SEQ ID NO: 32866 - DNA, 549 bp, Arabidopsis thaliana columbia
tgcgttcaattatttttgtattctatgaatcatgtaaaaagtagtgaaaaatgtatatagattagcttttgagcgttgagaatattctgaaaaaggaacattaatgtcgatcggttctcgtgtttcatcacgtacgagaacgaaatcatttactaatcgaatgaatgtccaaaactgtctaaaatgtagtgagaaatgtcatttaattgttttctgcagtttatgtaccagaatacacaatttgcttaatgtataaaataatttgctactaacagtaatttaaaaaaaaaaaactagacttaaactcatgatccatatttttgcccgaagtgaaaattcatcaacatgaatggctctagcaaaaagaaaaatgtcggcgagacttgtaatcgaatagttgattaagtttttaaagacattgttctttttaaagtgtggaggaggaggaggatatagagtgatgatgcaaatacttcccatgtgcattgattgtcacacattttgtacagccaaaatttcacatagggtctgattgttagatatgaatga

SEQ ID NO: 32867 - DNA, 611 bp, Arabidopsis thaliana columbia
acacacattgttcttgaaaatggaagagaaactttctcatttgaagaatcactaaattcgcttctggttttcacatccagagtcaagtagcccaaagccgtacagaaacatcagttagaaaagagataagttggattggataagtagactccattgtaaaaagataggctcttaggaactcctggctctgttcctggacgtccgaagatgaccttacctcaactttgtaggtgaaacgcatctctattcgagagcttgggctttctctttacggattgtccctgcataaggccaagccagagctgggaatgtatatatgtttgctcaactataataaacctacaatgtaatggaatgcctatcttcaaatgttatatcagctgtcaacttctgacaaaacggatgtgcttgttcatcagcctaagtaagaacagagaatgatcgacatgggaaatgctgaagaatgaaaccgatgtgatagatcatgagagtaatattccatgtctatgcagtgaacgaagttgatcaacccctctggatgttacatgttatgatctatgaatggtatacagctacatacaaatggagttcgttaggatgatcaacatgag

SEQ ID NO: 32868 - DNA, 508 bp, Arabidopsis thaliana columbia
gccagtgtgctgtcagtgtgctttaaatatctctaatcttctctctgtctctcttaagggcaatatctttaatagagttctgaactttggaagcatattaagatatcaaagtaattttctacttttagttgtgaaggtatgtgttcctaattcagttcaatgttcaagaacctgattcaaatttctttcataaccagttttgacttctctctctctctatcttttgttaatttctcatcaaaattaggagagaagaggagattggtaatcaaagaacagttgttatttattttctttttacttactggtcatgataataaatttcccacttgaattgaagtagaagacttctttcgaagtgcgtttgtcagcttttgtttgcgcaggcttgcaataagagttttattttccttaattaccatttttttgtattctttcgttttgtcctataattttgggttttgcaaattttggtcgattctcttagtaaaattatttgaaaaatgct

SEQ ID NO: 32869 - DNA, 596 bp, Arabidopsis thaliana columbia
tatattctatcactttccttcttgaaaatatgttttgaacaaaaatcttttaacgctttgttatatattaaccaacgagatggtaagaaatactagagtcaagaactgtccactatctcgcatccactccctttcaatctaactaccaaatatatattccatgtgttattgctatcgttatcttatgtgcggctaagattacttctaagatgatcaactacaaattaaagtcgcgaatatctaaggtaattcagttatttgctagctatatgaatatttctgaaattttatatatacggttagatttagtgtgtgcatggatctaatccgtctagtccatgatctagtgtgtacaaatcaaccaaaagaatgaaaccaccactactatagtattttaatctattgtgtcctgatattagtaagaataatagctgatattttgattgatttatgagacttaaaacaatcttggcgcgtcatttatgtgctaaattcccaaattaaaaatatgccaattctctctcaagaaccaattctatatttttagtggaaatgataaaaattgcatatatattactttaagatttacatttata

SEQ ID NO: 32870 - DNA, 895 bp, Arabidopsis thaliana columbia
tcagcctcaacttaggtgttgaaatcgcatcggacacccttgaccatacatcaaacgagcatccacatccacatctgcatccgcatccgcattcacatcgtgttcgttctgaacttaaaccagtggaacgctggattcaagtttattcatggaccacccatgggaacctgctatctaagtagcactaatgccggtataatcatcaatataacggttcgagagaaacgatcgaggctcaaacagatgacatctcttcctgttatccgtatatatccacataacatagcaagaatacaatatggtctctagaggaggatggtctgcacaaaccaaccacagtaacacaataaagaaaaagaaaaacaaaggctctatacttgcattatttatcttgattcttcctaggttaggaatggaataacattgttctttgtaatctatgatctatatgtatgtatgtatgtatgtatatcatgacacactaagatagagatattggtcttaatctcccaacatatttatttgttttttattaattcgaaaatgttttgtaaaaaaaaaacacaaagctttatatgtttccaagaaaatctgattgcagagatcatcaacatcagcctgtaaagaatcttctccatgactgccatggaagaaacccacctgcaaataaaacagaaacaaacactaaagtatacttttacattttcaaaatgtaaaagaaagatatagagagaaatcgaagttaccacattcaggacaacgaaaatactttttgtctcgagaaacaagtcctgttcctccacattcttcacatctcttctgtgcaatctgaaaccaaaactcatttttcaatagacaacacaaccaaataattaatgtatgtgtgtaataatca

SEQ ID NO: 32871 - DNA, 477 bp, Arabidopsis thaliana columbia
  unsure (1)..(477): unsure at all n locations
ggtgaaatacaacttcgtgatgcttggaagaaaggaagtgcaaaaatattcgtctagtaaaaaaaataaaatgcacagatgtaccaagtctaaggatccaatagtcttgtcgtgttcgtatcttttgatgtcatgactggcttgcgttgtccggtgtttttatctgggcgtttgtgttcgctccttgttggtgttcccctgcccggcctctcgttgagcttttgccccgccgtgcgcgcggcacctggcgcggcggtggcggcttcccgtgcggcacccagtccggccgctcgtgccccttgccgttcggtgcctcagctgtgtccgagtcagctgtcccgtcttggggttgtcggtacgtggggttctggtagcggtgtcggtcncgtcntagccttcgccgtggccttctacgagagacgtggatggcgttcgggcttnggcccggggctgagcttgcttgggttgtgttcttgt

SEQ ID NO: 32872 - DNA, 609 bp, Arabidopsis thaliana columbia
ctatgttctataatacgtataaaccaaacacatgaacacgtcaacacttaaacctaaacttcagctagattgaaagtgacaatatagatatacagatagagaagttaaacgaactttttatattctaaactctaaatatgttattctcaccaaactccatctctcttcttccacaagacacatttaaatagacatttcaatcaaagatcaaagctcatcacaaaaacaaagaacaacaccacaaagcaaagaaagaaagaaagataaaaagcttgcaaggaaacaatgacattgaagaagagtttctctgcttctctactttcaccatttctgatcatatgtcttattgcattgctttctgttccggtatccgttggagctcgccggttattggaggaacctaaaccagagataccgacatttccggagctacctaaaccagagatgccaaagttacccgaatttccgaagctagagttgcctaagttacctgagattcaaaaccagagatgcctaagttaccggagattcagaagcctgaattgccgacgtttccagagttaccgaagatgcaggaatttccaagttcgatttccaaagttgcggaat

SEQ ID NO: 32873 - DNA, 604 bp, Arabidopsis thaliana columbia
actctagaagttaagattggatcgtgttctgtatgattcctttgaagctacctctcttgatgaagctttggcctccaatcctaccactcttgagttcgataagcctaaaaattgggtggcgccataccccaagtatgaacctggatggtgggataccttcttgcctaaagtaacccaagaatctgcagtatagaactttgctttttgtcttgtttttgcattctccaatctcagctttgtcttagtgcttcaaagttttgtactactgagctcattatccaagtctatatctttcctagtgtagcttctattactcaaagttgcctgtgtgataagtcactgactcaaggttaagcatagaactagacaacagaaagcatcctcacatttagctccatcatagtcttaagggtgaccatatttgttgatttctcacgagaatattggcaagaaccttcagttaaagctctaggtattaagttgtctagtcacaggagggcaatatgcctactcgctgaagaactttgcaacagatctgaattttctggtttcaaaacgatttgtggactcggacatgttgtactcgttaggctagtgctggagt

SEQ ID NO: 32874 - DNA, 1012 bp, Arabidopsis thaliana columbia
acgtataaatgaacagtgaagcttaaaagacacgaagtcagctacaagtcagaccaaatctcaacccaacaagatcaaaccttagctcaaaccttaaatcgaaacacatctgagattcatgtcggaaacaacgcacctgggttaatccgaccagaaattagggattaaaatgggttgcgagattcgagctcgatcttaagcggcaagggataaaaactatatcggtagattgagaaagctacggagaagaagattagatgagcttgaaggatggattcgtcgggagatgagtagaatttgactgcgaattttcgagaaaccctaagacgaaaggggagggagagagaaagggggacttttttttttttcctatggcttgtagagagagactgttggagaaaggagaggagagagaaagtggagctctcttatccttgaaatgagggttttttttttgtttggctttgcgtcgatataagggttttaatttcaataaaataatctttttattaatttattgtaataattttatattaaaaaaagaacaactcatctatggaacatgacaatgccatgtcaccatctggtctgcctatttccaattacacgaaacaaagttacgtatctttttacttctattgtgtacacgtatctgtatttgtacatctctgtatctgttctttgtatctctgtatctgtcaaaagtgaataaaaggagaaaattttatgcatatgtttagttaagaaagaaatctgagcattagtagaaaatagctggcttaggggaacagtatccagaaattaaacaacaagattaagtaaaagatctcagtgtttttctttatattaggaaagaaccgatttttatttaaatcgtattagacgtttttgtgtgtgataggatggggcacaagaaaccaatgagaattaccacgtggccgcaatgtgcggttcttatcacaacccatttttcacttgtgtcctgatgaaaagaaaccctaggcgcgtggat

SEQ ID NO: 32875 - DNA, 592 bp, Arabidopsis thaliana columbia
gaagaaaaagactttgttggtcgtaacatttgttgacaagagatgtaaaactcatctaaagatgggctataaagacaacctctgattggatcagcccagtttctggctactggagtcatgtcatgtggcaaagttttgttggccactatgccgtttgggccagattttattttgcatcaaaccactatagttacataattttaaacaaccctcttaacctacatgaatgtatatgtataagtattgtctgacaagtttttcttctctttttacaaaactaaagaacatgacatgattaaatggtcaattgattacaaaacatatcatatcttttagactcaaaatcaatttagtcgtctaaagctctagcttagctatgtaaaaaaaaaaaaaggtccataaactaaaaagatatatagaaatagaatttctcattcaagtggacatttgacttctccttgtcattttacaagtcaatatatacactctccttgatacattttatttatttattttctagcgctaattaaaacactattagaattaattttcaatccctacaaaatgtgtatcgaattgaatgattaaaaag

SEQ ID NO: 32876 - DNA, 532 bp, Arabidopsis thaliana columbia
tacaaagtaaaggttcctacatttcacgaaaattttgttgaagcaatatgtttaatcaattagttctctatgtaagatctatattcatatactgatctaaacatagctgagaaagagatcggtagagcgagtttatggatgttctttttgtgggtaaggaaaaggaatctttagaatttactggtgcgattcttcgacaaacaaaacaggattgtccgtaataaggatcttaaggtcgaaaagttgggcccttatggttttgtttttttcgggtatacctacaaataaggccatagctgaagattgttgttggggataataaaagaaaccaccattcagaaagtggaattttcagccaacacggacgaaaatatccctcggcaaaagaaaaaagttcacgaaaatgacgaagtagaatttaaaacggtgtgtcatgtatgatgtataaaagtgtaattgtgttactttgccacattccaacagcatgttatttgtggttttcatagctagacatgcatgccaattatttttg

SEQ ID NO: 32877 - DNA, 466 bp, Arabidopsis thaliana columbia
ttcacccgcaatggaatatgatagggagcttgctcaccattactcgcataaacagctcgattatattgaggcttgcactgaaaagccaagctcaaaatgcggaaataaggttttcaagaacatgttagatgagacagtgccaattacagatgaatgttgtcgtgatatattgaagatcggaaaaaattgccatctcggattgattaaactcatattcgccacatatgagtataaaaataaagcatctaaaggcattccaaagagcaaacaaacatggaacgaatgtgtctttagagtagggagcaagattggtgctccggtctcttttgaacagtaaactaatatttatgtgtgtaatgtgtctgcgggtatttgtaatttgactattaccattataaaacaactgcatccattttaattttggtgatcaagaagccaaacccttacaatatttacagtttttatt

SEQ ID NO: 32878 - DNA, 716 bp, Arabidopsis thaliana columbia
aaaacaaaacaaatctatatttgggtaaacaaaagataaaccggagtggagccgagccaccttatccaaacttgcagccacgtctattccatcatttcatcagaaacaaaatccacacaaaaaacatattttcttgaaacgaaaaaaaaaacttattactcgatgatcatgaagcactagcttatccacaaaaaaaccaacttgatcccaactaaaaataggaaaagactttgttttggtcatcgactattatatatagagtccaatcacaatctatcttgttcagattttgtttgtggccatattctttgatctcttttttgaaatcttcaaaagcattaaaaacaccatgacgtctagatttgtgcttccatgtactactctctacgttctttcggtaacacttatcttatcattatatatccctctcgcatctgcgaaacgatcattagaagaagaagaatcaatcatatgcccttataacgacaagggatgtctattatatctgaatgagtttgcaatggaacatatcaacaaccataatgattatgaagcagccttagcttctctggagaaggagtttcaagatcatgacagaattcacttgatacacaaaccatacatgcacatgactgattcttcctttataatactttagacatatagaattctgtatatatgtggatatctcatagagagacattggtgtattaaga

SEQ ID NO: 32879 - DNA, 458 bp, Arabidopsis thaliana columbia
catataaatgaacttcattcaatacggtgaacagcaaaaaaaaacctcattcaataaatacattccagttacatttaatgaatgccatggtcttttgaagtagatagacatccaaaatatcccttggacaattgttctctgtcttattctgaaactttctccgcctaccttggattagtctaccaattttttgtaatataggcactcgttaagttgttgattttatatatatatatatatatatatataaaccattatactagattgtatgacaattctacctacatttcaagatgccataatgacaaggaatctaactatagctactagaaatgataagcatctctttgtcttgacgttatatcctgcatcttgtgtatatatagtgaaagccaatttaacaaaaggtgaaaaagatatatattagtagatgacatcacagacagagagcgctctgt

SEQ ID NO: 32880 - DNA, 925 bp, Arabidopsis thaliana columbia
acaaaagattacacatatttatagaataacaaaataggattatggtaactcaaagtctctaatatacatctttttatatcaaccactcgtttgttttaacccaattctgattggttactgaagataaagtgtaatccacaatggcttctaaatgttttaaattttagattagattagattatcattagataccagatagttcctcttgttgaatggctcatatactcttagatcaaattgtgtgtgtgtaatcacctaattgtacttcggactgaaatgaacagtatttgaacataaccgatagtgttaacacttgtatttcatagtttgatcaagtcttcaatttaaaacgagaagataaaatatatccgaaaccatacaagattttttcttggtaaattatatttgctaggaggaacactttaacttggctatataatcaacaattacaaaattcagacaaaaacgcactcatataacaactacctttctctctgtttaagcttccgagtctcctctatccatttggaactcttcaagttcatggtgtttctcactataccatttttgctcaatccaatgaaatccaaaattttggatcaaaagaaccaaatgaattcttccaaaactaaaggagaagaagcaatccatggctgtgcccgggatatacagaatggcaacaagggtcacgactgagcaagccatccatgcattagagaagcttgcttgtccttcttttcgacggtcctcctgggaacatcttcatgatccatcctagaaccctttctaccacctaaagagagagagagatatcattaaactgtggtctttctcagattgaactttataaactctgaacacagagaacatgagagagtactcatcgccttcatctgcaatcggtgttcctcttgacaacatgagt

SEQ ID NO: 32881 - DNA, 336 bp, Arabidopsis thaliana columbia
agtcacattttgcaatcgaagagtacattaaagctcggtatatatgaaaacaatcttcatcataaaaaaacctgcattataaacaatctctctgactgaggattaccctgatcataaatcatcctcaggttacaattctcaatgtgacatcaagcagttggcgctttcatatggggatttgaaatgtttcgagcgatacgacatgttgctagacattcaaaatgtttttaatgaaccatttggtggtttagcaggactaacgaaggtgagctcttctttagtgactagctcttaatattacatccgagtcaacacatttcaataggaatatcttaa

SEQ ID NO: 32882 - DNA, 579 bp, Arabidopsis thaliana columbia
  unsure (1)..(579): unsure at all n locations
ggtacctctgacgatggacggaactcagacaaacaatagttttcaaatatttcaggcaggctctctctttctaggaatacttgactgctttctgagtttattctggatgacgacccacaaatactttgattagaaggtagtttctcagtagctggtacccaattatatgcctgcccatgagagattccatgaggtgacatatagttattctgacattccacagagtcagactgatatgtcggattgacatcaaattggaatgcatcttcatttatttcgtccatcaaaccaatgaccccagtttcattttctgactctaatcttaaatatttcatttctccacttgaatcggagctactgagtctatcgctgatatctaaatcattcctagcatttgcctgttgaatgctgtcccatcgagtctgcaagtgcacagctgattcctccaaatcaggagcaagtaactgttggagctgggtggcaagcgaatcaaaccagaagtcgtgtcctgcaagttcaattactaagtgagattttgacactctacncccaaagaagccatttcagagttagccttag

SEQ ID NO: 32883 - DNA, 527 bp, Arabidopsis thaliana columbia
agtctccacctcgaaccacacgcattgcacaacaccggcttctctggtggcccgtttctccatagaggtgtacctgtttgcaagattttcacaatgatcaaacactcaaaatgaagaacaatgttctttgaaaaccaaaacaatcatgtgaagtttttaacatcaaagcaaagcagagtcttgattcaacataagtgagcaattctgacacaaaactatgagttcagtattcatttgataacattcaaagctctcaataagagtgatcaaaaggaccctacaacgtgttcttgtgatcacaaacacagacacaaaccaaaccgaatcattttcttgttcatgtctctaagaaacgtttgcattattgaattgaagcagttcttgaatagtcaaatttctcaaaaaccaaatcaaagaaacaagaactcacttgtaactccacagtgatagcaaggaccttgcttccccatcttttttctcttttttttccaaagttttgcaatatacaaattttcacaagaatcaga

SEQ ID NO: 32884 - DNA, 1154 bp, Arabidopsis thaliana columbia
tgagactatgtctcctccttaatcaaatgatagactttacttctttaaaataccataaatagcttaataattgaatgattatttttatatagataatcatgtcaaatctggctaaattcgatgtcgttgccctaaatatatctggcaaaaattatatgacatgggcatatgatgttaagatgcatctaagatcaaataggtttctgagcaccacagatgcatctaaaacgacataagatgagaccaaagctaaagccatgatattcgtacgcaatcatctcgatgacaatttaaaaaatgaatacatcataagagaatatcatgtggatctatggcaatcacttaaagattgtttcgatcataacatatgtgattttgccaaaaggcagacatgaatggctaaatctccggttcttggattgcaaaagtgttggtgattataattccgccatgttcgaaatcacctccaggatgatattatgtggtgaaaagtgagtgattataatattgttaaaaaaacgctctccacctttcattctgtaaatgcaatcccttcaacatcaataccggcccaaaagatacactcgttattctgagttgatgcaagtcctttgcgttgctgagcaaaataatgagctcgtcatgatgaatcatttatctcgcccacttggattaactccacttttagaagtgaatgttgctacattcgatgatgataattggtgaggacccggaccttggcctggctgtggtcttggtcgtgggaatggtcatgactgaggaaaaggaagaagtttccatcccagtgatttcaacacggaaaaatcgaacaaaaaccttcaagtgaatgatgttggtaatgttaataaaaggcatgttgaaaagcacttgccacagatgcggcatgaaaggacgtgtcgtataccaaagtatttagtcgatatgtatcatgcttcacaaaaagcgaagaaagggatgttgaaattaatctcatctgtgatgagctgggatcttcctttaaaggtcaagatgatgataattatcttgatatggtagattttcttgattgatcatgacaccgagaaatcagtgtaatgtattatagccatatgtatgacaagaattatacatgctttaattatgggatacacttt

SEQ ID NO: 32885 - DNA, 611 bp, Arabidopsis thaliana columbia
ctaaagtaagcgctgtttcagtcatccaaacgacgtcttcaggctccggcatgggctacgaagcgattaatggaagcctgtcaaggcggtcccgtgatcctcccaacgcgtatcatgagcaagatcaacgcgtgccttggaagtagagatttagaattggtcgagaatcttctggtgggctgatagagttcgtgcgcaagacatatttaggttcatgatgacatggttataccatggccaaggctataacagcctgaccgctctggttgctctggttgctctggttgctctggttgctctggtttaactggtacattctctctggtactcgtgcgctactcgtgcgcatcggatgtgggttgtggacagccgtggcgctgaccaacgatgggatggagtatgtggaatatgtaccaagtacaaaagacatgactggcatagccaattgtggggatcaggagtggctactttcaataattcgcaacgcactagttcgaggcagcctataccgtcacagtaggagtagtagtcttgcttcgatcagcttcactattcctatcccctgcctgatcttccctgctacctcagttcggattgaaccagatagggat

SEQ ID NO: 32886 - DNA, 1007 bp, Arabidopsis thaliana columbia
tcaatttggtttattcatgttggatcgaaacattaatttgaaatttggatagagtcaaaagttggggactcaacattgatgatacatgtctcctatgctgctaagctacataatcacgagataattcttgcctacttctctggcctgcacttggggtctacaccactcgattggttctctgatactcacgtactttcatattctgcaagagccagatgcaaggaagcgcactcttcgattctcatcgtgtaacaagcctccatttatgagaactgggacgagaaaaatcgtttgtagccaccattccaccagcatgccaccaacacacgaacgtattgaagtttgttgacataaaggtcagaaacagagcacagtcaccactgtggtcctttaaatcccattggagtcataactcttaaactaagaagatttcaacaataattgacaagaaagcagttgagtgcttttgtttgtatatgaatcccacttgttatgtttctatccagtttaatactaagttcagaagagaatggtgagcacgtaattcttcattatttcattagtacaccatgtctttgccagaaggaccgagcttaacatatgtttttgcggtcaatctaataacatctcatatcaatcaaaactaaagatctaacacaatgaagtagacaaagaatggtttatcccaaaccagatggtaaccaaacacaaaggacattgctaatacaataaacagaaactatcacatttccatctaatctaaacatagccttagaagaccaacaaccagagaaacactcaactaattacctcattatacaaagtcataaaccttttgatgtattcaacaagtcataatctaaatgatgcagggtaacgagacagactaaatcttaagcactctcgacaactactaatcaatcaagtgaagcattcaaaaataaaatcttgaatctttagagactcaaaaccaacttggcagattgtagaaaattgaacattttgat

SEQ ID NO: 32887 - DNA, 652 bp, Arabidopsis thaliana columbia
taccgagctcgaacaagactcaaatcgagtttagtaaaaaaactgaagtgagtggcaactacagaagctgatactaaattagcaacttccagaatgtagccttcaagcgccgaccttcggattatctgagggtcagctccaaacacaagctcctgagctcacatgctaagaacagagagaatcacacaacatagtcagctataaataacagatctaagagacagctaaaaacattttgtggcgtacctctcggtagcacgaggggtgatgggaaccacaccagaaggtgtcacaagggcatcgatcagaacatcattaggtgttacaggaatacttccatcctcaagaatttgaggcgagtatgacaatgcaactgcagtagggaaaagagaacagtgcttagattatattttctattgaaaacgttctgtagaattaatttgattgtggtctatacccataagtggatatctccaaccccttctcctttgcacggtcctgatatctcttcaagaaagtgtcgtagtagcttttacccatatgagttatccatataaacaagtagaaaggagttagattagagcatgaaaacagcaatgggaattgctagtatgaaactacattctttggggatggcaaggggatgagtcga

SEQ ID NO: 32888 - DNA, 1134 bp, Arabidopsis thaliana columbia
  unsure (1)..(1134): unsure at all n locations
ccctgtcttgactcttgtcactcaaaacgccaaagatgacctgcgtatatgattgaaatcgtaataataataaacccgaacactagtttttccgtcattccactaatttggtaattacatcgacattagtttcataaagtactatgataaagttttcaaaagttaaacaaattccaaaacatgtttgtaaaacgaaaatagaaactgctttagacgacaaagtaatatgatctgccataagtcatagaattaactttgagaaaagtattatcgtaggaaaacgatggaaaggcacaaatcataaatgatcaattggagagaatgtgatggaccatactatatcaaagaaaaaggggcttttgcaaaattctcaaaggaataattatgaaatgaatagtaaatttaattagttaacgtagaaattccatgtgacttcttttaacattggtggggctcctcttctctctttatttcacgtcaaaatattataaaaggcattgtcatatatcacaatatatcacccgctcttaagttcctcatgtggatctcttataacttacaaacccctttctaactacactatccgatcattaatggttcttctttaacactcaagatgaaatttttgagtgagtcgaattgaaagattttaattaaaacgattgtattgaataaaaaatagtttgtttttggatagatagatatatcggcgaatgaatttttaaccgatttgggtgtgacggttgtttctttaaatgtgtagttgtttgtagggacagatttatacgaatgaaaacttagggaacatgtgagagtattgaagaaagagataatgactaatgagacatatcgttgagtgatatgtatatgtcgagtttacaagtgatatagatgggtgccaatatcctcatgctttaatcttttttgatcattaattgttatctctctcgaataattgcataattgcgttgtgacgcattgatgaccatgacatgaccggatgagccatttcctcatttatgaagaaaaaaagccttcggacctggtgggcttcttagtgcccaatttcgaaaaattaataaattggcttcaattaacgaaganaaagtcaataatttgggcccattgtgtaga

SEQ ID NO: 32889 - DNA, 846 bp, Arabidopsis thaliana columbia
gacaataaactacatttacaagaataagatacatggacagcaaaacagaaacatcatcaaaactttgactgtacaagagtcattgcacacaagcatgaaacactcaattaaagaacagtgagggaatggggaagaactaaataaataaaaagcttaagatgtttttcttttatatttcataccatgtggtattccactctcgactacatagacatattgcataatgttgaactagaaagtgatagttaactggcctttctgagttttcaagcaagggaaatcattcatcaaatccagacaagcttacttaatttcgacaaagattttgttagtttagttacctcaacttggacattgactttgatccttgcagagtatgtcatgttctgaagcctagcatgccatgggagaaactcaagctccttgtcatccgaaaagaaagtaggcttctccacagtgacttctccgaacttcaccgttgcgtatctccaatcattatccttcttctttacaacatcaaaagacggttccacaagcatctcaccaaaggattgaaacacattctgaagcccgtgttcaatgaagtagttgtaggagttgagctgatgacttataagtccatacttatcaaagaaagaagttgcagcttttttgcagaaactctgcagaaaaccttctcctagctcagatagattgatctcccagtagtagcctcgaactcttcaagatccttcacatcaatgtccatatctggcatacctcaaaacacactgtacgaacaaaaaccctaaacaaagacagagaaattgattaaaaagctgtgaaaatcatgaaccacgaaaatgc

SEQ ID NO: 32890 - DNA, 363 bp, Arabidopsis thaliana columbia
atataaacgagcccaatcttaatttcataatacatgttaacatcacaaaatttacaagtaccaagccaactactccaactggcatagggtataaactttatgggtactcctatacaacatcctttcacacgtgccgcatatcgtctaatcgtctccgtgttcaattgagcttctaatacaatggatatgcattgagctcaacgccctctttagagtagggaaagttgcagcacagagcgcaacgacgcatcaagtctactcagcacttaccttaaaatgagccaatccttatcgtgtcagttttttcacattcactataaaccagcagtcggccaccgcatttcaaagcatagcgcttaatcc

SEQ ID NO: 32891 - DNA, 942 bp, Arabidopsis thaliana columbia
aacctctttaacattactagacagttcacacaccctctgtctagacggaattagggttttcttaagctattccgcagcagtctacggttgttgtgtcggtgtgggcgcctccaaaatttaccctttagtataaataagttttggaaaattcagactttggttattgaaacgccatctcagctctaattcagtacgatggggaggagaggtcgcggcggcggcggtggtatgggcggaggaatcaatcgtagatatctgagtcaagttatggatacgtgcggcaaggatttatctacggcggaggacatcgttgatgatcttcgttccaggtacggcaattttgcgaggttgactcggcaagtgcttctactcaatgtcaggcaagtccttaatgttagaaacaacaagagggttaaagacgaagatgaagatgacaacattggagatgaggaaggttctgcttctcagaggaagaaacagagacgggttgatgagaaagaggagaaattgcagcgagcggagcagtcgcatttaaggaagaggaatatggaacgttcagtgtcttcttctccgtcttcttcttcttcttcggaagacagtggtgatgtgtcgacttctgaggacgcggtttatggcgagaagctgagtccgccgcggtttgatctgatcaatgacagtctaagagataactacgctaagttgaacagctcctcgaagaaaccaattgggtcgcctgcggaaaagaatgtggaagttgagactgtgagcaacaaaggtagaagcaagttggctacaatgggggccagaaaggaggctaaagtttctctttccctcagtggagctactggtaatggtgatttggaagttgagggtactaaaggacctacttttagagactttggtgggagtaagaaaatattggatgaattggagatgaatggc

SEQ ID NO: 32892 - DNA, 540 bp, Arabidopsis thaliana columbia
aaatcgataaatttgaattgatgtcaaagaatgtagataatagtcacaatatatctgagtgagatttaatattgttgagttgtggagaaaaatctcaatctaagaatgtataatatggagcgtttgttctatttcaatgaacgtatggttgatattgttctattctataaacatatggttgatactgttttatctatgaacatatggttgacattgttctattctatgaacatatagttgatattggtctactctacgaatgtctcaaaacgttctagtgagagtattttctgtccatgtttgtttgccctaagctttaatttatagagaaatatcattccatatgcatagaaaacttgttatttagatcccttcgaaattcactattaccctaacactgttaacataactttttacgcatgtacccctacgttatcgttttagtcagttgtagagtataggcgaattattgcatgttgtaggactctaagattttattgggatattgtgttcgggagttatgtttttttttttaatatg

SEQ ID NO: 32893 - DNA, 697 bp, Arabidopsis thaliana columbia
tttctaatcaataaatatcaaattatccaccagataaaaataataatttaaaaagcgtattctcaaatcgtaacaaaaagggatatttttggtgtttgtcacccaaaagtataacctatccaatgagggtatgaagaaaattgagtgaatcaaaatataagagataaaaaaaagggaagacgaagcaaaactcttttgtatgtttcttctcattagcaaaggctggggtaaaacttagaagttgacttgaaagccactgcgtctgcgatgacctgcaccgccttttgatctgtttgagtttctttcatattggtatcgcatccccaaacccttaccgcaagcctacgacatttgggtgatgattctctgaaataggttttgtaccaactgatcacatctttcttctgtatacttcttagttcttctgcttctttgtgggagaaatcaaacatgtacctgtaaaaaagttaactccatttaaattcgccagtaaccgttgtggatatggatccaagtaaatcattgaaagttctatagatactacaggtcacataacttcaaacccttgagatccttaccttttgtcaacaatctgactccataagtcatttgtctcggacaagagagagggatccttttccagcaatctagcaatcataccacttcggtaatcttcataggattcatcatccagttg

SEQ ID NO: 32894 - DNA, 723 bp, Arabidopsis thaliana columbia
  unsure (1)..(723): unsure at all n locations
taaaagcttgttattcaggttattaattttcacaatctatataaaacaaaagtgaagtaaagaaagcagcaaatcattgataagagattttgggttcaagaaaaacattgaaagtaacacatacacaaataataaggctttttaaagaaatataaattgagtcttataacaatacacaacagacccaatctattgggcccaataaaactagggcctctatagagtaacgcaaagaggaggaggaagaggaagcacagttttattttgaaagatacacaagtagaggggagccatggcatcaccatcctctgggaggtcctcctgaggactgcccactcaatctgtcgaggagggtgttgaagtcgatgggttggccactctcttccatccgctgaataacagccatgacatggtctcctctgaaacccatgctcactagcttctctatcagttcaccgtattttgatctcaacacaggtggtgcaccaatgttaccgctacctgcctggtgcggctggggagagtatccacaccttgtggaccttgcaagtaatgggcttgctgctgctgctgctgcggctgaggtggtgggtattgcattctgccaccttcatacatggcattggcatacccggcaagaggaggaggtctgagggtagatacccatcgccagtctgggggctgtaaacatctttgcntgctgaggaggagctgtggtggtgg

SEQ ID NO: 32895 - DNA, 574 bp, Arabidopsis thaliana
ggaagatgagagtgctagcgagtcagaggaatcaatgcaggctgacagtgcagctagagagaaataccaggagaagaaggctaccaaaagatccgtttttttagagagtgagaatgaagctgaagttgatagaacggagactgagagcgaggatggaacagacagcactgacaatgagattgatgatagtgatgaagagggggaaagtgagacacaatgtagtgcagagaagacaggaagtgagactgaagctaatgtggaggaaatgagagctgatactaatgttacaatggaagcagtacaaaatgaaagtcggaatcaaatggaagaattggaaaatgagattgagatgggagttgaagatgagaagaaggagatgagtgtgattgtttcggaaagtggaaatggcactggtatacgagaagatgagaataaggagatggatgtaattgtttcggaaagtggaaatggcactggtatactagaaggtgagaataagaagatggaagtaatggtttcggggagtggaaatggcactggtatacgagaagatgatagtgattttgctgctaaa

SEQ ID NO: 32896 - DNA, 1133 bp, Arabidopsis thaliana columbia
tctggttctactctttcaaatgtccccaacaatacaactttgtagagaagctcagattcttcttcaacaaccaatttcttactaaagttatgctggatgatagacctgttatggtcaaaaggtcatatacaccagtgtcctgttttttttgagatcgaacttcatgtaaaggctgtttaactctaaccctttatggatgtaaggctatagtggaagtagctgcccctttaactctttttcttcttcttccatgagaagccgttgatactccacaacttccttttccttgatagatctgtagcccacagactaatgtttttaattcacaagtctccaactttcaccaaagttgactacctccgtaaacatgccagctaaaaaatgaatcaactgactttagttgactaaaacattagtaaacatgccagctagaaagttgactacctccgtaaactacattatgagttacatacaagattgaggtaatttcaactgactttagttcaagaaagtgttcgtaacgttactcaagaaagaatgcagtaaacaactaagatacatccgcaccgtaagaaaactcgttattcactacgaatttctgatatacacataaccaggaaaacaaagaaacaagtgcatttaaatacagaaggaaacaaaggtgggaattgcataaatcaaaagttgagatgaggtagtaaaggaacaaatcatgcgttgaagagtctccttaaaggcccatctttgcggtctttggcagcttcggtaagagcaatgaacttcttgaagccagtgcttgcagctcctctgccaagagcagctgctctggttaaaacatcctcgctgtttgctatgaaccctgcagctgtagccggattagtgattgccaatggtggtgcaggtggggttggcattggttgtggcattgctgctgcaaccgactgctgtgtgaatcctggaccatgcttgttgaaatcatctagtatactctgctgatcagctttcttaagaccctgcaccaaacaccagaaaaagtttcagcagactgtcgctctagaatactgttgtgaaccagactcgagcctcgagcctgttcgattgagagcgaggaaatgggttaagacatgccaaaa

SEQ ID NO: 32897 - DNA, 1268 bp, Arabidopsis thaliana columbia
taattgttgtcatgccaaaacaacgtctccatgtctacttcgcaagtatacttttattttttcacttaatttgggatttatagttgctgaaacgaaaccatagctagttgttacgtgaataagagcaaatcagattatgtattcaatcttcctcttaggcaattactttgcttcaccttcataaaagtgaacaatttcacaactatgcttaagtgaaatgaacacaagtaccaaatggtagcaactgatacgcatttacaaattcttgacttgcctatataaaccgtgaaatgcacaaaaatctatccaaggacaagaatgtgcatactaaacactatcacatagctacaattatgctaaacctaatgcacaacattcagaccacacaagaggtgcttctgagtgatgcagctcaagttcatgcaaagaaggtaacctcaaagctgatgaagttttcaaacaatagcgcatctctagggtcgaagatgaagtagaagcaagccatgtagggatcacaaccgtagttaacttttcccatagcaggccgagtaactaaacgaagatgattcatagcagaagagtagagaagcaagtagataaacaatgaagcaggccgagcaactaaatgaagatgatgttagggatccacaaccgtggtttaacttttcccataccaggccgagcaactaaatgcagatgattcatagcagaagagtagagaagcaagcagataaacaatgaagtaggccaagaaactaaggaagatgcttcatatgagaagagtagagaagcaagtagataagcaatgaagcagtagtagtagtagtagacccgaagaaacctcgacacggtggaaaaagacaagaaacgcttaggcatttagcagaatttccaatcaaacattatgtctttaagaaactagggtacgaatcaagtgttcttttacctattggtagatacacaactacgtacgtttcatatccaaaagcaaaagtagcaagctttaaccaacccagcagacctaaaacatgttctcttactgaaattcatagatgatagtaacttcccttagtccctctctgcttctcttccaaagtatcctcccacacactcgttttcttgcaaaatcactcactcagctcctgcttctgcgtctttcatgcagtacatttctgaagaatcaagcacagatgttgaattagcatctgaagaaaatgttaatgtgtatctcgaaaaactataaccacgatcttaagactgttaatgat

SEQ ID NO: 32898 - DNA, 758 bp, Arabidopsis thaliana columbia
gaaatcttgagagacagggacttcttgtggttttggataggttaacataaaagttctctttgacaaaattgtctgcttttccttaactcctcaagtcccttgttgcatcacaagtgattgttgtgtcgacaatcaagtgatcgatttgttgatagtatgcaatgataaacagtctagtatttgtcaacaatcttcaaagaattacaaattatctctctctctctcttctttacatgaaaacatggtctacatcttcattttacctcaagacaatctatttgagttgagctttttttttgttgttatagggtattcaaatttaaataaagaaagttacatagctatgacttgacttgcaagtcataaagattttgttcaaagcttacaagagagtggggtagagaagcgacatgcttacatctaaggtttcaaaattacatggaaagagctacaagataatctgtgatgatcgattcaatctagcttacaagagattttgagttgagcttttgactcatgtgaatctgtgatgatcaatctggagaaaaaaatgcagttgataacagtttcaactttaaaacattgttaagacttttcaaaagtttggtactttctagagacaacattgttgagaatcagatcagagtctcagattcagtttatacttagctcaagtttatactcagaaagataaaaaagagtttatatcagttctggttctgaactgatagttacaggcgaggtaatatctatatggg

SEQ ID NO: 32899 - DNA, 982 bp, Arabidopsis thaliana columbia
tcgtccctttgttggaaatatgaaaattgagaaagactttgaacaatacgaaggaacaacggcctcgtcattcgaaagcgtcgtcgaaacatgcgatcatggtaaatggggtcttccgaaaattaatcgttgcataatcgaatatgactttcttcgtgatctctctctatattagcatcccttttttttcctttttttcgccgctacacgtctactaaaattatctaaaccatcttcaaaacatttttcaaacatctcctccaacgtatcatcatcatgagaatgtgatgccattattattcaaaagagaattgggtttgagaagaaaaacaattaaaagagaattggatttgtgaaggaaaacaattaaaagagtcttgtggtttgtaaatgaaaataaagtctttgtttgagaataattgtaatgaagaattgtaatgaaaatatgagaagaggaagaatcgtttgaatggatttcaatatgagaagaaagacatatatataagagaattgtacaaatacattgagaaggaaaagaaagaccatagaaagtaaaaacaagtggcttctgaccataaaaacattcatatgtcatgtgctactaaaaaacaaacaactagtagccctacattacatccaaaacaactactaaaaacaaaaacaaggtacatccgaatatattacacaaccctacattcaagcatcaataccccacatctcctttccttgccgacatcactagcttccaagaggaagtcttgcacataaaaaagcaaagaatataaaataataatacatgttaagttaacaaaagaactgaactaacaacacatacctaaagaccagaatattcattctcagaaacaaacacattgcttccagaaagatactcttggataagagaatttttaatttgaatttccatatcactcgatccattagacctattaagtaggctgtcaagtagcttatgtttggagag

SEQ ID NO: 32900 - DNA, 568 bp, Arabidopsis thaliana columbia
gataccccacagggtttgaaactttgaattgaatagagttaacaatggtggtgcaaggcaagaaggaaataataataatgagaacagctattgtatgtttgtaaatcccacatgggaggagttaaggagtgcacgtgcacacgtatgtgtgtcttcttgtcctttctttgatggtcaaatatagaagaagagttatttgagagagagagagagaggctctggaaatcttgtgatccataaattgtctctcttcttttcctctgttctcatatacaaggaaaagggcttccactgttctgtacctaataaatatctgaaatcaaaaacagagagagtcttttctttttttctttcactctatcactctccacacatgttacttacaacttaatagtatctctatatctccttgagatcatcatccagctgttgctttttttactaaacaaaactcctctttgtgtgagtgaatgaatggaagtttccgactctctcatcaaatgttttttcacatacttcattcattcattttagcataacaatcggtggttggggatgatatgagatg

SEQ ID NO: 32901 - DNA, 592 bp, Arabidopsis thaliana columbia
ctaatttgcatcactcccctcttcgttgtcccaaactatattaaaattcaaactggaaatgcgactgtacccaacaaaggtagaattggactattacgtttaggagaagcaactcgtattccaaataaacagagaaaaagaagagaagatacctttgagagcgacactgcgtagggagagaagctgctggcgaggtttagatcgaagagaagaaagagggtagagcgcagaggaagaagaagaagaagaaggaagtgttgcttgcttggaggccgcatcgagaacagaaacggcggctatggagtgagcagatgccattgaagttgcgacggagttcagcaactatcgcgacgattccagaaaacaaacttttttcttgttctcttattttggttctgcccacggcttggactagagtatcggtgaggggcttgaattcttcttataaggccgaagctatatattacatttattaacgggccatatattgaaaaatatcacatagaaagggcccatataatcaaagcccaataaggggatgcattggtcaaagggtttgaaactttgaattgaatagagttaacaatggtgg

SEQ ID NO: 32902 - DNA, 554 bp, Arabidopsis thaliana columbia
aatcaaaaatatcatcaacaataaaactgtgttattattattaaaaaaaaaaaaaaaaaaattgtgttccgatcgttttgccgtttaagtcgctcttattactctataaatagtacacttcttttgtcatatagaagacaaatcaatcaagcaaaattttgtcttaaaacaaaaatctttaatcaatagtaataattttctaaattcttaataggtgcaaattctgcaagcaaaaatggagaaagtcaaattctttgcaattatctttacggtgtcaatggttatgacaatggtttcggcggaagagttaccggtgaaagtgacgggcaatgagatgactcttgcggcggaggctgccgcttcgagtttcaaaagcagcgccggagaggctgctcaaggagccaagtcatgggctgattgggctactagcaaaatcaggtaatttttattcttgtttgtttattctctaacatcaaaattttttgtggaaaaacaataattaaataacttctacttgcacccaagaacaaaaacaatctttatttttcaagggt

SEQ ID NO: 32903 - DNA, 715 bp, Arabidopsis thaliana columbia
tgatgatgatcaacgaaggtgttactttttgtttacaagatatcgattttctaacataaattatatatgcatataagacatacatgagtaaaatcttaaaaaggttagcacatattggtaatgtttatcatgaacgagtcttattttattttgtacgtttcgaactaaaaccatttttgggtggtatttctggaccaaattttcattaaagtgttttttatttcaattctcttgcaacttctgtttctttagaaagcgaaaaatgcatatatacgaatatacgttgggattgacatgaacggaatgtatgtatttacacacattaatccgcagcaaccggccattcaaaattatgtttgtgggccttgttgctgcttcgctgacaatactatccaaaatttatttcatttttctttctttgaaaaacacacaatcacttaattttcatttataaatcaaacatatgtacatgaaaatatcaaggaaattaaaggaaatcttaccttcatatggtcgaaagttttctttcaaaaagcagaaacaagaattaatgtttctctaattcttccccggccccaatccacgtgaaacatgttatgttgcgagcattacactggaaactgttacattacattctaattggcgaaaaatgaagtgcatttgtattgtatctcacgaagatttgcgtttgtgacaaaaaaaaatatgcaatttt

SEQ ID NO: 32904 - DNA, 672 bp, Arabidopsis thaliana columbia
ctacttcttcttggatatctttgcagctaataactacaaatctacaatcaatgtcctcttgatctaattaattaatccacgtgattcatgcgaaacacgacgtaatttggggtttccatgtcgataaaaaaatattactattgtacttgtaacttgtttttggtccactaaatagtttttgtgatactcatactcgtacgtttttttgttggatattcgtaaaataggaaacggcgtttgatttcgtcacagattatgtcataaataagaggattgaaaaatgtgatatgggatattgtttttaaaaaatgtcaagaaagtcttgaacgaaaatgaaaccttacgcagaccgaatgcttaaaaagataaaagctttaattgataaaatattaattatttgaaaaagaaaccttttttccgtcaagaaaggacaagcattatactggaaattgttgagttccctaaattgtatgagtttagccaaactaaataaatagagaaaaatagtcatacataagtaaataacgaataaataaacaaaatactataacagtctttatacagtaactagtaaaataataactaggtgatgatttataaagcgatgtttcacactgaaacgacaggagaagagcgacacgaggggctagtttgagatatgatagaggataa

SEQ ID NO: 32905 - DNA, 522 bp, Arabidopsis thaliana columbia
ctctgtattttttttctttctttctaatatcaaccagaagacaaaaaaagataatatatatgaatgttggttttgttgtattcataaaagacatagagaaatcatatctcaaattttccaacttttttagtgataaaaatactcgacactctacagtttctgaagattggtatgcagggccggcccaagtctttttgttgcttaaagcaaaaatgtgtttgacccattaataatgaggtattgaggaaaaaaaatcaaattctgacaaaagttagactcaaactagacacatagaagaaggttattcaaagcgttgaccactataccaccaacaattttacaatttgatgcctcaaattttgttactaaaatgtgatgcctaaagccctagcttcaccatctttagctctgggccgggcctgttggtatgttatatagcccacaatcctttggttacataaaaagtataaagatgataattcatcagctaattttatattggtatgataatattttgtttgt

SEQ ID NO: 32906 - DNA, 270 bp, Arabidopsis thaliana columbia
ttgtaaatatttgaaagcaacgatcacgtcttttgattacatcatgtaaaacaatttcagaatgttgtagtatatcataagtagggaaaacatatagttcattgtaggattatattctaaatcaaagtagaggcgaaggctgagatgcgggggtgagggcggctactggtggaagccttccggtacaagtgctgaagttattgaggcactcatatgtggtgcagtggttcacagtcctgcagcaactagagacgaaaggttctctcgcct

SEQ ID NO: 32907 - DNA, 917 bp, Arabidopsis thaliana columbia
ctcctcttcctccgccgtccactttagtttctggtttcccatctaacccttgcgtgatttacctcgtgctctctctctctctccaagacaatcggcgtgtaaacggagttagacgcatctcttcgccgtagctttcgccggaggtttcgtttatttttggctctgcgcagttgtgtgactgcgggaggaggtttccagtttgcaaaactttttcgattatttacttccgaatttatgctttttattttgtcttctatttacgctctcgaaattaaatcgaatttttttttttggccttttgacttaaattaaaaacaaataagctttgtatttgaatccttaattattttatttgaagtttagttctctaaataaaaactgatgacaaaaaaaattcataaaattaggttcgttcgtcgtaaaaatatttctgacattataagagaaacacctgaaaattcgaggatgtttggttgtcacgatggattgcaattttgcaaagtaattaagtatgactttgaaaagtccaatgttgaagaggttaattttgtaaaaattaaacttatggggtcacattcgaaatatcagcaaatacagtgtgtggtggtaagagaaaaccaacttgggtttaaatagagaaaataaaataaatggggttaagttcgaaataaacgtaaacgcgagtattaagcgaatctggtactgcgcgtatctggaaacaactggactgagtctttccctaaaaaccctaaacatagatttttagtttagtttggtttcatttctcatttcggcaaccaaaccaaacattcagagagacacaacacaaccacatcatcacacgtttctctctctctctttcctctccgtcgtctctctctctctagccacaccaaaatccttaaaacctagacttt

SEQ ID NO: 32908 - DNA, 1101 bp, Arabidopsis thaliana columbia
  unsure (1)..(1101): unsure at all n locations
atatatcaaataagagaggatgatgttacaagaatgccagcttaatctattcaaatttgatcgccagacactatcaattatctttgtgttctcttgagattctttaaaatttagcctttctcccgtacgaaacattaatattacaattaattggataataaatggtacctggtgacgtcaaagaatcaagccctggcagctcgtcaagtttcaatccgccaacctttttcctgagataaagaacagcacgcatatactttgcagttatattttgagcataaaagacaagaaagcataccccgtcagcaggtcatataatatgcattgccacgtgaagaaaaaaaactcaatggacatagaatttagtcgataagaatagagatcaccataaatgatcagattacctgcttagtttgtattgagaaatttgggaatcataggcatcaatctccatctgatctgcaatcgcatcatgacgtactgtccaaacacgaaccactccatctgaacatgctgtcacaatatctccggtttccaaaaacttggcatcccagatacagcctgggtgttccaaactctgaacgcagactccatctgtaccaaaacaaaaataacaaagtaagaacaatagatcaacctataagatctaaacatgctttaaaccaaaatgtcagtctcttttcgcaagtgatatctattataacagctattgcagaccaatcttcgtgagcctttcaaactggtttctgatcagttgattactgtctgacatactaacaactaactttccataggttgcaactaagtgatccaatttataacacgtcttccacaaaaatatgatatatagacatctttattattgaaagaaaactttaagagcgagcaacatactgaaaagtggagacatattttccaaatttaaacatctcagacctcatataacctagaaaactgtgaaacataagtgaagaacagccaaggcatcaatagaaactaaggaacccgtaatcacctttccatatcttggcatgacgatcttccttgngactaacaataaggccagacgaatgtgcgtcaactgaataaacaagggaggtg

SEQ ID NO: 32909 - DNA, 511 bp, Arabidopsis thaliana columbia
atttaataaattttaaaagtatcaaaaatctagcaacaatattgttatttaataaaattggagcatatccataaagaataaaataacaaacatgcttcaacactagtatcaaataaattttttcttttgttgttctcacgttaacaacaaacagaacatcacaattcacgactcacaagcatccaaaaccttgcagatgtcgtagctaccaaaataaccaaagcaagtgtgtcgttgtcatgatactagcttgtgttcacgaggataagatggtcaatccgacgttgttgtgtccttgccgttgtttggcattgtttcattttgagtcactgttgctaattatcgatcaaccccgaccaatggaaagagagaaacagctaagacatggtcacttggcatctctagaggatacgagaaaacataagaagtgaggtctcacatggaaatgtgatgaaagaggtagtaatattaataacagaataaagagagaaagggagaagaagagagagag

SEQ ID NO: 32910 - DNA, 648 bp, Arabidopsis thaliana columbia
aaaaaaattatttaattcacgcatatatgataataatataagccattgaaatacttatttaattcttagggcagagatctccatcccaaggaaattccgaccgatccacatttgagtcctacactcattggacaattaaatgacaagtatatatatatatatagaatcccacataagatataattatgacaataaccaatttatcattagatatgtgtggtaaaaaatgatcaagaaaatatataaacactcaaaaacctagaacttaagaaacaagaacactatcagatctagctagctacaaatgtgtgtgtgggtgaaaataatggtcagtcaaatataataacacacaaaaacaccaggaacttaagaaacaatatataacaatgtcaacaagtaaaagcttaggctgcacaaaataaaataaaaatgaaatcatatgctaaagaagacataaataatgcatacacaaaatacatgtacatatatattcaggatcaagttcatatagattcatacacagaacatgataaattcaaacactgacaaatgtgatgcaaataaggacgtcagtaatttatagtcagaccaatcacagattttgctaagagacttaaaaagctactaatgcacaacataattaaccag

SEQ ID NO: 32911 - DNA, 803 bp, Arabidopsis thaliana columbia
tgtaaccttttaaacaattaattttaattttggttttatagtacttttataaatggattgacaagtgtcatgatttttagtattagatatatttcatcaattatactaagaagattagcatgacaaaaaaaggatcaattatgggatcgacacattaaagtctatgcttttgttgaaataggcatatctcatatgcgttattgatttaggtacttctttctacaaggtttttacgattttaccctcacttaaactgactttaatattccgtggtttttttgtcttttcccaattcattatcaaaagtagcctcgtatacctctaaagagtcaagcttcttttcgggcttcgttaacatcgcctacgagtctcccaaatcagagaaacctgtttcaatgaataattgaagctttatttttatgtgaaaaaagggtcaatatgggttgagttcatttatcatccatatgaggacattacttggtgtcacgaatgttaaagcccttcctcatgtcttgtgaatagaatctagcaaaaggattggtctgcacgtcgaggtacgtacgcatgtatatttactgttttttggcagagaaaaattaaaagatatggagcaaaagattgcagcatttttaccttccacgtctgaagttttcggatgccataaaggattttgagcaagaagagaaaacaatcttctatagcttattgattagttttttttatattaatgtgtgtgtttcttttttttgttcaatattttgtttttttggtgaacataggagtttgtcttgaaatgaagaaag

SEQ ID NO: 32912 - DNA, 892 bp, Arabidopsis thaliana columbia
ccagtgtctaccaccttgagaactcccgccttttcttgggaaaaatccacctttcttaggtttaggaatgtcatgaatgtccatcacctgtatagtcctttgcttttttgctgaattcaaaacaaatacatggaacaacagtcagaaaacgaccacactgagtagagagatgtctgaactaaaaggtgtcgagttttaaaaccattctcggcttgtctgtagttttgttgtagccttttcctggccgtgtcgaaatcaacttctttatgctctttgtccctctgcaattcccaaaaccaagttcatcacaattgacatagttataagagtctttgaacaccgatatcaggatacggtttggtaatgtaccggaatggtttgttgagaaggagaagggcgagaaggttttgctggagaaggagattctctcctaggttgaggagcaacaggtcttggttttctttctggctcagtaatgttactgttcttgcttgaactggaatacccatctgtcgaaaaccggaaaaggaataagctttacggattaaaaatggtgaaagatcaaaatgttatagtctttgattagcagcttactctgaggaaccggtgaatatccgaaatcagggacctgccacaagagaaacagataacaattgaagctcaatgactaagcaagaatcgaaaagagtttcagggtttttacctgttggcgactaccattatgaagagctttctgcaccggtgaatcctcatcggctacattggaagagattgattgttctgagattgataagaatgatgctggttcttagattcagagtttggttttctctttacctatcaaacttggaggttcaagatcaccaggctggttaaatttgaccgattcatc

SEQ ID NO: 32913 - DNA, 768 bp, Arabidopsis thaliana columbia
tcgtttttatccgaaagaatattataattaattaattagcccagtcacattaataagtttcgtaaaaaaacattcattttctcaattcaattaaccggcttcttccaattcttttgagtcggtttggaataaaccggccggttccaggttaacggcagttagcagttacgtcggcggaagaagtattcgttacaatatttgttttaatcccaattagtctccttctcctttctctcttctctctcgttcaacgggcaaagtttttttcgaatataagttttggtttgttttttaacgttcccttcttcttcttcctcgcgaattcgcttatctggcgatcacgatgagctcaagttcgaatccaccggtttgttcaccggaaaaggtcagatttttccctgaaatctgattagggcttttcattttttgtgatcagattgttatcttcgtctactttggtgtgagttcatggggttttaggtctgaatcggaacacgttttaacaggtcttggaaaagggtctgaattggtttctaatgattagaattgtataaaccctaaacatccatcttgtgcttgaaagaaatcgacttgtttttttgtgagatctggcttctattttgcggccgttgagtttttagggttttgtgatttttgattatttgtttgataaagatacgttcttgttcattttgtgctcaatcccatgtttttaacgaaaattctggatttggtgatttatatgggttttttaggaggaaagaagtg

SEQ ID NO: 32914 - DNA, 634 bp, Arabidopsis thaliana columbia
ctacctaattccttgacgtaacaaatgcttatatctcatctaagaaatattcagtcgaaaataaagcatttccatcactctctgctcataaaactatcacaatagatattgacaaaaaaaatgggcttctgccttctgttagatttatctatcaaaccaactctccgaagtgggcttctaacagagaaacaagacatgggccacaaaacaaattaagcccacccagaagcccaagacgaaaactgtgcaacggtcgtcttcaatgtttcagcataaagacaaagggaacaaaactgcagagatgacgaaagcttgtacggaggagatagcactctccaatcaattctcagcccttgatggcttagagacatcaagatgaagacatgtgtaagggtttatctagggttttagttcacatatgtccttgtataaaaacccaaacaatagccgcttgtaatctctaagaagcagaatgaatgaaaaccaaaacttttcataaagatttataaacttcttcattatcgacatcatgagcctcttgggccttcatcattcttcaaaatcataccatagtttatagttttactgcgtacacaaatatggcaccgtcatatacattataggttctaggagt

SEQ ID NO: 32915 - DNA, 482 bp, Arabidopsis thaliana columbia
gaaatttcaaaactagtgatttgaaattaatgtacgtttagtttgattagatatgaacgtttaggattttagtttatggtaacaacaaaaaaaaaaaaaaaaaattgactaatgaaaaacattttatatttcttaataaaaattatattaatcgatataattacactaggcaatattgttggtacctccaatttgaagagttttatgaacctttgagaaagttttaaacttgagctttagatttcatccagttcccttaaggtttcatgaggcttacattttggtatttatatacgagacattataagcttctaaatcataggtaactctccagatttcttcatcctgtagtctctaagtcatcaagggctgagaattgattcgcaagctgtatctacaccgaacgagcttacgtcacctcatgttctgatcctcatggctttaagcgagagtggagatgaccgttgcacagtgcacgacga

SEQ ID NO: 32916 - DNA, 914 bp, Arabidopsis thaliana columbia
accattttctttagtggttgcagaccatgcaatattcgttcctttactaaccacaaatcctattccaggaacgcatagatgtaaagtcattctgcaaagacgcctcatactacatgctctcggcagtattaaacatgacatctgacagaacaaaggtcagatatcactggtctatttttctaattgttctagcatatgaatgttaattacctgtctgaactcaaatgtgtgctcttgcaaagtgttcttgttggtgtttatttacgctatttggttgtggagactcctaatgatatacatgcaatactttgtttagcctccgctttatctctcctgtttctgtgaaaagtatacatgcggttgctatatattaggttattatccgtgttttattatatcaagttgatttatacgcagatcaatgcttacaagtaacttgacgcttagcatttttggggtcagaatattaagttaaacttgatattatccgactttcaatttaacagtagatgactatattttttgtttgcaggttattcatctccaaccacacaccttatttatcaacagggtgggcgtgagcatctgtcttcaacagtgcgattgtcagacagaagaatggattaatccttctgatcctccgaaactctttggatggcagtcttccacccggcttgagttactgaaagtatgttaaatatcttcaaattgtgtaacttttttttaatgatgattaatgtgcttacggcggatggacaatttcagttacgagtgaagggatatagatggagcacgccattcagcgtctttagcgaaggtacaatgcgtgttcctgttccaaaagaagatgggactgatcaattgcagctaagagtacaagtcagaagcgggacaaagaactcacgttatgaagt

SEQ ID NO: 32917 - DNA, 963 bp, Arabidopsis thaliana columbia
tacactagaacgaactaataattgttttgggcggtttctcttctctcacacttgtacagctaaataatctacatggttatacacattacatctagtttgtttcccaacggaatttgaaactagaattatttcattgataatcctcaatacgtgatatggaattattaactatgatacatatccaacggtgttatgactataacgacgaacgacatattttaggccaaacacgtcaagatggcttctcctagcacgtgcccttcaattgcgatcagcaatctctctttcgtcacctagctcatattcagaacaactatttataaaaaaaagtactacataaagtactacatatcattcaaatcagataggaaaataataaaacgatgtagtaccgtgtgaccaatcttgggtttatcatcgagagcaaaaagcttgaactgaaaacggtgaccgtgactaggtaagagaggtcacgccatcccggaatcttgtgatcgttgtcccttcccgaataccggtagtctgatcctcattgccggaatatccttccggtaggcctttcatctctggtggtatgtcgacgacaacccacaccgtccatggcaccagcgggccactaggatcaggcgcatcgatgtcttccaccaccaaagctagcgtttttgtaccttctggaacgttgtacctacaccatatcaacattcttactaattcaatgcaatcctttgggtcggtcaataaaccacaaaataattaaaaaatggaaacatgttacttcaaacagaaaaaaacaaacaactaggaagccttgtgaattgtgataattaacaaatcgacaaaattaataatctctgtttcagcagcatgaatcaaagtcataaataaagagcgatcgatcggtaccattcaagaggaggagagatgtctttcttaacaccttgacctgccatcgtatactttctc

SEQ ID NO: 32918 - DNA, 967 bp, Arabidopsis thaliana columbia
ttttgacaggtacgaaaatggggaagtgttgaaagttaatacagcttattcccttgagagatttggtttcacaagctcaagctagcgctctgtgcatttcttcagatgtaggcaaactgcaatggagaagagaacctcaaaaggctactttacttagtcatcaaagaagaagcatcagtagaaaaaacaaaagagagagagagagagagaaaacaaaaggtgttgtccaaatattctgtgtatagttgcagaaacatctcttttctgcttctctagattttcatctccttttggtctgttttcttttatttggttattcttttaacaccttagtttaacttagagtgcctctcctcttttgcttttttctttctttcctgtatcatcaaattaccacatttcttaatcttttccatatttgaattgacttccatggtttggctcttacttttgtgaatcatctgcacagtaaaaacaatttccttttgatttagcagtacatgtctctctgtgttttttctcttccagcagtaatacatatactttttacagagcttacttttacacaatggcacgacttgttctctctgtttcggaattggttcttcttgaaactgattctccctctctcgtcgagttttcatagtagcacattttattctcaggcttttggtttaatttcataggaagatggttcaatccggtttactattaaaccgaaaaatctaaaaactagatttttcggtttatgaaatccacaaaccaaataatatagctgcataccaacccaaaatctcggcaaatcaatgttttccgtaaataaccttttctttatcgatgttgtcaggaacattaagggtaacttagtaatataacaattgcagacgttttagcgagcagaggatcccaaagccagacaaatcctcttccgtcgccgccgccgccgccgcaagtctcgtcggttagt

SEQ ID NO: 32919 - DNA, 904 bp, Arabidopsis thaliana columbia
gtatattggaattgcatggaaatatagtagtaagtatatatgagtacttaggcagctcatttcaagtatgaattcgattgttgcttcggaggacacggaatacctcatgattgattcattctttaagctctattcaatttctttgggatcacattgtgattatacttatcattgttgttcaatatatatggtattatactattttgctccgtggcacataatagaagaaatgagataatattttaaacatcgttaatgttttttggtagaaaaatgcaggaatcccgactattccacatatgagtgagcgactcttctatcacataaatccacacgaataacatttgaagtgtatgcctaaaaagttttcagatgaaaagatcatgtatttgttttccaccaagtatttgcgttaaaacgacaaatctcattttgtttaaacataaatttttaaagaatgagattaacattgggactaaatactaataggtgttaaagaaaaaaaattgggactaaatatggatgggcttccgttattaacctgtgtttagaacctccctaacaagattaatttaagacccattttagtttcaaaggccataaagctccgaatgcggcccaaaactactctttgaaaactcgattctttaatttccagtttccaaaacgaacgtaaagaattcaactgtggcctgtggggcaggcacgtggaggtttaacgacgtcgtgtgctatgtgcaaaaaagacacaacacaaagctcacatcacttgatgttttataagtaaattaaatttacaagttgaagttggaaggtaatgtattatgcattattctacgcttatgttataagtcctccctcgcttcacattttgtatatttttattttgtccacaatttgttat

SEQ ID NO: 32920 - DNA, 665 bp, Arabidopsis thaliana columbia
cgtttatttcgtttttgtaccaagaagtaacacattcaaattttaatgggatagtgcaggcccatagtgtgacctaaagggtttgttttgttcatgcatgatccggattagatatgattctgatttctatcaatgcacacaaaaaagggcttaatttgtcaagactatctacaaatctaagtcaagttgattaattagcggattaaatggtcaaatatttgagcgcgattactaatctaaatggtcaaaggaatttggaacatttatttaataataataattacccttctaatgaagattataaaacaaaacctacaaagaaaataaaaagttggagcaatgatatagaacaaagaaaaagttgctcctctatctaaaattttgttaaaaaaaaaagacttgaaaagatctaattaaggtcgtgaacatctttttccacacacgagaggttacgagaaacccaccgccactttagctgttcctgcggattgcatttcaacgtctacttcctcatcgattcttggcatcatcgagagaaccttgatatcgcagcggttgcaacacttgacaatttctacaaacttctcctcaatgttctcttcttcatcgatatctccttcctttccccaaagaaccgtgcaaactcccaccactaaaattgccat

SEQ ID NO: 32921 - DNA, 545 bp, Arabidopsis thaliana columbia
tgcttcatcaagccacgcatcagttgatcgagcgctgccgtgtttttctcgccaaacatcaccgccttagatcagccaccgtcgatccgtcgtggagcgatgggtggttgcctcctgtctgacgatctcgaacccaagccgtaaacgccgagaacctccagatctatcatatggtatgcttcaagagttctccgagcaaatccaactcctgggaagttccatcacagacaacacctttactgatgcagtcgaaacattgctccaaattcacgaacaaagaaagataatgaagatattactcctcgagatgattgggaggatcggatgaacctcgaggggcagttggacaagagattagtctcgccgtcgcgagaaaacaaaaaccggactactctagtagactgacatccgactagaagtcgaaaacttatttaaatctaatatagatctatatctactaaatcaacagtcactttatcacaaactgcaacattctcctgtttacacgtaagcaaagtcttaatttattgagttttgattttctg

SEQ ID NO: 32922 - DNA, 539 bp, Arabidopsis thaliana columbia
ttaacaaatccttattcacaaccacaaacccctttgttgttcatatgatcatataaaatagaaatatgcatacatttcttttttatctttaaatgtcatttgcagatttatatctatttttttctacaattatttattaaaatttaaatgccaaattggtatcaaccactaatttgggtttaaaaacaaatacatatctttgttggatcagaagaatagttgtggtattgaaccgttggattgaaccagaatgtaaagattaaacgagacttcacaaacagaacaaataatatttgttcgggagaattctctaatctatataacaatatcttaaataatttaatttcttaagtctttctaccaatttttttttttacaaccatatttcattaagaaagttcaaaggactactacagagggaagcccaattactacaatgaaaatacaacctaagttttaagaaaacctagatgctgacacgtgttgaagtcttctgcttcatcaagccacgcatcagttgatcgagcgctgctgtgttt

SEQ ID NO: 32923 - DNA, 569 bp, Arabidopsis thaliana columbia
aataaaagttattgttttattaatcttcaattaataaatatattcagtaaaaaaataagacacatataaaaaaaaattgatgtgaatgctaaaatgatagagcaatgaaaaatggtatgccacttctgcatctttggagtcgagaggactgaagtgaaacgcacaaatataaaccactaaaacaaggtcatataacatgtatccatcctttcacatacaacgaggaaggtgatggtgataatagtatggaagaagacattgatatatccatatgactaattggtgtgcatctattgaagattaggatctggttatggagcttttgcctccgaaggtctgaattttattatttcagaagcaaataaagtgttagctttcaaatttgagtctaacaagctcacatcgaatatggcgtcttttcttccggtgaccacagagatagaatcgatacaagatgttatggatcttcaagatcttaaggtcatgatcgttaaagcttacaatacttctttaattgaattatgaagtccattcaaattagtgtgcatgtatagcttttgaagaatgat

SEQ ID NO: 32924 - DNA, 544 bp, Arabidopsis thaliana columbia
atagttaacgcatgaccatcgtcagattgcggaattacgtgtcttgatccaaatggcttacaatttcaaagaaaactcgcattacttttatattacatgccatatatacgatttgcatttatttttacaagtatagtataacatttccaaacaagaactatacaatatacaaatcctgagctaattttctcttaccttgttacccatttcgcagggaagaaaatgttaggaaaataagattgaaaaatcttgaaaatatcaaagattcaaaacatatataaaattgtgtattatctcttacaaaatacttcgtagatccaactaaattaaaatatatatggctgactttctacttttataagcaattcatattggttggtaaaataaaatcaataactattctctgtaactgatagtagtatattatatattaacgcgtaaataattagatgtcaagttaaataaataattatttcgaagagccaaattatttgagagtcaacggtgtgatcacaggaatcgacggatcggagagcccacgcga

SEQ ID NO: 32925 - DNA, 596 bp, Arabidopsis thaliana columbia
gcctaaagacttttggggaggacatttccctcccattagattcgtcaactcaggattctcgattaaattttagcattgaaactcttctttatttgtttcaatgttatttatttggttatcttatataacaagagtaagaacgttattagcagctgattttaaagttaataactgaagagcaagaatctcgactcaaaaaattaccaaataaccaattactagcaagaaccaacttatcttaaaatccaaaaagccattataaggtttgcttaaacgagcattcgtcctccaaacacactggaaagctataataataataatccataaatgtctgagaaaaaacacaaacgatgcagaatataaaaagtaacctaaaggtaaagcaaattccaaaacttgacagagattcttcaacggatccagcatctgttttctctgcaagaaaagaaaatacaatatttatcatctcacacaattgccattccaatgcatcattacagttcaaaaaagagtggcaagagtaatataatgttaccttgtttggtttcatcaacgcctgtcggtttttcctgccctctcttgcctgaaacaaatgt

SEQ ID NO: 32926 - DNA, 809 bp, Arabidopsis thaliana columbia
ctctgccacgtttttggttttggaagtgagtcagttaccaaacacaattcctctttatcagcattagctgccattgactcctttatccatagcttctcttgtacccaatatcttgtatgtggcatgtttttgaacttgaacatccaatttttcggagaaaaactcagcttcctcttcttcagtctttctttctgtggtgacattatatcgagcacttggtatgtcttttgctggttagtgacacatgctgactttggagacaacatatacacttcttaaacacataatatttgtaatttctcttctggatgaatcaataaagcatcaacgccagaactagagtggaaatccttacaaacagctggtgattccttgttaaatcgaatggttggttccaattttgaaactggtacctgtggagttgacaaaatcgcatctgcgacagcgttgctatccacttctatcttcgatgtgttcctctcctcaaagatttcaacgacattatcggaggagtcttctgcaattttctgttgaatagggtttttctcaaccgtaatcgtttcctgaagtgtgtccattgacgaaatgatacagtattacacgtgagagttagcacgtgcgaaacaaagtgggaaaaataaaagaatctgggattgacacgtgacaagcgaggattcgcagatcagaatttgtcgttagtcactataagagcgtgtgtactcgtcactttcttttcatcgaataacctgtaatctttgaatattctagaaccttgtaattgctagaccctctcgcttgagagttagttg

SEQ ID NO: 32927 - DNA, 707 bp, Arabidopsis thaliana columbia
gcaacattgtacccatggaggatttcttggcactttctccatctcttcacctcccaacaatctattcagcttcttgactagagcctcttcatcagattcgtcacacccgaaaaacttttcctgtaaaaagatatacagatataagtactagacaatccttcaatgaacactaataattaatcgtgttttacttaccccttcatcagcatatagagaagcatggattctggcggttgcatcttctagtatagctaccaatttgatatttccgttgatatcacggagttttctgacgtctcggggatacacttgtatgaaccgaacaacacacctgaatttagcagtcacctgcataataagcatcagtaaaacatcaattcaagaaagttttcactatactcttttcctacaacttatgataaatccaaggtttttggatacattacattgtgataggtcaggatgtccatcagagaaacaaatggagcatcgtcatgggcaacccctagaaaagattaaaccataagtattatattaaacgttatgtcaaatttccacaattccaaacaattagctggttattacctgtgatttcagaatgtgaacgactaatgcaacgcgcagattgggttccatctcggtgaaaacttctccccacacattctgaaatggtaagaaagtgtgttttaaactgaagaacaaacgga

SEQ ID NO: 32928 - DNA, 623 bp, Arabidopsis thaliana columbia
catcagatccgctaagagcaataacagaacatatacatatggtgtaggtgcgagaacgaaggtgcatgtgagacgacgaagaactgtgctatttgtgttactgatttcatatgaattgacgactctatcaatggtgttcataagaacaggttgcgaggaattgaaatttaacaaattcaaaatcttttcaatcaaccaaaaatgatatgattaatactataaaataaatcatctgagagagaacccagatttcgtagattaaagatgtaggttaaagatgaagaagaaagcttttaaaactatataattatatttgtttcgtaaggttacctatcaaatacaataggtgagatggttaagtaagggtcttgttcttgtcgcaggttgtgggttcgaatcctacgttcgtcaatcaattttaaaagatgaaaacgacatcgtttaaaggtggctaacggagatgttaacagacgttagataatcagttaacgactgttaacggttagtttttttggtctggtcaacgaatgtttatagtttaacagttggcaacgatacttcatgttaaaatggcgcatgtaagtgaggtataaatggcacaatttgaagttgagtataacgca

SEQ ID NO: 32929 - DNA, 550 bp, Arabidopsis thaliana columbia
cctttaaatgccgtcgtttttatcttttaaaaagaaatgatgactataggattcgaaccgttcaccttcaagtgctcccaatgcttgtcaataccaactaagctagactgtttaatgattactatccaaaaacacgtaattatatattatgctattagatacctcagatccgctaagagcaataacggtgtaggtgcgagaacgaaggtgcatgtgagacgacgaagaactgtgctatttgtgttactgatttcatatgaattgacgaatctatcaatggtgttcataagaacaggttgcgatgaattgaatttaccaaattcgaattcttttcaatcaacgaaaaatgatatgattaatactaaaaaataaatcatctgagagagaacccagatttggaggcggcggctatggtggagatgtttcgtaggttaaagatgaagaagaaaacttttaaaactatataattatatttgtttcgtaaggttccaataaaatataattggtgagatggttaagtaagggtcttgtttttgccgcaggttgtgag

SEQ ID NO: 32930 - DNA, 1045 bp, Arabidopsis thaliana columbia
ggtggatcacgaaacgccaacgaaaccagatggtaaggttcttttctttttctatatttctgaggaatcatatataaccaaaagcacttcttctttgtgtttgttcatcgtgcagaatccgcctctgcatcatctccccgtaggtctgaggaaacgctaaatcagagtacccaaatcaaccaaacggtaaggtttccttctctgttggtattctcttaagtgatcatgaagaatcgtacaacgacttctttgtatttgttcatcatatgtagaatcttgaatcaccaattgttcaatcacaagaatcttccagcttcgaaaatgttttgtgtttgttccagagtcaaatataaccagccgcttgttttgtgtttgttcatctgcagggtccgagatcagtactacatcttcaatcacaagaatcgcatctcagcaattccacaaccacccatgcttcgtcgccttctgtcaatgtgactccaaagccagacttgtcttcattttctaatacaacagcgacgcaagaaccggcaccttctgctggacttcaaattaggacgattgagaaagaccggtcaccgggctctgccttcccaagacataaaagactaccagttttcgatgaggtttgctcgggtgcggtgtttccatggtatggaccgcaagaaccagacttgccttcttcatctggaataggaaccatgtcagcaaacagtcacgatgatgtaagtacaacgttccttgtatgatggacctttttgtttcgaaaaccaacaactcacaacaataagatttactctttgtgtaatcatcctgcagcgtcgcgcctatgaattagcttatcctttaccaagcagagatatacaaagcaaaaaggagctgaggaatgctcacctcaaaactcccacagccactctcaccaacactactaccacaaccatccatggctccaggacatgatcaggatcactctgctttggatgaaaatcttcagtaaagtcgccaagggtcatttgtttcccataaaaacttcatttaggtttgc

SEQ ID NO: 32931 - DNA, 652 bp, Arabidopsis thaliana columbia
atatatctaaactacatgtattgtgtacaccgctagacaaatactcctaaataaccaatgttttaagtagagttttactttacttttagggatataaataggtcttacatgcatatatcatgtgttatattgaataggaaaatgaggtggatgaagagccggcaacatgtccaatatgtctagacgatattatcgcaatagaaaacgtagacggtggaaatggtggagggaaggagaaggaaaccgcggtggtgaagtgcagagtatgcaagaacaaggttcatgatgaatgcatgctggcgtggagaaagagtcgtggacggcggccggccatctgtgtggtatgccgtgcacggtggccagcaaatagatcgagtaagaatcctaatgttggtgataataacgagaactgccacggtaattgttatttgaatttagctccttacgttgatgaggaagtggaggatggggttggcacgagcgaacggccatgttgaggatgttaattagaggattgattgttatgtgattgattaattgttaatactataattttaaacaaggtactgtacatttaacaacaacaatatttttatactaatacaagaatattaaatttacaaaaaaaaaagccatgatgctgaggatttaa

SEQ ID NO: 32932 - DNA, 365 bp, Arabidopsis thaliana columbia
aagcttagtcttgtctttccatgaggttactttgactccaagtactaatcgtatatgcaggccggctttacacatgtgctggaggagctgaggcacatggtctacccaaaatttctttatttataaaagtacatctattatagttagggtcctaaaattttgatatgtcacaagactacagtatgagagctaatgttcttctccagctctaggtcccttattagtctgagccgtccctgcagtatacggtttgtgtaattatgtgcagaactagaaacctctgtctcggtcagaggtaatcatttcaggaaggcctcaatgatgaaatgccaacctcgacaataagagagcgccaatgtgggcca

SEQ ID NO: 32933 - DNA, 754 bp, Arabidopsis thaliana columbia
  unsure (1)..(754): unsure at all n locations
cttttatgttatttgtccgctgttagatcgtttctccaactagacatgtttactgaaatctgagattttcgtttatttttgttttggtcagtttatgttttgagtttagagaaacatatgatccaaggtttttgttcaatacaactatttaatctctctctcgtctctttccaccattcccatgcgcacangatataagcattttcttgttccttaggtgatttaattcttgatcggttactcgtgcggctgtgtttgattgtaaacgtgagtctctctggctattatcgatgttatttacccacatataatgaaaatttacttagatcataattatgaaatctcgcaaagtttctaatttattatatcacttttgctccttactattttaatggaaaaactgtgataattacatgtcaatcactgaatttgaacagtaattataattttctataccgcacaacatatgcttattttggttttgggtactgtcttattagttacatacggtttaggttggcttgtttgtttgttttgtcctagctaatcacgttaatgaaaacgctctaccaaataaccgcgtttagaaaacgctattagttaccgagtgtggttgggaccgagtgaggacgtcacggctccaaccaatccgcaaataaggaagcgcgtgtgtgtaagtagtgggtgaccactttgcctagtcttaaacgttaagtctggaaataccaaaactaccccctggtttggtcgaaga

SEQ ID NO: 32934 - DNA, 471 bp, Arabidopsis thaliana columbia
tttactgaaagtattcttcaacttccctaaaaaatcaattgccacttgtttcggattcttcaattcttcatccacggaggatgtagcaacggggaggtatctcattactcatatgacagaaaagattaatgatattgatgccgctagtattgaacctgaagtagacgagaattctggtcagacaggttctaacaatatagaggctactggtaagaatgcagaagggttgaatggtgtacaagaagcatcaaacagtctaacgagctgcttgttagaaatggtaatcctctgagtagtgtagaatcaaaataagtagcctttgcttttcttagcgtgttatttatttgtgtagggctttagttattatttttccctgtattgagcatcaaccgtgtcactcattttattcgcttgctctgttcttggaactttgtatggctaatgtgtaatgggtatatcaaatctgatagt

SEQ ID NO: 32935 - DNA, 675 bp, Arabidopsis thaliana columbia
cgcttatatttattataaggttttctacaaccacaagaggttacacttacattaagccaaagtactaaaactcttctgtgtctgaaaatggattccggaaggttttggtgctagcctaataatcctagggaaaatcttgtaatcctcgatgttgaaatcgatgagcctttgctggtacagcccgaaaggtgagcctgataacctgaggctaaagatttctgtgttgactttccagtttcccatcaataaacttttggtcaaactgcctccttaagattgaatgttctgacaatttccctggcgtggtcatgttcatggagctcgactagtattctctttaatctgcgggcgagaccagtggtttccgcatcgtccagtcctgagccaagccttttctcgagaattcttctaagtgtcagagtacaatccacaagaggttgcagcggacgactgcaaagtcaaataaaatattttagtatgtatcaaggcaaaggttcaacataacgtccaaatatgagatgcagatatcatgtgaaccaaatgaagataaacaatgaaattgattggtctaagacgaatgagattccaaaaaaaaaacataaagaccatagcctgaccaatactcctaatcttgaaagaattgcccagattttgcaagataaaattatgtaattt

SEQ ID NO: 32936 - DNA, 880 bp, Arabidopsis thaliana columbia
tcgtgtgtaataaacaacttgcaaagtttcttcaaaaaccaaactacttgctaattgcaaaaaaaaaaaatcaaataaatacatccatttgtcacaccattttgtccctctctctcaatcaattcgtcaccgcaacttaaaaacatcggcccaatttgtctttctcgacacaacaacttaggaaataatgggtcacgtttgggccttaattttgggtcacttacggaaaacggtttcggttagctggagatcaacatccaatccgaattcattgttaaataacttttatccttacggaaaacggatcggttagctggagatcaacatcctcctagagactgaatgatctgacaatttcctcagcgtgtccatgttcatggagctcaacaagtattttctttaacctgcgggcgagaccagtggtttccgtatcgaccagtcccgaggcaaacctttttctcgagtattcttccaagtgtcagagtacaatccacaaggggttgcagcagatgactgaaaaatcaaataaaacatgcatgtgagtatgcatcaaagcaaagttgcaacacaaagtggtaatgtcctaatctgagatgtggatatcatggggaacaaatgaagataggttaatgatactttggacgtgcgtagacccgtttttttttgttttgttttaatgtagacacacatcttagtttctcactctcacgttggcaatcgtatcaaaacagtagcttaatttttcatgcagactgattgttataactgaaatgggacatactatgcgacatcacaagctcaatttcacagccctggactatgagtaaccttgatgtgtgcgagtcaaagcaaattttctgatgttactgttcaaagagat

SEQ ID NO: 32937 - DNA, 1249 bp, Arabidopsis thaliana columbia
cctctcagacaaatcttccaacactttctctacaatctcttgcaataactcttctctttgtcctcatgtctccaccaattacactaactatttcaacgcaacaacaacaaacacaacaacttctgtctctcttctctgcactccttccgatttctgccgctacgaggcctctccctctagctccggctacctttctccgacacacttcagttaacttcctcaatcaccgaccaagaaaactctctctctatagtgcgagggtttgtctttggctgcggggctagaaaccgtgcgacgccggaggaagacggtggtggcgtcgacgggagacttagtctaacgactcaccgtttctcgctcctctctcagctacgtctcacaagattttcacactgtctttggccttccgcagccgggtcgcgtaactacatccgtctcggatcagcggcttcgtacggcggcgatatggtgttggttccgatgttaaacatgacggggacggaagcttactcgtatcacgttgctctcttcgggatcagtcttggccaacagaggtataaacatatcactcgtttgatgttttgattatatttttaatttactccattaaacctagctacgactatcccctttgcataatctctcatgagtgtcttaaaaactaaccatagttataattaaagacattttcctttttggatgtcaaaaatatcttctctaagacattaagacaatttagacacttaaaaaggaaaatgtctttaattttaatcttgattagtctatttttaccatggttgatcttggagacatcaatgagaggttatgcaatgtagatgctctaacattttgttggggttaatttgtttaaactttaaaccctagctaacatagctacgtaaacatttgatataatatacgttttaacaacaaatttcatagactcaaacatttgatatttggatttcgattaatagtttgcgttaaaaggtgtttttttttttccaaataaaacctacatattgaacaccattttattaattatttgaataatacttttaaacaagaaaaatattttgtattttaagaaaatggttttctaacgtttcacataaaagataaaaccacaaacgtgcaagttagtatttaaaacaatcaagctcttttttctctaaatgtaaatatccattatattgtttctcatgatctttttttttattagaatgagaagcaatgagagtagtggaat

SEQ ID NO: 32938 - DNA, 1091 bp, Arabidopsis thaliana
tctggaagttttcaaaactaattaatattttttttctaaaaatgatagtaaaaaacccagaaaaagctttaaaataaaaagaaaataaaaaaggcaagggatccgtgattccaaaggattcgctctcaccacgcgcctcagtatccgtcacatctcacgcgttccttctttctctctctatctctctcccctactatataatctcgtgttcccttcttcccattctgcacctctatcccccacttatttcgattttgccactgattcaaaaaaatacgtttcaccgaacacacaaagaaaaacgtaattgccaaagctatggagaagaagttgttggatataactcggactgactcggctgagaaaaagcgagtcagagacgagtcattcgacgaagcggttcttgactcgccggaggtgaagaggttgagagatgatttattcgatgtcctggatgactcggatcctgaaccagtgagtcaagatctcgactcggttatgaaaagtttcgaagacgagttatcaacggtcaccaccacgacggcgcaaggttcctctaccgccggcgaaactcagcctgatctcggatatcttcttgaagcttccgatgatgagcttggtttaccaccacctccatcgatttctccggttcccgtcgcgaaggaggaggtaacgacggagacggtaacggatttggtacgagcgtcttctgattcgtcaggaatcgacgagatttggggatttgaagatcacgtgtcgaattacggtggtttagattttggttccggcgtcggagatggtggagattacgtggctgttgaggggttgtttgaattttccgacgattgttttgactccggcgatctgttttcgtggcggtcggagtcgttaccggcggaataaataaataacaaactttttttttaattaggtgggaaatgaaaacgatatcgttttgttaaagcgtttggctctccctcgcttttttttttaacccgatggttaatatctattaactaaaattattaggatttaggaaaagttaaatattttgtaagggtaatttgctagattagtattatggcaatcat

SEQ ID NO: 32939 - DNA, 970 bp, Arabidopsis thaliana columbia
tttattttcatgatttaaattttaaagggcaatgagactgtttcagcaaatgatacagttacaattccagagggatctatcgacaacgatgtttgtcgttgatgtaattttttttccggtgggtaacacatatttcttgttttaaacgccaggttcaatgttctcagccgacaggtggggtttgccctcctccccaaatgacgttgaagaaagccaggtaatatgcacattttgttctaccacgttataacgttttctttttttttgctattctcagtttatgttttccttctcccttgattaattggaactcttatgtgtccaggttgcctgcgcggtgggagatgtcacggttggcgcagacgagtccgccgagattaaggataatttggttagcagctaaattaccacccataatgctaaattaccacccataatctttgctatttgtaatgactaagtttcggatgattacgatgttaggcgttaaactatatcccatatttgttttgccttaaaattactatggttttcggtttgtgttttaaaatttattatagtgagatagttatgctgttttatattatcttttggagtaatgtggtttataaatattactaagcccaattaatacactgtttttttttattttttatgtctaattttgcctaaagtacatttgattgttgttatgatggttgtttgaagttattttgctttccaaccgcaatttttcaccgtttctctaagtatatttcataaaacatatctcccttgttcagccgtcacaacattttaagttgtactcatatatgtttatgggcgtttgtgtacctttttatttataaaactatttattagatttcccacctttcaagtatacactggaagtatatttgactgtggttatgatggtggttggtagttatttttgtctttcacgtcaattttcaacgtgcctatatggata

SEQ ID NO: 32940 - DNA, 352 bp, Arabidopsis thaliana columbia
gtagcatggttatctattagctgattagatcaaagtcatacttggaacttgcagaaagtgttctgatccttgaatctatacgaagtatttacagttcacattcttgtgcctgttgatggtaattggctttctttaaactaaacaggcaacagagtttcgcagagtcgatcctggctagattggaagagaagtgaatgtaaagatgaagttatatttatgtgttttcatttttccattagagatactcatgagtcactgacttatgttctctatgtttctcaatacaattgtattgttgtgatttgtgaatctctcaataaacataactcacattttgcatcttgttcgtaca

SEQ ID NO: 32941 - DNA, 274 bp, Arabidopsis thaliana columbia
agatcgtcgttggattctgaaactctttaactttgatttctacttaaaaccctaactaatgttttgacgactggaaaaaaaaaaccaaatctcgttcactcttttgtataaatatattgtactgaataaagtgtggaatctgtggacgtaaacgcggaacaaacatagatttgttggtgttgtaaatagcaaagattgttactcagtaatgaatcttcttcgcatatgttctattgtttcgtaagaggattaaggtgccaatagcattagggtt

SEQ ID NO: 32942 - DNA, 561 bp, Arabidopsis thaliana columbia
tcatatatatatgattttgaataaaaagaaaaattcaaaaggagaaaaataggcagcaaaaagctgtcagttattacatacagctaagacttgagtaatgattttgtagttgactatttcatttcccctgtggacacgctcggcttacggttatgaaatcatgcgttggagtttttcttgcttttcccttttctcatgcgtagagttttttttctttctttacaatttgtttaaccatagttttataggtttgtagctatatgagtggttaatttatggtctagctaattggtctttttcttattcagtttttgcattaaatgtagatatcaatactgaaagttgacttttatcaaaaatacataacacagtataagaaaaataacgcttagacaagttattacacatatgcaatgttcaccaaagcaagcaagtacgaaatatacatgcatatgataatacatgtaaacgagataaatcagcatcgtaaagatgaacttggtacacggacacgagccaccacatgggtggtactccttatgcgcgtctccctcaaaatat

SEQ ID NO: 32943 - DNA, 506 bp, Arabidopsis thaliana columbia
tgtaatataataatgatcaagtcttcaaaatggcacaccttaatttctttttgcaaattataaaaattctttatatggtgatcctacgtatctatctaattatctcccaaaactatgggcaagagtcattattaaaatcgacccttggtctagtgagatgctctagagttttaaattcttaaattttttgcctggtctgagttggtgggaagagaggttctagatccaaccctatatcagtgatttcttgattgtttcaatacgttcaatgtggaaatctagtgtaaactttcctcgagcgttcgccgtgggtgtatataaataactcgtgagaatgtgttcatgcacatattcatgagacaggaactcgctgcgcttaaatttgctctaattgttattaccttggtaaataatatattctcggttcgattcgcaattttcaagcacatgggtagcgttgaaagcattcgttcccttgaatttgaagtgaagatcgtggaagctag

SEQ ID NO: 32944 - DNA, 592 bp, Arabidopsis thaliana columbia
  unsure (1)..(592): unsure at all n locations
cgaaaagcaaaataccttctttggatctattctcgaaaaattcgaacagccatcgagaaaattactccctaaagatcatatagatttgagcgagaaagcagacaacacaaatctataaattagaagatccgaacaaaggacgattcttataggcaatctctcggctccaatccgaattcaccaacgttagatctccaggaagcagaaagaacgccgtggaattgaagaattacagaacaaatcgtgatgaattttccgagggatctatgagtcgcggacgtgaaacccacattattttgtgccctaattttttctcagttgataggttggtttgagttacacgaacgacggcaagttttgtcgtttcactctcatctttctatctcttttggttctgtcttaaacccgaacttcggtacactttcataccaacacttctgtttttgttttttttttgtttttaacatcatattttctgtgtaataattaatctcaaaaaagcatgttataattcagttttattaccgacaagaatcgatttggctgcaaataaanaagacaaaataataaataaaccgacattgtgaaaatg

SEQ ID NO: 32945 - DNA, 431 bp, Arabidopsis thaliana columbia
atttgtccaactatataagtaatgtaggaaattgtacacatatttttctcatcgactgagtaatatatgtttgtttttaaaaatttgaatcgcatcaaatgcagaaaaatctaatatttttttaattatatgtattttacatatattcaaaataaattaaatatgagatcaaataaaaagtgaaaaaagaatcatatatttatgtttaaattaggtagagatcgtttaagatattagcaatgaatcgagtgttgtaatgtcccgtccatccttaccagtgagcacccacgtcctctctcagttccgtgagctccacctctgttcgaaggttgggtgttacttctaagtgactttaaagacaagtttaccgaccgtgcaaataaccacatgatttttttctgttttttgccctcacttatatggttttggat

SEQ ID NO: 32946 - DNA, 649 bp, Arabidopsis thaliana columbia
cccatgaatattgatctaatcttgcgataaattaagtggcctgataaattaagtgggctcacttataaatatacaaatccaatggctttgtgtttaaaactcaaattggctccattgctctgttgaatggcgattcgaacagtctcttctcttgttcgcgctctttaccaaacccctaaatctcaatcatttcgcatcttctctacacttctacacgatccaccatcaccagatctagtaaacgagatctcccgcgtcctgagcgaccaccggaaccctaaagacgatctcgaacacactcttgtcgcttactctccccgagtttcgtcaaatctagtcgaacaagtattgaaacgctgcaaaaatctcggctttcctgctcacagattctttctatgggcaagaagaatcccagattttgcacatagcttggaaagttatcacattttggttgagattttgggtagtagcaagcaattcgctttgctttgggactttttaatcgaagctagagagtataattactttgagattagttctaaagtgttttggattgtgtttagagcttatagtagagctaatttacctagtgaagcttgtagagcttttaatcgaatggttgagtttgggattaagccttgtgttgatg

SEQ ID NO: 32947 - DNA, 575 bp, Arabidopsis thaliana columbia
taatagtccatttcaagattggacctgcaaagatcatcgcaaaaccgaacaacgcaagagtgatgccaacatgggtaaggagatccaattttgcataaacataataacaaagagagcattactagctataagatattttttctggaattagggcgaagaaaaaaagtggcataagcacccctcgggacctaacccaacaggaaatcgtcacccaccggtcaaacactgagtcgataacagcgtaactgctgcaaccaaaagaatcttacaagacaatgcatgatatatcttttaaatgatgtaataataaggagtgaagcagtctatgagatggagagtacttaaaagttacagatccaatgtttgtttaacatatgtactctgataaactatgtcattcgatgaaataattacaatgtaagagttgttatcaaaacagagcaaaacatctgaaaaataactagttgacttgtttattcttattcaggataagtttcttattaatcagtttatattgcagtcgctttttccattttcaatttcacaaattttctgttaattctcatacagattgt

SEQ ID NO: 32948 - DNA, 1336 bp, Arabidopsis thaliana columbia
cgcaaaggcttataagtctcctcttgaccgccatcactagtaatcttcttttcagactgatcaacatcaccgattcctcccatcaacactgttctgaccaccaacctcttcattagcctcaatttgattagcaatgggagcatcagataaatgaacatcactatccaaagtatgagtcgtatcctctggaacaggggacttaggtctttcaatagagtttaggtctttctctagttctgaaggctcctctacaacacctttggtaccagacggcacatcttgctcttgcatttcagtatccgccatcatgaagctaattctctgagacatagcatcacaacaacaacgcagaattcaaaatccagaaatcatacatagaaacgcactattgataattccagagagaatgcaagacgcatgtaatcgagaattggaacgcatcaaaactctgagtcctactctctcactgattcgctataattcaaacagtgatggcgactaaagcattagaaagcagagcttcacgaaatcatggagtacatacatagaaacaaaagatacggttaccggtttcgccggaagaagaagacgccggagacggtggagtcgtcgcgggttagggttcgatagcagccggcgaaatggaaggacgccggcggagaaaaagaagcgagaaacggaaagatatcaattaaacggagagatatgcagatcaaaagatttatacggatgatataatgaacacatgaattcattaagaaagaaattaatgcttgttacttgtattaactcttaacgaagatcttaatagcaaaacttattaatgatatttcagaaagttggacttttacgacccatttacataacaaagcccattattgtaaactatgggctcaatatgtaaggtatattatgaatataatcttaggcccaattaaacacggaagacaacgtaggtttctgcttgtctcgattgttgttgtgtttttatttgttactaaagatagagaaagaaatatcgaagcattgtgcgttcatgttcaatatagagtttttgttgtaccaaaaaaatatagtgtttgaatctttaattatagactagctagcatataattaacgtgattaactttacaattatggtgatgatgattttctcagtatgtaggtatagtacttgtcaaagtgacaaataattgcaatttaatgaattggtgtggatccaaaggataacaaatagtatgagcatattcattcgaagcaaaatggtacagaattaagcaaagctttttgtccaaaattctaatgaattaaggaccattatttttagaaccacttc

SEQ ID NO: 32949 - DNA, 466 bp, Arabidopsis thaliana columbia
ttagcatatatgcaccctcaagaacactccatgaacactttagtaaagccattgtgcatgtattcatatttacagcatgagatgtgattcgaagttgcaatgaagaaaagtggaggaagacgataaatatgcccttgttctacctagttcatcactcttgattgttatctggtaatttcgtggctgtttggtgcttaacgaatgtcaaactacagtgaataattgtaatgctgttgttgaccagataaacatgaattttacagtagtctaaaagtggtaatgatcttctcattcaataaattagaacaaatctgtgagagcctgttaattcaagtacaccggattaagacaatgaaaggaaaacacttccacgaacataatcacatgaaacacaaatatcgtattcacatttctatagcatagtaaggaaatgtaacatattgttaacgaagagctgaaggaagag

SEQ ID NO: 32950 - DNA, 591 bp, Arabidopsis thaliana columbia
gttcttcgtgtttatcgtgttgattcttcagcaagaaagagtgatttgtcaagaagatagaagcttggataatcccgcggctaatcgtctctataaccaattcgttttcgacaaaatatcgaatctcaccgaagtttttgaggatgacatcaaaagagagctcggattctgcattaccaatgtgttagtttcaaaatggcattaacctttatcctatagcattgaagatgtttatgttattgtctttgtttcagaaaagaagattataacgaagcctttaatttctctacaaagccagatttcttaaacgcatgtggtaaaaccacaaaaggtatatttatacatcctctgtttcattgacagaagccgaaataatattttaattttgctgatgtttttggtttgagaataggtgacatgatgcagaggatatgtacggctgcagaagtgagaatatacttcaatggattattaggaggtgcaaagagagctactaattacttgaaaccgaacaagaactgcaatctatcttcatggatgtctggatgtgagcctggatgggcttgtcgtactgctaaagatgtgaaagtt

SEQ ID NO: 32951 - DNA, 570 bp, Arabidopsis thaliana columbia
gtttttgttctctatgaattccaagtattaaggatatctcaacagacaggacaaaagtttaaggttaatgatcttttatcaaattcaatcaataatcagtctccgaaatcttagtgtatacaaatggcgaaaaaaatataaacatcattttccaagtacacgaataatgccaagagtggtaaatgatatccatcaagcctcttatcttctcaagaaaaaggttgatgcctttgtttttgaagttttctgcatattgatgtggtccagcacaaaccattgttatccactttatcttttatttttctttaaccccaacgttttctactttagcacttctacttatctctagtaattctccatttatcacttctacttattgtccacttgattcttgagcttcatattgttgaattcgtttctacttttctgccatcttctctttatatgcttaaattgtatatttttacgcttgctgtatagttttttaatgattatctttagtcctaataattggggatttaattgatttttttcctttgtataaaaatatacagtaaagatattaataca

SEQ ID NO: 32952 - DNA, 972 bp, Arabidopsis thaliana columbia
attctttgtaatgatacttttgttacgtgctacttggagctaaaatggcggcaaagagatctatttgagtctacatgtcgattattctagattggttattgttgatttagcttcaggctcggtttagtttctgtatttaagatctcttgtacattcaaagcttaatgaagaattttcacaattctgtttctcaaatgttgaaaatcttttatgcaatacccataagaaacagagtaattaataggaagcaccttgtttgttgtatacgaggagaaatagagaacaaagaagttggtcatgaatatatatagagatagcacaagagtcattacaaccaccaacatggtgaatgcatatgcatataacagtatgatatatttagagagactggtatatatggatcgggtaattaagacttctcgttgtggatcggaggcttacgatgaggctgaggataatccatgactactacttcttcccctgtctcgactccacccaacgcccgcctcctttctccaccattgaagacgtccaaagaagcaaccttgtgatgatgatgcttatgtgaccttaaacgacgagcggcagaggcacatccaacattggaagacaaaagcagaagaatgaaacagaacactatcacgagtccactcctcaaagagcaagacatgacttctcttattcttcttcttgttcttgagatacttgtgtatatatgctgtgtctgtatacagggagatgagactagagcaggacaaagaaagtttgaaatgttgttaattggtgtaagagaagagaagagggaaggagagtatttgtaggcagaagagagtaaagagagtaagacaagcattaaatacaggtggggggaggggccttcattatcatacatgctcttgttcctctctcttttatttctttttaatctctctcttgtctattattcaaatatattttacattcacatacata

SEQ ID NO: 32953 - DNA, 527 bp, Arabidopsis thaliana columbia
gctcctaactaatactaatgcgtcagttgtgcgttatgttttacatgaactgaaaacaccaaaaaaaatctttgaaaagttttgaaacccgatattttaagttgaatagactttgtacttaaatcaacttttaatgataaattggttcatttcttaattattactttacgttttaatcacactttccatgtgagtttttaacaagatacacttaattttcagaaaaatacatcagaaattattactatggcgttacgaatgactcttttgtagaccattaatatggttgttatcgtgagtaaaatatctttagtatcaacttaattattatagaccactaatatggctgttatcgtgagtaaaatatctttagttttcaacttaattaatgaaaagctagtgaattgaaaaagaaattaaaatagaaaactctccaacttgcagaatctaggaactctctttttctcctccttataaggaaccctgccttgctattcattttatagagcaactttcaacactcagta

SEQ ID NO: 32954 - DNA, 241 bp, Arabidopsis thaliana columbia
tgggtaaatggaataatctaaccgacaccatcaaattaacgtcaaatcccaactattataaaaacgctacaaagttatagcatcaataatcttttatataaactgtgttgatctttgtagagggaaacatttttggaattgagatcgatagagattatagtttattgctgaaagagcagatttcgaacttggcatggagaagcgcaagggtatttctgtaaatttacgatttggaagcacg

SEQ ID NO: 32955 - DNA, 589 bp, Arabidopsis thaliana columbia
tgcaaaagacattatactaatcatcgaatatcaccacgacgatcaatttttctatattttatttttaaaatcataatcatcatttatcatcataactatccatttttctttacaaataccgtatcttatttttttggtaaatttctttacacatgttaatactaagatccaataaaacatattgttttggtaactaacccttaaaaatccttaccattggggttgctataactctactccaaactgctataatcttatcacaaagatccaatcaacgaagcattcctttgatcttctgctacggcctagttagtgaattattcttgtttttttttttttggtttttgaaattacagacaaaaaccacatgctgtctaatcttcacatgtgctgtcgatatttatattccatcattatacaaacagtaagaaaaaaaaagaagtagacatcttctgtttgaattttttttcctccggccacaaaaaaacaaaagatgttttcataattttgtctttgtgtttgtctaccattacagagagatcaatgctaaaaatcgtcgggacgtttgagataagcccgcggtgggaaa

SEQ ID NO: 32956 - DNA, 567 bp, Arabidopsis thaliana columbia
ctgtcgtagttaaagtttttaagatagactattaatcctttgactaggaaaatatgagaaaactaggatatattgcaaatttatttgtttaagtatgagaatcggtcaagtgacattattgtctctgcagaatctttgagcgcgatatatagtttgtatccacaccaccacagcaaatagttgagtagaaaaaccaatagaccttgttgacaaaaaaaaaaaaatagagaagtaggagaataaaaatatatcattttttagattcaatgggatctccataatattattgaaaagaagaggtaaaattaaatttatttataatcagaaaactaaacagaacttttttttatctaaatctaagtaaactattctcgagttagatcaatgatatattgtaggacacttttcagattctagccagtaaggcagtaacttgggccaagtctatttaatttataccctgaagccaatcaacacacttgtgagttgtgacaactagtaatttaaattttcccgggaaaattgactcataacagaataactcctaaactaaagtatattatattg

SEQ ID NO: 32957 - DNA, 532 bp, Arabidopsis thaliana columbia
tcatagagctgctgcagatatccatcactgacgcctgtgcatacaagagacttacattatttcaaagtgaaactcgtatgcattcaacttttgcatcaccagttagttaaccactgcctatcatcatgggttctcgtctgcttccctccttggtccaggtatcatatggtcgctcattgttttccagcagaatcattctcagacgcatcttcaagcttctcaattgccatttcattttccttactttgatccataccaaccacaccttggttgtcttcctcacattgttcccctgaaacttcccgaaactctgtctcagctttttccttaccttcaggtttactttccccagaacttcccacaccaaccgattgtttgttcgctttcaattcatccacgctcttgctgttattgttgtgttccttcaccacagcctcattatcccttgccgcaacatcctgcatacaaacatcttctgcagctacatggttctcctttgtttcacactagtacgagcatcagatcccctgta

SEQ ID NO: 32958 - DNA, 491 bp, Arabidopsis thaliana columbia
  unsure (1)..(491): unsure at all n locations
caatgatatcaaagtttccaataaaaatcaaatttaacaataaaaaagagacaattgttgtgatcttttactaatgtttctgcaggtacttgggagtggctgtgatgcatataccatgctttgcggtcttcgctttggtcataaagctgaagaattacttgctgcagcagcgtcacaactcgtgatagttttggtctccccgaattcaagtttcatcttctatttatgagattctttgttcacgagagaataccacacatggaggaaacaatggttcatggtcatggtcaaagtcaaagtcgaagtcattcatctagtttgacaaagtcaaaccctcttgttgagtaagagactatccagaagaaagaagagtaatctccaacactacaacacattaatttaggtcttgtntagtttgtttatgattaaacaagtctcctcaataatgaagtgtcataaataagttatacaatcccttgttgtaaagatgc

SEQ ID NO: 32959 - DNA, 645 bp, Arabidopsis thaliana columbia
gaaacttctcaatcttttcttgtgggttaattattaatgaattcaattgcaaagaggatagagagagaaataatttgtatcgaaaagagagttagagagattaccataacgaaactagaagagacatagtcctcaatttttctaggaggcgtctgaatatgttcaaagtgactgacctgttcaatatcattcatataaaaattacacatatgctctaactaccacaaaggggaaattattttattttttgaaaggaaaaaaagagactaattattggagacaattaggtgataattactcacttatatcttacaacttaaattaaaacttagaaagattcttatggattagaatttcaatcatggatcaggttttaagttgattgtgttagttaagtagtatctaaccttagggctgttgaccggagagctagccgtgtcctccaaagaatcatcctcacaaatctttttggttgttccctcccaaacttcagtttcgccggaaaattaacgggaaaactcttgccggaaaaggcatgggtggcggcgtcagagaccagagaagtagaggtggcaagaagtgaataagaactcttgtcttgatgatcattttctcgatgatgagtagttctatattgatttgaga

SEQ ID NO: 32960 - DNA, 590 bp, Arabidopsis thaliana columbia
gtagattcgaatctgcaaggagttaaattgtacctgctctgtagttgcatatgatccgtagtgcacctctttacgtgacaaagccttcaatgccgtaaagaaggattgaacctgaatctcattgccaatttcccttagcttccacaaaaaaaaaaagggaggtccaataattctagaaagccacctaccttctcaactactgaagtgagcttgaatgtaagatacaatcccgtcataagagaggagaagaggcttccataatccttgttcaaaaagaaacggtaccatacaggggtaggcagtaaagagcgatacagaagcatgaaatattcaaccaaagttagcaattgaccctgcattggaagtgaataaccaaattatgtatcccagagacgccacagtgagccatgccaaatgaaactgaatacagctaaaggggacagagaagaatatttttctacatcacctgtttacgataattccgacccctactgtttttgtagtacatcaacaaaaaacacttgaaaatcattgaggcctgccgacaagtgtatctgaggaatatagggacaagtgagtaagcccaaatg

SEQ ID NO: 32961 - DNA, 879 bp, Arabidopsis thaliana columbia
ggttataattatttcatcggaacatatactcccgaggattgtaccaccggtttaaaaatggccatcaaagcattggctccaagataaattaaatgaagcaacttattataacaatgataagtggaatgattagtgttttcgtacgtagtgttggagttatttgtaacagtttaaaatgttagattaataaatatcttattaaaattcatttgcgttttaattagtagcttttcactttataaataatctaatgatatctagtttatgtgctcaaaacgtaaatattcttaggttatatattttctgttctaaaataaaatctaatgatgtagaatctcgttctttgtaatcaacaaaagtgaaatatttataacaagttcttagattgaatctgtcttaaattatcaaactaaagcaagttttagtctctcttttttttctttcataatattcgttcttaccaaaaacttgtaataaatatcatgggatcgatattttgactctacgatctcacatggaaagacaaaataaatgacgaggaaaacagaaaccggatcaagattcagagaattgtgacttgatccacttggcacacatgcatagatatatagtcacagcatggatagtagtagacatacacatttacacagtaccattgttatgtatatattgaatcttaagaaaggaactgtccagattgaatgatcaggtaagatcaaggaatagatagacacgaacaggatccacgtgttcagcttcagacactctcatatcacatctgtctcctaattgcttccactttgcttcttttaagctctctcgtcttcaagtcttcttctcttgcattttcgttccgtctgctttatctattaaggtttg

SEQ ID NO: 32962 - DNA, 514 bp, Arabidopsis thaliana columbia
cagataaatcattacaagagctcttccaattaaggaaacagtaaaatttactataggtctacttccagtatagaatagcagataaatcattacaagagctcttccaattaaggaaacagtaaaatttactataggtctacttccagttattactcgacatcattgtcactagcttcctataccggagaatatctcagtagattcacttctcaattgagggatgtatcacaaatcatgtgaactaattttgtttggtgttcacaaaacgaagaacaaatggttgtaagacgtaattggggtaagataaacgagtatcctatctaagtacctcgcattgtccaccagtattattacttcaaacgccaataaagggagaaatacaatcttcaagctcacagctggcggcgaatcagctgcatctcacataaattaacataaaatacagaagcttataagttctttgtaatgctatttaatttaacacattaatccaaaaaccaaaagtcctaaagag

SEQ ID NO: 32963 - DNA, 474 bp, Arabidopsis thaliana columbia
ccacttatgtatccatcactagatttcaagtgggtcatcttttgcttcaagatattgttactctaaacctctcaagctcgttaatcatgtgacaagaattgaatgtgaaactaattttcttaatgatttctttagcgactcatggttcttaaacttgtaaatttcatatttgtagccgcattgtcctattttctttttgttgatatgcatatcaaattgaaagacttatagaacattacatatttatttcatcagacagttgagaatccgatagaatatgtctcgcaaaccggaaaacaaacgttaagtccggaaattaaaacccaagaaagaagaaaaaagcagaaaaacaagggataaaatcaaagatgggggataaagttttgaggtttacacaaaagcaaagggaaattaaccggtgaagcttggtggcttgtaggcaatgaaactgatgcactggactttgacgggtgt

SEQ ID NO: 32964 - DNA, 214 bp, Arabidopsis thaliana columbia
aattttacaacaatatacgaaatcataattttaaatctgttgaccattagatattgaattagcaaatcataagtgatatattacaaaaatctcacttgaatattgttgaggaacaattgttatatatagcagctaagattagaactcataatttttataccgagttcaagtctagatacctctaaagtactattaagaacaattattactacta

SEQ ID NO: 32965 - DNA, 459 bp, Arabidopsis thaliana columbia
tgtttgcgtattcattgattcatatttagctttctagtgttctaattaatgcttttcgatgttctctaacttcagccggcagacaaatatccaaatgtgttctcccaagaatctctttttggcaggtgtccattcatactcctctctttaaaagttgtgtagaagggatctaatatggaatctcatgaaataatatgcgaattctgatgcagattccggtatgcattgccttgctttacgatttcagcttttgccttgcttgtgacagtactatgctgcttcatcccggtactctattttctttgagagcgttctgagaaccttgattcattgatgactcttctttattaatatatttcgtacagagttcactcactagtctcctttttttctctgagtaggagacactgcacaatcataagctggacagcttatcacatgatgattcatacgatatac

SEQ ID NO: 32966 - DNA, 575 bp, Arabidopsis thaliana columbia
caggatcccctttttcttttaaaagttaagaaaatgaattaaagttttagtaagttaattaaaagtaaaaatctcatctgatctttctgatttctattaaaatacatatctttattttttttaaaaaggtcttcacatttacataaattcctaattaccaattaagcaccaaaatgcaagaaaacttgagcttcatagacataaattagcattaaggaaaagaaaaaacattagtttttcatccaacgttgatcgagcttttctggaccagcatttgcggataaataaatcccatcacgttttgcaatatatacacgtaactcaccacatcgaggaattggagcacttcctctgtacgctctaaagtgttgagaatacccccttgttgcactaagcaatgccatgttgttctttcaaatgcagcctcgcggaaattaattcgaactgtatcactttggaatttcactgtgcctgtgactcggtttttgttgttcgattcgcagttgactttgagaataataccaggactgaggttgtttcgaaatactattgtgcaatcttcgcaagctttattt

SEQ ID NO: 32967 - DNA, 503 bp, Arabidopsis thaliana columbia
aaaccagccttgtttaggactttcttcaaatggcttaaaccgggaggtaaagttctcatcagcgactactgtagaagccccaaaactccatctgctgagttttcagagtacatcaaacagagaggatatgatctccatgacgttcaagcttatggacaggtttgtcttgttcgtcaaagatatctctttctattctcaaacccatttctctaatcccttcaacactgatcctaaatgtagatgctaaaagacgctggcttcactgatgtgatcgcagaggaccgtactgatcaggtaaatgaatctcatatatacaacaatattgaaaccaaggactagagtccttttaacagagtttctttttgttattgttttgtatttacagtttatgcaagtcctgaaacgtgaattagacagggtggagaaagaaaaggaaaaattcatctccgacttctccaaagtaagtgtctttcaatgtcaaagagatcaaatctttatgttgt

SEQ ID NO: 32968 - DNA, 617 bp, Arabidopsis thaliana columbia
aacttaattaatcatcaatgttctgtgcagcgataagatacaagttttgggatttgagagattcttcttccttcctttggttttttttgtttctcattgttttgtctctgtttcagctagtttacgctctagtactcggcttcttgttgaaagattcaataaagcggaacatccaacgatctaacattcctgttttaaggtatgagataaactatattaggcaaaagattttgaaagattgagtattggaggcaagactgagatgggactaacctgtcaaagcaaatgtaccgcctaatacagcgcaaagacgagtgattaagtggagaaaactacggcgttcttccttgatggtcacagtgataggtgaaagatcatataagaagtaaacagctggaagaaaaaaagatacatcagaaaacagaaagagagtaataagaaccaggtgcatactggaaatgaagtttgatcgactaacctggccatgtacggtcgaattcagtcattggcgtgaaatattcagttacagagtactgatttgttgacagtacgtcttttgaaagatatctatattctgtgggaacaatctgcgccatattagaaagaatttagtgacc

SEQ ID NO: 32969 - DNA, 870 bp, Arabidopsis thaliana
actctagagacttccagttgcaggtcctgttgcagacgctgatgtagaccctgttgcagacgctgatgttggccctgatgcagatgctgacgcaatactagactcaaaggtcgtaaaggcaactaaattcttcaattcttcaccatcatctgaatcaatttcagaatcactcatgatgaatttcttctccttttccttcatcaaattcgcacattcagaacacatatgtctaaaacctttgcactcaaaacatcgcttgcctttagatgacttgtacaatacttctttgtttccatcaaccttaaactcgtgaagagctctatttcgttcattccatgaaaaccgcttcttgaatggcaacctcaatatctccatcaatcttgatttcaaactctgtcttacttcctgaatgatcttctgaacgatctccggaacctcaccctgatctactcgaaacaagactaaatctctatcaagaacctgctctgataccacttgtaagtgcggatgaggtaacaataaagtgcagaaagtaaagagacaagaaatttgttaacgaggttcggtttttcctactccccgggaccacgtccagatttcgatttcactagaacaagaaagcaaattacaaccaattcgcaaacgcgtaaaacaagcacacccctcttgatttaccgctcccttctataaacgtgaaaccttaaggataatctctacccttaactaaactcccctgagtctagatttaatcaggataacctaaccctgagttaaactccttctgagcctagacttcaattctccaagtctctggaataaccttcacgcaccaacaaacaagcttgatcacacaagcaccaaacccgcgaa

SEQ ID NO: 32970 - DNA, 497 bp, Arabidopsis thaliana columbia
caaaatgtctctttgactacattaaaccaaattatatgtttctgtagtttcacttttgcattgtttttctaaccactaaaattgttgactcaaataattttgaatgcaatttattagtatataaaaatattgtagatgtatttataaaaaaaaattaagataatgagtctctcaccaaccaataaagataactataaacactatgatatatattattgtcttgaataattcaaagatgaaaataaaattttaaataaataatctgagaatattaaaatttatattaatcaaaatttgaaaataaatcttactatattcttagaaactttaatgttttatataattaaaagatcttagtttccagattggatcgggacttagttgaccaaaaattgccaaaaaaaaaagaagaacatgttaagagacaatttctcgagttcactagtaactgataaagtgataacggagttggttggaacgtgaacgcttataaaaat

SEQ ID NO: 32971 - DNA, 598 bp, Arabidopsis thaliana columbia
gccagtgtgctttatgttttgcatgtggttatcgttgttttaggtttcgggaattttagattcttaagtatacttgtttatcggcttttctcgttttgatatcatagcaatcgatttcgtgtgttgaattaattttaatctgaattaagattagttattccgtaatatagaattgaagagattggtttttgtaagacagatccatcagctaaatctattattgtcttgatctttgaaattaatatgtaatattttttgtattattaatttcttttaagatttattagtatcattattcattactgatgaacgcatgttattaagattattgaatttaattcaacttttatggctgatttttttaatggtaaattgcacaatatttattgtatgattaaggttacatgacacactttgtattattacagcttcggttattgtttcttgaggattttatatccgtattccagttttgagttatattactctggtttcggtaataactagcttatgtactgttgttgtaggtttttgttctattgttaagatgggagacaaaaacgatgacgaccagaacactgagatatggaagattaag

SEQ ID NO: 32972 - DNA, 409 bp, Arabidopsis thaliana columbia
aatgtaatcttttcgtatatgggatacgacaaagatggtaaagagagacatatcagagagtgtaactaagtttacaacaactcaagcataccaaaagccatcattctacacaggaatacatataaatatccaatacttgacaggaaagctttctttattgtaggccttgtttatagatccttgtttcagaaagccagatatagagagaggaagctctctaagccgaggcattgatcatgaagttatcgacatattctttcctgtaaaatatcagaatttatttctcgtaaaataacagaatttcttgcttgattatatatcccattgtttgcataagagaacaaacaaaaggggaaaacccaggacattgtaccttgcaggaagatggtcgtgtgggcgattgtatggt

SEQ ID NO: 32973 - DNA, 571 bp, Arabidopsis thaliana columbia
cagatcaagaaaactatctacccatcaatgaatttgggatcatctgccttatcttcttctttcccttcttcgttttaaattaatgtttaaatcacagcaaataaactccgctaatttgtttataagtttgtttattcaccttttttctcttagagtttgtaacgggattttcactttattatgtaatgagtgttctaaattgttgataaagagatggtgtgaatgtatgtatataaaactcaaggtcttgtccttaatttgatgtatgaaaaggacaaaaaaacactgcttccatgttgcaaggcaatacggtaacgtagtgcattcactaagttcgttaacgttgtcgtatcgtaacacaaacgtagagatttggctagctacccacgtacaggccatggcaaaactattttgaaaattactatagcattttggtttgtagaaaagagcataaagatatgattaatctagttgcaaaatgaggtagtgaatgaacaatacttgggaataacaaagtattgtaattaatcccttatattcttaatgatcaatcaaagtatatctgcacaaa

SEQ ID NO: 32974 - DNA, 396 bp, Arabidopsis thaliana columbia
atttttgatttgcaacgttggatcatttggtactcacaataattgttttttaaaaaaaatgtccttagtaaaagaaacgaaacagactctaatgtccaatattgccaggcataattttatttttttgccaataactaacatgacttataaaccaagatattataattttatattggatatgaacttattgatttaacattttttaattgtatttatgtggtcgtagatactgaagagtcagaagtacaattctgttgtcatgtgtcgacaagttcctccagcctgattacagaggatactaggctacgaggcaatagggttaatctcatccactaaattttatagtattatagtctattaattatattgaacattaaaactagaagatattttaaa

SEQ ID NO: 32975 - DNA, 552 bp, Arabidopsis thaliana columbia
ccgttttctaaatgggagaaggaattgccaaaaattatctttgaccctcgctttaaggtctgtcaagcctaaagatcgtgacaatattttgatatcttattctattttgaaattccacgtccattgtttctttccttgcatgcgtttgcaacttgcacatttccagttaatgttatttgcgtctatgtcagcattgtaacatccattcgttttgggtgctcaaatagagcacaaattaaagtttcctatagatttcctagctcggtgtagaaagaagtttacatctatattacatttggaaacaagtctttcactttacttatattagagtccataactagtatcctcactgattaattgttctgatgccttgtatgctagctacatgattttctgtagagaaagagtatgcctttggttccttccaatgttagctaagtaaagttttgaggatgttagagccattatgtgatatagtttattcactccacccataatatgttgtgtcgcagaaacttcattcttatttgctaattagaatgttagaggact

SEQ ID NO: 32976 - DNA, 609 bp, Arabidopsis thaliana columbia
cggagcagagaaagagaccttgaggtaggcgcgagaatcaagtaaaagcgacggtgtccgacgaaactcaccattcgatcaccgtcgccgtcatcactgttccgccattgcaaagacctttacgttaaccggaaattagtggagctcggaattaaaccagactggtttaatcagtcttaaaccacaaacatatcatttattcacgaatggccctttaattttaagaaatgtacaattttgacccttggtaacgaaaatttatattttgaccctttcgagccacatttgacatttccacgaagtgatttagtaaaacattaaatggaagaaaaaaaaaggttacaacaggcaaaattggatttaaattaaccatctttaaaagttacatcctcagaacaaagcatggccatgttgtccttcctctaatttcttctgcttcttctttctctttttctccatctttgtatctcctcgtgatgccatacgttttgcttgctgtgaccttatctccaatagcttggcctttgcatctttgaagggagcacagatcttgcatccacatttgctgcaaaacccacagcttcactttaaataccacaaagatgagat

SEQ ID NO: 32977 - DNA, 505 bp, Arabidopsis thaliana columbia
ctagaggatccccattcggccaagtccaccaccgtggagctctgaattcatttctcttgtaattcatcgatcgctgttgaatattttcaatttgagttcccacggtagaaaccattccgatttatacggctacttcatcgctcgagctctctcgtttctgtatcgatcgcagcgtatctgatttgtcaccggtttcaggcttgtttctctgacctctggttatcggctccctgattttgcgctctatctattaatcaatctcttattccaagtctttgttccgctgttatcacagctcatcttcatcttccattcactggtgtctttggtccggcgtcgttgtgctgctttcagttcatcacaggtattctcatttttacctgtttcttttttattgaggatttcgtggatgtgaccagttcaagttttttgtatgttactttgtatagcttttaagactcgattactgagaatttaggcctaatcgtcagctgaaaatataatg

SEQ ID NO: 32978 - DNA, 545 bp, Arabidopsis thaliana columbia
tcggatggcttatttagatcgcagggttgatcctagagatcttcgtttgaagctccaaaagagacatcatgggtctcaaagtgggcgagaagctggttcaggcgtgcgggatttacgggatcagctctctgggacaatgaatcagcaaccaaaaaacagtgacccaccaaaatccaaagcggaggctgctaggccaagtatgaagagcgtacggcttgaaacagagactagaaaaacttccagtcaagctaccaggaagaaatcacagcaggcaatatgattcacttttcttcaactatatttttccatcagtactttattgcttgggagaaaccattcttctgaccggtgcgaaaatgtagttagacacatagcttacgatgtctcttcccttgtatacaggccatccactaatgtttctttgcttgtcatcttctggttcaggctgattcatcggttgatagctttcttgaatcattgggtctcgagaaatattcaacagcggttcaagtgggaagagtatgtaatatcttctattaggttga

SEQ ID NO: 32979 - DNA, 530 bp, Arabidopsis thaliana columbia
aaaacatataagagaaaaaaggaagtaaaatcattttgaaactaaagtgtacgaatatatttatatattagggtaaaatactaaaataagaacaactatatatataaatgtcactataccatgataacaaatgttactgatttataccatgcatggtgttaaaagccggaattcaaactattatattttgagcagtcattacatcacaaattaagactcggtcaagctatatcgctagatataatcaaaagtcttaagtccgtagttaggtttattttacccgatttttattcaaattgcaatatgtggtcgaaacagttgtaaaaaatgggtgctcaccttttaaatcactttttgtttggttacctgacgtaacattagaattatcaagagaacacacaaaggagaagtacaataaaagtgggtagaaactaaaaaaatgatatgggtgaatacgattcgtcaacaataacctaaaatctttggagtaatggattaagaaagtttatgtgtaacgtttcattaggttt

SEQ ID NO: 32980 - DNA, 710 bp, Arabidopsis thaliana columbia
tgtcatgtaagttgagttttgaaggttgttgttcctggaaagtgaaatatacgtaattctttaattccttatgagtttgtaaatgtgcatagacgtccctagaccctaaggctaacattatggagcgattaacaaaaatatggtccttttgtatgcaaatgcaatctctcatctttcatataaatcatgaacgtataattggatgataagttttgagtcttatttgaaatgaaaaaaggatcatcttcctccattgtctggtaatgtcaaaatgttgttgcatgagaaacatacagtgttcatattgggcctaactcgaagttgtttcttttattaattgtcaaaatgttccacgagaaacatcgtaggcccaatatgtagcccaacaagcttcgatttttctaaataagttgtgtgacaagaagaaaaacgagagagttatttattgatgcgccacgtcagatttgatgaaaaggaagatttcgacttggcgctctcgtacgcctgaaaattcgcagtcttccctcgtccccaatccctggagccaaacactgttccattcaaccgccacgtcagcatattcgttttttttattttcgtttttattatttgtttaggcgaattaatttcagaattaaccataaaataataataaggagaaatatataaaccgacgacggacggtgtgtgtcccttcatcagacacaaag

SEQ ID NO: 32981 - DNA, 792 bp, Arabidopsis thaliana columbia
gtggattcaaagtaaaaattgtttcgtttaaatttctgaaacagtagctatttatgttatgcaggaatgttccttcccgtgcagcgcttccaatcattcgtccaacgataggccggtcagagacagttgtagatcgtgggagaaccgcaatgcaaggctacttgagtctctttctagggaacttggacattgtaaactccaaagaggtttgagatttttcactggcgatgactaagacttttctagttgtggtttttagatttcttgcgtcacacttaaaacgtattcacaggtctgcaagttcctagaagtttctagactctcatttgctagagagtacggttccaagatgaaagaagggtatgtcacagtgaagcacttgagggacgtcccaggttctgatggtgtccgatgctgtcttcctacacactgtctcggtttcttcggaactagctggacaaaggtttggtcaaaatcaactcggggtttttgtaaagtttctgaatttttcttgctcagatgaatgattttctgcatttttgaatgttttcaggtttgggcggttctgaaaccaggatttttggcgttactagaagatccattcagcggaaagcttctagatataatggtgttcgacacattggggttgcaaggtactaaagagtcttctgaacaaccgcgtttggctgaacaggtgaaggaacacaacccattgcgttttggctttaaagttactagtggggacgaaccgtgaggctgagacaacgagcagcaggaaagctaaagagtggg

SEQ ID NO: 32982 - DNA, 579 bp, Arabidopsis thaliana columbia
tgaatctgggaaagtgattcaagtgttgatgatcagctcgtctagtggacctggacttttgtttcccaaggtacaaagcaaacgctgtttctacttgcttttacctttgtatggaaacaaagtaacatatccgatgattcatatagggaggatgggagaatgatgagacagtcagggaggctgcagcgagggaagcagtggaagaagcaggagtccgtgggatatattatggtaaaacccttcacgcataccgtgtaagtgcagccctttgttatttgtttaagcctggtgctgagaatgtcgaaaattttggaactttgcaggattttttggggaattatgagttcaagagcaaatcacaccaagatgagtttagcccagaaggtttatgtaaagcggcaatgtacgcgttgtatgtgaaagaagagctagcgacgtggccggaacatgagacgagaacacgtgaatggctgacaattgaagaagcggtagagagttgcaggcacccttggatgaaggacgcattggtggaaggattcctgtaatggcataaggagaagatggttacaggagaggaga

SEQ ID NO: 32983 - DNA, 566 bp, Arabidopsis thaliana columbia
tgaagaagaagttaaccggttggcgatcctcggaaacgcggtcatcataagcggagacatagcgaactggagagagaggaacaggattgaagccgtaatcggaaccaaggcgctggtgaggcggaacgtacagcgaaggaggaagacgattcgtcatcggagccaaattcaaaactctaaactctctctactgtaagtcaaaagtaaactataaagagggagagagatctccgctgcttcttctaacactgaacttgcaactatgccaattttacctaatcgccctccaaaaattttgtaaacttaaaagaagaattacacaatttggttttgcagtcaaacagtaatcagtctttctgagaggaaatatagatttaagaggatgttttcacgttgctcacatacatatatgatatgatcgtgactcgtgactgtctttctttctcagagacaaaacaaaaaagggaaaaaaaaacaaaagacaacaatggtccttaatccttattacgatctctgaaattaacaaatcagtaggtgtaacccttgacaaacattcctttcttggc

SEQ ID NO: 32984 - DNA, 619 bp, Arabidopsis thaliana columbia
agatctatcttattctttatatacgtttgcttcttcctcaaaacctcatccgagtaggtgctggtgcaggtgacgagatcatctttatttagaataattggtgaggacctaaaacgaaataagcgttatcgattgattttagttttgtctctgaatccattttctctgctttgatggaggaagaaaaaactaagcaggtacttatctatattcacaattgggtagttacgtaataaacaagacaccagtgatggaacgaatttagtagagtaagcgagcccgtgatagaacgagtctaaatgtgattcatcgactcattcggagttatggtttgtgggacagtaaatatatatgctgagaaatccactaatctttaagaacttaactataaactctgtatcggatcattctttttattaaggtttgtgctaaagataatcgattctcttggacgattagtagaagggaaaaaatacgcaatggcgcgagagtgtgcgatcgtatgagagttgtaatccacacgtgcggtctccacgtttcaaaaataacgggacattatataatccgtacatgttataataggcattatataatacgtttcaaaaaggaatatagtgta

SEQ ID NO: 32985 - DNA, 556 bp, Arabidopsis thaliana columbia
attccttgaaggcaaatgatttttgacttatcgctagacaaaagaacttaactgaacaaatagattcaaagctttaaacaatttatggatattgtagctatatagattttataactaatagtagcaatcaaagatagagaagttggtcactttacatatatgtttgctcttcaacaaactgttttttaatctctacaacaacgatcatggagattcgcttctaagaaactggaatctatcattggttaagagaccgagcagacccgagccattgaggttagcgtatttcacatcttgaagcggaagttgacttgacaatgcgaaccgttgtgagacagcaaaagaccaaggatcttgcaagatgagttcacgggtggactcatcatacgatgcaaaaagttgtgtcatttcctcgccaaagtctaatcgccgttcttggcaaactgatggcatctactatagcttgtgtggatgactgtttctgagaataagaaccatcacctcttctcttgagacaaacatgaaatccatctacaatatgaactgaattgcttgt

SEQ ID NO: 32986 - DNA, 461 bp, Arabidopsis thaliana columbia
cgcatatgagtacccatgaacatgagagactgatctcttttgtatattaaacgtttttgtagtagtacgtggatttaactaacattgacaaattgcaaaatctagaaataaagctttcgtctttatgattctatttggtctattaattaagcgatccatagttggaaggttaagtatataaaggcgctttgaattcctctgttacaatcatgagtctgagagaaatggaagatgtaaaggtggaaatgaaggtaaggaagaatgagaatgaagcgttggaaacgggtttggcagagagatcgatgttgctgatgaaagctccatctctcgtcgcgagttctctccaatctcattcttttcctgacgatccgtaccgtcctgacgatccgtaccgtcctgacgccaaagtcatcctcggcgtcgatcctctggctcacgaggacgaagggacccaagtatgc

SEQ ID NO: 32987 - DNA, 546 bp, Arabidopsis thaliana columbia
aaagattctcgttttcaagcttcacttcttatgtaaactcttctttttgttgcaatcttatgcttactagtatcttttaaacttttgggaacagactgaagttgaggtggaagatgtcagaaaagcacaacctgatgctattgctcatgcatcagctgaaatcataagccgtttagaagaatctggtgataaaataactgaagcactcaaatctctgtgttggagacataacagtattcaagcagaggtaaatagcttcaacttaactctagaagctctggaatataacaggatatctctgtaggttttggctgtgtacgaatagatgatcgacgtcattcctttttgtttgcaggaagtgaagctgattgggatagattccctaggttttgacctcaggctttgcgcaggagcaaagattgagtcattgcgatttgcattctcgacaagggtacatccgttcttcctttcatgttttaagatcttgttcctgatctatgatattttaagaaaccgtgctgacataataattgatggtattaacat

SEQ ID NO: 32988 - DNA, 552 bp, Arabidopsis thaliana columbia
taattcctttcattccgtagctggcagtttaattcattttccctataatgatgtatggctggccaatgtggcatggtctactggcacataccacggatattgcaattgccaaaccacagtgagtgcaaacagaattgtgtaaaaagagattcaagcggtgcagccttaagagctcgagaaagcctgtgttcgccttttgtaaactctgggagtttagaccctgaaagagattggaaaaaggtgaaacaataccacatagctggattctaacaaatggttctagctgcaaatgcaaaattcatgcatcaaattttagatggtttcaaagtgaataatactacatggtaactcgaattcttgaaccagcaatgataatcaatattcaatgttgtgaaacagaacacaagtttatacatgcatctatgttcacacataatatagtcgaagtatacctcacgaaagagatctttaatcacccgatcaagaactgacggaggagggatgccactgaggtctttaaattttcggagcttggatttccactgtgagaga

SEQ ID NO: 32989 - DNA, 343 bp, Arabidopsis thaliana columbia
gagaatccataataagttaataatcattatattcaataggacaaaacctttgggtgtgtttatattagtctacggattttctgatttgtataacacttttggtatttcagattaatagagtattatggttgaaatatgcattcgtaaaatcttcggaagttttaaggttttgtaactaataatcatatatagaatcccaatttgaagaatcggttcttcacgttggttttattgattcgataaaaagaagtttttttaagaatcaatgcgacaatgcgttgtcgttccacgagcaaggagtcccaaatctgcgatatgtttctttcaaatagcctctgagcta

SEQ ID NO: 32990 - DNA, 584 bp, Arabidopsis thaliana columbia
gcaacagtttctcactgtacgagtaggaatccatggatagctcggtaaaagagttgtctccataacataggagggtggtgaaagtttctctaagtagtagcattgttgtaacaacaatttcttgtatcaaaagtgaataggattattttgaccctcaaggtcaggtcagataggtatcgttatgttgtgttaagttgaagcttggactccctcgggaagatgatttgagggagttggatctgtaactgagaagaggaggcaactaaagacatggttaacttgggatcacaaaaggtacaagctagaatataaacatttaagccgataataatggtctcatcctaaaagaagggagcttggggcagttgaactgatatcctttgtgctaaaaagttcttcagacaaaagccgagatgagcttgcgaataggaatcgagataagaaagtacaataccaaactagactacatgattcaacgctataatgatgtcataagtcaatcacacaaagaataaaaaaatcgaataaaataattgagaatcaaaggaaatacattggagatgtgcaaagtatttgtagagagt

SEQ ID NO: 32991 - DNA, 494 bp, Arabidopsis thaliana columbia
gttagatttattaatttaaatatttaaaattacgcgcgaaaggcgaaacttctatataatatcaaaaaattcaaaactatgtaatttctttctatttttctccaaaaatttaaaactcttcaagtcacaataaattcatttatgataaaatcttcaagaaattatattcatagtcttatcttttttgttttcttcattcatagtcttatctactttactcatttatgcatataaaataagaaaatgcagtccttagtacttaatcttcagtttgaaagtcattaacgtttaatcatagtcaagtttcgtctttaacaggtttgactatttgtttccctaatcttcttcgttttaggctttaataaaagattagtgtccacttaacagttacgtccgtcgtcttcttcgtccattcatcgaaagcttggttttgaattttcttaagtttttgaaatcgtaacggagattgaaggtaagagacatagcgagaagag

SEQ ID NO: 32992 - DNA, 1034 bp, Arabidopsis thaliana columbia
tcagtgatggaggtgtcaaatttctgaagaaagttcgtagtggggtatgttgctaaataagaaaaaaatctgctgtaatctgcagttgataaccttttgacactttgatatactaatttttatttttgtttcaggtgtacatccaagcatcagaccagaagtttggccgttccttcttggagtgtaagaatcagcatcttgtcacttttccttgttttttgtatacttttatgagttttatctttttcggctaccattgggggttttctgttcggccttatgttcatactcatgcatggtctattgatattagctttttctttggggatattgatgttatgtaggtttaaggttgaataaacagtgcatcagtaaagcattcattaactaggagatcagagagttgccttaatgtttttctatcaagagatttataagattagtcctagtttcgccataccaaactccaccagccgtcgccctacattccattaacttgataatgaaacctgtgcaagttatttgtagtctttatcatctcgacacattgtaaccttatgctacttacctctcacaggtatgacttaaagagcaacaaagaagaaagagactccattcgacagctgaaactgtatgtttgcttatacttattgagagtttaatggcttctcaactttctaccaaatgttacgtttcccatttatctctgttctcctaggtggcagctggttattaacttgctcaatgtgttgataaaactaggaataagaagtagtagtttggaactcctacactgagatttcgagtcagtttgtaagtaacgtcttttatatctgtaaatcctgcaggacggaatatgaaaacctgcggagacagtgtcgcgagattcatgaacgctatgaaaatgtctgcgactcaaaggagacagctcagagcagcaacactgaagacagtcaggttcttgaatcccatgatattgaggaagtcgagagttcacaagaaccatcaccgtagatgaacagagaagttgatct

SEQ ID NO: 32993 - DNA, 161 bp, Arabidopsis thaliana columbia
ccgcttgtcatggtaacgaattcgattttactgtgtgtaaacaacaatttggacttcagcttcagttcttttaaacttaaggaaacttttcactaaagggttttgctctctctctcaggattaatagaataatagtcatagtttttggtgaaacagtaaat

SEQ ID NO: 32994 - DNA, 613 bp, Arabidopsis thaliana columbia
ccttctcttatgtcttctgctatgaatgcatcatctgattagctcctcgttagcatgttgatgatcaccttaagcctgctatgaccgcattgaaggatttgtggaacttatttctacgagaaaccaggtgcttcttttgctaaacgcagtgtttttgttatgcaaattcagattttattgtgcaatgtaatatgcatgttatggtcaaggatactttgagcatgcatctcaacaaggctacatacacgttaaccttacagtatgcattgtcatggcaggtctagttatctcttggaggtaaactcagcaacatttacatggtcaatcatagtcacaggttacactctctaaaacaaatacttgtgcttacaaccaaaatcctactttccattccctaacaaatttaattttcatacattttcctgacaccaatttagaagaaactcactattccatcttctgagcaacctctttgtcagccgagcacattgtttcttcttaaatccagagtcctttgggtttcatgccacagaatcctgagtaacatacagcttttctctcatccctgtggcattggatgatcatgcgaatatggtggatctcatctgatgag

SEQ ID NO: 32995 - DNA, 462 bp, Arabidopsis thaliana columbia
gctgggaaagtgtgcaaactttcgggaatccgctgttctacaatcccgaatcgcatagcagtgacatatacaagcgtgccggttttcccaggttaaagggtaattccgtcccgttaatgcccccgtgacctcctctggcgtgaagattccgtggtattcgggattcgggaaccacgacgattcgatccagggcatcctgccttctgactggggactgctgaagacgatgtacatcagtgatcgcaaaatcaccggtttcgccagtgacaacgacaccaaggcctacctccaggcggctcagggaaacggaccagtcgccctgtccaacgatactgtgtcgctgactcgacagattaccgcggacgaacgtcgcgtgccctatacccccttcgaattcatcaaggctcatttgcgtgacggcgcaatggttcgggccgcacggtcatggtttcacgaggatga

SEQ ID NO: 32996 - DNA, 449 bp, Arabidopsis thaliana columbia
tttctactttggggcccttcatctcgcatgacaaacattaatgcaaagaaagagaaagaaagagagagctaacgtgcaacattgcttttgaatttgaattctggagaggaagagaaacattgcaagtcttaattgcatctacataatcagcaaaatcaatcgaagtctctcctacaacaccagattttgtagatccctgcaaaaacaaaactaatcagaaaagtaatctcagaaatctcttcataactctgagaaagtttaattttcctcaccgtcgttgacataactagatgatagattctctgattaaccttccctgttttcacatcctgaagaaacttcaccgtctcatacaccggagattcccacgacaatgtccgtcgagcaccatagccttctctgccttccgcgtcgacttcccaacatctccgggaactacagagattgtt

SEQ ID NO: 32997 - DNA, 571 bp, Arabidopsis thaliana columbia
cgaagaaacggtgctaaaatgttggtgttcatgtgtgcagatagaatggttaactgctggagaatgcattgctggaatgcatgaagtggttgttacgagcaagacgaaggatgccatcacattagcaaaggaacaaaaccgaagcctatggagagtttcctcgactgtaagtcttagccagtctcttgataagtttcctgacaagctcgactctgttggcttatctgaaagatttgtgtttgcctgtcttgcagttgtttgcccacattgcctctgatgcggactgaaacctttgggacatttcgcagaatcatctttggcaagtaaatatccggcgatacccgcacgatgagtatgttgaacaagaactctcggtcatcaatctcaaaggaaataagggatcttcatagtttcagtgttcagccgtgaaccagttgcattcatgggtcgacaaatgtttcctacttcctgctgattctgaagttttgaaatctgtgctgttgttaaagcaactgatgttgatggactcagaatttggttgaatttaggacttgtatttgtttcagttgac

SEQ ID NO: 32998 - DNA, 452 bp, Arabidopsis thaliana columbia
tatttgttagaaaaatgaaataaactcctatgtgtatattgaaagttgaaaaaaaaaaaagagaaatccacttccttgctctcttattgttgtttataggtaacctaatgtgtatgagtcattcttgaagtggtcaaagtggactagagaaggggacaagaccattttattagtctaagaaatagaattgtcgagagagcaagtacacatttgatatattatctgatgtgttctctttgtctttttttctatcaacatgctctcttttttttttttaaattatcagaaggtctttttgttattccaatcaatgtgactaagtatttcggacttggaaaatcttcaactattatatcttattgggttttacaatggttcaaatgtcaaaagaaaaaaaaacttttttgttatccacaactacaagttttccttagaactttataaaaatgaaa

SEQ ID NO: 32999 - DNA, 431 bp, Arabidopsis thaliana columbia
tcgtggcctttcatgcgtttcaaaacttgggtcgagagagagagtggaagaggaagaagagaaaggaatgaaccagtgactgcaaaatgggtcggtataacgcttgtagatgacgaagggtttaggcggtagtagtattcttgtgaaaactgcccggtagtaactcgctcggtccggtgttcgtgctctcgtgacttgtgtcgtctcgacactacccctgcttgagagaaacaactagacgttgcccatagtgtggcagccgggaatcgtgcccgggatcgcactgaccacgacgtcccatacgatccgctatactaccaccacttccgtaggattccaatgccactagcacattatttaccaatggatgccgtcttatcatctatctgtttccctaacatgggtgacacaagtggatacaatattgtcat

SEQ ID NO: 33000 - DNA, 626 bp, Arabidopsis thaliana columbia
  unsure (1)..(626): unsure at all n locations
ctactatatgtgaagactactatctcacactttccttatccccctcactcccccttatacccctcccctctaacgctctcccctagggcatcgattatccatccaactctcatctttcgcaactctcgtagctgcagtgtttctcctgcgtctttgtattcacttttcaagtatttcacattcagttttcgttttactcctttatcatttcttttatcatgttttcaatgattgctttgctatgtcttcgattctgtctgtcttcgttttaatcctttatcatttgtgttatcatgttttcaattgttgatttgctattgtcgttgattatgtgtgagtagtgaattgtatttctgaggaagggatagtgtagttgtggtttacttggtcgttttagttggttgagtttagaatantagaatctcttgtggattagttgngattagtgattgtttatttatgattaattggaatatgaatcgagatattatcgcgctgaaaaggtgtatgacggaatgttggatctattaattgaagagatantcgcttatagatgaaggtattggatgtgtagagagggtattgggtttaataagttgattttatattgcttgttagttagagat

SEQ ID NO: 33001 - DNA, 625 bp, Arabidopsis thaliana columbia
tccgaaagccaaaagcattaagagaacaatcgttaacataaacaacataaacagaaccagcatcaatgtcgaccatttcctcgcttgaaatcgcgagtgtctcagtttcgccatcaacaaagatccacccgagatgttgtacacaacgacaaatagaactcgatcgaatcagagaatcccaaaaacccctcgagatgcagaaactaataaagagatatcaaatttctatttcactcataaatgatttttccttctaataaggattctttctctgtcttttttctttaatctctgttctgttctaacgctgcatctgtaaatgacatttgtacccttatttacgtgatgatgtggcgatatttacggtggtcggtggttgagaaaatagggatgatttcgtcattttattgttgggaattggttttgtttcctagcacaatgttttagttattacacatgagatcaccaatgggcttattgttgattactacatttccataaaaactatagtgtcatctttgactataaggcccattagctgaaagtggtttctagtagcacattgtgctataatagtaagagattattattagctgtccttagattagttttaagatttttttta

SEQ ID NO: 33002 - DNA, 521 bp, Arabidopsis thaliana columbia
atctggtttctttatgtattgtgtaggaatttatagccaaagcaataacactacctggggagggagagataatggacatgatggccgtggcggatcctgatgctgttcatgctgttagaaagtttgtacgaaagcagcttgcatctgaacttaaggaggagcttcctaaagatagtatgtcttcttctctctacatagtggatctttcgggaatggggaccaaagtcatacccgccgaagtgaagacgttgtttttatataaaattgttcgctgcttattcactgaaacttttcaactaattttttgtgcaggtcgagaacaataggagcacagaagcttatgtctttgaccactcaaacatggcgaggcgtgctttgaagaatacagctctaggtttgtgtccagagccatcctttaatagaaggagatgctctcagctctagtcactaacttgactttgttttgctttgttaaaatactccagcttatcttgcatctctcgaagatccagcatatatgg

SEQ ID NO: 33003 - DNA, 500 bp, Arabidopsis thaliana columbia
ttttgcgattagcttttccgccaaaaaatgctatataaccagaggcttagagtgagaataaaacaagagagaaatcaaacacaacaatttgccgcttgtaaatgtgatcgtagccttggaggacttataacttagggtgcatgggagaatgttagtggacgaatacgggagcgttgacacgtttggtagttattattatgttgtgtaagtaagactttttctggaagctagatcgtttcatcatcccatattcaatacaaactttatatattactaatacgaattctttcgggctttacaggcctaaacagttcttaagacttgttcactaaattatatattaaagtacaatggctctttaaatatcaacttgtaacagatttgcttggacgtcttcttcctctctgaaaaatctttagcactaatttgaaatcctcgaatagttggtcggcgatgagagagcaagtgttagcattgagtgacacggcggctgcgaggat

SEQ ID NO: 33004 - DNA, 612 bp, Arabidopsis thaliana columbia
tcacaagaaattaactaggactgttgttaatcagttgttgttttttaataaaaaaatgtattagtcgaacttagagtaataattagacaaaacattaaacgaaatatttcccattatgttactagtattttattcggcggcgatgcatgccctgtcatacttacattttgggaccacattcaaaatcatttttccaggtctcatttagtaacttaccattcaaagtttaacttaaatctgataactaacaaatttagtatactagccgacaaagaaaaaaaaaacaaattgattagtataatactagccgacaaaaaaaagattgactgaatatatgatgatctctcttattctttaaatttttttataaaaaaaatctcactcagttgatagatcacacacaccaccaatgtttactggtagcttttaaatagaaactattttctaacaatagcttattcctctatatacaacaatcaacatttgcctacccaaaaaaaaataaaaaacaatcaacatttgattcagaaaatatctatattcaaaatgtctactgggcctgggggagtctttttctgtatgtgtacctttttttttacaatacaggttgcg

SEQ ID NO: 33005 - DNA, 518 bp, Arabidopsis thaliana columbia
ttttctcaacaagttcgaatttatttgtgtaaaaatcgacacaaaatatctaaatttttgactcagtttctttacttccacttttgtactcagtttagtgtatgtaatgaatcctctgtttaatccgctgtttgtgttacttatgctttgactcttttagtttctgtattgctcactgcctcactctttgcatctaattcttgtgtcttttttttgggttcaaattcttgtactatttgactatgccttatttacctgaaaaggttcttgtaagtgtctattaggaagaagatccaaacgtttgactaaatagtacttgtttacttttagcactgagtgaaatgatattattatgagcaatgctattataattgtatccattctcatagaccgatcatttaagccggcttcacgatactgaatcatagtgtggagattttttaagtcagactgtaatacatgaacaaatcattaggagatgagaatgttgattaggttaaatgtattacctcgggaga

SEQ ID NO: 33006 - DNA, 401 bp, Arabidopsis thaliana columbia
tttgtgaatcaaatcaaatcaattctccagttttgatcattggctattttcaatttacttttcttctccaactatctcaaagagacaacaagcactccattttgaccaaatgctttctctttatttaagttgtgctagtagtctaatgatatagtactattagatgaaggtgtatgatcaatttttttttccaataaactttcgcttgattatcgccattttgattagttttagtttcggccttaagcctaccggcgacaaatctaatatttaccgattaattcataaaaatatcgtataaacactcctcacgaaaattctgttacatcttaaatcgtctaaatgtgtcctaatatcgtcttgcacattttgaacatctcaccaactaatataatataatg

SEQ ID NO: 33007 - DNA, 469 bp, Arabidopsis thaliana columbia
tcaaaaatatttatagttaaccccaaaactattatgaattatcccaaaactattatgaaattgtaaatcatgcccctggaaaagggggcaaccgtggatacagctaataatttggtagggtggaccattttcccacatgtaaatgttttaaaatatgctgtcacttttcataaattcccatgcatataaaaaaagaagaagcaaaagtcagaaaactatataataacatgatgtaattgaatttaaccgtaatcacccaactaatcaatgtcgtgttgagagttaattaattattacgtcgaccgaatccgacataaggtgtggccaaaaccaaatctttacgtaccacagttttttttttaaacacgtttttgtttttacatcactattttttaaaaaaggacatgaaaatactattcacgagaaacagaaaaatacctactacacctagccactactatctatcgca

SEQ ID NO: 33008 - DNA, 566 bp, Arabidopsis thaliana columbia
acaaagacttagggttcaagccatcgactagatggtcaagtcaagaccagagaccatacaaaaacagagacccatgaaatgtacaaaggacccaagagtgaaagagaaacaaaaagaaaaccaaaaaactatacatattacatgaagctttacacagactctagccttgttgttaccacatagagaggaagctttcagattccatcaacggagtgtttgtttcatgttaccattaagcagagacataagcccgccaccatgaactctttcctcaggaatcataaagtcaaatatgttcctcattgctgccactactattgttgtttgtttcgatatcgggtctctcggtgtttgagaagcttaaggatttcattgatggaggcacaagaacctgcattggtatcatcagcttctgtcttttctcgggttgatgatgcaacggtggcagcgggcgatcaatggagtccatgcaatcagagaccgcactgactccagattgagaatgatcagtggtagtagtagtagtagttgcagttgttgtggcttgtaaagaagtagagacaagg

SEQ ID NO: 33009 - DNA, 491 bp, Arabidopsis thaliana columbia
tttaaatactgacgcaaccaagggaaaaaagatacataaactttttaatttatcgactatttccacaatctataatttaagaatcgttacgtgatttttcgttgtcgacgtcacatgatttatatttagataattcattatgtgtacacataagcatgactacttcttcaaacaaacacaaaggcaaatacaatgtacggacgcaactaacaaaaaataaaatacagatgtgaggttataatttggtcttgagtcttctttaattttattaaatttaaaattaatactacatagtatcattataattatgagttcttcaatgacataagattactaaggggaaattaaattaaattattaaaaaaaagagtatttaatttggtgaaaaatacgagataataacgtgaaacagagggactcatgggataaataaaaaggaaggaagagatctccgtcacacacacataaacactccacacgctctgcttcgt

SEQ ID NO: 33010 - DNA, 528 bp, Arabidopsis thaliana columbia
tgccaatgttggtgactggagataactctcttcaataatactgtaatgttcacttttatcagtcaagaaataaaaatagaagagttgaaaaaaattaactggtgacagcaaagaaatgaaaagtaaaggagagagagaagggcgttgaacccaaagcaaaacggtactgatcccaagtccctgacggtatcctacagaactcaccatttgtcaccttcctcactggtcaatgctttaatttgacctaacaagtgataagtcttgcatgcaactgcaattgttgccagccttctatttttgtttcctttcaatactctctcatgttcttgtgtttggaattgaagatcaagtataatttttcacttgaatttgcataaggaagaattcattaaaaggtatggaatacttgtctatatatataatctgcatcttgattaaaaacataatagtaagaatcatataacaaaaagaagccaaacaattttccctaattgcactgtatttgagtagagagacgatatatatgat

SEQ ID NO: 33011 - DNA, 434 bp, Arabidopsis thaliana columbia
  unsure (1)..(434): unsure at all n locations
gcatcacaaccattaacagtaatatttaaaaagaactctaaatactacacttaaattaagcataaataatcattgaactatttaaagtcaatataattatataaccaaggtcatcaggatatacctaggctggaaataatattgccttgtccgtgttgggtgctagctcttgtggcttccttgtccggtcgctggtccgcgtccttcgtgcctgcgcggtgaaaggtaaagatgagtgtgcgctggccggggcggggcggtcctctgttcggtggggcgtgcggtgcgtcgttgggcgtccgtgggttggnagtcaaggtgtgggttgtgtcgctgggcttcggtgtgtggcgttnagggggccttggtcactgcgcttccaaggcgttgggngtgaaggttgggtgttgtttccctctcggcgntgctgcggg

SEQ ID NO: 33012 - DNA, 1299 bp, Arabidopsis thaliana columbia
tgcgatcagccatctcaattaagctctgaactagcggtaatcgaaaatatctctttaggttgaacccgacctatgcaaatttggtggaactggtgaaaacagtggaaacatcttaaaccatccgaaattaacagaatctagtattacaataattaatgatgaactataatattaaagaattacacacaaaggtaaacaaaaaaatgaaaataagaaaaaaataaacaaaacataagcaaaacgtaattaaaaaaatagcaaacaaatgaagaaaaataattataagttcaaattcaagatcttaaaaaaaaatagatgattaattaattttaaggaatttaaattttaaaattttagatttattattttaggtttagtttttagggtttaaggattatttttttagggtttactatttagttttgaaggtttaaagttcaatacagtattaaacttgtggtattttcagaaaaaaaaacacacaaattttttaaggtattattggaacaaaaactcattaaaatggtatttatgagaatggccctgtcattaatgataacaattgttttgaaatttaattaaatcgtattatttgatcaatcgtatttttgggacaaacgtggtttacctcttctctctccttctgaagtcgccatctgaaaactcttttctcccaccgacgccggcctcacgccgtgtggtcggaaatttcttttgatgcccaagaagaagaagaagcccctccgtgggctggtccctggtacttctaagttcggtgccgtcttagcgcgtgcttcagctcccctcgccgtcaaaggtcgttcttcttttcctccgacctctcctctgcccctggttgtctctccagcgattcctgcctcagatccgtcgcctcttagtgcagatctgtcccagattgttgcctcgttagtcgtgcaaagctcagttacgccttgtccctctgaaattgctcgcccctctgatgatatctccgcctccggtgttgagacgtcagtttcctcagctgttaacaagttgttgacggttgtcacaaatgcccaatcgactgtcgtttcgacggacttggccatatcctctcaggagaagctcgtgactgaggtagtcaccgctcctgcccctcctctcccgtgtgttgtggaagtagaagcaccgactccgggtagaattgtgagtgctactgtggagcaggtttctgttccagcaactgaaccaaaatcccctagatccgattcttgggttgatttagtgaaggggtctcaaagaaactctctaaaaaag

SEQ ID NO: 33013 - DNA, 427 bp, Arabidopsis thaliana columbia
cacatcattgttgcactcttatagtattagaaaaatacacacgaagctttaaatattaacgcaaatgcgtatgtcacagttttgattatctttagacgttaaaactgaggctcgtaattactaatcgtaatcatatgatcgatcattgcgaattcactgcaatgatatcgatagggactctaatttctccgaagaaattagattacgtcataatttcgtcaatgattatgaggatagggcatgaaaatcatattgcagaatctcgagaaagagcttcgaaagttgggtggtgcgtaagatcttatgggctacccatgtggaaatgacgtggcgcacatattctctagcagcccaaaaccacccactccagcgatcacacagtgtgcgtagtgacccccgcacgtgcattcccacttacatatagatt

SEQ ID NO: 33014 - DNA, 548 bp, Arabidopsis thaliana columbia
tgtgctctaaagctttagactccagcaggatattaccagtgggatactgtgttggtcaagcaagtctgaagacgtcgattttgttgcggtcactttcatgatcatggactgttgagagatgttggcaggaaccggacctagcgcaatggggatttcccgcctgcccccatgccactgcagtcgttcctggcataagatcttcgtctcctggcgggcaggatgaagtgtcacaagtaaatccacatcttgtgagaggaattcatcgcccaaatccgttgtgatgcagaccagtgcggaggcggagacagagctggccttctgcttctgcagacggggcgtctttaggaaacgaatgtaataaaccatccccgctgattgtctgggacctatgaaacaggtctaagatgtagtggatgaaagtattccaatgcatgctgctgtgtatcttgtaggggctgactaagacggtggcatcgctgccttatcgggaacttcatcctcaggctcgtctcaggttccgtccctagttgtccctcatctacagactg

SEQ ID NO: 33015 - DNA, 539 bp, Arabidopsis thaliana columbia
caagcatagcagcagaaaatacaaagtttggtaaggtttgttcgaattctttccattaccgaatttaaatacacattattttagtctcttaggatatttgtattacctaatcgtctttttgttggaattgtcgaccgaaaaaaactgaacataaacgtcaatttctcgactttataataattatctcaattatctttaaactttatgataattaattttgatgaatataactcaaatcaaagctatgacaaaagagagttgctatcaagcgaaacccactcgagacggttccgattctgtgttttggtgcatgttgagattattctggggcggtgacaaaccaattaaaaagctatggttaattggttatataactctaggtaacaggcagtggttttatctttagctcgtgaatggagaagaaaagtaagtagctcattttaaaaacatgctgacgatgcatggttccacgtcatccaccaaaaaccggaaaaacgcgtgaacgtgacaaaaccgatgagcgaagatcctctgtgtga

SEQ ID NO: 33016 - DNA, 497 bp, Arabidopsis thaliana columbia
gtatttcccatttccaactttcacaagcaaataccaccattttccagcttgtctaacaagttattaaaataaaaataaaaaattcccccaaaaaaatcatgtgtcaattgaaccttctcttaggcatgaccgtatgaccaaagtttggttcggattttaaaagatcaagatttgacaattctataaaaaaaaaatttgggtgtaaatgtcatttgtctagagtatggttaagatactagaacctttttctttacaagttcaaaattcagaattaaaaaaatgtaagattttcagagtttgtggacatcaaattatcaggtaatatggatagtttgtgaaaattgcaatatctatctatacaactaatcattgtgaaacatacatttaggactagggagttagatactgttgtgttgccgagactcaaactcaagaactggtcagatgtactgagtaaagttgtatatagtcaactagtacatatttgaacattatac

SEQ ID NO: 33017 - DNA, 575 bp, Arabidopsis thaliana columbia
  unsure (1)..(575): unsure at all n locations
aactctaaatttttgttaaataagcagttgggtattctttggaaaccctttgctgcttcaatagcttcttcaatgcttagaggtttctgaataaatttcccattgcacttcgtacatctggacatcagctgatttccgctgatctttagctggaaagtctctatcacctgcgaacgttatttgtttcagtaattcacaaaaaatccgtaatcattctactgaatgtaagaaaagtggttgcacagtgagtggacgaggttattttggctcggtgaatccaagcatgccataattacaggtagtgtagaaaatgttccacccagaaagtaaggttaaaaataaatttgttaactagtgtcttgagagatcctattctttaaagcaaaatttccagggtatgtgtcctttttgattaataaatctagtaaaccaaatcatgccacatcacagatcttgcataacagcttatacgttgaaaattaactttgtttgtacctcaagtagctgctcatttttaagaagactctttactcgatatatttgatgctttgcaaatcctggtgcncaacaatttt

SEQ ID NO: 33018 - DNA, 543 bp, Arabidopsis thaliana columbia
ttttcttctctttctcattgttaagaagactaagcaaatcagtcaattctttgctcaaaacaattggttgatgcatagattgagacacaactgaaaccatgttcgaatgattcatcggattttgaacattcgtaaaaacaggagtgtttggtacaaaattcgatgacctaacaggataattcggagttagggttcttgaattcggaacccaatcaggtaacgaatctaaagagagattgtcatcaagcttacgataaggtaatggaagaggaacaatttggggattagggtttccataaccagcaacaaagggtttctgataattgttggtgttagaatcattgttacgtaatgcaaaacttgaattagaagcaatcacatcaacaccgcaattgttatatgattgagaagaaaccctagacacgttattattattactaccatgatgatgatacagaggattatgaccagatcggaattgctgttgcgcttgtgatctgaaacgtttttgcggcggcgcgtaacggttcgtctcctcttgat

SEQ ID NO: 33019 - DNA, 1072 bp, Arabidopsis thaliana columbia
tgaacattcgtaaaatcaggtgtgtttggtacaaaattcgatgacctaacaggataattcggagttgaatttggaacccattgaggcaacgaatctaaaggatcaagcttacgataaggtaatggaagaggaacaatttggggattagggtttccataaacaacaaagggtttctgataattgttggtgttagaatcattgttaggtaaagcaaaacttgaattagaagcaatcacatcaacaccgtaattgttatatgactgagaagaaaccctagacacgttattattagtattactaccataatgatacagaggattatgaccagatcggaattgctgttgcagttgcgatctgaaacgtttttgcggcggcgcgtaacggttcctctcctcttgataacatccgattccgccaccgtaaccgcgattgtcgtttcgtctcttcatcgttgttccagcgtttgcgtttctctgagcagagaaggatccgtttgatgccatcttcgcgattcaacaacaagttatgagttaccagagatcgatcgcagaaagacaaaagaaaccctaaatttggattggggtgatcgcgttgagaattttagaaattgaaacgattgaaaaataaaacgaatctgaagaggcaggaagataggtttctctataaataaacgtttatgtgattatgtcggttgataaagtaaaccgcgtgaatcgcgcgttgtcacatgttttgggccacgctttataggcccaatattttaatgggcctgtttaatggggcttctggaatatagtcgttgttccgctctattttgaagaaggaagctatggattctaagaaggcactagagcttgtaaagcatggagctacgcttctctttctcgatgttcctcagcatacgcttgttggaatcgatactcaggtttgttaactacttcttcaaagtttaaagcttttatcgaatttgaacttttatcaaattcctcaaatgtcatttagtaatgttctggtctctggtctctgtgatatcctgttagtagcaccatggaactgtataaaccgtaagtga

SEQ ID NO: 33020 - DNA, 619 bp, Arabidopsis thaliana columbia
acaaactatgacactgagtaacgttgaaattcgatgtaggctttaaacttagaagtagacaaacctgagtatcgattccgaccagtgtatattgaggaacatcgagaaatagaagtgtagctccatgcttcacaagctctagtgccttctcagaatccatagcttccttcttcttcgtcttcactaatctagcgtcgaattcaataaagaacagcaaaatacagagcggaacaacgagtagattccagaaggcccaatttaacaggcccattaacaaactgggcctataaaccgtggcccaaaacacgtgacaacgcgcgattcacgcggtttactttatcaaccgacataaacgtttatttatagagaaacctatcttcgcgtctcttcagattcgttttacttttcaatcgtttcaatttctaaaattctcctctctcaacgcaatcaccaaatccaaatttagggtttctatactctttctgcgatcgatctctgaaaactcataactgttgtttaatcgtgaagatggcatcaaacggatctttctctgcgccgagaaacgcaaacgctagaacaacgatgaagagaagacgcgacaatcgcggttacggtggcg

SEQ ID NO: 33021 - DNA, 438 bp, Arabidopsis thaliana columbia
gtaactatatatacctacatttccattatgttaaccccatctgcagataatttgaatggctcatttcgtttccacgttacaaatgctaaatttatgctgtggttcaaaggctagtttgtaaattcaggtttcaagctgactctctcagtttttctccttttttggttaggatccatccgtgtgtccacaaacgattaactctggagatgaacttcttgagaagatgtcaagcagatctttggaagaagtaatgacaccgtcggtagttgccatgaacctcaaactaaacctgtctcctgtgcctgacaagtgagtctatctttagatgtggttacatgcgaaaactgaattgactataactttgatttgctcgtctatctaatattggcaagcttctcaaaacgcagtctttacatgtgcagaagaatattatggaca

SEQ ID NO: 33022 - DNA, 455 bp, Arabidopsis thaliana columbia
caatgatatgtaagccgcatttagcatatgaaaacttcagaagatagagtgactagactaccaaagcaaaatataaaaactgagtacagatgagaacgcatgccttctgctccacaaagagtatcaagttcatcttctggtggaataaccccacttacagcaatgtttaacaatgcagatgtatcatcatcccatggagtatatccaggcaggttatttatttgagtaggaaaggacatggaaacgtgaagcgacatttgagctgcagatttgagttgaaatcagattgattacatgttactccatctgtcaacccaaagtaatatctattacaatagaactaaccatttttcgatgccttttgaggatatggatgagcagctttgcgcttaggcctagggggtggaacatgtgctaaagtcccatttttttggagctttagaaagtatttttgg

SEQ ID NO: 33023 - DNA, 518 bp, Arabidopsis thaliana columbia
gctttactaaaaaaacaaagaattcaatcccaaacccataattgataattcaattcattactatcaaaacatgtgagcctataagggggatgagatcaaccaataatcgatattaatcggtcatacggtgagcataaaactgaccagaggggacgagactcgagagtggagggagacagagaagcgtgcatccgccttcgtagagagagtttggggttttgtgttttcgctattcacaagcagagtgagagaccgtaaattaaatgggtaagttttgggctgtcttttattttccacatttgggctttaagttttaagtttccactatggaaaccaatcaaaggcttctacatgggctttgttgtcatcagcttctctgcggctttcatgcttacttgtttactagcacaacattgcatgcacctattgcagagatgcctaaggtgtcaatggtggataagaatagtggataggacataataattattttaacagaaaagagcatttacactttgggg

SEQ ID NO: 33024 - DNA, 607 bp, Arabidopsis thaliana columbia
ccggccttcgtcgtcgccgttttttggcgcttctttcacggtttatccatgtcgtgctttgtcgtaccgttgatttctccgttttcagcggccatcgtcattagatgtggagctgttgctcctactttaattagcatctcatagaacattcgaggatgcttagatctggaagtgttgccttggccctgtttattctagtttaataccggtttcataccgactatgctttggtttctgttgcttgtgaaaatgatccttctcgaaggtctcaaaggcttcctctggactccccttcaattcgtatttctgtattgacgcgatgtctagatcttccgtctgtgacatagtgaatgaataaagaaagagtctgtttctttcagtagtttaaggatgcgttttgtaacttcggaattagtttggactcggccacttgtgtatttctaagttcttagtattcgatctttggcttgtttggggtacctttccttcaagctttaggattttagtagttgagactcttgcagattttaggattgactggattgcactcatggctccgctgtgtcgcgaagtgtaaaggttcctaggatggaggttaagtgagaga

SEQ ID NO: 33025 - DNA, 440 bp, Arabidopsis thaliana columbia
gagacttattggctttttttttgctctatctctctcttttcataaatgaaaatttaataaaaatgtgagaaacagagtacatttcgacattactagtaatggattaagacaacattagatctaaaaagtaatgttaagatgctatcatattgtgtagtcactttcaaatattgtcaactacaaatgcctagttattttgttatttgtcaaatgtattttacatctcttaatattatgatttgggttctttgcacggaagatacataaggagtcaatttttaaatactcaagaaagtagtacacaatggagttagcaaaaaaacaagtactttatttcatttcattaatagtagaacatggttcatctatataatagataaggtgactgaaaaatcactgcaaagttgatatttatgcgaatcagaacagcaaaagacata

SEQ ID NO: 33026 - DNA, 551 bp, Arabidopsis thaliana columbia
ttttttttatgtataagaacctgcaaagttgaatgaaaaattcttggggaaatttttgtaagtcaaatttttgacgtgagtgagggattgtgatcgtgctctgtttcagtctctaaagaagattgatgattctggattacattatcatgggaggagcttgttcaaggaagagagatcaacaagttgaggatattttaaacagaggtgtctctggaaaatatagcaagagttcaagttcgaaatggttagctacttcgctctctaggtctggctccgatgttaaacggaagaatggagaatgcccgtcgcttatggagctctgtgtccgcaagatacaggaggtatattgtttccacttaccaggctctaattagtgtataaacgctagcctaatgtttgaactctgtttcattgcaggacattgatagatataccaagttctctgacctacctagagatatcagtcagcagatttttgatgaattggtttattcacagaggttaactttaaagtctcttgaggcatttcgggactgtgcaatccaggtaaa

SEQ ID NO: 33027 - DNA, 587 bp, Arabidopsis thaliana columbia
catacggtaaatatactcttgggtaataatgaaaacggatattgattattaagcttccctttttaacatccagtcaaagacatcatacttggccttctactccgtagttttcctcttcttcttacccttgtccatcatctccatcttagccttcttcttaagttcagccttcttcatcctctcaactccaatagctaatataaagtataaacaaggaaattaatgagaggttataattttgcaggcaaaaagcaagagcaaatttacgtacttggatgtccacttccagtaggctttaattttctgcctgctggcggcacaacaaaataaactacaatcttccatccatctgcggtacgtccacttagttccagcgccttgtctacacatccttttcccataatatcaactcgagctttactgtaaaattcaacagaaacaagtttttttttgttagaaatttattaacttgagataatatgtgggtcaaaagtcacaactggacgaagccacaaacctttcgtgacagcacaagtttccgtggaccaaaacacttatactggtgacgttccacatgaagagaaatg

SEQ ID NO: 33028 - DNA, 605 bp, Arabidopsis thaliana columbia
ggttgttgtatgcagtgaataagcaaaataaaagacaagtaactaaaatagacgataagcaataagagagaagtgttaggtctttgggggtttctccggatatcatggttcaaaataaaggtatagatcccaatttaggtgataatatggttagtttttttacttcccaattctcgttaggtgaaagccggctattctcactatacctcgccactcagttgcccacacggctaggaggtgctaacatagtttcgagatacagatgaaagcattaagttcaagtttgattctagtccataagtccctatcacttggcgggtgagcaacgattatagttctttattcagttgagatagttcaagcaattatacaagattttgccaagtataaaatacctaagatcaagtacaagttggcgtttcagacatacctgcattaagattaaattcaactagaaagaatagtgtaacgatcaagcaaaaccatagaaaccaccaacctaaatcagatctaaagtccccatgaattcgcctttgaaacccctcagacccgactagagatctctcgctcatggcaaaggagcgtaatcaaagttgggttgagta

SEQ ID NO: 33029 - DNA, 473 bp, Arabidopsis thaliana columbia
gattctacaggtggaagtccaaccggtagtccctctgcgggtggcccaagtggaagtgcaagtgaaagctcgatggaaggtggaactttcggaggccaatctatgggaggacaagccggcagtgctagctatcaatctaccaactatcaaaagacacactcaaaatccgcaggcaaaagctccgtcagccattcctcggaagagaaaagctccgacagcgccaatgcggactcgtagatttagacccagaggtcaaaaacctattaatactattatgtcaataaagagatggccctgcttagttacagcagcgagctgtagaatgttttgctttaagactattaattacatacactcaatactagagaattatattcacgcatattgcatggatataaaattaactccctttttccttttggtaaaatatgaatacaagaaattttggatatatacatgatacattttttttt

SEQ ID NO: 33030 - DNA, 845 bp, Arabidopsis thaliana columbia
atatctccatacaactttgtcatctcaatgtgaggacatctacataggtggaagatgattagatgaagcggtaaagcttaagagggttgcctactattccggttgtagcgatatgttcatcaattttgctctggtactagtgcggccgtgtaaatcttcaagactaatctggatgaagtccactatagatgttgtgtccgaatttttattacttaatcgaaagagtaaagtgaaggaaggtggtcgtaataacaaggtcgatgattaaatattaagaatgtcacacaccaaagatatgagatatgaactaagctaagaatcgtttagtttttgttgatattctcaagactaaatatgaatgacagtacttaagataactgaaactaaactacgtgttgcgaacaaaaacaagatggttgaataaacacatgcaagttaaaatagtaagtgagttaagaaattaaacaatctactattataaacctaaatctagaaaaaaaaaaaaaaaggaacgcaactaacggtctttttcgcataatagtgcaaaaaatcgagataaatcatttagacaaaacatatttatgtttaaagcaagcgttcaaatttgcacaagcttggagtccaaattccatattgtaggcttctctaggtaaacctctcaaggctctatcactcagtgcaggacttaaagaacaagtaagatttatgtaggaaatgaaggccaagtcagttttttggtataagaacgtgtagttggggtctgctttcatagttggtgttcttcttgtaatattgtgttttaagaccttgtcatgttcatgttcttgccattcacattttgggtt

SEQ ID NO: 33031 - DNA, 584 bp, Arabidopsis thaliana columbia
taccagaaaaataaaaattgaatatctattgatttttaattccatttataattcaatactgagttagttttatggtaatattatttaaaataagttaaacaaaatataaaaaaaaaatgtgaagaaccaatatcaacattttgaagcttttatttggatttaattcattaatttttatattttaaaagctttagaatagttctaaatttatagcttatacattgattaggcctagaattggtttttatattattccaagttcaacctcctttaaattagggtttaaggctataaataataagtactgtttcattccccgggttaataatcaggcgcggtatagaccaccgtaacagaaaacagaaacagaaactcctgtctctatcaaatgcaaaatttataagataaaatagaataagtggctgggtctttagctagggtttaatagtgcgttgcagcttccgctctctttctctcctttcttttcacacagccgcaaaggtctcatcttcttcttcatcacacaatctctcttcccgacagacacacggattgttgattccctggatttggggtgaatggag

SEQ ID NO: 33032 - DNA, 597 bp, Arabidopsis thaliana columbia
tgaaaattaatactttaatagattaaaaaaaaattaacaacatatcatgcgtgaggggatggtgggtttattttataaaaatgcaaatgttttattaaaactaaaacaacaacacattctagtttctacaacatatatcatcccgtaattcagagctaaacataactctcagttttgctcataatgaaataattttgctagtaaaacagaaaatatctatgtttcataaaccatcgtttatcgttatcgttttcacacaggttagaaaactatttgaatttatataaatgttcatactttgattagttttagattttttttttttttaagtgtatgttagtaaaagtcatcctttttcttttctttttgataaaagttgttaaagtgatttagcgacgaagcactttgataccatatcgaattaaattacagaagaaaaacgttttacttattctattattcaattcaactaagagggtttcattttggttacacattacactggttagttaattgctactcaaatttgataataacatggtttacttaaacgaacactctttaactacaggaataataaacaaagattgaggagtg

SEQ ID NO: 33033 - DNA, 871 bp, Arabidopsis thaliana columbia
tttggagtaactgatgcgtaaaaattgtacccttggcttatttcatcatttgttactgtttttggggttaggaatatgttggtgttcttactcttatccttgtatgttcggttactcagattaaggagtttgaaatgtattgttaactcttggaacattgtttcttttatcttttgtttgtcatcaaagccctgcaattgggctgcagcgaatggacttatgactatagtggagtatcgtagcagtgaaggagtggtaagatgacaacaaccccttgctaaattctcggtgttctatcgatggaaacgattgaacatgaataaaagagagattattgaggctttgttttcctgagcaggatatcaacgctcttaacgatgagaacaatgctcctctacattgggcatgcttgaatggccatgtcgaggtaaccgttactcatgtccgcgattaaacatgttttgtttcgccggttttactaagtggaaagctactcacaggtggtaaagagattgatcttggctggagcaagtctaagtcttttgaatcggtttgtctcttgaatctttcctctaaatctatccaagaaactaagctgaaccagtttaagcttgaaattttgtaggtacgagagaactccaatggatgaagctattggtgcggagaagatggagattatagatgctattaacacaactgttgcccaaatggaacttgaaaataccagtatgacatgacttttcagacaacttcatcctcagcatcctaaatgttttctctctgtctctctgaattaaagatgagtttttgtattgtgggattgttgatttgatacctagtctagttgttagactggaacatatgaatcaaa

SEQ ID NO: 33034 - DNA, 586 bp, Arabidopsis thaliana columbia
taccaagttctatcgtaaatgtcctaaactaccctttaatgcggttcatgtgaaagccctttaacaagggcccaaatgtatattagcccatttctataatataatgtactctcttatttcacaaatactttttgtttccttaatccttatgagttacatgttgcactaaaacctctataaattaatacttgtgtaatctttttttttttttctatgcatacttgtggaatcttacttgctgcactaaagaatttcacaaaatctatttttagttttggtaatcatatacgcctaataattaaaagttcatctattatcattgatgaatgccagtgaaggagactctaccaaagccaagatgcccaatctgatacaactctaaccaaactctctctgcttccactctcgcacttattctcgtctcttcctcttcttttaacgacgccgttttggcttcctctttggtcaaactcccgtctctttccaccacaaaccgatggtcatcgaactctccatctccatctccgccaccgcaacatccaccactcaccatctcggccgacctcctgtggtggtgatggtgatg

SEQ ID NO: 33035 - DNA, 1000 bp, Arabidopsis thaliana columbia
  unsure (1)..(1000): unsure at all n locations
caaaaaaagttacaagttgaacacaaactgcataaattaggaacaaagctcgagagtgattcgaaaaatcaaacccaaaagtaatacggataatcaagccgctactcattcggaaccacgaaattacaaacaaaactttgaacataacttaaaataaccaccgaagtttaagaaaaaatgctaccaccaaacaaaataatgtgaaaaccacactcgcagtcaacagaaagcgcggaaagaacagtagatgcagaactacaaaagctcacaagcagtcttcgaggcaaatgtaaatcgcgaaaaaggaccccaaatacgacgaataacaagaagaaaaaatcacatataagaatcaaaaattgtagccatgtaatcttcatcctaaagagtctaaatttagaactttgcatgcccacaaaaggttagcctttacataccaagtaagaccacatgagaaaactgcttattcaactaaaccaaggagtaaggacggtggaaggagcaacctaaacttctaataaacggtagactccagatacaaacaaaaactaatgaaacatacacaaaaccttgagaaaggactagcttcaagggctggtcagaaaacccaagagcggaaacatacataaagttatgttgtgagtcttctttttgaaaatcccaaatatgcaatcattgtttaaggcttcttttcataaagctctcagtcccaagaggttatgaccaatactcaatgttgaatgggataaatagcccataagcgaggacttgcacaccgcacgctatagcagagggtgcgcttggagtagaagaagttgtacacatgctgcttgaatatactttgtcgtgtttgtttgtacacactgagtgaaaaccagagcgattcatgtagttgtgacttgtgacataacaaaaagagaagaccagataatccttcattagaaaataaagatccaatcagagtcanagagatgagtttaagaacattctacagtaagaa

SEQ ID NO: 33036 - DNA, 493 bp, Arabidopsis thaliana columbia
actctgtgccacacaatctctggttcaatggtggtacggagatggcggagaaggcaaatccggcaagttctgacacctatttaaccggaggactgaaattttgcatctttttctgctcacgtagctctcgccaatgggggagacgaagcagggtggctcaaaaaggttcgggctttctctcaaatgtgttgtgggttgtgttcagaggaagacaaaattgacggatttgatttggtgacaaaagaaaagtaacgcttgaagagctaaaattgaaccaaacaggaataaagtctttgtgtctttcaatgattcacgagaaatttgataggagttcatgtttctttgttccaattttggattcttctgttaaattgtttcattttgattctgttttgggaatgtgtgctcttcaccaccatttacggtctttgtattcttctgcaacgtttattatttagagtctcacttctcctagactcctactttgagtttt

SEQ ID NO: 33037 - DNA, 481 bp, Arabidopsis thaliana columbia
ccagcactagcactttcaccaccagtttcagctgaaccaccagaagcagcttcaccactttcaccaccggttttagctgaggcaccggaagcagctccagcaccagaagcagctccaccactagcactttcaccaccggtttcagccgaaccaccagaagtgtcagcggcagagctccaccactagcggtttcaccagcagcagcacctccactatcggcactagcagcacctccactatcggcaccagcagcacctccactatcggcaccagcagcatctccactatcggcagttgctgcacttccactctccccagctgctccagcagaagaggaatcaccacccattgaactttctcctccggcagaaccatcagttgtacttccactagggccaccagcagtgcttccactaccatcatcacttggatatgatggactacctgccgaacttccactatcaccagtggtgtctccata

SEQ ID NO: 33038 - DNA, 564 bp, Arabidopsis thaliana columbia
tcaaagtgacaagttcccttgggttttgaattttttttgtttggaatctatttgggctaactaggtgtttgcttacaagtacaggataatactgaagattgcgatgaaactgaactttataaaataaaagcggagatttcatgcgaaaatgggatagcttcgtcttctggagtccaattcagcggctttctagagaaaattgattctgtcctctgtagaaattttagtatatgttcagaatctggaagtcagcttggtggaattcaagagagtgatattccaatatctcctgaacggtcctttgatttgtcacctgaagccagtctacctgaggtatccagcagcaacaaaaatccaagaaaaagagtgaaaagagtcgaaaggaatcctctacctttgaatgagaatgaaatacagtctactcaagtaaaggttgatcctttggctgattgcgtcatggaggacaatgacgagaaaaatcctgttacctcaaagcagataccggtcaaaagagaggtagaacccatggtgaactcttgatgaaatgactagatctgtgaactg

SEQ ID NO: 33039 - DNA, 452 bp, Arabidopsis thaliana columbia
ctagtaacggccgataagagatgtgtctttgtgaaaaatacaaaatatagtcgttaagcaataatttgttcaaatgaacaagatcctgcaccccaaatgctgggaaccaatgaagctaaagacgatgaacttcatttttcttacttcaatatgagaaattagacagaagaaaaagtgatctacatagatattgtctcagccaataaaaatcaaccatgaacagatgaacttgaatatttttttattttacatacataagaactataaaaagtagtgtaaaatctatccatacaaccaaactgctatttaatttgtagatattttgttagaagacatcaaacactacaattacataaagccgaataagcctcaaacttcggtataaattacttacgtgtaaccaaagacaagtttggtaaatttatcttttcaaacgatcgacaattgcagta

SEQ ID NO: 33040 - DNA, 571 bp, Arabidopsis thaliana columbia
tcgcctcatatctgctcacaactcacaaggaattcccttagttacacaattttaaaataaatataccgttacacaaaatacacaaaaatggcaaacttgtgtacacttgttggttttcttgtcatcatcttcttcaatgtgtttgcacctgcctcttctgccagtcaccccgtcgaatggtcgctcgggaaagactatagctcgttggctaccggaaagtccttcgcggtcggcgataccatcggtatgtacatatacgttgtctgtcctatacgtagtctgaaattgtttcaaccactaatacatgcttttgattttacatgtaaatttttttacatttgttttaaaaaaatgattttttgataatattgtgttgtaaagtacgtataatctgtttgtgtttgccattaacaaaatgcttttatactttgcttgcaaacgaacaatttcgaagtcatagttgtaatatagatctatatgaatgtgtcattatgttgcatatagtgtcaactacggtgcgggtccacggtggacgaatgagcgaaagtgactcaagagttgccattgggga

SEQ ID NO: 33041 - DNA, 537 bp, Arabidopsis thaliana columbia
aatgttgtcttttatgataccctttgttcttctggtttgcaaacatttgtttttaatctcttcttctaaactgactccatcaaataaacctagagctggcaactattaaggctataataatcgagttgattgattgaagagtttaatttagccacattaactgttactactcaatattaatttgcaccgtggaagccaaacattttcaagactattgatagaaaatacgaaacactcacaaatacgaaaaaatgtggtaataaactattatcgaatccatagtagccaatatttgtttttcttgcctacggctacaaattaatcccttgaactaaaataacaaacgaaaatttttttaacaaaaaaacaaacgaaatatttatgaccgtccaatctttcgtttataaaaagttgttctactctctactcttgacttttgtcggtcacgaccgtttaactgcgaaaccattgcatatcttcttctgaaattcaaatcacagtacccaaatgcaaaaactcttctgggttttcaaaaag

SEQ ID NO: 33042 - DNA, 305 bp, Arabidopsis thaliana columbia
tttatattccgtagtctcttcatcgtacctgtacctgcacgcatattgtgtaatcaaacacatagccagaattgagctgataatcgaaattatgaacacatgaataaagatattagtaatgggttttgcaaaagtctaaactcatcccaagtagatgttaccatttgccggttgttgcgtacagtaaagtccattgttcgggtcataatagtaaccaaggctgctgctgtagtagtacctgcaaaaccatttatagaatacttttagataaataaaattgagattcataattgaatattgctagc

SEQ ID NO: 33043 - DNA, 438 bp, Arabidopsis thaliana columbia
attcaggttctgcatatacataactaccatatctatggattaaatccttgaactaaaaatgaaaattgaaaataatcttataggctctctagagtttgaatataagatcaaggaaatataaaagcacttctcttattaactttagaaaataactcaaaaccaaagatccccaatctctctcttaaaattcttaaaggtataccacacctaagactaatcctaagactaatcctaatcacattaggaatatgtttagataactcctaaacatataacctttagagaactcctaatgattccacattatctctcttctaattaataacttatcactcaagttatcttcaagtttaaaccaacatcctcccccgttaagcttgaaatcttcctttggcacatcttgaactccaatgagatcctcatttctccgaacttgac

SEQ ID NO: 33044 - DNA, 569 bp, Arabidopsis thaliana columbia
ggatcacaaaacaaaaccatgagctctgaagtcaatctcaccagtcaccatgactcacttactacgtgtatctgtcttttttacatatattttgaaagtttcatcctttatcccgatggatgcgaataatacaaataacctaacaaaactcgaatcagagaattccagatattacttacataagacaattttagcaattagctttcaaatctcatctctttattctctctctctatctcttctcctcaagaaccctaaaaatctccagaaaaaagatcccaaatttcgtatttcaacgatctgaatctctctctctttcgggtttatgttgtttcccgatatggtttagaatttgtgatttaaatggaagctgacgtgtcaatttcctgaaaaaacccttatcgcgaaattttccagattaccaaaaaaaaaaagattgaaacttttttggatttgtttgaagaagaagcacggtaggaacgacgacgatgaatcgtgctttggcctacttttatatgtttggactgtttctgtgtagcttcaagcaagtttatttgatgaggaataac

SEQ ID NO: 33045 - DNA, 550 bp, Arabidopsis thaliana columbia
gagttggttcgacaactcgaggtatatttcgagcctcatattcgtgccaatataagacattcgatacatggttcatttgttgatggtacgtactctaaaaatgatgttataggaatatgaaccggagtttgatgagataacatcaaaattggtttgggatgaagtggaccggataagttatgtaccgggttcggaggtagctaccgctacgtaaggatgtattatggggagtttattttttggtaaaagcagtgtacagcggaaattaagttgtttaacatcagaaggtaagggcggaaagaagacaaaagaaagtattggggtcgttttgataaacattattttgtaggggtggtttaaatgtgtgaagtggataaaccatgtgggtaactgctaaccgcgtatataccaaaccctatcactccccacttgtctttgtacattttggtttaatggaaaaaaaggatagggctattttcaagaaatgacaaaacgatccttttcttttggttattttctgattttaccataacttctagtttttactttt

SEQ ID NO: 33046 - DNA, 543 bp, Arabidopsis thaliana columbia
cagagtaaatgggatgcgacaattggtgcttctcgaaagctcaggttctggacagttggtcctgttcgtagtctaagattcggtaatgattatcagaagaacttgaagagtgtaggaacagcagcctcgactactaatgacgaactgcatcaattcatcagtagtgatgcagattgcatgacaagcaaagcaaggaagctgtgtccagaattgatcaaagataaggaagataacgaaaaagaaagtgaaagaattgcttcagaatcttcttcagcttacgctaagatcacagacattggtcaaagaaaggttcttcacattgatcaaagaaaggttcgtcacattggtcaaagaagtgtttaggctagacattgctacactaattgatgtatagattgaacaaatgcagaaatgaatttttggaccagtgttatagagttgcttgaaactgaaatttatctttcgtgtatggctttatctcctgaaatgacagctccgagcgaaatgcagcactaaacttaagaggacaaaagcaatattttg

SEQ ID NO: 33047 - DNA, 356 bp, Arabidopsis thaliana columbia
cctctttacctgtggatttggctgatttggtatgtttactaatgctggttttggggtgtttgcaaaagctgttgcaaaatttgctgtccacgcacttgcctgagtattttgtttaagcattggtatttgcctctatatgtgtgaatatataatgatgctgttgtccttgccgcgtcttgttatgttgttgcctgttcgccggttggattcccgcgtctttgtccgtggagcgttgtccttgcgttgacttgatcgcctggtgtctttgcttgtgtcttcggctgggtcgctggttccgtgttttctgtgtcttgtcttctggttgcgttggcgtgtctcgctggtcttgccggtgt

SEQ ID NO: 33048 - DNA, 564 bp, Arabidopsis thaliana columbia
agaggatccctaacgtgactagtgttgtgttgcttttgaattgcggattgtgcaagcgacggggaatttaggaaagagaagatgggagtttatgatacatggggtttgattgtttcgacggtatcttgcttttttgtccggtttgatcttgaatatgttacattacactgcagtatactgttgaagatatgattgatgcttcttttgttgaagctcatgttatatagaatatagaataatagttgaacgattaattatgcggtgaatttatttgcctcgaagagtcaagactcaagactattattaactttatagaggttatacctttctaggaatcttgtacaaaaatgtaataaaaatcgtactgttacttctatatataatacattcaacccggaaacattaattaaacgtaatttcatatactatctttcataattttattggtattgttggtaacgttacatattcaatcgctctcagttttacgtcatagttcattaagtccctccaattctgttgtaccatatttaacccattgcctactccatgagttaaaaagaa

SEQ ID NO: 33049 - DNA, 337 bp, Arabidopsis thaliana columbia
ttgatagcactttggacggtagcttcggcagtgcgtacgagtacgcaaccgcatccgccttcttcttcatcctcaactagtacctcgacttgtccgccacgccgctctccactcgaccaaaataataatccaatgtccgcccgaaattacgagacctcgacagtgagacacggaatcaatttcaaggagacttcacaagacaaggctcccatgttcatccaaatcccacgcggtgtgtgactatcctttgatttttttattcgtctgtggacttattggttttactgtagggttctcctttttcattggccaaatcaggaaaaaataatcacaacat

SEQ ID NO: 33050 - DNA, 602 bp, Arabidopsis thaliana columbia
tctcgaaatatttaagataaactgatgtcattgtcttcttccgtttagggggaaccgaatttgacttatcagaagagcctaatccaatgtcaatgggatcagaatgtggaactagtgtcatgtccatcatggctttaggttccatttctacaccaagaagcagccacaaaatatcataagtggttctagtctcaattgaatgaacaaacacatacactgagaccaaggtaaacaagttccatactttatcacaaattatcagattgatgaatcttcatattcagttttcaatttacctttgtaggttttgaatgcattatttacattccactccattgattccaagcgtcttattagtctctgtgaaacgatccgtagagtaaaaaccgttgcgagagagagagggaagttatttttttggagggaaagcagaaacagcagctagagagaaagaggatcggcgctggatctatgagccacagatctgagccgatttaagggatatgaccttaggaggatcggcgagtcgggagattcgtcgatctgagagatgggttcgacggcggatccgttgatttggccggagatttgacggaggagag

SEQ ID NO: 33051 - DNA, 509 bp, Arabidopsis thaliana columbia
agaatctcttcttgatttcaccttactccgaaatctacataaatgaaaagtgatttagagaaaagatgaaagtaccttttttataagagaagttacgttgtatcctccgctagtcataaaactaacagttgcatcttcccaccaaggatatagacaatgcaagcgaccaatctagattgacgaaaaaaatcagactgatgagagctagtttcttgtttaccaataagaattacttagtaaggcttgtttacctttgtccagtcccaactagtttccaatgagataccattgaaacatatgaagttaacgtataaccgtaatggaatactctttagaagatacacctaaaatcccaaattcatatacccaaaaaaccatagtgttaacagaattgtgaagagttttactcaagaggatcatcctccaatacaataaagggacttttatgtatagaacttgatgagaacttaccccagcataagctgctgctttaggtaacgttgccaagt

SEQ ID NO: 33052 - DNA, 525 bp, Arabidopsis thaliana columbia
tgatttgttcggaaaaatgggcgttttgatatttggtatttagggttttgaggcttgataagacttgaaaatgaaaatgaaaatatagaatcctcttttatgcggtttccttatcttagtagggttttctttcaaaaaaaaaaaagtgacgagaggatatagagaaagaaacgatcatagttttttagtctaataatattattccgaatcctgagagctatcagagtcaagctgttcatcaacacaaagcaacatctcatcgctaacattatttactactcctagtcctagaccactaacttcttctaaagctgcagaggaagaagaagcccttgtcgtttcttttccttcttctgataactttgatacatctttctgcaaacattcttcttcttcttcttctcctatagagactactgttgttttatttaggctatcattggcattgctgtctcggcttgggttctctgtttctgaagttggttctgtttgatcggctccgagtggtacggggaagcctgggga

SEQ ID NO: 33053 - DNA, 182 bp, Arabidopsis thaliana columbia
tacactaaagggatacgacaagttcattttttgtgtcatgttaccttgagaagagcgtgaagatgcccagcgtcaacaggcgctcctttagctttgaagttatactccttaaactctaactctttccagctgcaaatataccaaattcctctcttaattgcatatgcaacctacaatagcat

SEQ ID NO: 33054 - DNA, 554 bp, Arabidopsis thaliana columbia
cttgacatgctttgggataataacttttgcagagaagggaaagcttgcagaccccttttatcgtctagagcaccaggaagtagatttacagaagaagaaagcagctgaaccgcttttggtccgtcttcagcgagtctcagatgcaagacatgctgatgattactccctaaacaaagctctacgtgcacaacttagggttcgttccaagtttgcaattttttgctctgtttgcaatccgatttttcgaatcctcctttctcactttgttctcatttaccagcgacacagaaaacgtgtagcagaggaagagactgcttcaaggaagctaggcttggggataagactgcttccaaagagtgaagaagatattaaagctgcctcaaacgtgaaattcaagagcaagtttgataagaatcgaaaggacaaacgagcactgatccatgcatcttccatttttcccgagtcgtcttactcatcgagcaagaaaagaatggagctggaacaaaaagaaggaaaataagcgcagatccgcatcaagcctattgagaggagga

SEQ ID NO: 33055 - DNA, 160 bp, Arabidopsis thaliana columbia
tgtaaatcttggtagaaaattaaaactattgtagaaagtagtaagtcactgaaacaattaaaaaggtataaaaatagaatcaaaaataaacatccatcatcattatgaaaactaaaaaaaacaaaaaatgaagaaaaaaatcgaccactaaaaaaactgc

SEQ ID NO: 33056 - DNA, 466 bp, Arabidopsis thaliana columbia
ttttttttctttcccaaaaattcgatttgtttatcttttttcgatatttggggttctttgactcaactacgaaatgggtttttctctgtttttaccaccaaaaagaaaaaatgtaaaatgtgttttggtgttattaggtctctgttgatttttggacaaaacaaacttcatcatttttggatgattttgttttcgaaagaatgtattcctctaattcgatatgcaaatgtgtatactctgtattatattatatgatataaaaagtttttcagtttgaattaattaattattacaaaacgtacgtctagagaatctagtactcattagagaatggattgacctcgtatcttagtattataattgccaacatgcataaactaatgttttgacgaccaaaaactagtttatattactatataacatagtaagcaaattatagtattattactttcttactcctctagtc

SEQ ID NO: 33057 - DNA, 505 bp, Arabidopsis thaliana columbia
aaaacgatttcccagtcctcgtaaacagttggtacaggatcctcggggtttaaaaatagttacagcacaattttgacgaaggagcctcgctctacgtacgtaactaacattgaggattttagttcatagctactgtataaattctaaattagactgtgaaacagagcgcgtccggacagctccgtttaatctgggtcttgagtaaccaataaatcaatcgataaatataaaaaaagagatagaagaaatgcacatggatgaacggctggcgctgaagcatcctttactcctttattacacacacctacctctgttatgaattcaagtcaaaaagatttggcacacagtggatgctgttagctggctgccatttcgctggaggctggacctttcctggatgcgtatggtatgagatatggtacgcagcctcctgtttgacgcgcatgccgcgtgcgtgcgtgcgtatgggacagcaatgcatgacgactctgcaggtagtttgatt

SEQ ID NO: 33058 - DNA, 496 bp, Arabidopsis thaliana columbia
ccaacaacaaaggaaaagagttacaaaacatgtgtattaccttatcgactattaatttttaataattttgactatcatgaaacatctaagcaaaactatgcggaacctaaatgtgtgtttgaggtttaacccaactccagggtttgataaatacaaatatcgatctgatgttgtcttaatttaccataaatcttaagacattatgtgtaaactacaaagagagagtcgtctaacttgtccaagactaaaagatttaactttaacactttgatgttttgattctattgactagcttgtccagttctccgtagctacatcgaagtttccctattacagaagtcacatggacacaattgacaagaacataggatacactgtttggtacaaagagttacagagatacagatgcgaaaaagaacaccggtatcaagggccacatcaattaaaagaacgcttcgcattgattcctttccgggggaataaatagatggaccat

SEQ ID NO: 33059 - DNA, 488 bp, Arabidopsis thaliana columbia
gccagtgtgctctaaagaaggtccaatatcctcatccctcctcacatggcttctcgtcccgaggtcgtcgaccatttcaagcgcaaattctaccaacgctacatcgtacttactactatcttccctactcttgaatttgcttatccattttcttcattactttgagtttcgagtttgactttgtgttgtgtgcgctactgatttggggatttagtgtggactttgaatcttaggttttacaagtgtggttgttgatgttctttctgctaaattgcttagtccttgggtccgaatctcctcgtgattaggttattaagcggagggtagggcttttcattgaatattcgttaggtcctgtttataatatgtgaagccttcgtgttgttcatctttgctcttccctatgaagatgtaatctggatttgtttctaaatctagggtgcttgccatgtccttcttttttgcaggatcctgatcttgttgtggag

SEQ ID NO: 33060 - DNA, 497 bp, Arabidopsis thaliana columbia
tgctaatggaccttagccaagccggagttaaaaaaatttaccggataaaaattgaaccaaagagagaacaaactgagacaatgcccgaaatatattactagacattcgcaccgcatgttacaaattaaacggacatcgaaaactactacatacatactcaaccttttttataaacttttatagccattttttgccaatttatctataacgtaatactatgcattccctcatttacatattttttaacattgttcaaagggttgtgtgccccgtgttaatatagagtcattttctaacatctacaattcagattaagctcccaaacatatgttccaattgcaatataccaccaaattaaaagattgactctcacataccccattaattgaaaccaaatgaacaaaaacgttcataagatattaagatgtcacgtcagaacatgatctacaaatgacacataacatgcagacgcggagacgcggagggccggtgttgtt

SEQ ID NO: 33061 - DNA, 543 bp, Arabidopsis thaliana columbia
  unsure (1)..(543): unsure at all n locations
tctagtnnnnnnnnnnnnnnnnnnnnnnnnctgagacatattttatgatgccaacaaaaagcataccttgatgaagttcttggtataccagttgttcgagaatttgttctcgagaagaactttttaggtaccctgcacatcattaccagcctcaggatggcgaggcatggcagtggcgcagacatagcccattaatctgtggagatcagttttgacgctgatactgaagcggaggctgcttctggcgtttcaggtgcgctgagtgttggtccgagtctgaaccacgtggcaggagtgacggagaaaattgagtacgcaacaagcttgaattacatttatgcctatctcattcatttccaaaatggagtaactccgcctgagccagaaacaagagagcggcgcgtcttagagctcgaaagtaccaagagtacaggtttacatggtcagattatgccagcagcagagagcgagccacgccaaaggaatgggatgaatggatacattattgaagcaaagatacgatgatatgcatggattgaaaaa

SEQ ID NO: 33062 - DNA, 490 bp, Arabidopsis thaliana columbia
actctagacagtgtgctctaaagaaacaaaaaggttcaatacgtctacaatgataacaaaaaaaaacaaagcaaaacaaatcaaaatttctacttaaatgataacatgcgaagatgacaatcatgtaacgtctaagatgaatcttgaataagtcctttaggccagccatgcatggatgggagatcggccgtatcatccacataatcgaaatctaatctttcatttatttttattaattatcttaaccaaccgattgtgacaatttctccttgttgccaaccactaagatacggtgtcattcctgacaacgaagacttttatcgcgtcgcatttatcaatcgattactcaatagcgttctcacttctcgtcgtgactcacgtgttaaaatctgtcatattataatatgaatttatattagattttggtcattgtgcatgaaataccgactatatatatacagatatataacgtatagataaatacatctga

SEQ ID NO: 33063 - DNA, 548 bp, Arabidopsis thaliana columbia
  unsure (1)..(548): unsure at all n locations
gatttttataaaaactaaaaagcaagtaaatggtaaaactagtaccaaattaaatatataacgccgttaatatatttcctaattaactaatcaaaatggccaaaacattatagtatatgtggcgaccaatatgcgacctcctgttcaaaaaatcaaacgtactagtggtgtacaaaagaatattttgaaatcttcattatgaaacgtgaaatcgtcaggattttatagattttgttttcctctaataaatttttctaagagcctaattattgtcaaatattttgtaatgttggcgtaattttaattatttttaataattgaaaatatattttgtagattcaaacaatttaggatatagttgaatgaagttgacaagttgatgcatgcaaagaagtaagaagaatgacattcttgtatgcgaaaatgattattttcaattagtgactgatatcttttgcaagtctaaaataaatataatatattntattacaattcgtgaaaagctttntatttgatggcaaatactacatggttgtccttttttttgg

SEQ ID NO: 33064 - DNA, 542 bp, Arabidopsis thaliana columbia
ccctagtgcataagaatctcgttgtcaaattccaattcttgctattgatgatctcttttacaaacatacctacctactcaacaagaagagataacattcaagcagcagatgatctaagattaccaagcaagagttaaatcatacttgttgaacacaactcatgtaattatgaaatagggctaaaaggaacttcaaataatgattttaagtatttcctgaattcaaggttaatcgtctaatagactacaacttacttttataaactttgttaattgtcataaaaataaacatagatccgagtaaatatagatatcaggtacaatgaaaatcaacaaccctttgaaatagaatagatccatacactcttactttgacaaaatagaataggcacacacttatttgactatgattttgttaattttgaaatcacatttatagtcttcaattatgttgtaaacaacctaaactttcacaatttcgtccaacaatattttgaaattctctaaagagcttcctttcatggagaaatcttcttggagttt

SEQ ID NO: 33065 - DNA, 497 bp, Arabidopsis thaliana columbia
atcacaatgtaatttgtataaactattactcttttcgaatattacttacagattgagaaaattatgaatttatatcacgagtggggacacccgaacatgaatgcattatgaggaaaattattttgttagaccaaatcgggtatcaatttttctgcaccacaataaaaaccatacaaaatctctttttgaatagatatgtcaatgaataccataatggagtgaaatggaacgtgttggggacctaagcgtcggtccaataaagccaactaccacttttgtatgtggaggggagagagaggtagaattagaaaccttaatgaagagagagtgtgacttattatgtcattcgtttgtataaccattcagcaataccaagtacatgtttatatggacacctagatatcaataatttagaaacgttggatgataagttcgtgtgcatatctcaaccgtccattttctcatgatttgatgaaagtcaaaaactagatttgtta

SEQ ID NO: 33066 - DNA, 507 bp, Arabidopsis thaliana columbia
gggttaagtttaggtgtttaccatgtaccaaaaacttgacaatctataatcgcatcacttttaaaaatcgagttgtaatcatttggatgttttaggacgggattaaacaaaaacaaaagatatttataagctaggagtgggaagaaaaaacagatctgaatcccagacccaagataggcgatttggatcgggtacagatcctcaaaaatacctaaatgggtcatgaatctaagaatatcggaaattcgatcacgttcggatattactagatatcaaaagtgaacgcgaagagatctgaacatatacataagctctaattcatacttttacataaattcatcggtaaacctcctttaggattagtaatccgatattttatcctaatcatagttcttttgttcagttaggtctgggttcgagctttcatgaagttatttttgctcattctcttgtcgatatgttaaatctataaggtttttggtacaaaacgcaagagaacaagtgaaa

SEQ ID NO: 33067 - DNA, 586 bp, Arabidopsis thaliana columbia
gaggctaagggttgagacaggttgctattgcaggtaaaggtttgcgaaaatctccaaaaataatcacaaggccagttttggtatttgtcgggcgccgtcaacgaagtcaccgcacaaggggcaactgacgatccaagagatactcttgtcatcaacgaaatccggtgcgttggagctgtttgtggtattggtgttcttccaaatctagagctcgagggttttggaggagtcgttataggtaagctttggttcatggtttatagtaaatcattgcggaccttatcttcaatgttgattcaagacgtgattggagtccaaggccaaaccagtcaaagaaacgagccattaaatttaaggaacttaccaaaataaacagaactagtcaaagatgggagttgggcctcattattaatcccagaaatgggcttcaaatttttgcttgctatgccaaaatttgttcttcgaatttgtggaccgagtccacaatgataatgagctttaatggagaaaaggctggtccaacaagatggtactgaggtaaagagtccggccactaagggtgatctcagcaaattagggtttgact

SEQ ID NO: 33068 - DNA, 480 bp, Arabidopsis thaliana columbia
catccccgtctaactttgctttactattagggagtcttcctaagtacgagtgaaaacaattatatcaatgattttgttttccatcaaatttttttcataatagcatatttacatcttcattcactaaaataaaagtgatgtgataatgaatttatgatggtattataccattggtaatttggtatatatatatatggataccattgtatatctaaaacgtcaattccaattcagagactctgtaccacaaaactaactaaagtaaaaactatttctctttcaggtccgattatcgaagctctctcatcgactactctttccggcgccggtgaagcctctgttcaccggcatcgggaccccaacttctcttcttttcgtcgctatttcgttaccttagtttccttctttattttccccttttgaagctttttccatcctttccctcttgttattcccttgttattccagccataacttgtt

SEQ ID NO: 33069 - DNA, 534 bp, Arabidopsis thaliana columbia
  unsure (1)..(534): unsure at all n locations
atcccccatcgatgagtataatcaagatatgttcctctttacggatgttagaagggtagcaagcaacactaaacattacgtacaaggaaaagagcgagctgcctgtgacctttatcagaagcaagcttatgtggcgtttatccagtgttatctttcaatatcagttcctccttggttccagcatgaactagcagcgtacaagcctcaacgttttccttaatcacagcccagtgcaaaggcgtgcagcctggcaagcaaagtgattaatgtaagaatttctaagaaaatagtgcaaaatatatatcagggtatcagcattctacacttttcgcaagtcattaacagtctggaatgctataacaatccctccataaacaaacactcaaaaatcagagttcataatctcttatccgtttttgcacttatctttacgcatcataaggtacagaaaaaattctgatgtaagccattctttattaattatcgagcagacaagtanatccagtaacagacagttttaagagtttctgattt

SEQ ID NO: 33070 - DNA, 542 bp, Arabidopsis thaliana columbia
tgacctgagataatagtaaaaccaatttgtgatgttgtaatagtaagttttatttttctcttccttatgttatatggtaaattcgagcatttccaatgttaagttctcattgcaattcttcaaggttatttttggtttttgtcgtagaatattgatatgtaccaaaagaaacaaaaaagaaagaaaggaactattgaaacaaagcattatgttaaaagatactgtatctgagttttcattattgtaattgaaacatatatttatgaatttagataagtgaaccgaaactccaagtaacgtaacacatattggcaaagttttcaacgcgattaaaaaccagaggtggctcattagaaggcccttcgaacgcatctttgcaatcgccagctttataaaatgcgtcagaaatagccacaagtgcttgcgtgaaagagttactgctcaaaaacttttgagctttctcaagctctttgattgcttggccataactagccacgcatgactcgtaagatcccttgagttgctggtcctcccagagcttt

SEQ ID NO: 33071 - DNA, 595 bp, Arabidopsis thaliana columbia
  unsure (1)..(595): unsure at all n locations
gctatcagccttcaactttaagttgcagacaatggcacaatgcgtaaactaaaaatgcaaagttacagataagctaacagaacaaaagtgaaaaaaatgcgacagataggctagcaatggttgtccagacatgaaatacaatgcaaagctttagctggtaaaaagttttttagcggaacttacggtctaatgacatatttcgttttcccttcagcattatagcctaaaggagccctgtacaaagaaaatggaaaggtcagatttacgaatttagtttagttgagaaattttacacaagtcgtccaaaataaatttcttttactgtaaagttgaacgaatgtgaccacagcataccttgtcaggagacaagaagcaacatgtagacccaactcagctgaggggtcaaatgagaacctggatttcaaggaaatgccaaaataagaaacccaaagattatcgttatgaccgatatataactatcattcaagaaatggacttaaatacagaagtattgtgggaaaaaaatctatagttgcttaaactgcggactctaacgnatatcacagcaagaatgcccattactaagaagattttt

SEQ ID NO: 33072 - DNA, 447 bp, Arabidopsis thaliana columbia
acgaggtgtagcaggaagcgaactcatctgggagaacatatgtcttgtaactccttatctttgagaacagttgagtcggaaattccaataaagaagctagaaagacacactacttgtgcaaaggagagtgtcaaagcaagtgtaagcaatgagatgacatcttccaaacactccgggggtagtatctgctttaaaagtaagtacattagtatatgttagatcttgaggtgactatccatatcttcctgtgataccagttaataattgtcacaggatattagcaaccacggcgaacgaatcatgggggcagcggattagattactctctcccacagatggatggtaaaaaatttcttatacttggccaaatatatatgctggagcttctgtaatatttattttgtccttgtgtaccagtttctatcctggcactgttgagaagtttaa

SEQ ID NO: 33073 - DNA, 519 bp, Arabidopsis thaliana columbia
gatccccaatataacatgtagtcatgtagagaatacccaaggaggaatcaaagtcaagcgacagattaataatatcatagatggtcctgttcttttttgtaattagaaggaaagagtatgtacatatcctatgaaaatatcatgattaactattagtgatactttattaattcaataattaatactacctttttcttaatgattaaccaattgattaatgtgcttaatgttgttgttacattaaccaatcgtcctacatttaatgggcctaatactaaataatgggccttaacgagcttatcatgttcagttataaactcaaatattttttaaaaaaatcttcttccacttgaatacgaaacacggaaacactaacgaggaagagaacgtgaagctatatatatatgtctcgagagctcactgtatctcttgccgccatagcttcacaagctctaacatttcctcaattaaaccaaatccatgctcagctcattgtattcaattctcttcctcgacaaa

SEQ ID NO: 33074 - DNA, 328 bp, Arabidopsis thaliana columbia
gactcaccccagtctctatgtcatgttacttttagaactatctatgttgtctgttcatttgagtcagagtcagcaataaagacaatctaagttgatgtttcaatacttttttgtgtgatttggttggtgaattgacatgcaaaagcaccaggggtcgttgaaccaggatagcctgcgaaaaggcgggctatccgggaccaggctgagaaagtccctttgaacctgaacagggtaatgcctgcgcagggagtgtgcagttttttttttttcctgtagctttctaaaggagaagaagctactgttgccgctcgagtctcgttccacggtt

SEQ ID NO: 33075 - DNA, 615 bp, Arabidopsis thaliana columbia
taaccaatgtacccaaaaaaacaatggaaattcgtaaatatcaaacaaatatattttaggaaacaaaagaaaaaatcaattctgccttttacagcacaacctccacatgcaaaagaataatgatctaattctcaactccactagaccacaagtacatcattttcctgtatctgaactgtgtctttgggaaaacttgagatgtcaaaggttgtacatacatatgaagcaacaaaagtcaaagttataaaacattgagagcaacaattcatgtaaaatgttgaaacttgatttgctcaatacaagatagtgtcacaactctcacaagcacttaataaaactcatattgaggacaatgactctgtcgaacactacgaagatagaataggggtcccctacgacgtactctgtacctccctctccttcttcctccatgtgattacgtttcttacattttttgtagttttgtttattccttttttctcacaatcatgcattcttagtttcgtacatatattgtgacatttgttttacattaattatcgtggaatggctcagctccaataatgaaaatcatacaaacccggactagtttttttttcttttttatttagatta

SEQ ID NO: 33076 - DNA, 358 bp, Arabidopsis thaliana columbia
tgggcattcttagatttcgagggtggttcgttgtctgtctctgaggaatcactcttgagtgttgaatctgatttgtcaccggcacaaaggtcagagaataggctgatacccacgtcgaagttttggaatcttgagtgtatcacattgtggttgttgttccccttttgggtctgataatttcctacctttgcttcagaatctgcatcagaacgcaaactgatcccaacatcgagtttctgaaacctagctggtgatggttgctttgccttggctttactgctctcggctctggtcttcttaacaccaccttgacgtatgtgtagtgcatgcttatgtgttcccctcgatctcggggaag

SEQ ID NO: 33077 - DNA, 634 bp, Arabidopsis thaliana columbia
taatcgagctcagatgcagcagcttcaaatgtattgcccatttcagcttcctccgcctgcaattatcaaagcttctccttcgagcactgagcctcaatggacgggaatgcagctattcggaatgctgtttcctcccgggtttgactacacttatcctctgaataatgtagttgtgagtaacggcgagcttttgtctttctctgaaggatctgcttggctcagagatggagaagggaatttcatcgagagattgctcaaacacgacaaagggaaagttcttgatatcatctattccgctcaagaaatgctatctcagtggttgctgatgcgcggtttgagtgtgtccttggcggatttgtacctttcctctgatctgcagtctcgaaaaaacttgactgaagagatatcatacgggttgcgggaagctgagcaagtttgcaacaagcaacagctaatggttgaatcttggagagatttccttgcagttaatggggaggataaggaagaggattcagtatcggatttggcccgattctgctatgagagacaaaaatccgctacattaagcgaacttgcagtcagtgcttttaaggatgcttacagagatgtcaggcactagcatatagggatggtg

SEQ ID NO: 33078 - DNA, 439 bp, Arabidopsis thaliana columbia
ctgtgcggttagatgaaaaagccttgtaagcttccgggcgaattttcgaagcttcttgatacacaagcccttgcatatctcctaaatgtctttcccgcaaatcacgatcggtaagcacctagacaaccattattcgtagttaaacttctatgaagtctagaaagtcatatggattcagcttcaaaacttagatccctctactaaaaatcaagcacaaaggtgaagactttagtgggtttgacacatagcattatgtctttagatgtctacctcaagcttgccgcatttagcagcaatgatctgagcagtctcaaaggctctcttcaagtcagaagagtatacatgagatatcttctgctccttcgataaccgctctgcaaccttcatttcaaatgaaagaaatgttttaaaaggcatcatgatgattaaggttcaacac

SEQ ID NO: 33079 - DNA, 563 bp, Arabidopsis thaliana columbia
tattcatgacattttcaatagccaatcatcaatatatatttttaacaaacttcagattattggggttggtgattttgatattgctagtatttttgagctaaatactagcaaaaaaaacaatcgttttgtacatatccaattttttttctttttccaaaaactaaattacataggataaatttctctcaaaaatatcatagtgaatctttcgagcactataccaccatcatgtactccgatttcaattattttgacaatctatggaccggtttagatgcaaaccaataaagaaaagtttcgaatatagaatttccctaaacaaaatagactttaggagaatgtgagtggaaaaaaaaaaatagactttagatttggttttggttttggtttagattcggtttgttttctcggttacaattttccccccagtcctaatttgatttgtgcgaagaaaaccaaacgtgctgaaacgttgtcgttcggatactatcagcgattgcttaaattgttaagacgagaaaaaacaaaacgacgtcgttcttatacagttgcagagagagttt

SEQ ID NO: 33080 - DNA, 185 bp, Arabidopsis thaliana columbia
ccattcctgaatttgtagcgcttggggatggtattgaaaatgatatggtgcaaggcagagcatttaaatttcctgctggcagcattatcgtctttgataaaggatatgttgattatcaatggtttgctcagttgacacttcagaacgtcagctttgtaacccggctacgcccaaagacagtttat

SEQ ID NO: 33081 - DNA, 587 bp, Arabidopsis thaliana columbia
aaattattattgattaactcaactgaatttccaccggcgcttaggtcaacggtaaacgttggttaatagtcaacgtgaagctccaagtaaagtaatgagtttgtgcggtggcgatgcgattgtcacaaacacttgatgtgagaaataaacgacacttggagagaaaacattagagtatcttagtcgagttttgcaagtaatcgtgacggacatgtgactcttacctagtttcgtggcacatccaccgtccccacacgtgcaaggttttgcataggtttcggtttgagacaactcatgaactgcatgactcttctcaagttagaataacagtaaactgtcatatactgcgtaagtgacataagaatgaaatattattatttattcaattcaagtataataacttgcaacaaaaatgtgatattttaatttggtcttagtaggagggaggagttgatttcgtgaccaaatttcccccaatttatactatctcaagaaaagctgtgaatactattggttaatgaatacatttaatgcgaaagtactgcggtaatttagatccccatgcttcaatcagaagactaacgaca

SEQ ID NO: 33082 - DNA, 600 bp, Arabidopsis thaliana columbia
attttacttgcagctaaaactttctccattttctagaaagtaacagagcacaagaacgtttttgcaacattttacttgcagctaaaagttctatttcctctgtagattaatcaaatttggggaataaataccaacacaagaacttttcaattcattgggaaagaatgttaccctgatatgaaatcgaaagcaacagactttggatttaggagaagcttacctgaagaagagtgcagagttctagctccgatttcctatagtggaggtatgacttttcatgggcggcttcaaacattgggcccccactgcccaaaactttgaattttaaattctcgttcacgcatttcatcgaacacattcagtgcataacccaaacgttccaaagttcgaagcaacatggtttttaattacaaagaaacaaagtatagcggagaaatccaaatctaaccaactgggcatcgacgcttgtaaccaaagtcgaagactttccatcaacatgatcttataaaatgcagagaagagaatgccagagaagtcatcaaaaagcatatttttatctttgcgacgcttagatacaatattataccgaaatgatgacgt

SEQ ID NO: 33083 - DNA, 558 bp, Arabidopsis thaliana columbia
atatattaagttggtatacaattttcacaaatacgatttcgaattttcttgatttgtcaattactgactgtaaaaagaattgaaatggtgtgatatatctaatctccacacaataaatctttatcttttaatggtaattaatcagatagttagaagtagaataatcagtagaacacaaatctaattaatatgcataatacaataattcttaagatcaaaagcaaggtttaaaggatgattaacatggttaatcacagtcaatagtgctcaatgctttttatacataaaacaagaaccatataatacaatcattaccgataatatataacatatgtaaaagagacctacacggcggcggaaactctctctcctgtggtggttccggtggcgacgacgatggtggacctcaccgaacctttcttcttctccttcctctcgtccactgtaatttgttgttgcctgcactctaaactacaaaacgctctatctcctctgctcataatttacaaccaaaaccaaatcgttaattacatatctaatcaaaccaaaaccatgaga

SEQ ID NO: 33084 - DNA, 184 bp, Arabidopsis thaliana columbia
tgaggcagtggctatatgtgactcaatcacaacgttagaataaaatcattcactatcaatttcgcagagaggtccacagcttttcctttgtaacttttgtcgtaatgctacaaaacaaaacaattacacatgtcgcctacctggcagtactatggataggacacgtggcacaaattgtgcaaaa

SEQ ID NO: 33085 - DNA, 594 bp, Arabidopsis thaliana columbia
tttttatcgtaatatttgcttatctaaccgaatatgcgtatcaaacgaaacaaatatccgtttggtaattaacatgattttgtcaatggatattcgtttatacatagtatccggtaacataattaatcagaattagaaagagtgattgcaactttgctagtcaaggatcgaatataccaaaattgctacatagcgacttttatcaatgaaacttgaacgtatattaatgtcgataacatagactaatttacgatgcagacagcaaaatggagattaattaggtttcagacactgatacatgtgtaacatgtgtgagcgtaagtggaggctttgtctcttcaagtcaaaatccatcgacattctacaaatttatctaggggccaacgagagtcgagaatacaaaaaagcctaaaagttcgagacagccgtcactgtcaataaacgttgcctaaatttctgtgtacgttgcatataattacgtttttgccactggcacttattagtcactttccacttatcaatcacttgcgttacttcaattttgaaaagtaaatattcaaaacgagatcaattttttcacatagtgacaatata

SEQ ID NO: 33086 - DNA, 587 bp, Arabidopsis thaliana columbia
cgttaagacagtaacagagaaaaaccctaaaccctcttttcactttgtttgctgttccggtcatatctcgcgacgatgaatacctcccaagcaactcgtgcggctctgtttctaaacgtaaatattctcttactgctattcttatcagtggtccaagttttgtgtcgattgatcgatgaacttatttgattccgttctgttgcttaatcttttcatagattgattataaggatgatttcgaaaagtactttatattgagaatttgaagttctgttgatgttgaatgcagtaacttaggactctgatttactggaaacttcttggtatttggcatccataatgttttcgttttaacaagttagtgtttttttgcagggttccaatagacaagcgatgcttttgcagcggacgtcaatgagtcaattgtggggttctgttagaatgagaacttcacggctgtctctgaatcgaacaaaagctgttagcttgagatgttctgctcaacctaataaacctaaagcagctgtttctactggttcttttgttactgctgatgagctaccaagcttggttgagaacctgctgct

SEQ ID NO: 33087 - DNA, 463 bp, Arabidopsis thaliana columbia
tactatgtcacctagttcatatcttggccaaatttcgcagacaatgttgcgttagattcagagattccaacttttacggtttctaagttgtgaaacatttgtttacgcacatttgaatatttgattcaataacttgcaactatttcatttttgtccaaccttgtttttatgtttgctatactatatcgtttactagttgaaaaatatgtttgatatatttgtcaacaatgtatcttgtgattatgaacataacattttcacacaaaaccgcaacagaaaatgcaaatatatgcatttgaaacaactaaggcttatatatatatatatactacatacaaatgatcacatacatactagcaaaagaaagatggacctatgaaattgcttcaaatttcgtcattataagagttgtaaacaaacaccattccaagtacgatttcaacatgttcaagtaaagtacact

SEQ ID NO: 33088 - DNA, 258 bp, Arabidopsis thaliana columbia
attagctagggtcttccatcaaagagttcaactaatgaaaagtgtcatcttactttctaacacatacactgtgacattaacgtctccatttactagcgatacaaccatattattagatgttaggttctagaacataacgacatatatatcttatatttagaataactcagcattttctcgacatccgagtctagcctattggatccacagcaatagtctagcaggtcccttcaaatagaactatttttagtcaacatt

SEQ ID NO: 33089 - DNA, 507 bp, Arabidopsis thaliana columbia
ccctgagatatcagaggctggcaaaagcttaaggattacctttattatttagtttgttcaacttcaagctcttcttaacgctaaattttctgggggatttcttggagtcttctgatgcagctgataaaccagacggaagagatcagctattaattaagcaagacaactaaattttaaagtcacaagaccaaaaggattccaaacaagcctttgtgctgaataatttcgtgagatacacaaaccaaatacaaaaaaaggacattcctatgaatatgtgaccaatagctttcaggtttaggttcaaagtctacattgataaccaaattcaagatatactatacatttctaagcattgagagttgattcctaactgatatttcgcaatcgcaatcgcaataaaacaagatttctaaggacaagacttcattcatgctgtaaacaaagtgaagtcaagagatcaatcaacacatcaaaagctgagtagctttatttcagggtgaagatata

SEQ ID NO: 33090 - DNA, 497 bp, Arabidopsis thaliana columbia
tatcactatttttaaatgcatattatcattagtttttcttcgttatactcatcattaatgtattttgacaacattatatattgacagaaatgtttttcgacaacatcatatattagttgtatgaattttattcattaatttctctcttatataaatttatgtcatagttcaaacaagccaccctgtatgaaattgaaaatatgcttggttacctaggtaaaggtttctgataattcggaactattacaaatcatttataaaaatatacacaatctatataaaattgaaaatacattgtgaaacagtgacctgtttttacctttgtagagaaaattttaagtaaccattagcatgtgtcatgatgagaggtgtggaaataattaatggatgtatatatgtatctatatgaagtgtcattaaatccaagatccgtccaattataatttgaaacatcacaaagttgaaaaaagaaaacgagtacagagaaattaaatggc

SEQ ID NO: 33091 - DNA, 491 bp, Arabidopsis thaliana columbia
ggtaactcaattgttcttctctttgctgcttcaatggtttatgcatatgctaaagacgttttataactttgtagttcctgattatgttgttggacaatctgaagctgaagcttctaaagaaggaaggaccttagctgatttttactatggatgtttgggttattccgtctacatgactgataaagactcatctgccattaagcatcatacaaagactcaacttcccgtttgtgtcggtcttgaggtttgtcgctcgtaacacttttctcgaaaatccattacattgctttgaaagttacatattacgcccatggactttcatcttaagcttactatcaattgaatcggtttggtgaggcagtctggtcaatctttttagtttgctttatgcataatttagaagacgttatcaacttctgcaaaaactggaatatatctagaagaacttgataaacttcactggcattaaagaatgaatatggtcgacttgg

SEQ ID NO: 33092 - DNA, 515 bp, Arabidopsis thaliana columbia
gatccccggtgtaccgagctacgagaagagccacgaacagccaattttgctcggcatctccatccccactggccacaagaagcagcgtcagatccaaatattcatcaccaaaaaccaaaaacgatgagaaatcagaagaagtgagaaaattagcaccagtctacaactgtcgaaagtgaaatcatcgacgccgtaacgcttgaagaagtctgaagcttcgtcgacaacagctggacgatggagattgaactcttgcgtacatcctgagcacctgtgaaaattccagagaagagagacgaaatcgaatcgatttatcacagatgcttaagagattgcgatctatcagagatagagacagagagcaaccggagatccgtgtcttacggttggacatgagtacattggatagcgcaagctagtgagtcgtaggacgttgacaggcgtgtgagtggaacggaagcgacgaagggagccgaagcaggagctgacacgcggcagttgatgattggaaacga

SEQ ID NO: 33093 - DNA, 627 bp, Arabidopsis thaliana columbia
gaaactttcacacttctcttccacttttatcctttcacactagaaaattacaatgtgcacaattatagccgtttcacacttctcttctacaattttttttttcacatcaaaaaattatttcaggtttttgacacatattcccaacaatttatttttcttaataattaatataatttttaaaatatatcaatgtacaaaacataggctccaaatggatgacaaataattgaatatttgggtgcaaatggttgcacaatttaaaaggttgaagaggttaaaaacattattcaattaatcttcagcattttagttgaaaaagttgaaaaaattattcaattcattcaacttaaaaagttgaaaaatgaacaaattataaaggaaaagtgttcaacttcttgatccacatttttggagatgatcattcaaccccaattttgttcaacctaataatttcaactcattcaattttgaaaaaccatttgtacaagttgaagatctttcaacttattcctctacaaaaaggttaaacaatttttctttataacttttttggttgaatggatgaaattagttcttagttatttactcaaatagtaaaacataagatgaatgacatttactttttat

SEQ ID NO: 33094 - DNA, 538 bp, Arabidopsis thaliana columbia
cttctacccaacagtcgtcgtcctccgaacgatggagaggtagggcaaagctgcagagattcacaacaaagattgggagacatgcgccacgtcatcgttgccattgccaacgaagacgacacgcagcagctgcttaccgacgttgacgaggagcagcaaaaggaggcctgaagccatcactttggtcgtcgtctccatttctaacacgcgagcgagggagaaggagaaggctgtgaatccccaacttctcgtcttctacctctctgtctctatatatatgcagtgactcttcttttgcactgttaagtccagaggtgctaactgatggagttatggacatcatttattggaaaacgatgcgtataacatgcaaaaaaaaacgcattatgtaccccaccggtcgttattacttaaggttttctacaacgtaacaaacaggccaattaaattgactgcaggtagtatgtatatggctataccgtaaccaatgtcctacattacgggtctgtttggttacctccctaacttatcatatttt

SEQ ID NO: 33095 - DNA, 520 bp, Arabidopsis thaliana columbia
ataaatcacataaaaagacattaaaactcaaaattatttaaaatataaggttcaatacatattttgtcaataaaaatttaataagctgctaatatagttcatgagaaaaatcaaaaattaatttatcaatcgaaaaaaaagacgaagaaaaattaatttatctacgtagcgcaagagacggactgttgtttatttaaagaaaagaaagaaaaaaaaaagaacgaatattaaaatggcgagtcgctctcttttctctatctcaatctcaccttctcaatttacagttttgccatccatcaacaacgagagacgacgccttgctatcgccgctcgatctcaccgactatcacgccggaagattcgtaagagacctcctgatagagatatgtcctccatagtttcaatcccggagcttcctcgccggcgggattctgaggaaagcctgcttttagattctcgaatcagtaagttcttaaagcaacagaatcctcagaaattggcatttgggattaggttttgc

SEQ ID NO: 33096 - DNA, 623 bp, Arabidopsis thaliana columbia
tggaaggtaaaattaaaatataaaagaaagaacaaaacttgtctgtaactttttgacatgttacttccattacgtgtctctctgtaaatggccgtatgttttttttcgtatgcgtttgattttgctatttttcattcagatgttaaactgttgttattgtaccttaataagatacaaaattttactcttcttagtaaaacctcatttgaattatcttttcactaattttcattttttcatttggaactttctctttctctctattgattttttttttcttcctttttatgggtagtctctttcagtcccagatcacatgagggtcgaaagttccttggctgctgaataattcagtctttatatttttttgccaaatgagtcaaaaacgatgattaaccaaagtttcctgtatagtctatgctttccaaatcttttcctattaactaacaaacaaatcagatttttttcttttgtaacagtaaaaagattatatgaaggtttttttcaatgttatcatgtgcacaatactcagcgactcccctttgtacataatagtatcttactgcatttgtgtgacatataaataaataatagaaagatttgcatatcaagtggtgtgtgga

SEQ ID NO: 33097 - DNA, 213 bp, Arabidopsis thaliana columbia
caatgttgttaagcatatcaaccataaccggaactgtgattcctcgaatcaaaagcgatgctacgatgataaacacccacctgcaagaacaaagcaaggatactcaatctaagcgtatcaaacatgtttcttatgaatcatctacgtaatattgtgaaaccttaccattgagaaaatgtgaaagaattcaacaatgcaagcaaatggttaaga

SEQ ID NO: 33098 - DNA, 541 bp, Arabidopsis thaliana columbia
tgatgtaattacattagattctaatgtatgttggtggtaaatagataagactggcaggtaaaaaaaaaacaaatttcataaacagtagaaacatcaccaaaattgtgttcataataactgtaaattgtgttcataataactgtctcattatatatatttttcacttggcaaatctcctatttactacgttttgagaaatgatgttaagagaaatgatgatctaatataattaacaaatacttgagaggatgtttatacaaaaactacagagaatccaatccatccatatgaatagcaacattccacatgctgcattacaatctaactctactctataaagcaaatcgcaacgctttcttctgcggcaaacacacagattctaacccgagactgatgatctcgattttacctttagaggcgtctggatttgttaggaggtgcgtaacctgacatacccattcctgggatctttccttcttagctgttgctgctggtgcggttgagccatccgcgctgctgctgcagctgaacactcgggtta

SEQ ID NO: 33099 - DNA, 472 bp, Arabidopsis thaliana columbia
gtgatgaaaacatgaacgtgataacatttatatactaaaaataatataaaactaaacgaatcaaaaacttagcacctccaactgccacttgaatatttcgcttttattctcctgaaagcgaggccttaacctaatgtaaaaaatgtcgtgttctgtatatgtaaaaagcctggttaaactggatgaatcgattgtaagtaaaatcactttgattgtattcttttggtggtttgttgtggtcgggtgcgtggatgtgtgcgtggatctggttggtgagctcgtgtgcgctggtgaggcgcagagattggtagtgaggcgtgtgcgcgtgttcccctgtctgcgtccgcgtcctcggcaaccggggtttgtgggccgggtgttcgtgtcggtggggtggttctgtgtggccttgggttcctctgggtttcgagtttgtcttctttgtggtttcagttgtctgcggtggtttgcg

SEQ ID NO: 33100 - DNA, 759 bp, Arabidopsis thaliana
tggtgctggaggaggtcacggtggtgcgccggcgctggaggaggattaggcggtgtgctaggaggaggatttgccggtggtgctggaggaggtggcggtgcaggaggaggatttggcggtggtgctggtggaggccacggtggaggtgctggtggaggatttggtggtggtgcaggaggtggaggaggtcacggtggaggtgctggtggaggatttggcggtggtgtaggaggtggaggaggccacgggtggaggtgccgggggaggatttggcggtggtgcaggaggtggaggaggccacggtggaggtgccgggggaggatttggcggtggtgcaggaggtggaggaggccaaggtggaggtgctgggggaggttttggcggtggtgccggtgggggatttggcggtggtgcaggaggaggtgctggtggaggatttggcggtggtgcaggaggtggaggaggccatggtggtggtgccggtggtggagctggagggggctttggcggtggtgcaggaggtggaggaggccatggtggtggagctggtggaggttttggcggcggtgcaggaggaggaggaggccatggtggtcgtttttaaatatagctttatagggtaacttgcttgtgtctcaagccagattaaaaaggaagatatttgctggagaattttattatgaatggaataaatgatatttaagaagtattagctattatatgttcatgacttcatttcagtgaggaagaccacatatg

SEQ ID NO: 33101 - DNA, 517 bp, Arabidopsis thaliana columbia
tcatgatgtagatacggctctctatctctcatagcatcctctgagaaatactgtccctcggatacaagcttattcaaataagccaatctcctattcctcacagctacagacctcgatttaatctcttctgaagtcggacttatcttcttccgcaggtttttcaaatgccaatcaacctcgtagtcatgtttcatagcatcaaactcaagcaattcatctactagtagctccgatccatatctctctgaaatcatcaaagcagaaacaactaatgcgtcagttcccaaatcatatttaataaaaaagtttcattctaataacattacacactcaatacttagatgattatgaagccaaaactcatctatctactaacctatgaactaacctaaggactaaaaacttaacctggatgaatcaatagtttcaccaagtacttaattaaggactaaaaactcagtaacacatccaatcatacttagacagaattgaaattagaatcgaggaattggagcag

SEQ ID NO: 33102 - DNA, 572 bp, Arabidopsis thaliana columbia
tgctaccgtcttgcagagttgttaacctttcaattaatctcaccattagttgaccgagttgactcagcctcggccgcgactcgttctcaaaactcagttaggttccgcagtctcgatgtctgttccctaaaagaatcaatcagcctgcctacgaaccaaaccgaattaaactggatagcttcttctttctgacggcgtaaactttcggctctcccaaaacgacagcattagagaatcgtctcagttgggttttagggttaggcatcatctgagataggcccaacattacatatctaacaaggcccatataactgaataaacaatacacttgcaagtttgctttcaagtttcttgtcttagtgaagtgaatatgatcagtacttaagtgtcttttgtgaagattttcatgattaagccattcgatcacaacacgtggatattgtcctgtcaaatccatatgcattttttttactgcttttgataaaaatgttaaacgagtcaaaaatttacaatgtctggaaaatgtatgtcaacataagtgggtttccttgaaaagttaaatgatagaagtg

SEQ ID NO: 33103 - DNA, 450 bp, Arabidopsis thaliana columbia
ctatttttcttttttcatactattcattatattttcttcttatatatttcgtcttcctatgttatgttactttctttatcgattttatttatatcttatttgttatttttttcgtatcaagaaatagattacaaaaatagaaaatagagtaaagttttagaaaaaaaatattgttaaattctattttaaacttttatcatattcattatgtggtatattaatatgcttctcgtcaatttgatatctcaataaatttgtttagccgaataaggatacaaaaataataagtttccgaaagtataatatgggacttcaaacattaattggtgtatctaaaaagtgcaatggctcttctattcacggtggtatcaccaaatccactgtcccccagaatctcatcgctccacgtgtctactgtccgacagcacttatcatcatcaagaaccatac

SEQ ID NO: 33104 - DNA, 522 bp, Arabidopsis thaliana columbia
tatctttttttgtgtcaacaagtgctgaagcggaacaatattttgttttaactcacgttattgcaatcctcccgatgcaaaaggcctatgcagcttcccctgtcgtctacaattggtacaacttgctccttgaaaaaccgcatggccacattcttcaactgcagagtgcctagcagtggccgagtggcttcaaatcgaatcataatgctttctattggttcacttggtatcacctgtgtcaatagattgctgttaattaccaaacttacatctcagtattagattgaaaaattgaggcaagtacagcaaaccaccaaacctcacattctgagatcatttgcctgaatagagagtgtgggcaatagatatctataccttactaagtagatgtggacgcaatatagacttggaaaaccccaacaatgtttctaggcggacagcagcctgcggttgaacaaaaaccacccaactaaggtttcacggacataaccgcttagtaaatacatgtttccaaaacaaaaa

SEQ ID NO: 33105 - DNA, 621 bp, Arabidopsis thaliana columbia
tatcgtaccatgcattattatttattagtgtgtcgttccacgaattatccacaacaggaagtagcttttagtacgaaagagcagccaagtgaattaacccggctcaaaccggtcgtcgagtgttgaccacacacgtggttccagataagcggataaggatcgtgacatcaagtgtgagtatgtgttacggtccgtatcttagcgacgttgttatggtttgctccgcagaggagtcaaactaaaacacaacttgcataatactttctcaattaaagtaaagtaataaacatgtgtctgtttatatcgtgtgtttatagtattgggcggcttcgatagtcgttttgttgaaaagtttatatatattttgaagacggttctaagtactatgaaccatacattttaatggaattgcttcggtcctcggtccatatatacaatatcttcccgaatttatcaatttggtttttacaacatatttcataattatccggcataattacattatgcatgtaaagtttttataagatgtaatagcgcatatagaagaaaaacgacttgttcttttttgatagagaaacaagacaatacgattaagttttgtaacgtctcgttaaagagtga

SEQ ID NO: 33106 - DNA, 184 bp, Arabidopsis thaliana columbia
cagcatctctagaaaatgagttaatactaaagcagctgcgtttatacgaggtttttctctctccttattacaccattttaatttgctgttatttctccttttctggtcaagttttgttaagcagtatattgtgtctccaaagttcttaactaccaaaatatatgtgaaatagtcttaagtttgt

SEQ ID NO: 33107 - DNA, 612 bp, Arabidopsis thaliana columbia
ccgtggagtcaaatttctatggtcggaatcaaatcgataccttttctgattttcaattacgtttcttgatttcttgtttgtttttgggttgatttgcagatctcgtgctctgaattcgagaattgaggtttgagatttctgggtgatttggtctaggctatataagtttttagaacaagacggagctgaaggaatcattgtgtttttggttgatgagtttagatttagattagtgccttagtggtttgtttctatatcttattttgaggagcatatgggaaagagaaacacgtcttgggctagaaattctaatagaaaggttagatctaaggataagggttcagatgagtcagatgaggattatgtgatttccgacgaggatgaagaagagtctgaggctgatctcaaggaggagtatgcctcatctgttgacggtgagccatcctttgatggttttaatgggtctgatgcggtggaggatgaggaattagatgaagtggaagaggaagatgtgatgctgaggaatgttgaatggccaaaagtgaagactggtcctcgtggtaatcgaaaaatcacgggatgtaagtcaagaaagacgacccaggtggttgt

SEQ ID NO: 33108 - DNA, 628 bp, Arabidopsis thaliana columbia
  unsure (1)..(628): unsure at all n locations
tgatgtgtgtgtgtagagagaaagtaaacacacaaaaatgcaacgaagtgtagagagagagagagagagaaagaagtgtagagagagagagaggagtggtagagtgcaacgaagaacgtaaacacacaaaaatgactaacaatatctacacatggaacacaaaattaaacgccaacttaatcgtgaaagactaaacgatcgctaggtgaaatacataaaagtcgactaacgctaacttaaccgccaaagacaaattgctatacaaacacacaaaaatgagtattgccgtggaacatccacataagacgaagcgaacgaaaacaaaaatgactaaacatatcgctacacaaaacacacaaaaatgattggcggcctgactctggcattagtcggaaggcgttccaaactcggttcaggcagtgtggtggccacctggatcgggagaagttcctacgatgtggaaacacacaaattactagtatatatctaaataggtgggccaatgtcttaggatctgtaatgtatctacagagtccaccaatacatgaacttgtgatattttaatatgtttttatgatctttagatttttgtntgtctaatatgttcttanagataaatgtaggagat

SEQ ID NO: 33109 - DNA, 1665 bp, Arabidopsis thaliana
cctccattggctcaccattcatagatcccgaaacgtcacatatagccatgcagttggtcaaagaacctttctctttaaggtcgtcaaccattcgtttccattgcagctcagcgactttgccaccgtctccgccgtttaactctctgattatctcgtgaggtaacacagcaccggcggctatcttcgttttccccgtcttggcatcgttaagatattgctgaaacctcttttcgtcacgatacaagaaaacctccttgtatgacttcatcgccactgatgcaacacggttataagggagagattgccaagctctagctcccatgtatacttcagggagttgcagagtcttccggagaggaacaaggacttgtttccttagccggtcacgaactctgtacgcatagtgagcatcttccacgccttcgtattccgggaatgattcttggggaaagatcttcctagctatgctctcgcagataagagttgctttgtcgaacgaagaatcaagggatggacaccatttagccgctagagagattttgtttggttggccggatgtcaaaaactcaaggtctctctttagttgatttgcgaatagttcagagacacgttcgtggagaaacctatagtttggatcgttagaatactttgtagatgcagccttcgccattgaaaccttcttttgcttgcgcttcaagcttgctctggctttctcctcttggttcttcctctccgcgttcgctacccttagctccctcgtggctgccgacctttttaaaaaatgacgacccctactacgaccaccaccaaaaccacgaccacctctagagaaacgggatcttctacgtagagatgctgcggctattgtatcgtacctttgcgttttctgtatactgcggatttcaggtccttgtagaatccggtaaagaatctccggaaaatctttaaaatagccaaatttggagagagactcgaggttacaagctagggttttgggatggcgaccatggagccacaacgccgccgtgtaaaacccttccttgtcagattttccagtgccacggactccacgaaggttacagataagcttgagagtggttaaagaatcatggtcccaagcctcctctagccgctgctccagagatttcttgggcgtggaaggaacaatgtgaaagaagaagtcgaggcaggggttacctgaggagaggtaggtggcggatctattctcagtgtagcccatcgcaggtgaagatttgtttaaatctactcttcgccgtctaacaggtctaaccggtctaacaggtctaaccggtctaataggtcgaaccggtctaacaggtctaacaggattgacgttgactttagttgatttcttgatgtttgagacctttgggacgctgggacgacaagtgttgatgttcttgaggagagcggcgaggtacgtgtggggtctttctcggtctgtccatcggaggtgaagtattgactggattggtgggaccagaagatgtgaggggagcgttggagtcttggatctcggatggaccagggaactgagaagccatggttattttaaaatataaaaagcacaagagacggtcgaaaatggagacacaaatctatcgagagaaaattaaagtgttgaaaattggaattgagaacaag

SEQ ID NO: 33110 - DNA, 521 bp, Arabidopsis thaliana columbia
ttcataatactctaacatacctctatcaacatgagcttttctactagcagagtcagcaatggaagactttcaaaagtcctgtacctgtatctatatataaattcttgtatagtgagcattacttacaagatgagatttcctctggagattaaccgagatactaaacctaacccagatgatcgaatgaaggaagcagggctcacatgtaaacatcaagctttaccaaacaaaagaaatacaaatcaactgttcctaaaccaaaatgaaatttttacatctttgaacaatctagcttctgtgattagtttatcctatcacagcttgtaaccatcatcaacacactaaactaaaaccagctcaaaaatgaagaaaaatacacacttacatttcaggaccttcttcgccattctcagcaatcctaggaactttattcatccccgacttaaacgaagcattccctcgtccacctctccctccaggcaacaacaacgccctctgtcccggatgcaacaactccaaaa

SEQ ID NO: 33111 - DNA, 397 bp, Arabidopsis thaliana columbia
tataagcaaaattttctgattatagtttgttgtaacgcgttaacctaatttcctttcttctttctaatttccttttttctttctaatttccttattgttttttactttaagcatgttttaacggtcatatattgttgtatttccttttttttgttggtataaacatacctcattatagcagagcttaaaccaaatcaattccgaacccaaccaaaccggtaatccaattaaattttcagcttcggtttggttcggttcggttcggttcaacttggttttgcaagtcgaattattctgcgtatgtgattatggggaagatgatgaagatggcgagagaattgtgatgacgttcccattgctgcaactctaaagctccgggtttcaaaaatttgaaaac

SEQ ID NO: 33112 - DNA, 833 bp, Arabidopsis thaliana columbia
tgattatcgtatgtgtcataggggaacttcttgaatccccccaccaactcactttcacctactttttttggtggcttcaaagtccaactggtgaaaagtccttattacaaatatataaactagctataactttgaatggtatgtagtttctgctaactattatatgtggctgaattggtatacttatgaaatggacattgaattggtatacttatgttgaatagttccattttgtattattttacatccatttggttggtgtaaaataatacttttggtagattgaatgtgatgtatacaaaacgtcgtgtatgtatttcatttaatgcacatgactcgtgagttaacgttcagagtacggtctctcggaagctagaatctagaaaatctaaagaatgatatgtagccatgtttaccaaagcctggactatggagaacttgagctacatgaatctcatgtttgtggagtcaggattctagagcatattggctacaaggagcatgtatgcataagctaagcttgggcctcgataaacctagactatgcatgggacccttgggttgtggaaagcttggatttaggagagcttctgggatgtgtatgtgtagaaaaatccatgtgtattttgtagaaaaatccatgtgtattttgtagaaaaattcatgtgtatgatgatcacactagtcactaacacgtgtaatagacctctacaagatgatcacactagtcactaaacggtctattagcttaaaatactcttgtaaaattttgttaatcatatgactttttctaaaatttgtatatatcataagtgctttaatttatttatttt

SEQ ID NO: 33113 - DNA, 541 bp, Arabidopsis thaliana columbia
atcttggtgatgtgttatattaggatcttgaggtgcccgccagtgggaccaaccagagagaggaaagtactacacaacaaacccctgggcagacaatcccttctacacccagcagcactactgatcctgccccctcaacgagaggtccatctgaacctcttcgaaatcctgtggccttagttatacctgttgttgctcgatatcagcagatatctcttggtggacgtagctctactggattggatggtgtacatcagcctgttactgaatcttctaggcagccacagagcgtcggtactccaggaagagaaggttagttctaatataacttccctacactattgtactgatttatttgttgaattgtcgataagagaaaacttcacgtctgttaccttttattactgggttgtctcatattatgtttgatttgatgttcccttggttgttttggcttcaatcttcttagacctggtagatgatgtgttactaaacgcaggatatgtcataaatctttgcttctatgaaatatgtaggtgat

SEQ ID NO: 33114 - DNA, 629 bp, Arabidopsis thaliana columbia
attatgttatttcaataaaaaaaaatttcttgcattgaaatcatgtccgaaactccgaatgcaccatactaaaatatatggttacatctagggacggatctacagtgtaaggaggtggggcacatgcccacactaatccttgataagtatttaattgttcagcttattacattaatattggtaagcttatttggaagaagtgccctactctatgtcccagaaggtgtgttcgatacccttacactggtattttatttcatgtttatattttccccatatttattattttaaaagaagtttcactaatatggtgccccatacagttttccgccacttacatcttacatacgtgtgtattacaaaaaaatgttttctcaaaatgatattatgaccaaaagaaaaagataattcctagatttctatcatttaaagaacaagagcaatcaagaggcccaaatatatattgggctttataagcctggttcatgacttacaaacacgtcagagtggcaaatttcaaacgggtcgggtcgtattcaaaaaagaaatccatcaattttgcgcggtaaccctgagattccagaagtaaatagagcaaaaaaagaatcaaaacaaaataatataataga

SEQ ID NO: 33115 - DNA, 474 bp, Arabidopsis thaliana columbia
ccctaatgtttatacagatggattaacgtatggactcaagatagacacatatcgttgagaacaatgtactagatgacctttgatgaacgaatgaaaggtaaagtatccatagagagcaacattgagatatatgaagaagaggaaaatcgtttttagaagttaataagtatagtttatttagttggaatttggataaaagtaatgttcaaagagtacatagtgccttgaacgtctatgtgattctaagtgcacactacgagataggcttataaaatatataaaaatacatattatttagatgatgtttatttatattaataataataaataataagacacacaaatacgattttgttattttaatcaaaattacaaatacactatatagaatataataaaagctagctagaaaataacatattttcaattctagttgcgtatgaactgagaagtgaacaagaattaatctatgga

SEQ ID NO: 33116 - DNA, 1189 bp, Arabidopsis thaliana columbia
cccgtaagaaggtctgagttattaagggagttttgccgatttctagaaggtctgagttctgatatacataatcatcaaaataaatgactacacaactcaagacttcatatcactcgaggatttcaggcacaacattaacccactccgtcttaccacatatctcatctgtatggcgcttctctaacgcaatcttagagaacccaattttatatcctctatcgtcttcatcataccactgcttcccacataactacaagcagtggcggatctagggaggaaaactatatggggcaccatattagtgaaaaaaatttaaagtaataataaatatggggaaaaaataaacatgaaatcaaataccagtgtaagggcatcgaacacagcttatgggacatagagtagggcacttcttccaaataagctaaccaatattaatgtaataagttgaacaattaaatacttatcaagaattagtgtggggcacgtgcccacctccttacactgtagatccgtccctgactacaagattcccatcataattaactattccatcgacagtcctctgatttaaataacatgtagggtaatcattaaattcgtccaaaccatagatatttctccactctttaccttgtgagtcataccaccttaaataccccgtgtaagtgcaagagtacatgacatcctctatcatacacgaatatagtatactaggactgatacctacaagtgctttgtggatgcagcatggagtgccacaacaaaggctggacctttaaaggcccacatggcaaggctctgctactctattcggcctcgtggaagtgttaattcagcattagtaacggaggctttagcgctgaggagtgctctgcaatcttgcttcaaaaggccgaactggagcatatcacaaggttggaggttcactcggactcccatatgttgattcattcaatcaactcgaaaactagttttaagaccaagtccagcaatggtttttaatgggtttctataatgggtttctaagatgaaatgggcctagataaaaaaaaaacatttaaggattccaccaatagatcataaaattttcaaaaactttacaaaatctctaaactacaaaactatcagaatttattaatacaaaataaatagaaaccttacttaattagaaactaatcagtgtggttgc

SEQ ID NO: 33117 - DNA, 566 bp, Arabidopsis thaliana columbia
aatttctaacctatcttttaggcaattgatatgatgtctttctcatgagattcttgttacataacttaatgttagtttcagtttcatgtctcatgagtgggagccagggaccagtgtggaaggagtttagtcttgtatcattgctatatttccaaaccaagtcaagtggtctgaggtaagtatattttctttggtcgacatgtgttttgcttcgtgatgtttatggggtgtgaaacatatcactgtatcagaattaagattatgttatgtcaattagttgagagctcgaggttagaaaggaaagctaggttattgagttggggccttgtggattaatgtaggattttgctttggacactgggcgatagataagagacttacttctctcgttaatcaagcctcttaagagtttacgagaactgaatcctatcacagttcctttaactaacacccctagttttcagattccatacttatgatttagtttttcgtctattagcccacactctgatatcagtatatatagactcctggcagaacgatcattttgatagtccaaatgtgaa

SEQ ID NO: 33118 - DNA, 459 bp, Arabidopsis thaliana columbia
actctaattgttgcctaatataagcaaataataccaatttctgaatgtattaatattatgtgagtaacaaatatgtgtaaaactattgatgttagagctgcttggtttcggcttttttggtacaatcaggttttgtaagagaagattatttgaaattcacttcagtttcggttttgttaagttatgaataaagttcggtttagttatactcttatactgtaactaatttaagtacaatgatgagtttagtttgtttaatattaataaagtatgcttagttatttaaaagatgctaaacaattataaattaattttaattttttaaaaaaaactatttcataggctggtttgattcatgaaaactataaccggtttccatttggttcggtttaagaattctcatgttttattcactccttattaacgtgaacggccaaacaaaatcgtttttcagtcaaa

SEQ ID NO: 33119 - DNA, 356 bp, Arabidopsis thaliana columbia
ccgtatatagaagaaatctctttgactcgccggaaaacaaaaccccgttgttctccgtctatctctccctctctctctctgcacatttcttctacctttctttgagatttgagaaaacagaggaagaagatgaaactcgacgaagaattcttacacgacagagaccattcgtttctgacagatgacgaggaaaatcaagcagcacttgcttgttccgacgatgaacacgacggagacgacgacggtcggagaggcggagaatattcagattcctcctctccgttatcatgagaccgttctgataacaatctctcggatgtctcaaatcctccatggccacaaagctatcggtaaca

SEQ ID NO: 33120 - DNA, 457 bp, Arabidopsis thaliana columbia
gttaagagcatcgagtgcagactggaacgggtgaaaagcagtgagctggacgacccgcccgaaccgactaaggtccgagacggagctccgaaccgcctccgtgttctgtccaatctcatcggaaccgtgtccctcgaacaatccgtagccggaggtgattcggaaagaagataaatcttcattgtagagagaattctgtaaaaaccctagccgtctttttcaaaattgatttgaaaatcgagtatttatgcagtttccgtttcggagaagaataagagaaattagggtttaaggttatttcgcacggaagatgatgcggctttgctcttagattaactacatgggcctggccgattaattctatcggactcaaccaaaatgactagcatgggtcaatggtcttcatgtaaggaaaaaaaaacaagcttttgttatacaaagagggaaaagtttaggt

SEQ ID NO: 33121 - DNA, 589 bp, Arabidopsis thaliana columbia
gattttgaactattctcaattgattggtttctcagaaaaagaaagatgtcatcttcacacaacaggagtaacaacaacaattcagaaggagctaaagcagaacagatcatatttgagttctttgctaaaagccttcacatcattctcgaatcaaggactccttttatgtcttcaaggaactttagtggtgagcagatgatttgttctccttcctcatcttcttcctcttcctcgagtgttagacctcgagacaaatggttcaatctagctcttagggaatgtcctgcagctttagagagtttcgatatcgggcggagaagcagtcttgagcctttggttgttgatgttgttcttgtggtgaggccacttgttggtgatcagtctggtaaaagggagcttatcaggaacttctccgggaaagattatcagtctggttggaattctgatcaagatgaattgggatgtgagactaagaacgagcagattattgagagatgggtggtgcaatatgataataggaagatcagggaatctgttactactagtagcaggaggtcaagcagtaataagttgcaagtgatgtataaga

SEQ ID NO: 33122 - DNA, 639 bp, Arabidopsis thaliana columbia
gctcctcttgttgcattagagaaataaatatgaccatgtccaagacttttcttctcacattgaggaaaaaattgatacatctttctcttctaattcgggagaaaattgatacattgatggttttctgtggcctggcatccaatttcggctacaactctcttaacctctttaacaatttccttgataaaatcagcttctgaactgaaaaaaattatgagttgattgaaagcaagatattttgtggatgtacttttcgttcataaaacgaaacataaaaccaaaaaaaaaaagtggtttatccataatccttaagatccacacatctttaacattatctttatcacacacacacatacacaaaaacaaaaaaaacagagagattccatgtcccttggcatctatacttttctctcaaacatggaatttttcttttttcttgtatttaatttaaatgtgaaaaaatagaaataatataagatagtgatgtgtgttattgataaacaaaataacatttgctttaaaccatgtgcatattctatctgaatttaagaaagcatatgcgataaatgaacccacttatctacattcatttgtattagtaatataatgtaaaatgcaaaaaacaagatcagaatttgt

SEQ ID NO: 33123 - DNA, 573 bp, Arabidopsis thaliana columbia
ttctactataaaatggttagcaattagcttactgagttaatacattttttgtcatccattttgctattgcagtacttcctagagctaatgaaggtgccacgagttgaggcaaagcttagagtcttttcttttaaatttcaattcggcactcaggtctggtggaattacttaataccgttattttctgtctatttgattctttggaggacaaaatataattttattagactattgataatgatgttttttgtgcagataacagaattcaaaaaaagtttaaatgctgtaaattctgcgtgcgaggaggtaagatgcttgcaatagttaactctagtttttgggcagtccatatgcatttctctttgttagaattttctacttattgcttattcatcaggtccgctcttcacaaaagctaaaagaaattatgaaaaagattctttacgtggggaacacattgaaccaaggaactgcaaggggtaagtattatttatgttattcttgttctacatctttttgcacaagacattgctagttgttttgtctgtacggataacctttgtggttgatatg

SEQ ID NO: 33124 - DNA, 477 bp, Arabidopsis thaliana columbia
caaaagaatcagaactcatacaataatacaacagtgacaacaagaaattgaaatttactgctacacatttctctccacactataaattacaatccacacaaaacacacacttcaatcaacacttgagtctctctactaatctacatgaatcttcttccaagacaaagcagccacggcaaaagcacttgaagctcctattaaagaaaccaataacaactaattgatcttctttggctcattcagaacaaactctgcatacagatccttcaaagcaatcaccaccgtcgttatcaacggccccattatcgctccctgcaacaacaaaatacccgaaaaaaacattacaaaatcgccaatttttgttccaaatttcataaagacccaatcctttaattttcttacctctagagcagaaggaaacagagtgactccaccaataatacttagtccagtaaggtaagcattggacccaggaat

SEQ ID NO: 33125 - DNA, 327 bp, Arabidopsis thaliana columbia
aagagctacaggttctaattccgcatccatctaattcattcaagaggaagaagatataagaaaaggtaaagactttgttaatgggtaaataagcctagatcctctaatgaacaattcgagagaaaagatttgaagtttcgcagaccgcaggcaccgaaatgcgtacccggaataaacaatttcgatacaaacgaagcgaacccgtaaaaaatttgtacagggagatgaagagaaaagaacctgatttggtttgtggccgggtacggtgaatcggtttcggggaaagtgataaaattccggtacagtagcgtcggttctggagaagag

SEQ ID NO: 33126 - DNA, 265 bp, Arabidopsis thaliana columbia
ctgagaaagtctatagcaaaaaaaaaaaccaaaaaaaaaaaaaaaaaacaaaaaaaatagcaaaagcacacctaaaataaataaaatagtaataaaaaaaccaagaaatagagttccacatctaaaagaaagcagatctaaagtactatatgaaaaccataaatcattcttccatacgttggaatcccatgaaatataacaatactatctctacccgacagaaataatacctgtgtatattgctccgtcgtgttacggacctttg

SEQ ID NO: 33127 - DNA, 421 bp, Arabidopsis thaliana columbia
tgtatctacacaaatcatcattaatatagtaaaaaaaactcaacatgtaaaaaaaaaaaaatgtaacgaaagaaaaaaagtaaaaaaatttgaacgtacttaaatggattcgggttacaaacaaatatcctgacaaaggaaagtacacgcatgagatgtattcaaagaggggatgatcaaaagaaatataagtaatggttgaagaaaaagatagtataacgaaatgaaccaactgcctagatttgtaaccgcatgcaaaaaacaaaagagtcattgatttgaatgtttacatacacaaacatagaaaatgatcagagttcttaattcttcattaaattctattagatttcgtgtctaaatggggatacttaacttgaggaattactcccacaaaaaaaacaacaaaacttgaggaattgtt

SEQ ID NO: 33128 - DNA, 444 bp, Arabidopsis thaliana columbia
gcttcaagctcttttggcactgacctacttcctttagcatttttagatgacagaagttgttacggagcagtggattcaggttcaacatcttgagcaggtttttaatttttgcctttaagtttctttcgcttaatgcagttgaatcttgtgagttgtgaccaagtggggtataaattcacgtcactgatgattgttcctattgcatcttgaagatgagagaattcaataaccgaaggcatcacacacctagcagatgcccgttcgtgaaggtaaatttcaaatccagctgtggactcccagtgatatgaaatctgaggaatagacaattaaaccgtcgtttaataatctcatagcctcgcatttctcctttgtgtatctgtatttagctcatgagcgatatccgtagaagacatctgcccaaagtcgctgcagcatttgacattc

SEQ ID NO: 33129 - DNA, 447 bp, Arabidopsis thaliana columbia
  unsure (1)..(447): unsure at all n locations
ttaaaaaccatcatttgaaaaaaaaagaaaaaataccattcccgaataaacggctgtaaatattactaacggaaacactaactgcggttaaaacttaactcgtggttttagcgtgaatatataaaaactctttcgcaactatgcgagtatttagtcttggtctggtggttggatgtaggctgtgtggcccgtctgttctccgtggcctctgttggctgttttgattttatttccgttttcttttgggggcgcgagnaggccgttgcgcgttctgggtggttcttggggcgctgagatcggtgggccggccgtgtttgtggggcttttcggccttgtttcctccggttggggcgttggctttgcggtctcggggctggggagcgggtctttgtgtttggtgcgtggttggtgttgtctggtttttcgttgaggtcgttgagcgtgtgt

SEQ ID NO: 33130 - DNA, 635 bp, Arabidopsis thaliana columbia
gaagaggtggtagaggtaggattactttagaaattgtttatacagtgtcgtagtttcgttgtaagcttttgcatgtgatttgtggataagcgtttgagtggactgtgctaattccttttttcgacttatcaggaaatggacctgcgaatgttgagtatgatgatggaggaaggggaagaggtggcagaggtaggatatctttagccaaatcgtatttgagtatagatttttgcatatgatttgtggataagggtttgaatgtgttgtgctatttctttttttgtttgatttaccaggaaacggatatgtgaacaatgagtatgatgatggaggaaggggaagaggcggcagaggtagaattgctttagaatatttctttccaaatcttagttttaccttttaacatatttgcatgtgatcggcggacaagtgtttgattggcttgtgctatttcttctttcggatttgccaggaagtggatatgtgacaatgagtataatgatggaggtatggagcaggaccggtcatatggcagaggacgcgggcgtgggagaggaggtggacgtggtggtcgaggaagaggaggtacaatggcccccaccaccttactatgagctcacaagatggagagctat

SEQ ID NO: 33131 - DNA, 453 bp, Arabidopsis thaliana columbia
tgcaatagcctatttattggtaatcttggggagaatataaacgaagaagaattgaggagcctgttgagtgcgtgagtatctgttccctttagtgagactcctgtccattgctttccttgagatcttggcctttttgtagacctgtgttctcaagaattctgcggtaaactgtactttcattttgcaggcaacctggtttcaaacaaatgaagattctgagacaagaaaggcatacagtttgctttattgaattcgaggttaactctgagaccttcaccatctgtgtatatgtgacagaaaatattcttctagcatattgttaaattcttctatctggacttgcaggatgtcaatagtgccacaaatgttcaccataatttgcaaggtgctgtcattccaagttctggttcaattggcatgaggatccaatatccttatatacttttactcttt

SEQ ID NO: 33132 - DNA, 398 bp, Arabidopsis thaliana columbia
taaatcttcaaataccaaagggatttatatacacacacagatacacaatgattgatgatcttaaaccaccaatccatacatttcctgaatgcaatgtttggtacactgtttttacatgttttttgaggagaatcaaggagataataaatcaaactaaaagaagagttataaaacacaacgattgatgatctggcgaaacaagaatgtctcaagcttttgattattatcttttttatttacagggttttattagatgtttactatgagtatgatgcgggaagaaacctgatcatatcgaacggaatgtggccaacagtgagagttggatggagatatcagcggcctgcttcaatgtccagtattgctacattcctgatactatcatagccaatgctgct

SEQ ID NO: 33133 - DNA, 568 bp, Arabidopsis thaliana columbia
  unsure (1)..(568): unsure at all n locations
ccggtacataatctgtaagcatttaattttgaaaaacttttcagcctatataaatctcacgtaaattccaaaacacacagaacaagaaaaatggttgcttacgtcgataaaaacttttcattggcttgttttttggttttacttctttttgttgactcatcgtatgcaaggtttaatatgttggttacaaaagatcagatccacacaatatgcaccaaacaagatatcaattcttcatattgttttcaagttctaaacgcaaatcctgaaattgctagattagattttcctagtctcttcaaatttgtgcttaattatcaggctcaaaatatttcggatacgctgaagcagtttaaattatcaggaggttacacgccgggtgttgaatctcaatatagcttatgcataaaattatatggatgggctttcgataatcgtgatagtatcctcagatatttggctgccaaagactataacagcgtacgacntatgatcggtggaacgttggaagatatgtttacgtgtactgatgatttgtcacaatgaagccagtccacaattttttatg

SEQ ID NO: 33134 - DNA, 528 bp, Arabidopsis thaliana columbia
cactgatggatacagacctcaaattacgatctaagttttcttcctgcccacttacacatgctaccacatcaacagagtcaggtgttacacactttcccaaaggctcagcaggatcagagcattcttgaactacagccatactatctacttcaagaacttgctcgctgccagagttacactcattgcgagctaagtctgtgagttcagtacactcagtgttcaaattatcagcttctatttcctcgcttggtggccttctaaggttgcaaacaggaggagtccaaccagttgtgatagcactattttcaggagaaactatatctagactctgtggactaagagatgcacgcttctcaggtttctctggcctcacatccatcatttcactatcgttctttcgcttggcatgcctctccaccacagagccggaatgagaaacactgccatcttcaccagatttccacccggtagattttggtgcctggactagcgaggccttcgatatccattagggaaaacaaaaggtgg

SEQ ID NO: 33135 - DNA, 533 bp, Arabidopsis thaliana columbia
ctgtgtttgggcttagaccggccgtggattgaagtaatagcttccgagggaggaatgattacgaagagtggagaggacggtgttgcggtttgattgataagtgtcgggaaattggttgcaatcagttagattttgagaaggttgggacatggctccaagagagaataggaagaagcaaaacagggaaacatcaatgattcttgtcatttttgttatgactaatgagaaaggacaaaacgtaacatagatttatataattaaataatacctttgtttattttatttcattcagatccgtaatgtccacacataaacgtggtagacgagttcagaggaagaatctatatataactattgttgtttttagttgaatatatttcatatttcttgtatatatataaaacgttgaatatctttgcaggttcgatgaagcaaaaagtcaaaagataaagttgtccattggttttgtgaaagatctaaacccaagcacaagacttgttcatacattttagtttttttgagacctgaagata

SEQ ID NO: 33136 - DNA, 498 bp, Arabidopsis thaliana columbia
agaaccatttatctattagatatattctagtactggtagactgtcgattctggatacatcctgaaaatcatttaccacaataaattgtcgataatctttttgttggaaaagttatatattatcttcaaatgataatatattagtcgacaaaagaaaagcgagacaaaatttgaatacattgatttcggttaattcaatactttcacttcatttttagcaaatagtacttttatttctgatttttatgtggctaggataaaagcaaaaccttactggttggagagagtaaatatttgagtcgatactaacaacaactacatcatgcaagatatgtttgtgggacaaagagaccgagcgaacaaacgaaacggcaaaaccatcatctacatgtatcaagtgcgcggtaaaccctcatggaagaatttccaagaaaacctcccaaagtccatggtatcttctatatgaggtaatgccgctgcctctagatcaacaagtaat

SEQ ID NO: 33137 - DNA, 530 bp, Arabidopsis thaliana columbia
tgcaaggtttaatacgttggttacaaaagatctgatccacaccatatgcaccaaacaagatatcaattcttcattttgttttcatgttctaaacacaaatcctgaaattgctagattagtttttttggtctcttcaaatttgtgcttaattatcaggttcaaaatatttcggatacgctgaagcaatttaaattatcaggaggctacacgccaggtgttgaatctaaatatagcttatgcatagaattatatgaaaattctttcgaccgccgtgataaaaccctcgaatatttggctgccaaagactataacagcgtaaacactgtagtcggtgaaacgtcgacaaatatgtttacgtgtattgatgatttgtcatccatgaagccaataccacaatattttctgacggaaactaatgatattaaaaatttgtctaccattatcttagtgattctcgaatgtttcataagtaagagaaaagaattctgtaattctcgcaatctatattaataataatattagtatgattg

SEQ ID NO: 33138 - DNA, 543 bp, Arabidopsis thaliana columbia
tgcaaactcatgcattctaatagtagaggtgaatacataccaaaaaccatgacataagcagcttcaagaagccaacaaagcttcaactttagctatctgttcttcctcggtggctttagctggactcttgttcgcctcatcgaacaagtcatggtcccatttcttctcattccttgtccagcttccgctaaacccacttcgcccattgccgttgaatctgtctctatcagcttgataactctgtctgcttcccgcgcctctttcatcatctctgttccacactctgtctcttcccattgctggtctctcatgtctttctgaatgcgtattgctcctccagttcctctcgttctgtctgcgattgtttagattagtgtcttttccatcctcagttcttgttctgtctgtgttgttccagtttcctctgcaatcttcttctccctgaaggctggtcgtttcctagagagtgctccttgggtgtcacactctcacggaacctatcatgtcgccatgagcttttgtcttcgtctttacgatgctgtg

SEQ ID NO: 33139 - DNA, 207 bp, Arabidopsis thaliana columbia
aaaaagcttaattaatacatcatcatccaatccggtggagtaaatgcgtagatggatagagaacggtgaagtttccaacaaaatctctgactctgattcagctttctatattcaatcgttcccattatctcattttgtagtttagttttatcctcaacaaccatcttcttcgttatattccttgagatgtttccagggtgcgttctt

SEQ ID NO: 33140 - DNA, 983 bp, Arabidopsis thaliana columbia
atagctgtttcctgtgtgtgatgacattcacctgaaattttatatgtacagtatgtactttgttgacaaattatccttgcactgaattacggaattgatcatgaatgtaaattgtgtgcctctagttattttctgatatgtttttttttttcattttttttttggtaaaaggttaagttttataccatttttgattttggacagaattacagagattacatgaaacagattaaaacaatctacagaagataaatacaatattactactcaaattgttttggatcgcttctaagcgttcaagaccaagttacgagatgaaacaccgattccgagctcgcaaaacttagaaatttgcgtggttgccacagagccgaagcactggaatcctcatcttagttgccacgagctaaactattcgagggccgtccacaaaacctcgatatagaagcctacaacttctccacaaaacctcgatatagaagtccacaaaaccacgagctaaactatctgatttctgatatggttttggtctgtttgatttcacacaacacaaatcaaacatcagcacaaccatagattatagtattaagtttgtttcttttcccacaacatcgaacaaaagacgaaacacaaagcaacatcacaagttcacaatcacagattataatgagcatgttcgtttagttaccgccggcggttgcgttttgccgcaggtagttgcggcaactaaacgaacataaatagctgcgtctgccgcagccgcaggtagttgcggcgacgaaacgaacaatctaattaattcattttgttcacaagaaaaaaaaaactaattgtctgctttcttttctcgtggagtcaataaaaggacgagccaactaaacggatcctgctgtacttcctgaaagagtgaaaacactttagtttttaagaaacaaacaaaaactcataaaatccccaaatgtttatagaaaccataccacttc

SEQ ID NO: 33141 - DNA, 517 bp, Arabidopsis thaliana columbia
aaatgttatgatacattacggtcaaatgtatgtgtgtaaccactaagccaaggaggataatgggcaagtggtctctggcgtgagggttcgacccatattctttactatgatgaaaaaaggctcacgccatattctcgatcaacataacaatatcattgaattataactattattgtcaactggatttgtagaatttgggggcaatgcaaaatatgatgttacattacggtgaaatgtatgtgttgaccaatatacaaaaatgccacacaaaagaatacatttaactgtgaaagtccctttaacattcttgtgttgttttctatatgtaactggatatatatataggtcgcaatgcaaataggatgatgataccttacggagagatgtatgtgtagccaatacacgcgagtggatccatattttctcaatgagcttaacgaaattatgggttacaagcatttctggagtcgtacattgcaatattttcttatgaccatttcaaaataaagttaccatg

SEQ ID NO: 33142 - DNA, 114 bp, Arabidopsis thaliana columbia
caacacactttttggcgactccactaggggtagggcatttggttccattaaatcggcccctaatgtccgcttccaaagaccactccaatgtttcccccaacaatatcaccgagc

SEQ ID NO: 33143 - DNA, 714 bp, Arabidopsis thaliana columbia
tatggctcaggttttcagacctgattacttcactgatacgcctgatctgttccctgtggctatggtttcgttttccgacgtaagccatctcaaggttcacgttggaatctttggccgttgctttggccgccattgtgaatctccttatccagtccaagtcatctcctccgtacaggaaaatgtaattatccggttttatctgcaaatcagacccatcattgttcattaatcacgcctcgttcttgaatgaatgtaatttaggtcaaaccctgcctgctctgtttctagagtttccaggccaatcataaaaagaaaaaaggatgagacttttgaaatacccagttgaaaatgacagagtcgatgccgtcgacgatgaggttaagggaaaaggtctctctcctccagagctcttcctcacgagatctagtgaaagggaaagcttcagtgccccaaatccagatcatatgaagcgcattgaggctagcctcgttgccttgtggatcaatcaccacaagtatcggcttgttcataaaatgccatctccctctcataaactccaccacatgtctctctatcagcttcgggctatccactgaatacctgacccccacaaaaaaaaataacttccaattatatttctccatctttctttacaactactagaatgtgtgttttgaaataaatgtgttagatccatggcatagggtcacggag

SEQ ID NO: 33144 - DNA, 702 bp, Arabidopsis thaliana columbia
taaaagatctaactttgacggctctcttaatcttactcactccgtaagttccaaatctctctcctttactctcatatctatatcgtccgaacaaaacccaggagaattgcttcaccccctttttgggtttttaatcattttctcagattctcagtttctgtttccgtcttctagattctgggttcagtttctgttttgctcttattgaattttcttattcattttgtgtttcggagttattcatggtagctgaatttgttaattctgatgttgttttgcgttttcttcttttctagtttggctatgtcgtctttgatctgatgctgggttattctctttccctctgttttggtttcttttagggttttaagtcggaatagactgatgggagcttgatggttattgttagatcagatgtggatttaaagccttcgctgaactaacaagtctatggaagaagcaaagacccttgttttacactgtatgttgtgaggaatttgtctgattttgggtgataaaggtgaagtctttgagtttgtaattttgagataagattggatggtgggaagagaggatgcgatggggaatgatgaagctcctcctggttctaagaaaatgttttggcggtctgcctcttggtctgcttcacggactgcatcacaagttcctgagggtgatgagcaaagcctgaacattccgtgt

SEQ ID NO: 33145 - DNA, 476 bp, Arabidopsis thaliana columbia
aaaggtactcatcgaatcgcagcatcccacatactataacttccccaccgataaaaacatttcaaaatcgaagtatgagagagattagcagcacctgagagagatcggacaagagaatcgcggcagtgacaccgctagaataagcagtacaggttttcagaatacgcgaggcgacccagccccaacccggaccactagcctcagtcatggcttcgccgggacccctcttactctcttccttctcatcttcgtcgtcttccggtgaaatcacagttctggcgtagtccaggaaagccagaaatggatcttctacttcttcctggtcaccaatttcaatgagcgatgctccgtttgtatccccatcagagctcggataccaattcaaaaccctagatttgacgttactgaaattgccggggtttatcaggaggaattcagggcatttgtgctttcgcggggaatttttaaaagaatta

SEQ ID NO: 33146 - DNA, 401 bp, Arabidopsis thaliana columbia
  unsure (1)..(401): unsure at all n locations
nnnnnnnnnnnnnnnnnnnnnctaaagcaagattgcgtatacttcagagtcggctcgaacagtagccgtgatctaggctacgataatggcccagctacgtgcgagcacggatctgcttacttgacatttcagagcatcttagtaaaacgcaagtgttttcgattgtcagccgagggtagggacctaatcagggtatcaagctaggatagcacgataccgagcgaagcaggacatgcgaaactagcaatatcactggacactcatccgagttcgttaagacaacctcgatcactatcggcgactcgaaagttgcagccgagtttgacatcgtcagctcaggttaccgtgagaagtttggagagtcacgcgccgagagcaatgatcctgcaccctgtgtagac

SEQ ID NO: 33147 - DNA, 226 bp, Arabidopsis thaliana columbia
gacagtttgtgtttgaatagcggtttacacggtgtaattccagcgatcactgcggttggaaacggcggttgcggtggagttgttgaagtccgagcaactgcgtcggcaccatcgcaaaaaagaggacctttcgggttctcatttaagtacccactgacgccgttttggtctcgcggcggtggaggaggaattgcgtcgaggagacgaagtggattgtgtttagacg

SEQ ID NO: 33148 - DNA, 493 bp, Arabidopsis thaliana columbia
tttccgtatatttcagtgagtcccctaatgaagtttactgagttaagcagaagtgttggtttcttagttaactgctaaagtcatggttttgcaaatgtttctgttgtttgcttactaatggagttcttccagatgaagtttttagtgtgttttagcagtttctcttatatgaaattgatacttgtgaagtatgatggatgttttgaaactaatggtttactcgctgacgtttcagatattccgttcttggagtaccaactggcctggagctatattccttagcctggagtaaataataggctgaccctttgaaatcaacatggtaaaccgggaatatgtttcgcagtcctgtgttatatctttccaaactctcatccatggattgtgtgttcaatttttgtgtctccttcttcttgtctggctttaggtttcctcaagaacttaataacttttcgctggtttctgtcctggagcgttggtgtgtggttggcag

SEQ ID NO: 33149 - DNA, 540 bp, Arabidopsis thaliana columbia
ttcacatggaaacttgcaaaaagaagtatctaaacatcaatggggattaacttgtaagagccgtgattctttaaaacatgtgtttgaacataggaacgtctctgtgttcccatttcactatgtatcaaaagatattagtcctggcttctttggaaacatatctaaatccactattcagcattttgttaatgaagctgagaggctacattcgtgttctttgctctctttggcggctgcgatgataccgtctttgaatgtcatgtaagtttagtaatattgtttagtgctaaaactctctttggggaagtttctgattgtagattttattaggtctgcaaatggacttgctctgccactagggagtaatgatgttaaacttagggagaacattgaacataggacttgtccggagaacactgaacataggacttgtcaggtgggatgtgaagaatatagtggtttgagtttcaaaaattagactggacaagacaatcagtggagcctaggacggggatcgagttccgatgttgttgaaggaga

SEQ ID NO: 33150 - DNA, 519 bp, Arabidopsis thaliana columbia
tgacaaaattttgcaattttatagtatttgttattgtaacatgttatgtgtaaaaaaagagaagataatttttttaatcaaaagcagagatagccaattacttacctaactaattagaactaataagccgctttagaagttcatgaacctcctttagttgttggattagtttattataatcaagtgattacataaagttcacagcttcatttatattgttatgatcttcattcaaagaaatttatattttatataaacgagaaaaatgggaactccataaatttttagaagaaaaattgtcgtagttaaatatctaactgaaattcgttgaaagaaaagagaatatatttaaagtttctaataaatactatgaaaatcctttgaagaaaagtacatattgaatagaacatataatctagtaagtttgtggtactcgttacttcatcatttggattgaaatgacacaaaaacaaatgtgatgaagaccaaacttaacaaaaattcaccaaaatataagtt

SEQ ID NO: 33151 - DNA, 270 bp, Arabidopsis thaliana columbia
ttagatgaactgtaaacacaaactctttaatcatgcgtgggtgattacagtttccaaaaattctttcgtacaaatacttagatcctctcttctatcatagacagattacactagtttaacatgtaaagctaaacaaaaataacatatataatacggtagattccaatttaacaacttaggcagcaatattaagctatatatatatatatggagaaacgatgagttttcgttccagattctctatccaacatgtaagtgatcaaattatat

SEQ ID NO: 33152 - DNA, 521 bp, Arabidopsis thaliana columbia
gataagctaaaggccaaccccaaaaaaaggcggcaaaagtcttccacgttggtcttattgacttctagctacgacaatatataaaaattgagcccattcacatttgtcccccatatatgccttttttatattatggacttgttttagttggtttatcgttcaaatgcactctaattacaatcttttcttcccctactaacacatgtcatcctcaacacttcacttttttcttgaaattttcctttgtgggtatatcctatgaaagcatgaatatacatctacgtttgataatgaaatcattcgcattattctaaaaaggttttcatacttcgtataggtttttctgcttaccacactcatacacacagatgtatataaatattgatagcttactttgatatatatttatatcatgaaacgttgacaaaaggaatatgtatgctgatctcgaatgagcactttggagaagtttaaatctcgtcaattataaatctccttccacgaccgccttagtttttttt

SEQ ID NO: 33153 - DNA, 724 bp, Arabidopsis thaliana columbia
gattatgaagagaatacccgaaagaagcgacactctcgccaattgatcctttacagaaaaagttaggaaactcagcagagcagatagatcacatatagaaacagagttgtgacagagaaacagaactcactatccaaacttgtcttgggagaacaaggattgacaaaagagctgtgcatagaacaagtcctaaacgcacaactagatttgctcttgctggaagaactactagagttaatagccatacctacacatatatacaaataccaaaattcaagctttaacaaaaaaaaaaagactcaaactttttaacaaaattggattagaaatttgataagaatcaagaattcaatataccaatttgattctgggatccaccgagtggagaaatgtcacaggagacgatatgaattgtccgatgggacttccggtggcgcttgaaatcaatctgaagacgttttcggctccaagtcctggaattggtaaccggttcacccaattaccggttttaccgtctccgtcgacggtggctctgacaatgaaaacccttttcgcggcgagagaggaggaaggagtctcattaagccggagcgggaagagaagcttagggtttgtaaagttccggttaggaattggagatgtgagatgacgaattgggtgtttggggattagggttacggtgagggagactgttggattggcaagattggagtgattcatgagt

SEQ ID NO: 33154 - DNA, 588 bp, Arabidopsis thaliana columbia
tagatttgaaatggctattatgtgtattttcgttttccgtacctgtagtacatgcagaaacaccgagtgaaaaatatcacagtttaaaaaataatattgctcagctgcttgcaccgaaaagcaaccaagatttcaaagttgctaacatgcaaaagctaagtaatttcacggtgacaccatcgaataataatttacccgtagtcggtagcgggcgacctatgcagcctgcgtctgtaccgattatacaaagtcagcctcgcgtacttaaagatgctgtacagatcgcagttcaacgtaatcctgaaatttctcagactttagcaactcttgctgcacaaaatgcaaatatagatgttgctaaagctggttactatccgcagattacgggtgttatgaatacaggtgatttgacacaaaagagttcaagaggtcagcaagttcttgccttgagtgcatctcaaatggtctatgacttcggtaaagtgaagtctggtgtcaatacagaacaagcaagacttgctgtggacaagccaatgttttggtgaaaattgatgatactcactcgatgttgccaaacgattattaata

SEQ ID NO: 33155 - DNA, 313 bp, Arabidopsis thaliana columbia
ggatgatcattgcctccatctgaattctgatatttcaggctaagctacgattacgtttggtatcatcccgtacgttaatacaatgtgaagaaatacacaaaatcaaatgcaattataacgtagtaatgatatatgttttgtcattttgttaaattactcacctcaactctatatatatatattgattttttcatatgttgagaatatagcacatcaagcttataataattagtaagaaacatagatttctatatgcccatgactaaattattacaaacaaaatttaacattttaaatgatgttatacggtgta

SEQ ID NO: 33156 - DNA, 617 bp, Arabidopsis thaliana columbia
ccacacaaaaagttttgttatgaatttaatataagttcactaatatatgcaaaaccattgtttaatatggaaactataaagattttcggagcaaatttcttccaagtgttgacatttaacaagtcttggatttgttttcagctcaaagtaggtttaactcattattagtagaaaaccatgtgcctgaatagtattgtaatgtaaactgcagaatataaaattttaagaatattcgaacaacaataaacgatgtgtggtcttatgaaatcattattatataaaataaaaaccaaaattctttatatcagctattcattttcacatcataatctaccttttcaaattgtggttttaatgacataattaaaattaaatatactaactatatgagtatttggtaggactaccaacgtatatctattactacatttaatgtctgtttgaatgtggctgtcgacatacatatatagccgtaaaatttcaatatacaacctatgttaagatattggatgaatatattttaaaacaaatcgatatattaccatgatttgatttttataaaaacattaaatttgtagaaatttttcttgaaactatcatgaacaaaaaaaacagat

SEQ ID NO: 33157 - DNA, 533 bp, Arabidopsis thaliana columbia
gggttagtctctaggtgattctgaagctacgtttccggtaattgtatctgagctggatcggcgaattgatgtatcatcattctcaaaggagctgttttggctgagaatctcaaatgatagttttcttcccgaggatctaatcgccattggattacgtaaacgtaagacgaagaaaaatggagagacgaagcgaatacatacacacaaaaattggattcacgaaatcgaaaaccagagagacggagacagagtaaggagattttgattgttgtttgtcgagacgcaaaacgctgttttggaaacggcgtttagatgcgtgacatgcgtcgtcgtgtaacgctataaaaaagtctgacaaagcaacccaattatatgctgccacgtgttcttaaaaagcctcttaaatttaagcgattagtttagagtgactgagaaaataattagtcggttcggttcggtttagggataccgaaccgcagtaaaaccaatccgataggccaataacaatgacagacaaatcaagtgattagttt

SEQ ID NO: 33158 - DNA, 628 bp, Arabidopsis thaliana columbia
attatgatagttgaagggcatatgctgctgagagcaccagtgccaattcggttttgccctgcttgtgcgtgttgtgcaccggctccaaaaggttcttgctgcccatgccgatgcaccaacaatccccaaaggatgtgactttgctttctgctagcatgtatgtgtttgatatgtgaatgtgtatgtgcaaaatggtcaaaatttaatgaaaattaacaattcacaagtaaaagtaaatctatggtgttagaattgtagctataaatatcccattaactagtggataaaggaaaggaagacaaataaaaactagtggacaaagaaaagataaggaaaacttaaatttctgaactttcaatagatatcatccaacgagtaatattttttttcttgactaatataaacatcatttactatggtctcaaactgcatctgaaatcttattaagtttctaagcatttatcagaaagctgcaatggccaccgagcgattctcaaccatgctcatttccgttctcgtacttgctttggtcttatctccaatccttccatgtcaagcaactcgagcgcatctagatggttagctaatctttttgggatttatatataatacatcgcagttttcttag

SEQ ID NO: 33159 - DNA, 639 bp, Arabidopsis thaliana columbia
ctaaagttgtcattcgagcccactgagattagaggtcctggacgagaagatggcccatccgccccgaaaccgattgctttgggtttggggaatagaagatcttcgagaacgccagccccttctttaaatacgggctcgaccgggcgcatagtgacgatttcgagcaaggagactttcggcagcttccagaaaatattcggactaaacaatcagcctcagcccatacagaaataacctcctgttactgcattctcaactcacccattgtccagagcgcatagagcgccgagtttctgatggcacaatttgcacccgatctcctgtacaatgcgtccacgtataaggctcaactcggacgactgaggtatctgcttcttttcggtagagattgagatccgctgaagttggcagctcaaccatccagagacaacggaatatgagttcgacagcttcacccattcgttctcaaggaccgccagagagctcagacatcgggagcactggcacaaaacggctgggcgagtaaatttggagaggtctatggcttcggagttcatgttgaagcaaaagaagatcgacgatgagttgcgcgtcacctaatctcgaagacatgagaccactggcaggtaagatgtgaag

SEQ ID NO: 33160 - DNA, 594 bp, Arabidopsis thaliana columbia
gctctgtttactctgctttgtaaattttgtaatgttcgtttgttgttatcgtctactaaggaagacaaataatgggttgttctagctcgagaaccatagcagagggtactctctctctcatcaaatgagagtcaagaaatgacccacacacatctgatctaatgttttcttcttcatgattattcttactgctgagagtatctctgtggactgtgatttgattgtgtgtttgtagggaaaaaggagaagattcgaagaccaaaaacatggaaacatcctcaaccgatatcaagagatgagctcacacagatgcgagaggagttctgggacacagctcctcactatggaggcaagaaaggtgatcatcacatataaataattatgtcaagagtcaaaagtgtttgtatttcaatgtatatacatatgtaaacagagatatgggatgcgttacgagctgcagcagaagaggatgatttatcgcttgcgcaaacgatacttgagagtgccggtgtgattgttcagaacactgacctcaccatttgttacgacgagaaaggtattagtcttattcttccacaaggtttggttttggtt

SEQ ID NO: 33161 - DNA, 613 bp, Arabidopsis thaliana columbia
taaaaaaaatttagatttaatttgtttcttttttcttttatctcattaaaaatcatcattccggttgtttctttattctttcgtctcatacaaaatcaattatcccttttgctgccttttacactaactctaccaagttttatttgtcgaattttccttaaagccaagtcggataggtcgtcatacaattgtcccaaggactcgacactcttaaattgagcaaatgatagattaggctgtgaagctgtgatgatggatatattggattggattgatggatatcatagaagcttgcagaagagcttcacgatacataaacttagatcctttggatacacgtaccaaaagagactaagggttttgatggatatatacacaaacaaaatgatctttcttttggatataaaaaaaaaagataagctctcaaaagagtttacaagaagaatataaagaaaaggaaaagagaagataaagaggcaagtcttggaacatgctctaacgttgcttagaaacaaaacaaaaattaaaatagagtttaaattagagtttaaattttaaaaaaaaaactcaactgcaaaagtgacaaaaatgccttcttatttaggtgggtttg

SEQ ID NO: 33162 - DNA, 964 bp, Arabidopsis thaliana columbia
gagaatgtaaccaaacagcccctcaaggatcttactgcgttcacggctatcttctatacatttctctatctcattcatcaaatgctcacgcttcatcagcttctttcctcctccaacaaagctacaacatttttttacgcacaaacatttaactaactaaggaatccaaatagcatcaaaatgtagccaaaaaaaaaaaaaaaactaatcctaagagttaaaagaacctggcaaaacatctcttcatgtggtaccggctttgtttcaatgcatcaggcattttctcagcgatggaatccgacttttgaagcatagcttgagatgaagatgacatgttttttttttgtttttacagaaacaactgaagattcaaagtctcttcaagaatattgaatgattgagatatgaagtagtttgttgaaacatggtttaatccacattttatatataaagatacacaataatatgctgtgaaggggacaggactcacaggagtagaaggagaaggatgggggagaagattattcgttagaaataaaagtggggaaaagaaagtgtgcaagcaagttaacaaaaaaagaatattgcgtgattttcattttgtttgaagcaaaatcagattttgtgtaccttttgcttttcttggggttcatgtgttaataacataaaaggtatgggtgcaaaaagaatgctccttttccccctctttgatggatactttacttaagattgtggtccctgtggacaatgatactaaattactttatagcaagataataattatatcattatacagtactaattatccattaattagtaccaattggaaaaaagattcaagttgatcaatttatagtctaggaaattaagtcatcacttgattaatcatatggttacactgaactaattttgttgagatttcattatgtaccggaatatacaagcgccagagaacatccggata

SEQ ID NO: 33163 - DNA, 577 bp, Arabidopsis thaliana columbia
caaaaattaacaaagaaaattgattaaatattaataaataagaaaccgccgatttgcttcgtttcaaattctttcatcttttatgcgataaagcttgtttgatttttcttcttattgaatctgtgtggtttgtctatgggagaagagaaggagaactggagaagcgagctcgacgatatcaatgggcttagtctgattgatttctccgccgaggatgataacctcctcctctcttcctttctcgatcccaccacctttgatttctcaggttatttcaatttccatctccaatttctggaaattgttagctgaagattttcctgggaaacttgtgaattgtgtgatttggttcatgattgttcattgtggggatttatagattttttaaagcttgattagatttttttatgatgatgatggattcagatactgataaggaagacagaggtctttgtttatttggagatacacataattgttgtgatgaagagactttgggctctactactttagaagagaaggagcctcataagatcatgaagactaacctacgcaaaagtcttgcttgggacaaagc

SEQ ID NO: 33164 - DNA, 556 bp, Arabidopsis thaliana columbia
tagcaagtttcggctcaatgttacctgtacattgatattgtcatgtctcacaaaagccgagaagtcttttaaggttaataattaggcccataaccggcccatctatagtccacagtattgaacccatatatgttaagaagcctagtagcccattccactgagaagagaaaacgatcaaatcgaaaagagatcgatcaacagccgcatgatgttgattgccgttgctgggttcgaaaagctgagattatgttcttgatcaagtccggacttatgaaaactaaatgacttaaatttgagggtattttttttcttttaaaatctgtttattagtttaatactttaatctagtataaccaatatcgtcataatgtaaggcttcataaataaataaatttagtatgacataatcttcttaaaatagttttattcttattggttaaaaatatttcttccttttgtaagataatttttaaattcgccgctcaatgaatttaattaatcaatcaaagattgaaggagcattaaatatagttaggtggggagatgcgtagggttg

SEQ ID NO: 33165 - DNA, 531 bp, Arabidopsis thaliana columbia
tgccaaaattttcagtatctgacaatactatatacgataatacgatatgcatatatatcatattttatttttgtagcttatttttttatatttttccaccactcatcgtagcctcgtatattttgatcggatcattgccccgtcaccatcaccaataagtaccattggcgtaaattaaccacatttcttcagaatccacccttatcttttacgtggttacaactgatcacgccactagacaccgcgacaactcgcgttccatggcggccgcaaccgctgttgaagcttccacgagcggtcgtcggctggcaatgtccagcagaaaccgcgacacagtatctgtgcttggtccagccacgagcctctcccaggccacgttagcatccatcttggaccttcgctttgtaaagactggagtcgcatccactctctgaatagaccacttcttcacttttctcaaccgttcgatcttttctctctgcctacaagctaactcaaatgtattcctctttatttcttcaacactttact

SEQ ID NO: 33166 - DNA, 301 bp, Arabidopsis thaliana columbia
gtcgtgttagtaagagttacatttttttttaattctttagctgcaagatgcaaagaggcaagaaggatgaaccctccttattaggctctaattctttgagatattcccactatctaaattttaattttgtgtgtattttttatttattattcgagatatttattatgtcctaaagttgattctctttgaaaaaggctacattagacttagacccgtaatatgaaagttacgtactttaaaaagctatatataaaggacccttggagacccttcactacatcaaacacgaactcaaaattat

SEQ ID NO: 33167 - DNA, 530 bp, Arabidopsis thaliana columbia
tatcaatggtctaggaaagtaagtatcttgaagctttttgaacgctactctctctctttgtataaccaaaggtatgaagaaaactcgggggattttggtgttttaaactctaaacagagccaaggtgagcaaatacggagatcggttattggaaaccatagattcaaccatcaacgaccactacaaaacccgtcccggttcagggaagaggagaagagacgagaacgttaatccgaatgtagcagaagatgatgatcccgattggagtgcgagtcagtctcacaaaaaggtagtgaagaacaaaaaataacacgttcataaactttaaaggacccaaacaaactaaaaaattaagaagctatagaaatcatttacatttgcaaaaatagtaattcaataccatctgtcaagcaacatatttgcccataccggggtgtgatttagggttaggttaaataaacctttacacctaatccaccatgtcccatgaactattgttaatatgtcatattctgcaactatttatatac

SEQ ID NO: 33168 - DNA, 554 bp, Arabidopsis thaliana columbia
ctgtttgaaatgttcagatccaatttaattaaaaagacaatgacattggtgtggagatggtgaaggcaaacaacaaacaaaaattggaaatagaactaaaagactagaggtgagctaaactaaaggttttcgtggtaaatttgggatggagttaatctaatttgtgatatgttttttttaagcatgtaccatccattatgtacattcttttagttaaaaaatgttgagttgaagttaattatttttttatagcttaatatttttttttggtttaacaattagcttaattttgttatttgataaagactaaaacacccctggatgctcacccaccacatgcccacaaacggagattgccaacccccgggggagatgacgacagacgagaggagagaacagatttggagcttttatagcttttatagctatattgttaaaaaaaaatcaataatataaattaaactgcatgcaaaatcaaactcttgtacatctagagtcttactagattaacgtgtaagaacttagaacttggaaaaatctatatggacaaaata

SEQ ID NO: 33169 - DNA, 584 bp, Arabidopsis thaliana columbia
  unsure (1)..(584): unsure at all n locations
gaggannnnnnnnnnnnnnnnnnnnntgtaacttagtatatttatacatttcctcaaatactttcgggacagtaaaaatagttttggagatagttaaatttgatagcactctaaaatacaagtattaaatggtagtcttcacaaaggttatatatttgttgaaaattgcgcactgaatgcatgtttgatctctgcgggccaaatagatgttaatgatttgaaaagtacggtgaagatactggtgtggttccatccgaaaatcacttgatcggttaaaaactagcgttttatatgaaacttggttgaatgtaaacaaaaatctatatgaaaacagaagttagaaaacatattcgagtttacaccatgtcgaaaaagatcaatgcatggcgtatagtatatcaggttttaagcaggatctagtgaaaagcgaagtaattgcgagattttgaaaaacggaaaaggtcaagagtgtctatgttctaccaagaaatgatctcctcaagtgaaagggataaagagtttttatgtgtagtatcatgtaatcgaaatatcccagttcaaacagtcgtcgacactctagagat

SEQ ID NO: 33170 - DNA, 373 bp, Arabidopsis thaliana columbia
ttcaacatgttcacgtggttatttgttgaaccatccatatatataacatataaagaaagaaggtgagacattgaatgaagagttcaaaaatatggttgatctatatttggtgctcctttaattcagtgttcctttacttaccaaccaacgaccatatcatttgaattattgctcataaatctctctctctacccaatctctttatttagtaccctattcttcttgactttgtttctatccaaagcttatacaagagatattcattcttaaactaagattttcatatatattgaaaaagaaagaaaagatttctcatcattttactttttggtagagagcatttcaagtaccaaatactttgagaaacaaaaag

SEQ ID NO: 33171 - DNA, 913 bp, Arabidopsis thaliana columbia
aggtttcacattataccaaatatactacagagaaaggatagatatgtgttcatctatatagaatcttcagattagttgaataataaggaatgtgtatagttgtgacattttcctctctattgtttctactttattgctagtgttacagacatgaaacagaaggaaaaaaaccaggttttgttattagtctgaaactatcattgagctcagtctcaattccaccttcatgtctgagatacagaaccaatccaaagtgaaattgattatttattggtccacttaatccaaaaggacaattttttcgattaaaccggtccgaccggtctggtattttgtccaatccaaagtgaaattgattatttattggtccacttaatccaaaaggacagattttttcgatcaaaccggtccgaccggtctggtcttttgtccggttttcaatagaactgcaagaactaagaaaagatcaaaactttgattttgttttccatggattacaacagtcagtggcaacaaccgccggcaccggcgatacagccaccggaaatgaatcagtcgacggcggttgatgcgtattacgcttcctattatggttactacgcaaatccaaaccctagttccatctccgatctccaaacttatgaatcctcagctattgcaattccaccaccgcctggagttgttgattctacggcggctgtgattgcgacgacatcatatgtgactgtggatacgacgccgtattatactttagacatgaatgctcagcagaactcggcttggcctgtaagtcgtttcagaaatatgaatgctttgatgaggaagctatgaatttctctccgttaagttgtgggaatgtggtcaagatgatgtctttcatagatttctcagtgattcgttaggatctgtgtgt

SEQ ID NO: 33172 - DNA, 559 bp, Arabidopsis thaliana columbia
tcttaaacttagttagacttgaacccaaaaacaaacaatcttaattaggcttctaacgggctttaagcgggccttattacataaactattcagctttcgtgaaataacaaatcggacagaagttgaaagctttacttcttcacttttacggttgctcaccgtcgtgacatctccactcttttcctttcaaaatccaaaatcacgatttgattttctctcgcctccgacgaacaagtttaaggtaccactccatgtttctctgcgatttcaattcgaactccatgtgaccttttctctgtctgtgtttaatttagggtttactcaattcgtgactttcatttgcgttgaaaaatttatctgattttgctttgttgtgacttgtgagtggttttcagatgagcgtacgaagtgattctccagttcattcatcaagtagtagtgacgatcttgctgcattccttgatgctgaattagactctgcatcagatgcttcgtctggacccagcgaagaagaagaagctgaggatgatgtagaatctgggtaactcaactctcatat

SEQ ID NO: 33173 - DNA, 432 bp, Arabidopsis thaliana columbia
gctcattcccatccatttttggatcaaatttcttcctaattcatcagagaaatcgaagagaaaacagatctcaaaaagtcaaaacctttgtcaacaaaattagtactggatcttaggggaatattaaagatcgaaactttaggagagaatgaagcagagaggaatcgggatgaagaaaataaagcggtaaatatatgagagatgagtcaaaggaagtaaaactcacagaaaaaagtttgctttcgtcttctccggtcagcttcctcaggtttctcttctctctctgtatatgacaaaaggctttttgattaaaacaaccaatataaagattatagtaaatttagtgtaatgaaatgaccaattgataccttgtgattggacttaatatagttaagtccactaacgatgatttattggcattagatgatttat

SEQ ID NO: 33174 - DNA, 427 bp, Arabidopsis thaliana columbia
taccggaaatgaaatgaactaggagttggtgagggaaggtgacagactattttttcttaagtcaaaaagttaagctgaccaaaaaagagcagcccaatgaaagcaaggatctttatctttagtctagtgtctgaattccatgcacttccaatgttttagtcaacaaaatgtacttacatttgatgacttgatgttgtatagattcgttaggaagccacatcactaaacgttaagcataactttatggttaaaaaaaaacccccccaccgtgttcttacttgtcatccaaattcgatctgccatttgaagtttcctaagctgttcttgatgactattcttaaattcgatgtttatatcttaccatctagattaagccttacaagagctacatatccaagtagtatatgctggagtagttttgtgatcc

SEQ ID NO: 33175 - DNA, 526 bp, Arabidopsis thaliana columbia
gtcgattaaaaaaacataaagagatcattggattcggtttgttatcaaacttcaattaagttgagaaaatttgataactcaaaaaagtttttaaggctttatatagtaataccaccaaaaattatgtttttcaaaaattgattttcttgtaatatggtcgcaccacttgactatattaatgcagagataaaaagatgtaaaagacgttgtactcgaagctactgtggaaacgcattttcataaagtatgcaccatccggttgggcctaaacatagcaaacgaataatgtatattaagggaccgattggaaacgactgttattaatggttgtagaggttttggctacaacgactttgactatagaaggctagaagctttgattacagagattttggttttacagtcacatacgtgacttaaaaaaaaaactgaaaaaacggctgtgaaaactttagaagattttaaagccaaaaaatcttgattggcaaaaaaaaaactttagagaattttaaatctttctaaaatt

SEQ ID NO: 33176 - DNA, 431 bp, Arabidopsis thaliana columbia
tacaaagaataaagaaagatataataggaaatataaaggtatttatgcatagaaattaggaaaagatcaatctttttgaagcaaatttttttcctagaaaatcaaataaaaaggaacagagagaatagaatttttctaattttgttatgaaatcaagttaaatacaaaatagaaatgatatgttaaattctaattggatagactatgtcatactttccctttacatgatatactttccttttcattatataaccgaacttaaaccgaacaaataacatgagaaccggactaaaattaaccaaaaaagtagacgagcgtccggttctattataaccggatctatatcaagtgtctcgggttcgatgcaacgcaccgttaccagtttcaattaaaacgcgacagtattatatagcttcaaagggccctcatag

SEQ ID NO: 33177 - DNA, 588 bp, Arabidopsis thaliana columbia
gggtaccgagctcgatttatagagatcaaagttaatcaaattgaaataaatattattgcgatgatcctctgacgacaatactataacaccactaatgttcaacatgaaaactcaaccatttataagttgggaaaataattcccttgaactgtcttagatttttaaagctaagtatatcgctcaaactagccgaaaagagttggaaaacctgaaaaactagtccaaagaaaaatcaggatggaagttgaaattgagaggtgcacacaaaaaaaaataaaaaaaattgaaattgagagggataaacgtgacgtggcatcttcatgctggcaacagctatatgtgaaaccttcccacaaagcttggagagcgacgctttttagtcgttcatcaatcctcaccccattgattgtgttactttcattatcacaaactgtttcctaattaaagtcctcttatttcgaatttatttcagtatagtacttgtgtgttaaacttacaacgttgaaacaactatgtccttcatttgcatttgaatggtacaatgaactacatatttctacattgtagtatgagtttttttagtttagt

SEQ ID NO: 33178 - DNA, 1041 bp, Arabidopsis thaliana columbia
cccgttgattgcgcagacgattccggtcgcctgctgcagagtaagactgtacagatacatctctcaaactagcaagctacaaccaccagcaacggctaggatttaggagaatccccgaaactggaaggacttgaggatggttttggctccgagtttaagtgaactcctagcgcatctgcaacttcggatttggcagattttggtgaggaacggaaagaataaaccctatataatgaattaccgccatagctccaaagctctacgacggaagtggtgttcctctgctaggcggtgattcaatcatgggcctaacttttggatctaatatagcaatattggcccatcttattttagatttaagcccaaataatgacaagagtccaagactggttttgtctccgattatcatttttcattaacaaaaattgattacaagaaattgaacttttttttttggtggaaacaagaaattgaacttaatataaagataaactatagaatgacaacattttctctcattaaatttgtgaagtcacaaaaatagagtggtattgcataattatgtgattggttaatattgcaaatataattatgttacttatgtatgaaattaacatggctaattaagatctctcttccatttaatttcttaacatgatttattctaatttctaacgaatagatagaaagaaacaaaaataggtcaaagaaatcaagaaggctagaagaagcaagaggagtaagtagcaaattaaaatgaataaaacctagaggtttagttaaatccattaatcaactagagtatgagaatgcaacgacaataacaacaacaacaactccactccatgatctcatcatcctccgcgcttcctatataaacaaacccattagccttagaaaataaacacaaacctaaaaccaaaacaaaaagaaagaacaatggccaaagctcttagccttacaatctttctctttctcttgatagcttccaatgtccaatccgctcgacttctcgatgaggttcaaactcagccacaatta

SEQ ID NO: 33179 - DNA, 424 bp, Arabidopsis thaliana columbia
agtaaacttaaacctgccgccgttaaaccgacagaagtggactctgttaaacctccggcgactcctccacagcggcttccgcggaagagcgcatcgttccacacactggacgagcttgaagtgagggccaaaagaagcatcgccgcgcaaatcccgacgacaatggttaagcttaagagaaccgagtcgatgtccaagctaagacccgagtcagatgatcgaaccgagtccactcagtcgtcctactctgggcctcggtcagtgaaggagaacatattcgtcaagagatacatagaacggagggagaaagaagggaacaagaagccggtgatgaactaggacctacttagggagtcccggagaagtgtccgccgggaggaggggaaggtttgattgtctacacgacgtcgttgcaaggagtgcg

SEQ ID NO: 33180 - DNA, 523 bp, Arabidopsis thaliana columbia
aaaacagtcaacaaaattagattagttacaggtttagttatatagacgatttgaaacaaataaattacacatacgacaagattggtacaacaaactatacgaaccataaataattacgatgtaaatgcaaatctttataatttcagaagcatagatttatacaaaaacttgaaagataaattaaaaacgcattaaataaattggacccacaatccaccatctattatttctttctttctttcttgtactatttttatatatatataaatctcatacaaatcaaaatcacaaactttgcctatcatcaatctcgaaatagtatcaagcaagtcaacaattttgattctcaacattggaaatttatcgtaaagaagaaaggataattgtttgttctttattacctaacaagtaacaacagaagatacgacagagacaaccgctggttctgaaggaagcttaagattattattaggtgtgtcgcggtgcacgagattccctgcgcctgcacatcagtatcgacttg

SEQ ID NO: 33181 - DNA, 481 bp, Arabidopsis thaliana columbia
agatgttttcacatgatataatataagattctttctttttgtagcaataatccaatgaaccttatacaagcttgaaatgtcatataatataataggaaagatcaaacgaaaactgcattagatgtttaatgtgatgtaaaacatgacctaccattatattacatagatgtcgtattttagcgtataaagttttaacttttagattgagatttgtaatttagtattcttgtagcttatcaccaccacatccattgagtcccatttaaatatgatattatacgttatatattttatctttttatttttttatgaacaatacagccccttaagatctaaacacaaaatgatgaaagtaatcatcggctgatcattagtatgcatgaaaaattcccatgtataattatattgttaaatagtttttcatttattacaaacatgatttacttgactaaaattgaaggtgagaaaataagatgtataa

SEQ ID NO: 33182 - DNA, 442 bp, Arabidopsis thaliana columbia
ctgattattattacttcccttactgaaagaattgaacttcattataggaggtagcattacaaacaataagacatttttagcctaaaaatctgctaacacattagcgaaccttggaatgtaaagatacagcaaaaagaaagaaatttaggtccatactcatatagaaaaaatattttggttagaatttatgttgtgaaaaaagaagtatgagttttggtccatacttttcaatttaaattctaaccaaaaaaattagagtggattcaataacaataaagagaatatatgttttgtcagagaataaaaccgtattttctttactccaaactagttttttaatacggttttattctagaccattgccattacatctaattttttatttttaaaacagtatttaaatacagaagttttttaattttgtttttactattttggctag

SEQ ID NO: 33183 - DNA, 606 bp, Arabidopsis thaliana columbia
caaaattcgaagattcccagaaattctgggttttcgaagtagtggagtgctatggatgttgcacacaaggtgttcgacgaaatttcccaatgctatttttttatatatcattcttgtgtcacgtgactctcacgttataaaagccttgtgtcacgtgactcacacgttataaaacccagcttcttcttcgatgcaattctgttattttcgttgcttctttttttcccgcttcacaaatttctctctgaagcaagaaagcttaaagaatcttgagaatcgtctacaatggagtcttcttcttctatcacggagggaaaaccctacaaagatgcaaatgatcacatcgctaaaggtaactacatcgaggcattgaagatacttgaagatttgattcgaatccatagagaagatcaaaacgcatggcttattcgtatcaaacaaggtcaagtattcttaaaactatcgctagaaacagagaactctgatatggaatcacatacttgttaggttctgtgggatgtactcggaagatgagaggttatcacattttgtgcaaatcgcttcacatgttggccacaagcttggatctttgatgtactcaagaag

SEQ ID NO: 33184 - DNA, 523 bp, Arabidopsis thaliana columbia
cgccttaccgggaaaacgaatcccccaatctccgacgatcgctccacctcctaaatctgtcgccatctccgtctccggagagaacctccaacatcatgactcctgaagccgctaactccttcgaatcgcctccgtttctctctgtttctacggtgagatcatcacaggcaaacaaattaagaatgtctctctgacgtttatatgagacgacgtgatgcttgtgtgtgtatgatctctctcgtcttattcatagctttttaagagaacagagagccgttgtatatatgatgagtttttcttgggccagaccaacgaatgattctttttaaacgaagggagaagaaagaaccagggcatcatcatctcgaagaagagaattgaaatcagagaaattgcgtctttagactcgaggagataacaggaaacgaggtatatttataaaacttatatgtttaagaattgagactcaagttccctttttttcttcccaaagtttccttttttcctattcacttagggtttg

SEQ ID NO: 33185 - DNA, 494 bp, Arabidopsis thaliana columbia
tttggttagaaatcttgagaataagagtttggttgacagtttggaattatagtatgtctttagacattctaaattaccattaaaatctagataaactttaaattgaaaagcccctttttctgtaaaactcgttaagtccatattataaactttaaattgaaaaagcccttttttgttcttttatcaaatgcatgcttgatctgttaagaaatcgttttaaaaaattaagttcttaatttatatgcaaatttaatattttctttatttatttaaaacgaaatcgtgtttgaatgttccgattgtacactgtacttgacgatcatcttatttcccgaaaccaaaaatttactattggtttgaaataatttatttctattaaaatcacacaaatgagtatttttgttgtatattaatatcggttgaccaaaaaaaaaaaaaaaaaaaagtatcttcgttgaaattcgattcatgttttgattcaatgaaaatattat

SEQ ID NO: 33186 - DNA, 1475 bp, Arabidopsis thaliana columbia
gtcataatggtgcatatatcatgtgacttttttaggtttatgccagcactcgtgtctcttttgctttgttgaagatgcatgaaaatctctcagggttctttggtgtataagatggtttctttgcatgtctacttataagtcttcatggtgaaattatttaaactcaattgctgattttttttctcagccaaacgggcattctttcccaaatcataatggttacaggggacgtggaagaggacgaggaagaggagcaggggtactattcttctcactcatttgtagaatgtgacggcatttatttgtttttaccaaggaaaagatctaccagtttaaaatagctcatgaactttagccatgtatgctaataattcttcttgttggcagagatcacaccaagtaatgaaattcactgaagattttgatttcacagcaatgaacgaaaagttcaataaggatgaagtatggggtcatcttgggaagagtactaccttagatggtgatgaagatgatgattccccgactgtagatgaggctgagcttcctaagatcgaggccaaagtaagtgaagtagacttataatcaagtaaagccaccatattctccctctctggtctcatccacattgtttattgatgtagcctgtttacaacaaagatgactttttcgatagcctatcatcaaacaccattgaccgagagtcccaaaattcaaggcctaggttctcagagcaacggaaactagatactgaggtacaatctatatatttccacactctgaatagcaagcagactggacagagtttgtcccccctcgttgctggagatactcgaattcccagaatcgtaagagaatcccattgactaacagaacgtattgctatgatttcagacatttggtgaattctcgagattccgaggaggtcgaggagggcgtggtggttatggacgaaacaacggttactcacgtggtggttatggagggcgtggttatggcggttatggtggccgtggcggcggcggcggtggctacgggtatggtggacgtggccaggggagaggcgtatcaaatcgtactacctaaactgttctgctagaaagggctctaaagactcaaaatccaatgggagctcagctcttgagtgcttttggtatgtggcaataaaacaaaaaccgagtcccgtgtaatgttttctgttataaaaccccacttgtgtggttttggagtgtattaatttgatttctgatctttgtttttaagacttggtaatagcgtcgttcttcttatatccaatgttattttgaacttttgtatactcgacatttggtgtgaaatgcattttctatttactctcaatagcttgttgctgtttactgttggtagcttcttgtctaaatttcaaaagtcaaacattttgactttcaatacagtaccagcagccttgaatcaaatgggccttagtaagagatagagag

SEQ ID NO: 33187 - DNA, 478 bp, Arabidopsis thaliana columbia
aaatattatatttatacataataatacacttgggctttgctcccttcctttagccccaaaactaaaaataaaataaaaagctcccttccttaaaccacaaggttttgattccagaaccagccattaaaatttgctgagaagaagatgatgggccatcaagcccaaatgcttatataagtgtcggtagtaaaattacagaactaggtgattattgttgaaaatatggataattatccatcataacttttttaccacgtttcattagctttgttcccaagaaaagtaaagtttatcttatccttatcaattaaaaacttgatcaacatgttgtattgtgctaagagaaataagaagaataagaaaaagcaaattattctctctttatatctctcatcttctatagaataaaataatattaaatatattcgcgttatagtttttaatacgttatcattatgatcgtctcttcgggtgattg

SEQ ID NO: 33188 - DNA, 487 bp, Arabidopsis thaliana columbia
tgctcacacgtgttcggtgtacatataatatgttgcatgtggcatttcggtgcctaattatcaagtttttaccgaaaataagggaaaagtatataatcatgtagcctttcagacaccgacaaaaattttaaacagtaaatacgatttttctgttcttcttaaacagaaaatgattaaacatgaatgaaacttttaaaagcttattttgacgacgtgttctttagccaaatagacgacatttaaacacatcaccggaccggaaaaacaccagttgaaaataaaataaaaaatgtatttgtaaaagtctgttattacaagaaaatatggtcgatcgttccatgtttaattgtgtttcttgacactttttagttcttataaaacacctttactacataacttgataagttggatgagaataaagaattataatagattctccataaaatgactttataagacatattctctcttatatatatatatatat

SEQ ID NO: 33189 - DNA, 585 bp, Arabidopsis thaliana columbia
gcttcaccaaccacaacttagacagttggcataggaccgatgcatatatagaccaaagaactctgattatgagaacagatactctgcagaaaaaccaaaagatcccagccaaataaagaaaaaaacaaacctaaaaacttaagccgaaccaacgtcgtggctttggaagtccacgaacgttagtcggagccacaattttgtcgaaaaaaatgaccaggagaaaaagagctggtatagagagaaaacttttcggaaaaaaagctctccgataaaataacattctaattttataaaaaatgactaaaattatgtaacttttacaaaataaactaaaaatcaacttccatttgtttacatatttcccatcacacaatatttttctttgttttacttgtttgctaacttgggtcattttgatttattttggacccaataaaaatcaagtgttttgaccagtaaagatgtcttcagtagtcacgtagacacagtgatggctcacacgttcagaacggaaatcactcccctggtcttggccaaatatatgctcctctaacttagagtgctaccactcggccatgaaaatgt

SEQ ID NO: 33190 - DNA, 638 bp, Arabidopsis thaliana columbia
gaacccagagaaagagatgttgagtcgtttcttggtttttgtctcacagtcaattcgtcgaacatcttgtgtgcacaaaaacacttcaaaaacgttacccttttgagctgcagattcaaagaaagaggagagacaaaaccaacagaggagagacacaaccaacaaacaaggattagaagctatagattcaaagggaaaagagagacaaatcaacaaaccttttccaactaaagcaatctctaactgaaacgtgagaggatgagtgaaagaagagagaaaggaggagagaaaggtgaagaacaatgtagaattttggatgtgtgaagtggaattagagatggacaaaagaagaaatttagggtttgaaggaatcaatttgggggatttttttttcttaagatgtgtttagcgttttgtcgcttaatatttttagatctgagacataaggcgcttaagtgaattttttcgcataagtattggcggaatagatgattttagcttcccgcttagtgattttctatcatagcgtttacaaacgctattacaaaataatcaaaataaaaatttagttttcatagcagtaacgaaaaatgagctatcctcttgtgctattaatgtggatatttgttgtagtggtg

SEQ ID NO: 33191 - DNA, 589 bp, Arabidopsis thaliana columbia
tatgtaagcttctgagcgtttcccttaactcgcaaatctgtactacataacctacacaatttttcctaaactaagaacataaagagagaagtttggtcagatctttggccggatcatacatggtgtgatcatgttggctccaaaagtcggtccaatagcagcagaagaaaacatcagctggaattaacaatgtttctgcctcttcccattcagagtaaaaccttttttaagttagtgggactgtgcttcgagaaggatgtttgtggcggcgttgacatcattcctggcgtgcacaagcgcctgtctcgctgcgtttctgtcgaatcccattgataccaatgtagttatggcttcctcagatggctccacacttgagggcaacggagctggctgagatctctgtaaacgaagaaacgttttagatgacactaagagtttggcaaaaaggcaaaccggatgttactgagaaaataaaaggatgactcacctctgctcgacgccctgtgttaggtgatatagtccaacgatgttcctgcttggtgctggaggaggagagttaccgaaagagggaaaagaaagccgcgagaag

SEQ ID NO: 33192 - DNA, 546 bp, Arabidopsis thaliana columbia
cgtctcaaccggtttgaacccaaattgggcctagagagaggccaagatagaggtaggctacaccgaaccggcccactcgctctactaatcctttcgaaacaatttcatgtccagtgtaaaccattaagtgtgattgatcattcacaatttcacataaatacagtcacctaatccatggataagacattaatcgttgcagttatctataaatggagagtgtatctttaagcaaagtacaaataagtgaaaagctaaggaatatttaaaaagaagaaaaagcagagattccacacaacgtcagaaaaaaccagagtttggtttccctggacaatgtctttttcttttagtctactttattagatgccattttcattgagtaaacaaacattattgtgagattattagaaagagacactgtataaaggataaaacaaaaaggcatacaaagacaagaacactcatgagcttttccctgcagccagagcttcttttttcacacagctttgacatagatttcatagcaacatcctaagacgaaaaaacaag

SEQ ID NO: 33193 - DNA, 305 bp, Arabidopsis thaliana columbia
catttcttcgtttttggcaacgaacatgcccaatccactactttaggtaaaaactcatgtttggggtggtttcgtgcaatttcgttgccgcacgtcacccattccgaaaacgggtgttgggtgcatacaaagcacgagtttttgccaccggaaccatttcttcgttttactgcgacgaaccttcccgatcccatactttaggtccatactcatgtttggggtggtttcacgcaagttcattgccgtcttcactcatgccgaaaatgggtgtcgatgtgcatacaaagcacgagtttttgcatttc

SEQ ID NO: 33194 - DNA, 566 bp, Arabidopsis thaliana columbia
atatcttttgaactgatttcgaagtgttaaagcacagatcaacaaatgcaaattgtgggacttgattcaggaacctcatgaatccaaaaccagatcgaagatattatgtggtgagagattgagagacttacacgacgttcgactttggataaaaccagatcggagaacgccagcgtcgcaagaagaacgatcgccaggagaagaagtaacagatcgacgacacttgattacttcatccttgtcagatgtttcggaccagtcttcgaactagcttactcactcagagaaccagagaccttaacaaaatattggctatttccccgggtcggatctagtcgaagcccatatatattgggccctaaacatgggcttaagggactagattggctctgttactaataggacagctggcggtgagttagtggttggattatggtgaaccttggtgcagaggatgatacagtagtcgaagtgtgcaaaactaggtgaggatttggttttgtgactcagtgaggatatcgtaggcgatttctcgagaaaatcgtttgaggaaaatggagacttct

SEQ ID NO: 33195 - DNA, 538 bp, Arabidopsis thaliana columbia
ccttctttgttataagtagtacatgaatgtttcagataatgacgatcattcgtatctcgttaagttaaaacaagaaaaacaaaacagatatttttgatgtaactccaatatatacatagtttttgtttccactttgtttagatttataaatttagattatgtccgtagcaaaaaaaaaaaaaaaaaggaaacacaaattaatataagcactgcaatatgtggtttagctcgtacaatggattgggtgatttgagtggttaatttgataaagatgatccaaaagcttgtccaaaccctaaaacaaactattggggacaaagatcacacaaaaggaaataacgacagcacctttgagataaaacaaaacaaaacaatatcccaaatatagtttgcaagccacaaagttttaatcatgaaaataaattataagaaaacaaaaacattcccaatatattatgacatccttttttttttttgggcaagtattatgacatctaaatatacagtacaacatcaaaaatatggggaaaatgttttt

SEQ ID NO: 33196 - DNA, 503 bp, Arabidopsis thaliana columbia
tattggtctctactctctactacaaaaacctagtgggactacaaatgaaaataaaacacaaaaaaaaaagaaagtgaaagtatctctctctttactacaagctgcttcatcttcttcctctcactctctctttctccaaacaagtaaacaacagtcaacacaaactcatagccccaccagaaaaaaaaaatactccaagaatttataggttataagtaaaaattcagtacaagtatgtatgtatgtatattccattttattgtgtgtatttatccccataattaaaaaataaaaaaagcaatatggagtcccacaacaacaaccagagcaacaacaacaccactggttcggcccatctggtcccatccatgggaccaatctccggttcagtctcattaaccaccactgctccaaactccactaccaccaccgtcaccgccgctaaaacacccgcaaaaagaccgtccaaggaccgtcacatcaaagtagacggacgtggccgg

SEQ ID NO: 33197 - DNA, 605 bp, Arabidopsis thaliana columbia
cgactctgccgccagtgtgctctaaaggcaagagttctctttctgtttgggtaatggttcccttgcgtgtttgcttgatttctgccaagaactgcagggcagttttacttttggcttctttgataatggttgtttccttaagactaaagtcagaggaaactggtttttgagcaattttttcacgcatgcgtttggttgaaataacctgagaaacagctgttgacttggccaattgataggtttcaaaccaagtccatttcttctcctcggcaatagcaaagaggtttaagacatcggactgctcatccgcaaaacgaagtccatctcgagccatcagctggcgaaaatgttccaagtcaaaatcattggccactttcttcttgagaccaaggtcttcttgactgcctagttctgccaattctggaaagacttgattgagtgagacaggtatttcttcaccatcagcactttcaactttcaaatcctccacagcagagtccccaatctttttctctaagagtctgcgataaacaggatgccccaagaagtcttgactagatagaggagcatggagggctagctgataaacatccccttttgataga

SEQ ID NO: 33198 - DNA, 617 bp, Arabidopsis thaliana columbia
tggagcaaaactgaaggaaaaaaatacaagaaatgaaggtgttgatcgatagcttctatgttgcatcaatcaacagcccgttagaggcaagacaagtcaatttattttgttgaataattgatcgatatttcatcatgccaattccattttgtcgacaaaatcgatcgataccatgaatgagtattgatcgactgcctcttgagcctgactaggccaccaagacctactgtcggcctaatgattgacatctctattcatgttgattggcattctttaaccgagagttttgagtctcgttttgtcttgagtctccctattctgacatataaccaacccaattgatcgttttttacatgcctatttggtaaaaagaaaaagaatactatcgaatacatttgttgtattttttttgtagtttagaagactattgtatgtcaactactgttaagtaataagtataatctagtagaataggaagactccaaggcaaagcacatgtttgtaacagaaaaggttataaaattgagtgattaacaatgcatcataagttcacacggtggaacatactacacacaatgaatcatttattttctaacttgattgtctaccaacaacta

SEQ ID NO: 33199 - DNA, 598 bp, Arabidopsis thaliana columbia
cttcccaacagaagctgatatttgtcatataagcacactaagaattgccagagtccaatcagaagcctaagtaagcgtaaaaagcaaaccttttttcttgagtttattgagaaccatccgtgtagaatctggtatcattgacctctgaataccaaattcattagcatctaacttcttccatggcatcgatttatccttattacttccccgtgctccactaaaatcttcgatcatttttacacaagtcaaaacaaaacaattcccgcttcattagaataaaaatcgcaacttttttattgaatagaatcagaatcttcaaaagaatgataatcaccacgactttcttccttgcgaggtttcacaacatttctaggtgctgcgatagtccaacacagccgcaatgaccaatctgaacaatacccattttcgggtcgttgttagttacgaaggtgaagaaggaaatatagaagatggaactgaatcatagagtttcaaagcggaaaagagcgggagacgaaactgttgacgttcggagggagaaagggagatctctaatggagccatagcagggacggcaatagactagagcttttgatga

SEQ ID NO: 33200 - DNA, 432 bp, Arabidopsis thaliana columbia
taaaaagtcaaaacatagatttaaaaaaaaaaaaatatttcgtgaaattatgtttttcaaaatcttatacattttgatagtttcagtttgatgatttattcgcaaatatattttcatggttcaatagtttatacattactttcaataatttctctaatccaaatatccaattattattattattattattattacccacacccttttttgatctaatccaattattagtcaatgaatacatgtttctttaacatgcaagtgtatttaggatttaaataaaatcgattgcgatactatttaagatatagagacaggttgtggcgcacaacaacaatataaacgaaacgatatatgtctgcgcactcatctattaaactaaaatatgtttacgttatacatatgtgtgtgcatgctccatgcataagtaacgcg

SEQ ID NO: 33201 - DNA, 564 bp, Arabidopsis thaliana columbia
caaaaatgtttaaaaataagtcaaatatctttcaaagagtgaacagctcatcagaatcacaaaaataaatttataaatttttcttttgggtctttgcattcaccatccatttatttctatgtgaaatctttgtttttttttctctttctctatcgctttcccataagtacaacacttgttgaatcgatagagaaccttgtcttatgtatcgatatgaatccattatgaatcgatattattacattccaattccttaccaatatccctcaaggaaaattccgaattggatcccaaattggcgggttagtgtgagcttatccatgcggttatgcactcttcgaataggaattcattttctgaaagattttggctttcgtgctttggcaggtctccgagatcctttcgacgacctatgttgtgttgaagggatatctagatgatccgatcaattgcgtaaagccgcagtagcaacgaaaccggggaaagtatacataagtataaagaaaagacagttcttttcttttctattatattagggtttctattctattagattagttagtg

SEQ ID NO: 33202 - DNA, 273 bp, Arabidopsis thaliana columbia
ggcctcagctacttaaacgctgatgaagtatagggctgtagtgggcttaatatacaatatcttgacccattagttttagacatgacaagaacttagacatgcaccgtatgacatggcacatatttcaaaacacataattaaaaccatttcatgcgcattatgtcttcttctctagcattacctctgccagctccatctctctctctctctcgctaaaaccagtctgcaactttctctctctgagaatctgaaacagatctaacggatgtcgtc

SEQ ID NO: 33203 - DNA, 511 bp, Arabidopsis thaliana columbia
atatatagtaaaagagagaagtgagaagatccaatgtttgttaaattactgtacacatcatatttttaaaaagtttttagttttcttctatactatttcttatatacaattaatctaatgaggttataaaataaaaaataaaaaaaatctttatatttagaaaatttagaataattagttttttgaaaggtgtgtttcacatttgtgataaaacttaatatgtcatatgtaaaccataaaacatatttagtttgcatgttataatgtatacctaaagttacttttaaagaagaaagtgatcaataacacatctaaatagtgatttatgcctaacatgtaattgaaatcatggattaacaagaaataatcatggattaacatgatttcttactaaaaataataattatgcattacctcagtaaaaatagcatattttactcaattaaaaaaaaagtgaaaacatctaatacaaaaatgacattgaattgcattagatacatatgttatattt

SEQ ID NO: 33204 - DNA, 489 bp, Arabidopsis thaliana columbia
tgcaggatcgaatccccaaggcatgtcaacccaaaccaataaaacagtgatcacaacaaatcatggttttctattctttagtattcattcacacattacaacagagaacataacaatatacgaatcttagaatataacatatcagtgtttgcttaagagacaacataaaacctaaacatcctgataggataactaaacactggacaatactaaacaaacacaaaaagacaaattccaactcttgatgcttaaacgtttgcttgctgtggaagttgacatttttagtaggagggattctggtacgcatctctagcacgagagtagcaaacgtagtagaactgagagacaatggcggtgaagagtgtgaatgcagcaccagctgcaaaaactcctttccttataacttcacagcttggtggatcttcaactttccacatctttctatacagtgtgtggtacgcatttctgattgatgccgcaagcaaacac

SEQ ID NO: 33205 - DNA, 417 bp, Arabidopsis thaliana columbia
cacgttcccacctctaaatcaattgtcagtgagtgctgatagtgtgctgtctcacgctgatacaaaattcaccgttgatgaagaatcctttgagtgttctctggccaagcaagtgtggaagcctggtgaagtaattggtgaataggaacatgaaaacggtttagaaaagtgttacaagcttgttaacgtttcggtaattacacagagggttggtgaaatgagtttacaacaaggtgcaggatattttattacttcgattaagacacaaaacaccaggttgtttaggagttgatagaatgtctatgactggaaaacgaccctttgttgtttctctctttacgcgagtgtgggatcctggagaaatcttatgtgaatcagttcaactttggtggttaaatcattactttggtgaaaata

SEQ ID NO: 33206 - DNA, 473 bp, Arabidopsis thaliana columbia
gaagctttttggtcgtcgggtgggtagttgttgtatcagaaactggaccaagttctgcgaatgctcaagtccgaatcatcttcttttgacttggcatttggtgaaggagttgaaggaaagatgtatccagatgctattctcactccatgcatgactcgaatcagagactgcaggttgtcgtaaccgagcttgtcaaccgctaaatggtacccatactcctctaagaagtctttcctgaaacgattcaggctatacccttcagggtgttcctctgttatcttctttatcatcttctgacaatccgctattgccttcctttcctctctctccagctctttccggtccactgaaccaacaggcactccagcatgagccacgttcttgccgcttttctcaccattttgtttctgccgctgtgattttgaagactccgtgacgattgtgctcgacctgtttgacgcatggcggtggca

SEQ ID NO: 33207 - DNA, 591 bp, Arabidopsis thaliana columbia
catcatctcccctagtcaaaactcaaaacactgtcacgtgttctcaccgtctaaagtaacaccgttaacactcacctacaaaaaaccacattatataaacaaatcttttttctcctttttccttctctcatcaacttcagatcctttcaccagcaacacaagttattttcaaaagatgatgccaaattctagatcggcgacaataactccgacgacagaatcaaccaccacaacaacaacaacaacaacgactctaacgacgtcgtattggtgttacagttgtacacgattcatcagcgtttgggaagatcaagacgcaaacgctggagtcttatgtccttattgcaacggtggattcatcgaagagattgaagattcttctaattccaccgtcgcggcgattccggcttcgactccggaagttagatcggttgaggaaacacatagatctataattagacgtcgtagatctaatcgccggacgtcctttaatccggtaatcgtcttacacggcggaggaggaggaggagccggtgagagagttgagaacgaagaaggtgacggagctactagagaacgacgagcttatga

SEQ ID NO: 33208 - DNA, 621 bp, Arabidopsis thaliana columbia
ccactaaataccaattgaactcaaaatagtatccactcaaacccaaaggaaaaactaaaagagacaattttagcagaagcttatctcaggaaccccatttctagtggtttcttagtatcagcttctttctctatgtacctattcgttatggaaaatacaaaaacctaaataccaataaaactcaaaatagtatccacccaaacccaaaagaataactaaaagagacaactttagttgaagattgtctcaggaaccactagttcatcagaccctttaccttgtatttgcagataattatatttacttctgcaattttttcaaatgaattttctacctaagtagcaatgttaagactcacttgtcgatagcttgtttcttcttctctggacattccgggacatctgtagtttcctctctcctatcccttttcttctttttctttgatagagttgcatcaccattctgagaaagtaatacatcacttgatgatttgatcccctgtcatgtgcagacatgatatgttagttgacgtttaaaaatggacctttaataccagtgagaatttatgtgcatttaacaatgatatcaactttctaatacatggggataaacatttgtata

SEQ ID NO: 33209 - DNA, 217 bp, Arabidopsis thaliana columbia
aggcgccgactatctccgagcagctgttccaggaagccgacctctacatcaccaccgatgaacgagctcaggacctcatcggaggagcaaagcctgcaccagcggcaccgcggcgcgacacgaaccaacaacctgacaaacgttttgtaatactcaaaagtgcaataatgagaataaatctcatctcactaatttgtgtcctctacttatcatcaca

SEQ ID NO: 33210 - DNA, 516 bp, Arabidopsis thaliana columbia
tgagctaatgcattgtacgataccgccattttaacgctacgagaaacgaaaagtggcggcggattgaaaaaaaaaagcaacggaagagattaaccctaattgttctgaagtcaatgtgatagtgaagggctttttaaagaccgactcagcaatgtgtgcaaatactaaaatgcccctatttatgtcttaatattaggaattacaaaagcaatccctattaattgcttgaaatttcaaattccgccataacttaagtttttctctattcttcgtctccaggagatccaaaaaccctagaagagctagctctccgagttatcattttcaactattcgcgttgggttactgatattttcccggtcatctccggcgttaattttccgatcaggttagtaattttacgattctatgaatgtatgcttgtcttcgtttagctttctagttttctggaatcgcttttgagtagatgcaaatttgtggatttgatgacgatataagactaagcattcttttgtt

SEQ ID NO: 33211 - DNA, 425 bp, Arabidopsis thaliana columbia
taaagaaaaagagctaaaaaccaaaatatcaatcttagttctttctttatcacagtgacacagtgggtgcaatccacgatggttgttcctataaaatggtgtaaaacctttggttcaacccaaatcagtttgttttttccgatggaatttttggcacggttttggctcggttgaaattggggttactcgaattacatgttagaccaacaacaagcgacacagtttttagaaacagaagtacttgaaactttcaagcgacgagtttaacatggcacaaattcaaactagactactctgactcctgctcatagccatcacggttcacttgtggccacccataactttgaccggctctaccccggttaacctgctgggtcgtgtgaggcggtgcattccgggattccatgatggaggaggatacgatc

SEQ ID NO: 33212 - DNA, 526 bp, Arabidopsis thaliana columbia
cgctttaaactgatttttgtgtttttggatcattctatgaaagtggaattcatttagaattggaatcaaatgttttaggttgtgaaagcatgtttaaacattttcatagggagctatttggtttctcacgcacatttaatgtgtttcctttagtgtttgtgaaagataatgaaaaaccggttaaggatgcgattttaaacattaggaagagttatggtttccctaatccttttgattatggatcaaaagaagacatggatcaagcttggtccgaaatgaaagcaagtaaagcaagtgaagcaaggacgcatctctttggagtttggaattggaagtacttaaggaagacgaccacaattgcaaaaggatgctccactctaaaatactactttgctaatgtccatttatgctttgtcttgttcgttgtgcctaaatttttccttttgatgtaggtgaacggatttaagggcaaatccttttgaagagggggacatgatatgactatcccgagcacacccgaaacttg

SEQ ID NO: 33213 - DNA, 249 bp, Arabidopsis thaliana columbia
gctagaagtgaagaaaagaagaagtgtagagactttgaacaaaaaaaaaataaaaagaataaataaagaagaagtgtcgagaagcctctgtttcaattgtacaattgtgttaaacgatgtcgtttattaaactcagttgtatttaaatggatcccaaactttagggtttccttatcttttgaaaatcatattattctcctactctaactttcttccttctcttaccttattctcttctcatcgaattcc

SEQ ID NO: 33214 - DNA, 588 bp, Arabidopsis thaliana columbia
attaggggatgcatctcttggttagatgcgccatatgggtaggtaaccgcaagcaattgtttggttacatggcggttatgatggtagccatcaagtgacatacgaccacaaaaccttgaaaatgactttgtaagcaaatgcagagtagaaacgttaatagaaaaccaaacttgccttgatcctctattgcccaactcctccaatacataagatgtgatagcaacttatgtaggacacaccaaaccaaataaattacacaatctgtgagtgtctgttttcaagatttccccgacaattccattaagcaaaataaataataataactcgaaattgacacaaccacacgaatttgaaaaaagctgaaatccatatctcatgggactcaaacatccaatgttgattcaataattgtagtcctaaaaataaatcaataactaatacattttcataaattttagtactaatacgatagttagcattttgggttttacatagctgaaaacagaacgtcacattatttggagaacattaagtctaaatatttagcatgaaataaattcatataatcatatggacacaaggtttttt

SEQ ID NO: 33215 - DNA, 611 bp, Arabidopsis thaliana columbia
ttttttaacaaatcacattttattaatttcgtgtctgaatgtagcatgtgtccgggtcgttgaaaccaacataaaaaacctggaaaacatctttattttgttacatttattgatatgtggattctttatttagaatatttttctgctaactaatcaattaattgttagttggctatgatatgataataatctcatcatttagaacaatccacgaaacgaaacatcgcacggaccttctctaggactaggagggtcggcgccgtcgaaataaacatgtcatatatgacgactgatagaaaattgcaaaaagcccactttctatcaataaacagatgtattcgtttattgttattccttttttaaaccgtagtttgataaaatgaaccttaaaagtataataaacatgccaattatgagaaggatgagttcaaggaatatacgcatccataattccatatcccaatctttttcttcctcaaaaattaaagtgaactaccgtctagaaaagaaaaaaagtcaatgaaagaagataaagcaaaacaattcatggtttgttcaaatacaagagttatcattatcgtcatactatatgtctatatgtatatatatat

SEQ ID NO: 33216 - DNA, 369 bp, Arabidopsis thaliana columbia
gcattcaaataataaggagtataaattagagataaaaccataatgaaaactaattcgtcaggaattttgataaacaccatacctatttcgcgagttaacatattttgactctaactaacgggcttaaaaaccagttaatcatagggaaaccgatacttcaaaatattggtaaaaggacaaccataaggtttatacagagtcatatctaacagaactaaaggttcagaatgagcaaaatgaacatacctcgtcggaatgactctagtcagtgacataataagccgtatatggatatgtgtaacgactgaagacgtcgagtcaataaaatattatctaacttggactttgaaacaaacaaacaagcaaaca

SEQ ID NO: 33217 - DNA, 566 bp, Arabidopsis thaliana columbia
tgtacaagtatggaaaaggagaggaagtgaggataatgtgcattggccatggtagtttcttgacaccagctgagtttgttaaacatggtggtggtggagatgtggatcgtcctcttcggcatatcgttgtcaacacctcttcttcgaccttttaaatcgaagaatcggtgaagaaaccggaagggtcttgtgttctctgtttcattttttttcttgttgttttatcttttggatctctctggtttttggctataaaaatgaatgccaaaacctcaaatcttgatgaagatcaagattctcatgttgtcttaggtctaatacttgtgaacatgaaagtatcatcatcgaatgattctttctcgagctctcgcgtttaatataagtcctctctgcaaagtgcgtataattgatgtgtaaacattataacagtttaacaatgaagagggaacaagtgagtacagaagagctcaagcagttgaaaagtttttatgaagcaagtgtagttgcaggacaacttataaccgcacaagccaagatgtctctgtaatcttttgatatcgtgaaag

SEQ ID NO: 33218 - DNA, 553 bp, Arabidopsis thaliana columbia
tggctatctaatctctgtttgctgttgtttagttacatcctcctgtaatttccagtaattttctgattttgcaaagtgcagtcgaacaacgtagatctacgtacgagaacgatattgcagagtgcagacgaacaacgtacagattggggagcatgtatgaaaatatgaaattgttggatcttcactctctagtcgcatagttttttcacaataagttttgttctttaattgatttcattaggcagtcggccgtcccacacgtcttttattaagatttcgtcaaatcaatcgatttctctggaaaattgataccttatttcgacgtggttacgagtctgataacttttgttgtgatcatatagctttagtgtttgtgattaacatatcgccctttcttataatcttaagatatatcccttcgtggtccggtctgccttataaatatgttatgtaacgtagtcagaagcaagcattttcacataattatggcatgctcttgagttttggctactaccagtttttcgaccgcatatattagcgtaattgttaaaga

SEQ ID NO: 33219 - DNA, 1250 bp, Arabidopsis thaliana columbia
cagttacattattaatcaaactgatttatattagtagataaaacttatttctgattttgaaacctttgtaatctgatctttctaaaaaaaaagaaaagttgggatcttgctaaggattttttttgtttgtttactagaaagagcaaatattgttgagatgaaatttattatgttcatcactaaattaaatggtcttcaataaataaccaaaaaggaattgataatgttgttgttggtccaaaactggtcctgtatttgcctaaccaagtaaagaattctacaatgagtaatgatggctaagaaagatccataaaacatatgaaaaatgaaatgtgatgaggattagcaaaaataaaaaagaagacatgagcagaaacatatcaatacaaagatagataaccaaacggatctttaaagtttatgggttgagatagataaaattcttaaattctttttagacttcgcatgaatcgacgacattgagcctgacagatgctaaagagagctacgaagaagagaaatgtgtttgcatgcaaatgatgtgttgtaccgcaacgtgaaccactagttttgctcatttttatttgttaaatggtttgctccatcagaatttattttattggtaacgactctaccttcatccctgttatatcaatgttttccctcttcgttgtatactatactaatcagtcttgttatcatccgcattatagtagaccacaacaaaaatcatttaactaatcttcgtgtattgtcgattcaaattaaatgctctagtagataatttaggagtagctaactagctatagatcggataaaacactagtttcatagtcttttcatgcatttagttagttttgttgcaagaaatttgagaatatagtttggattaaaggaaaaaagcatgtggaaaattggagaaaacatcatggcgatcgccgatcagctatgatcagatcaatcgtcacctcgaccgatcagaagagggacaaattagcagaaatgacaacaactcttctgaaaatagtttgatcggtcactaaaatgatcatgatatccattaattatatcacgtttagaacagatacattggttcttttagctagaatctaagtctatgttgttatttggtacggcacaatgtctcacagagtaaatccaaactgtgtcgagacactataaagatccaaattcacattgagacaatcttttttgagaggctgctacaaaaccacatcttttttacaaaa

SEQ ID NO: 33220 - DNA, 561 bp, Arabidopsis thaliana columbia
caccatgaccaccatttagtttaggcttcttggctttccgagaaatctcaccgaaaacttcgtccttgacattttccccaccttttggtttgaccactagcgctccttccgctacagttataggaacagaagaagaacttctactcttcagagtcctataattcgtacatgattcggcaccaggcatatgttcaatcatttcctgtacaaaatctgcatcaagtccaaatctgttttgatcgagccaccttgacaaagcatcaactactgctgcaaattcgcttttatccttttcaccacacgtgacactgcaaggagccaacgaacagcaaaattttgacaacgataaaattacattgtctttctcattcatggtatcccagttgatttcacttgtttctctgtcaacatgcttacataggaaattcagggtaccttctgcttcagtacaattgaacatgcatcaacaagtttttgagacacttttttccatgcatcagacaatgaatcttcttcacaacaatgtcacaattcaacccatggcctgacataggataattt

SEQ ID NO: 33221 - DNA, 492 bp, Arabidopsis thaliana columbia
atcccccagcaaatctcgcttagaaacttgtcggtctttggaccaacggattcatgtaattgagctttgagtattgttacactccacagtatcagtttctgatgatcaaataagtcccattttcattctcctgtctctctcttcttaccagttaattttacttactacgaaactaagaatcacagggtaaacaaaacaagatccaaaaatggttgagtttcaaagttcaattcaacaaagcaaaatcacagcataatttctcagggaaacaacattatcttccagtgtcttattcttctgatatgatttaaagctatcgtactaacttagttctcctcactaccaccaaaaagcttcattttagacaatggagtcctcaagtacccttctacttcaaatttctttggagagagctctctgtacttagcaaactgttccttagcttcaacgttcttgtcaagcaagctatagatcatacctcgacagaaatac

SEQ ID NO: 33222 - DNA, 458 bp, Arabidopsis thaliana columbia
actctagaggaatcagatcaattatacggtagatttaccgtttggttaagtatatacaattaatgtttttgtaaattgtgttattaatccattttactttataattttctccgaatcaataatatctagatccccttttatttaatatattatccctttcaagtttaaaacaaaaaaattgtattaagatgttatataacgcaaacactaatcagaacccaaagttatattcgtgatgtacccatcgtcatacatcataaaactaagatgatatacattcatgcatacaagatgacgtttcacatgtccaaaaacctttcagtttgtcttcatatatatccagtttttactctgattaatatatcgtcttattttaaaagttatcaaggtatctgattcttgtaaggaattcattcatatcaagtatgcaaatcaaatatgcaatgttctgtatctat

SEQ ID NO: 33223 - DNA, 498 bp, Arabidopsis thaliana columbia
attaactttactaacggaaacactaattagggtagaaacttaactcatggtgtttaaatagattaataaaatctcttttcaacattatacgaaattttgccttggtcaggtggtttagtcttgattgactatcccaaatgaccctagatttgattccccctctttctcttttataagtttttaaatttttcttaattttttttttgacttaacatttcaaaccggaaattaaaagatggtttacaaaatcagaatcagccaaaacacagtttgaccggtacaacctacacagctaaagacgaaaccctaatttggagcagtagggattcatcgctagccgtctggaacttccagtcaccggagctatagccaccatcaatctggtgaaccatcatcaaccctccttacaatccggtgattgaggatttttatttcctctctccattaattccgatctaactcctctactcaactctccattggcaaaaaaattgtttg

SEQ ID NO: 33224 - DNA, 511 bp, Arabidopsis thaliana columbia
ttttttcttccctccatattagagatgtgcttggaaagtactaaagcaggttatcttaatcaattggatttagacccagagccttagagatgattcccgtatacaatggccataatgatgtcgcatgtctttgttatccctgactttgtgccacaataatcatctccttatcttttagaagaaaggtcacggtccaaatccctctctttgttttgctatcactagaaggatggcccaacaggtgttttaaagtaagactctggaaactaacatgattcaattatcatctgacatagcttctcaggaaaaaccttcactatacttagacccctgcccgtttctctcccatgtttctctgtgattttgtaaatttaaaattgctatgacttagcatagaataatttataactctggtttgagctctgatttcaataccttacaatatcagaatctaggcaacagtggtggtctaagaagtatataagcttctttaacataactttgttgggca

SEQ ID NO: 33225 - DNA, 488 bp, Arabidopsis thaliana columbia
ccctatactttaatttatactatccatcattggccccgaaagaccaataaaccttttttctttcacttttgtcaaatttggtagagatgttaaaaaaaaatcagtgtatcgtctgatgatgcactttattatccataaataagctgagaggcttctctcaaaaagcttcatgaaaatcaagattttattcttagggtacctctctctactttgttttactggtagagtgtttcttgctagatcagtcacttcttccaatattcgaatggtcttggtcacaaaaccaagaatctttggttatgaatcaaaaggccgagtaaaagaagccaacctagattttatagttgtggaagttcttttgttatcagaccatgttccaacctaaaccgcaaactagtttgaaggtatcatcaattatttcatacttcagtacctatccattattgagagtcgatatgcaatcaataagatagattccatcgactagg

SEQ ID NO: 33226 - DNA, 576 bp, Arabidopsis thaliana columbia
gtttaatttctaatcacctagtactacacaatttaacccaaaaacacacataatggcacatgaagtcggctacagtcaaatgtgttatatataaaaaagtctttaaaaaactatgaaagtagcgtgtaaggaatgacgccgtcttcttcggccgtaacaaccgatgacgtcatgctaacatgtgcatcttgcttctctacacggtggagtcgcatcatctttttgatcctctgttcacctcttctctgcctttcaatacctctcctctgtgccgttgagattttcagccgcctcctcagccggatcgtgaaacctccaccttcctccgccgtgtcgaaagtcctcgtcgacgatgaagataatttacggctccggcaatgtgaagaaggatttggaatgaaagaagaagatgaaaatgaagaaagtggtttgcttcatagatacttagataatcagttgagtttggctagaactatttttgatgatgacggcgatcgtgatcatgattctattagggttccttttttgtcgtaaatctttctttttataagggaattttaaaatgcaaatgtagat

SEQ ID NO: 33227 - DNA, 630 bp, Arabidopsis thaliana columbia
ttcagtctcgaattctctgtacatttcaactcacatagcattgaatttgattcatattttcttgtataaagtgttctttcccactgtctagtgtaagtgtttgtatcattatagcttaagcggttctagaaccatggaaatgttgataattttttgaatacatttcagccatctggtcattttgatttctatgttaataaccttatgggaagtgattatattgttcttctctgttggcattaataaacggaagcttttgttcatgcaggagattgcaaagaagaatgttcatgttaaagaacttatagataaacttcgggaacttatagcagatatctctacatggcaaagcccttgttctgtttgagttttatttttttgacaatagtgagatcagtttagacaaagattctaagccttgttcttgaattactccatgtattagttttagatatttgttattttgatatcatgaagccaaaaaaataatcaaaaatgacttttgtatataaaaatatttcagacaaaaccttcaaaccgctgtgtcctgttttcgattcttgtttgtattgatctgttaaagaacacttcttgtagtgttctgaggaatcatgaccgaatttctgagaa

SEQ ID NO: 33228 - DNA, 525 bp, Arabidopsis thaliana columbia
  unsure (1)..(525): unsure at all n locations
tcatgatcgagaccattataagagtgtccatgattttgatttttgtgttgaaagtatattgtcgaatggaaatatatcttcgatttctcaaattaggagtatcaatattttcattacgtttttttttgttgtacgtttattgacagatatgattaatagcacattcagttacgattagagattgtcttggtctactacagtagtagcgagttccgtatcggcctatcaaaagcccgattcaggcccaaaagcaaaacacttatttttcttatgtaactgttttttatcttaacttggaaacatattttgcaaacattacatcagccgcaccttcacggtttattttaatttcatatcatttctttcaagtagcactaagtcaaattcagaagttccattctttttataggtctttgattggtctacgtatgtttgacctcaaaaaaaatgctttccttagaactttctatgtttagtaacttttcatgtgtactanataacaaacacaaatgttcaaacgacaca

SEQ ID NO: 33229 - DNA, 922 bp, Arabidopsis thaliana
tctccattcctccagtgtaagtcacctgagtatacgctgatgtatctggtaatcctactacttgtcgtggcggtggtactgcggtgtattgcggtggtggaggaccagaggtaaaaggctgaggaggaggaggttgttgttgttgtgctgcttttgttcctataggtgcctgaagtggctgagcacgttgtacggtgattggtgtggttctctgtaagtatctgaagccactctctgtacctgaggatagtagccgccttggtttacttgtcctgtaagtattggtctgatgacaccttgcggttgcggtggtggtggcgcgtggtacaccggagatggagatggagatgggatcatgtaaactggttgctctggtaatcctaatccatgtgtggttgttggaaatacgactcctggattgtggtttccttgccagaaagtcgtcatcggaggagcttgcggattcgtttgaggaatcgtctgctgtggcggtggtggcgcaggattttgtatgtacggtggagagaagtatccacctccggtttctattaaaccgtcttcgttactcttccttctgtatacagcttcctgttgttgttgttgttcttgatccctaatatgcatcctctgaaattcctgcatttgtctttgaatttccatcggatttacgacgtgatccggttgaatcacacgcggatcgttaaacaaaggcggttctaacgccacaggaaccggtaatttcacctcagccggtggtggcggcggcggagctgcaactttctccgatccaaacaaaaaatccgcattattcggaggagcagttacggatttctccgattcagatagcctaggaacagtgttcaacgcctcgacgaagcgatctcgatccgattgagtcgaactttgagaaccaaatccagaa

SEQ ID NO: 33230 - DNA, 777 bp, Arabidopsis thaliana columbia
cttgtaccgttgtacctctactctttttgcaaggatcctctcattgtaacacgatcctaataatgtgatatttcttctaagtattattcaatcaaccagagactaattattgaacgcacaatgatgcagaatgtaatctgcggcttaatgacaattgacaagtttcaatctaaatccataatattatatgatgatatcaattagtcaattacactttacgacagcagttgtatagtattctaatgtagacaatgaataattttcagacaacaaaaaccggtaattattttcggacaaacaaaaaacaaaacaacagtaaagagatagattccgttgacttcttttcataatccagttctgcacactttactttctgatccatgggccctagaatctgagcctgacgtctgttgcggttgatacgtcaccgtttcttacttcgtttatcttctctccaaacgacgccatttctccttcccttcttcttcttcctctttagtctttttcatttgatcgctggaaatgaaaacttttcctctcatcactcatctctcttcttaaagattccttctttgcttcacgaaactaaaccgaaccctgatttccctttcttacatgctcaattatcttcaattttcgtttaattcttaggggttttagtcattttcgatcgttcaattccatgtccggcaaaggtctatctccggcgccgttcaacgcgcatgcgatgattgtccaagatgctgacacgttacgttttcgggtcggcgaacagga

SEQ ID NO: 33231 - DNA, 612 bp, Arabidopsis thaliana columbia
tcatacaaaatctaatgctcttgtatattggattcttctacgacgtcatatgtgtgtgaacaagattctaatatagagtatgaaatttacgtttaaacaacatgggaagataggaagagatgacgaatgtatggtttcaatattaggtaaacaaaagtacataaattgttagtttctatccttcccttctataaagtctccacatttctttcttctttttcccttttcttcctctccaaataaattgaacacgttttcattcgttctatgaaaaatataaatcgtgtcaattggagtatcgttttgttttgaaatagtggatgaagaaaagagaagaaaaatctagaaaagtgtaaaaaaaaatctagaaaagtgtatgttgtatatgaaacgtgtgtggtttatggtaatgccttgaccattcattatactctcttattctctacgcattatagtttcgctttttttcacttttaactagtagtagatgtaacatcgaacgtttcatatgttatgactttggttatcgtctttcttttgtaaagataagatataagtacatttgagtcaaaataatgataataattattacaaactatatatacctaaaga

SEQ ID NO: 33232 - DNA, 825 bp, Arabidopsis thaliana columbia
cttcatttggtcctaatggcgctggttgcacccatatcggatcaagatgccatatttcaaagctccatgaatggagaaaatgtggcttggaagagttcccattagcagagcttaaacccaccatgacttcaccacctttccaaagcttctccaagtctaccgagaaagagaagaacggatcaaacatctttatcgaaccacgttttctgaaacgaaccctcattctcttagaacttgcctcataatcaatcatacagctcaaaatccctccatcatccatcatcaagtcacccacaaacgaaaggtttctaattttggcagactcaggtctaccaattaagactcttgcacggtttcctctcttggagatatcaaactcaaaagcaacaactgtctcgttctttgcatactctaatagaaaccctaaagcagaggaactgtaatctttcttaccaaacagactaagatccaaagtacttggaaccattacaaaagccaagacatcaccaatctcattgggcatcgaaaacgagaagtaagtcgagaaaataacggagttcctctctttaccctggaatagattgatgggtttcttgtaaaagactcgtccctcggtccgattcactgagtcagtcagctgaatcgaagaactgtctttgaccagcttcgaatctccaaacagagcaacactcttgtcaaaactctgagattttacgaattcatcaaatgagaacgtgatatccacacctgcggttccatgtatctcacagcagaaaaggaccagaaaagatagggttttgaatatcgccatagctatactgagac

SEQ ID NO: 33233 - DNA, 912 bp, Arabidopsis thaliana columbia
  unsure (1)..(912): unsure at all n locations
tcactagactattagaccttctcttacagccgttggatgtgtcctatcgatgatgagagatatcatcttctaattttggcagaatcttttgtctaatgccactctctctgtccgaaaatttcccatctttttcactccattcacgcaggtaacagatcatttcaggttagtataaattgtggataagtgaatattacatgatagaggaccgtaagatattggaaatacacggggaacattttcttacgctatacctcgttaaattggtggtgtgacagtacgatttagttggacttcgtagaaactagaaagagtcatgcaattctaaatttactatggataggcgatcattactagctattaggttaagaaatccattttcttttagcaaaagattagtgacaactcatttactatgttttaatattgtagtatagtaaaaaaaaaatgtctttaagtatattaaatttattttgcttaagacttccatttttatttttatttttttcagaagactcataataaatcgatttttgtttgatggtaaaatagttgatgtatttatatcatttggtttattccagtgccattttttcattcgtttatcgaattagttttaattagtcggcacattgataatccgtaaaagacaacgtcaatgatccacctgaacatcttcatcgtccttaatttggaacctactattattaatttaaatagattaacgtcgtacaatatatactaataacatctaccacaacattaagtatggtacaaagatcacaactaatatgtgtcaaacagcccaaaatccgcccactatatgtggcatgtgtcatgaaacaagttcacatgtaattactttgatatagactttgagttaagagcatttttgtgcncgcagagacaata

SEQ ID NO: 33234 - DNA, 870 bp, Arabidopsis thaliana columbia
ggggaaaaacatgaaggactacaagtctacaacgataaactaacgctgtctggttccggtttacagttcagatccaaacccaaaccctgtaacccgacccgattaatctcatcgaattctccgtctcgaacgccgttacaatccaacgagtttctcaacccaagattctgactccgtttcctcttcttagacggtaactctccctcagcaacaccgccgttaactttcgcaaccgttcgtgtcgccacgtgtactctccgtaatatcttgaaaaactcatccacctcttcctccgttaccgtccgaacaacttccgtcgacggtttccctctgttaccgtcagattttccgttatcttcttctacgcgttcttctttcttcaaagagttgttcatgttagccagaagaaaatgttaacggcgtcgtttaagcttagtcaagaaaaaattatttgctgattttattttgctaaaatttataatgaaactcttatagccgtcggtgtggaacttagacggtcgatattgtcaacaactaaataaattggacggtggagattgatgctaatgacatcatcatgcgatgttttaaagcgtaagtatcatgacgtcacactttattgacttttggaataaaggaagtccatgtgtggaaaaattggtatcggctatatttttagagtatatgtaagaaataacttttgacttcaaaagaatacacaaaataaccttggaccaaatagtatttgtcggctacagaaattttggcaatagttagtctattttagcctttctctttcttcttccttcttttgtttctttttcatcttctttacgagactttagccatggagttctctttctctcttca

SEQ ID NO: 33235 - DNA, 544 bp, Arabidopsis thaliana columbia
tccaaaccaaaaagcttatctccacggttttgagcacctgatgtccgaggcggcggtgcatgtacagtaatcggaagaacccattcgcttttttccctttccggtactaacaatggatgttcgtacctgtaaattaccacaaaacagaaccagaaactgacttcaacaacttgagcacttcaaaagactcaaccagagaatggatcgtttgagtattgggagtaatacctgcttaagtccacactcttaggagtagttaggaactcaaaccgaagaatccattgcacagaaacacggggcgtagaaaacgacattggaccatccgtcggaattgaaaatagaaagctggtttgaataaggtctgccaccacctcatggtgatcgctttggaccttttgacgaaaaacatatggggtagtaagattacaattgtagagacatagcatccagcggaaaaagcaaagtaacaatatccatagccaaattataatccgctgcatcgataccttagtaagtgttggagaatttctcgttgatggatgac

SEQ ID NO: 33236 - DNA, 970 bp, Arabidopsis thaliana columbia
cactcggatacagtctgcactgatgtggtgagacactgtaaggacatgtcgtcaaatctgcggatgggatcctctggcgccacgagtatggatttagtctctagtgatggagacgagaaagaaagcaggattccaagattagaggtttcatctgatttcacctgcaccagctcaaaaacccccattagtaaaaacaagaagatctcataatgtgatgtatctagaagcagagacttacagagtaggagattgtgatgggggaagatgaaagctgaagatggggtttgaagagccttgttgtgaaatacgcatctcccttgagttttcctctaaaaacgatgttccctcctccgttaaaagatgcctctcgagcactatcatattcatagtaattgtttaaatgttgctcagaaaagtcaaaaacatttttcccttcttggctttaccgaaatgaatatgaagatagtattagggccagaactcactcaacagtgacctggatgatatctttgttgtcttcattgaattctaggagaggctgatgtgaagaacagaataaacacagagatcatcagatgagaggacgacacacccagatcaggaagaacgattgtcatgttgtggcaggaaaagtttttgattcatataaaatcaaagacagtaagatggttgaacctgaagactttggcaagaaatgttgtaccatggagaatctgacagttggcgaccttcgagtgaaacatggtaaccaaagccctgaacaaaagagagaagagggtttcagaacatagctgaacataatcataaccaagaaaatcaatgcatgatctaccatggtgttagtgttacaaaataagacctgatcaatctcaccttacctgattgaaatctgagtaaaaaggcaagacttgtggataagtttggactattccccatgacttctcgacaagtgaccaccatctggagagaa

SEQ ID NO: 33237 - DNA, 563 bp, Arabidopsis thaliana columbia
ctagttacattttagctttcagaattttaacattatgtactgtctcatatggtcttgaacagtcacctgcgcttagcggaactacatggtttaacttctcacctgttcagctaggacttgtggtatgttatttggagatcgatattttctgtagttaagccatagagttagcagaaaatgatagtttttactgcattttgttgtgtaggttagcggatccttgtatggagcccttcttggctcaatttctgtctatggcgttgctgatttccttggtaagtcttgtttttttgggttgacttctcgttcttcttaactgaatgcaagtatctcattctggttttcttcacatctttatgaaggaagaaggcgggaacttattatagctgctgttctctatctcctcgggtctctgatcactggctgtgccctgatcttaatattctcttagttggaaggcttctctatggctttggtattggtttggtgagctccggaaacctgaatcgttatggtaatttctttgttacttttgttgttgattgttagttaatgttttatgt

SEQ ID NO: 33238 - DNA, 846 bp, Arabidopsis thaliana columbia
cccattgaagtcctacaaactacttcttcccagtgatatttgaaaccagatcagtaagagacttagctgatttggtaataggagaattcatagccatcaagtgatacagaacaagctcaacttcttcgattgatggtcgagaattgaattgtgaaacaactttcaaagtaccattaccttcttcttcttcaacgagaacattccatctttctccactcacaacaccgtctcttacacacttaaagatcactccttttctcttactaaacactcctctcacttctaagccagtgaacgcataaatcacttcaaaggaaccaataaagccatctccaaagcttttctcttcttcaaacaaccatctcggattgatcattactacaggttttgtagaaaaagcttcactcgcggtcttaacatcctccagctgcgatttctccggagccatgaagatcgccacgtcagcagatctcagagctgttttaagagagtctgagaccggagacatggcaatgtggtggatagagtctgaccggaaagctttaacggcgggatcgatgaatgaagggttaggccagaggaagagaagcttgacattagagcctcttctcgagatgggtaagtcatgaaagatcgagaaagcgagctgagagagtgacgaaggagaatcatcgtcaaggattgggatttcaagacggaatcttggttgtttgagcttcctgagttttggggaagcgagttttgggttgtttaagggtttgatgagacatgaaaggagacaagttttggcttgattaatggcttcttctttggaaaggggaggagaagaagaagagggcactggcg

SEQ ID NO: 33239 - DNA, 716 bp, Arabidopsis thaliana columbia
  unsure (1)..(716): unsure at all n locations
attgggctaatgggcctaagtgatgctgttaaagtcccattaaacattttcaactcatggatttaattatgcaaagtcccattaaagtcattaatcttatttttataactaattttttaagatagttaatgccatatgggcatttgaaaatattggttaaaataaaacattaacaaatgcttatagcgtttttttactcatctatgtgtatttacgatctacaaataaaatttatttgataaaattagaatgaaagtttgtatttttctttaataatgaattaacatgaaaaaccaatctaaatcagaaaaaaataaagaatagaaccttttgaccaaatttatgtccaaattaataaataaaaatattaaatgtatctttccttttatggaaaacttatcacatacttttgaatattgattaaataatatggaaatgtattaaaaatatatatggaaatgtatttatgtgtgtatatatataaacacatagacaatatcattaaacttaaatctcagtaagtacaagtatattagaaaaacaaaaggtacatcagttcaaacgatgttagattttatacagattgttggtaatttatacgaagcacacnacaatttgttcatgaaaaagaaccaaatccaccaatgactccacatattctttcgatgataaagaacttagttttggttattaaatttcttcctactacatgattt

SEQ ID NO: 33240 - DNA, 930 bp, Arabidopsis thaliana columbia
ctgccaagaaaggaaaacaagctttgtttgttgatcctcagtttttacctttgttagttgctgtgtttttaattgcatcagtagaacatcatgtaaataaaaacaaactttgttgctccaccaaatttatttgacccatgtagatttgaacacatgaatatgattacttccacaagtttgaaatctaataaaagctagtaaagataatatcgagttttatcatattctcaaaaaggtgattgagatgtgacaaacacttgatagacttatacatgttttgtaactatgaaatatgatggtgatcataagcaaattggacttgtataaacagaccacaggtgatgttgatataactatcgttattcaccttaatttggacccaccatttgcttcaacttgtggctcctaatctctagagactcgtagcgacttggcagattccaattggctccttggatctccaccgttggccaaatcagcttgaccgacttgatgtggaaggaaacaaagttaggacatgccatatctattatctccaacatatcaccaaaaaagacacctagcatcattcgaagataacaaatggttaagagtcataatctttttaacaatgctaaacagtgatcatttaatttttataattgaaatcatgagacgatgagagaaacctgaacagttagaacatggcaaaagttaagaatcaagataaacattaggctaatggtcaagccaaagagctactaaagtttccagctttaccaaaatagtagtagatgatacaaaaatagttagaagttgcacgtttcagaacctaggtaacatgtggatgggcctatagaagattcataggaagaggtgtttcacttattgaggaagcagagagaaaagtagtactattggtgcattgcaagatataagagcaattagttt

SEQ ID NO: 33241 - DNA, 778 bp, Arabidopsis thaliana columbia
gaatcatatttttcattttttatagattattatatttattcagtcgctaaagatccatgtaaagtttagaagggtgatattctttgatcatacaatagtcggtttccttctcataaacaccaatttatagtacgtgcccattaatcgatatttattttagtttaacaaatttcaattttgagatctacgttaagccatcaaccatgcaaattgtatatgagtcaataatatagattgaggagatatgttatcggccattctggtgcaacttaaatgatatacagccacatgattatctcttttcctttttggtaaggttgataccacatgattaattataaagaagacattgattagttcatgttttaccacataattggaattaaaagtggtcgcaaattataatcaaacgtggtcgcaaatcgaatttcgatgagatgcaaacgttttttcagctgtaccttttaattcttttcttatttgttcgaaatgttggcctttggggaattaaaaggacatttcaaaaataatttattgtctttccataggagccggaaatggaaaagcttcaatcttcatgcacactatgttttgagtggacccaatttcgacaatctttttttaaatgaagaagataaaagttgttttttttggtaataatgtcgagtatttatagttttataccatgtttagtgagtatattgcagtttcacgttatgaaatttgtaatgagaaaattaaaggactaaaaaggcccactaaaagcccatatacattt

SEQ ID NO: 33242 - DNA, 558 bp, Arabidopsis thaliana columbia
cacattttaagtaaatactttgtatgatattttaatgcatttcttacgtattgaattttagccatgtaattctctaagggatcatattagtctagtgtttacttaagtacatgtaggtgtatgaagtggtttaaacaaaagaaacttacaaaatttgacgtataatcctaaaaacatatacatatacatatttatatagttttagcaatcaaatatctatagttagcatttcttaatcatccatatgacaactatatatacagctatatttgataatatagttacaggagttctatgattattttctacatttttttcaaagtttatattttggttgaaattatttttttttgtttttgcttagggcaccaaaaatggttggaccggctttagtcacactttagattaagaaaaactataaatcattgtttacagtgggagcaatgtgaaacattcgcaaattaagtaaattttgacttcaccttttacaactgatgcttaatctttaataagcattggttttattgttgtaaattttgaataatttaaaaagtgatg

SEQ ID NO: 33243 - DNA, 839 bp, Arabidopsis thaliana columbia
tatcactatcatcgaagaattcatgattatccaaattttatattagacacgagagaagcaacgcccacattcaattcgaagcttttgcgtccactggagagaagtagatgttaaattatatggtagactatggatggacttatggacattacgaaacccacgtctgtacagaaaatgtgtttttgtttaaaataaatattttttatttaggaaggtgagataaatagaaaaatgtaaaggtgtggtttcgttagtctactctgtcttttttttttttttttaatggttctccaccaattagtcatcaactgtgttttagttttaggctaggagtttaactatatataaaaaaaaaaatctaggttacgaaaggataatgcggaacccataattgtatagggttctctgctacctttaatcactgagaaatttgttattgtcctcgtcgctcctctctcaacactcttcaaactccaatcaacaaaataaaaagtacaagaaaatctaaagactggctatttcagataacacaagtgtgccaagatttgccatgagactttaagaacagttgtactctgctcatctgcccttataaccttgttcgttttccattgttaaaaaaaatctactaatatatctatcaaaaaaatacattaaaaaagggtttgttggaaatatagttacttttggaaacataattatgtaactagtaacactactatttacaatttgcaaaatagacaattttactctttgttttgtatactaagattctttcttttttagttctctcaaaccactagttgttttcactaaattttaggagcctcagaaagagg

SEQ ID NO: 33244 - DNA, 777 bp, Arabidopsis thaliana columbia
gacagaggcaagaaaattacgggataagcgtttgcaaaaacatgcttcgttttctggatatcctcatgatctttgaccttcgcttcctgcatggtaccattgtttttcacagagatgaactttctaacagcagaaataagctccactgataatgaagaaaccggatcatgtataccctctgttgtgatggaacgcctaccaagtctcaattcgcgagtaactaatttatgcattgaatcttggaggatggagacgcactgggagcagcaacggtacaagcacaccaagctagggtcatcctgaggattggttcttccagtcgtttcaacttgttcaactggttcaggcatgttgtttgcggattctaatccatgaactccatcccaggctttaccgttatttgagtcagctgatttgtggggatcttccagggatatagaattggaatccccagatccattaggattgtctagggaatcagctttttcttgcaaagaaattactgttcctgtagtttctacctcgcatgatccatgtggagtttcattctgttcatggtcagctgcaggagagttaagatcaaggagaacagcctgccgaaagggattcactcctgaatcctcaatcatcatttcagtatctgaaataacatcaacattctctttgaccaaagttaagccatccgtactgtgggttgtaagatgtccagtatcttcaagaaaagattcatgatttgttccattatgaccatttgcaatctctacaactggctgatga

SEQ ID NO: 33245 - DNA, 1440 bp, Arabidopsis thaliana
atctcccccttttggtcattataattttgttctccctatcaaattttgtatccctagtatagctaccggcattacttttcccgctaaaatcatcccctggacgctcaaacttggcatccctgtcactcttaggaccctgaatctccctcttagtctcaccatacatctctctcccatcattcctagtatagcttccggtattaccttttccgctaaagtcatctactgatctctcaaatttcacatctctgtctcccttaggaccctgaatctccctctttgtctcaccatatatctctctcccatcactcctattttctctactctcaaccctaatttccctgccatccttagcaccatctctcggctccatcggcacaggggcgtgagtcaaatgaggatcactagaagaaacagttgtgggcagcgacggagaccgatagacaagaggcagaggagagcgtctctctccatctctaggctcgcttctcgcaaccttaaccaccgttctagattcaacctcataaggagcagaagcagaagcagcagcagcaagtggtgaatgggagtgagaatgagaatgagggtgaggaagcgcctggaggtgaggttgaggctgagattgagattgagattggggatgctgatggggctgttgatggttatgatgaacctgagccggtggtggcgtcacaggctgatgcggcgatttagggtaagatccagaatcctcgtgagggtattttgctactgatgaagaagaagatggatgagtaacaccctcttcgtgagatctctttggaacaccactcatcactcccaaattcaataacccagaaattcactgctgcaacagatagaattgcacttaattcatacacaacctagagcaaaacacagaatttgaatcaccagactaaacattgaatccctaaaatgaacacagagccgaagatttttttaaaaaggatatttcttttaccaattgaaactgaagcagagcacgaagaagcaaacccttttggattttgccgccgggaagtaataaatggcaaactggattcggacttttgcctctctctgagtttctctgatgagtctaatttattttccgttctccttggtttgctactttattttggacaaatgtttatttttcgcgttaatatttgcttcttgtcacagaccgtcgtgctcttacaagtctccacaatttaggttttatttattgccgttatgccctcatacttattcaatctctcactttttccataaaactttctattaattgaattgttcataggatatagattttgtcgtttttaattttttttatacagtacaataaaaagtcaacggaaaacagagctcattaaattcactgagacgaaataaaataataaataaataaatcgaaggaaggagtcatatcaccttggg

SEQ ID NO: 33246 - DNA, 389 bp, Arabidopsis thaliana columbia
cccggtatattttatgttgtattttacccagtaagacaacaaaaagcatatattatgaaataaaacttttggttttggtaaaactccagagaactctccacctaaggctgccaccttggactgtgtccacatccctcagtgtctctgtcctctgttgcttgagcagctttagtgagaaagttgagaaaggttgtgagactgcgctaccaaggcccactcagacgaagattcggttcatcagaaatggggtccagtgcccccgtccttgacagtgctggaggcacagcctctcccacttacctgcgggcagtgactctgggagcgctcctcctcctctgtaaaatggggctaacaggccctacccatagggtggggtgaggacaggaggg

SEQ ID NO: 33247 - DNA, 565 bp, Arabidopsis thaliana columbia
aatctcattccttggctaataacccaaacagggaagcagatgtttcatgggctcagcagatgttaaaagactcttcatcacctaggaacggaaaccgtgttgtgaacatgaatggtgcaaggccattgactcaaggtggttcgagtgtgaatcctcacaacagtgacactcgtgagagcgacattcttgatgcgtggcttgaacagctgcacctagatcgctgagcctcagctgcgagagagaggttcacatttctgtgaagctgtgaaactgatgattcgtttatttattattcaagaaagcaaacggaaacaaaagcaaactccgggtaagcttttttcgattctaataaccctaaaaggctcagttttttcaggcttctttctgaaatttctttactttcttatttttatcacctcattaaattaattattgtatcatctctgttgtaacaatggccaaagtgcgcctctattacttcccggatttctgatttacattttttgtacctctcagtttgtcaattgtttctaatatcccttcatatttgcaaagacactgtatg

SEQ ID NO: 33248 - DNA, 881 bp, Arabidopsis thaliana columbia
gggataaatgtatcactgttacctctttgaggaccgacagtctgatgtgaccgattactgtagttagaagaaggccgactacccgtgctgttgctatgagatgaagcaggccttgaaccataagtatcattcacggcagtcttcccaaccccacgggatctggtatgggacttgctttctccaatgtgctgttcaggtgctgtttgctctgatttgggatttgaagatgtgaatcgaacttcagaagaggatggacgagggagtggcagagaatcaactgccttctgctcagtatgcacaaccctagagccaactgctacacgatttttgcttaattccacagaagacggtgcaccatcaatgttgtttgagggcactgaagatcggccagctttaagttgacctgaaccagctggtaggttggaagactggcgaacatcagagcttcctgatttcggaccaacagtacttttatccatcacagcagaatggctgtaaaccaaaaaacacaaaacaaaaatcatgagaaggatcatctatagagtatatccatgctggaaaaaggcccacccatctttaactgagggtgttatacatccacctataagtcacatagaatcaaggagaatgatacataaaaggaattagtactataggatgacaatcaccttgagaccagagctatatctttcgtttttatctcttgagaggttgaagttgatggatcaataacctgctttggaccgttttcttttttgaaagaattctttgcaccagcaacatctgatcagaagtaaacattcaccacacagttcatcaattacagaaaaattaaaaagcaacatgttacagactgccgctagggaactttctctttcaca

SEQ ID NO: 33249 - DNA, 678 bp, Arabidopsis thaliana columbia
tctcaattcttttgatttggtattcaggccaaccactggtggtgttgctccagctcctgccatcgcagctactgaagccaaagcctaaacaatgacgaaaaaggttattaggagttcgatggggtaggatttttgtttggaaaaataagagaaaccatacggtgatgaggaagagtgagtaagctcaatttcttcctgatttgaactttatcatttttgttttttttgaaatttgtgttcctgaattcaggatagtgctctctctctctttacatactctcttcctattgtttcttgtcctttttttctttgtgtgatgtaatcttaaaagatgagagggacacactccaagatagagagagtgggcatacacccactcactactttttattcagtttcagttgaaattctcttttggttgctctatctattattttacttttttgttttagagattatataaaatctcgttttaaaacatcaaatcatagatagatcttgaatactaatcatatgtatacgtttaaccgctaagcgctaacataaggaaaatattatgtaggcaaatgattaataaacatatgagaaaaaaaacaacgtcgcccgaccgtggggctcgaacccacgaccacaaggttaagagccttgcgctctaccaactgagctagacgggctttg

SEQ ID NO: 33250 - DNA, 595 bp, Arabidopsis thaliana columbia
cgagtagtgactgataatggaacacgttcatgagtgtgaatttcttcccatatgtgagttttataaccatttttcctttccttttaatcgtcgtggtgctcatgtttcccatgataagtttttctcattagaaccttgtttgtacgttgagaacatactcccgtaagagcacacatgcttcgtgtcaacccaccaatcattagagtttgtcatcatttttgcctctgaatcgaccgcaacaaactgattttgacaaggtttgtgttacatgcatctcaaacaatgtcctttccgtcttatggcggtagtccttggctgtatgttcaggctttccatacatccaacaacatcttatggcttcttcttgctgttaaaaccctttggtgaaatgaacggtttcttaccgttattgttcttcttgaagaccttgaatatggacttgtttccttcaattacattggctttgattccatagaacaaaactcagaattctcattcttacgattttcctcttcgattcgaagattgagaactaattgcttgagacatgtcttcttgtagatgctgtagatagacttaaaatcctccaagttga

SEQ ID NO: 33251 - DNA, 592 bp, Arabidopsis thaliana columbia
ctttgtcgtaattggactgatgaactagcaaaagttataaacagtttctcggactatcctcttcttctactttctttattttttcctgaaattctgtgactatatttttcaccgagaatgtaacatatggtttatagattcaacaatatacctttttgattagttgcttattttgattttgtgtttttacagtagctcaaaaatgtttggatcatcgtagtgtcagataattttggcttatgtgaaggtgagctaatcctacgaaactaaaatttccatgaataaattattaaccagcgaataacaaaacaactataatgaatcacggacaaatatttttatagaatttgttttgttgggcaagagtttaaagaatttataaagtgacttttcaccaaggttcaacagctgttgtgcaagaagaatcccaccgtcaatcacgtgtttcatcaatccatctgccgccacgcgtcaacaacacactcgttctccaatcatatgctttgctcctcccgccgattagaaaaataaaacggtaattaatgtttttggtcaccggaattgaaaactgctctttgagtctgcttctttg

SEQ ID NO: 33252 - DNA, 532 bp, Arabidopsis thaliana columbia
caaaaaaaggaatataaatattttaaaaactcaacttttacgttagtttgattttttatattatacagcttgaaacacggtttttcatatttgtaagattaaagtatatcaacaaaaaagacgtagaaccaaaaaaacagttcaaagaaaaagaacacaaacgcagatattgggttcttggacccacttttttgtttggcaccaattatatcagttccctctattcccttctccttatcaacatcatttactattttcataattttggatcttgtttcgcaattacatgaaacgtaagactaaattcaggttagtttaccgccagttggtgaacacactactaattaaggaagaatcactcgataacagagaagacgaaagtacacgcatgcatgtataaatgtacaataacaacataataacttaaaatacattacaacgaaaaagaaacatcccctccacttacatctcataattatgagcatccatatataccatcaaacttactctcattctcttctcaacttacatt

SEQ ID NO: 33253 - DNA, 946 bp, Arabidopsis thaliana columbia
tttgtcacacccttaagaagattgttatattgatattagccctgcattatatcttgctgatgacgtgctcggatactcataacaggtgcagcttcttactttcttcttctgacttccgtcttcatgcttgtgaggttttcaaactcgtctgctcaaggtatgcaactgggttgtttgatctgatgtgcttacgtgagcacgaatagacagctttaatttttgtttgcttttcttgtctgcagaaaaagacccagtgatgcttctactgcagagttcgattctgcaattagcaatttgtttcagattctgacgaatgcctccagagaattcttatgtagatcctcctcaagttctagcgttatagatgacaatgattatgattttgctgtatgcatgtgtgagagtatggcctctttaggctcaactaacttgcaaagcatctcttctgatggtggtgttatggctgtttatcttcagcaggtactgatctcgtatttttaatgtgttattttgatacttaaatggatgttttcagtgaagaaggtggagctattaatttatattggaaaaaaacccgctgtctgtgttgcaatggcattctgaaacagaataagtttgagatattattttagttcttgaatgacccgattccaagtgtatactaaattttgaatgcttgctgatatattttgagggatctaagccaattataactttaaaatcgttctattcatgttagcaataatattatgcattagtagtgtttttccccacaaaataatcatgttgtgtttatgttgccttaatcgtttgtattggtatagatgcttggctttttccaacacttcaagttgggccttcacttcgaggcacttctcttttggctggtatgtggtcttctctaatccaacttcttcattgggaaatttctaagacagacagattt

SEQ ID NO: 33254 - DNA, 826 bp, Arabidopsis thaliana columbia
tgaggcgagaagaagaattgtaactcaccggagaaatggttgtcggcgagaatgacgacggtgatacggcgaacatttcgggtgtctcctctcctccgggaggtttatcgaagggttttgatttttatttttgggtgaccgagtttttggaaccggacgagtcaaggtacgagttttttctttttttttgtcaacaactttgacacaaagcctttaaagctttgatttatataagcccatagtttgcaaatttgaaagcccataagaattaacaaacaaagtcagaccgtagccagcttccggcaagtgttgtgttttgaaaaactttcacagtcgtcgatttcttcctctctccctccaaaattcactctctaactcgttttccgacagggttagggttttgctattcaattgctccgaagattggatttgtttgagaagaagacctaaggaagagaaatcttcgatggctagagcgagaagccggagcagaagctatagtccccgtcctcgtgacaggtcaccacctcgcgaacggaaaggctacgacgataatcgcctccgcgaacgtccgtcttctcgtgatcacgaatcctctggtccttctggtttgcttatccgtaatctccctctcgatgctaggtctctccgtccttctctactgttcagattccatcaaggacatcacaagttctctaatgttgattaattgacacgagttttggaatgttttcttgtttttcaggccgaacgatcttagggattcgtttgaacggtttggtccactcaaggacatatacctgcctaggaattattatactgggta

SEQ ID NO: 33255 - DNA, 891 bp, Arabidopsis thaliana columbia
gatgggtctctacgacaagacaaggcttctaagatttgagaatgacactatagatgggtctctacgacaagacaatgcttctaagtaaagtagtaaagtgaggtctacagtcttacatacaatttattctattttagccatggatgtaagtgatttctgtaattcttgttttgaaatggacgaatctcatccataaatgtatgtaaagagcttcttattgattcaacttggccgtgaaaagagaaaacaaacagagaagcataaaaaggatccacctttcccgatcaaacaaaacgagtaagggagaagtaatccaatttcagacttacactcatacagattttttccgaagcatctcctctgatggaagctccaaacgtagtcccgcgtgttcctgacttgctttcatctctacgacacagaaaaatcaaatttccaaagatatgagctttcactcacacatttcaacacacatatggtgcgctagattattaaacccacaacgaaccatacctgccgcgttcgatgagcattcccagttaaggatatcaattaagtgaacactgccacaatacgcttcgccatgagcggatcaattccttttaaggcgatcccgcgaagacggtctacggtgtccacgattgtatccgactattgagtgaggccaacgttcccgattgatacaatcttacgccccaaattcccatctcttttatcttggttggacaaccggcaccagccatttccgtacttcttaactgggagagcagaatcagtctctctttgtctggcatgacagaaaatggaggaacctttgctttgaaaatgattgttctaaaatggttatcctcacaatttcccttgtgatgcagcggaacatggcaattagga

SEQ ID NO: 33256 - DNA, 458 bp, Arabidopsis thaliana columbia
tacttgtgaataatagaagtggttaagggctcggtatagtccggtttattcatctaaggtgaatctcttggttatttctggtttagtagagtctgtatactatacatgattgtaataaactctttggatcattaatgagaaattgagctttcaccatgttttccctctcgttcatggttcctattatggtatcagagcattttctgctcttgcttctctgatttcgtcatcgatttctcattgttttcttcgtttttcaccgttaaagtgttgaatctatcctggatttgtgttgatttgagctctagctgatcagaatcacctcctgaagcttcgattcaagttccgttaacacatttgagcttcgatctctctatccatggtgaaacagaagaagaaagcgcagaatcggagttcttctccaacatctgagtatcaccgatgaagactcgagctgg

SEQ ID NO: 33257 - DNA, 638 bp, Arabidopsis thaliana columbia
tattactccaaatattaggaaccatgatcgagagagaaaacatggtgaaaagctcaatttctcattaatgattcaaagagtttgttacaatcgtttatagtcaacagactcaataaccagaaataaccaaagatatgctcaaattcatttttacaaacactcaaaagtgatatgctctttctctcggctctgtattcctttcataacaagacaaaccgaggtcgttcaaaccatcatcggtaacgtcgaaggcttcaacttgaagcaatgatgctgatttaagacttattgtgctaggcttcttaatattttggcccatctgccagaattaatgatgaatactttcatattgggccctgagaaattgactaagacccaattgttcacagcaatgtcaaaaaatttacccaaaaaatctttctttcccatcttttaacttcaacttttattactttttatataatctattttccttaataagaaaattaaatactgaataaattctaaatatttgatacattctaaacatttttattatgtaatggtgaatgtctaagtattctcaaaattttagttcaactctgatctactaagaaagtatctatgaaaaaagaataagatcaaggtaataaatgagt

SEQ ID NO: 33258 - DNA, 585 bp, Arabidopsis thaliana columbia
tgtgctctaaagctggagatgtcattatttcgttatcaagtggacaagaaggtttacaagcgagctctttaaataaacaattggtgaagttacgtgcaaaagaagctatctttcaaaaatttgaacaatcattaaatgagaaatacaaccgtatgtctaattctggtgaagaacaggaatattatgggaaagttgaatactacctatctcagttaaattcggaaaattataataatggtacccagtattcaaagattcaggatgaatatacgaagttgaataaaataacagctgaaagaaatcagttagatgccgacttgcaaactctacaaaatgaattgattcaacttcaacagcaaggagactccccttccttatcagatacgacatcagctgatgataaagctaagttagaaactaagatattagaaataacaacaaaaatcgtagcattagaaacaaatattacttctaagaatagcgagattgatagcaacaaagccatattgaagatatgatccgtacctataatgatcaacttctcaggcttataatatttatgacaattagttagtgagttaggta

SEQ ID NO: 33259 - DNA, 646 bp, Arabidopsis thaliana columbia
cacaaaacttgttacttttgtctgttagattgaggatcatgtcacattttagtcggttgtgtaagagaatcttttggctcccatgtcattcaataacctttcggatttgtgacttataaaatttcctttcctaccacttacgttttgttacttgctcttcgacttggctttgtcctgactatatggatagatttattctggcttgctccacaagttaatcttgtttattctggttttgtttagtgtggatagattagtattgagttagatttttgtttaggagccggctcctaattaatcgccatcagataattagatttttatcggatttatgatcatcccgtttgttagtaacatcgtcgacaatgtcccgatgacaaggatatgaaggtgagtaatggttagtaacagtatcatcgttgtgttataattcgagttcaaggtgtgagctacaaaaagcgagtagctttgatagttctacatcaagaagatatcgtattaggggatacacaaaatacaactatgttggaaaaaattacagatcatgcataagtgtcaaacaaatataaagtagatcacaaccggatgttttcaaaaacaagctacgaatccaattgtattgtcactatattaagatagctgattg

SEQ ID NO: 33260 - DNA, 602 bp, Arabidopsis thaliana columbia
aagacatgaccttccctaattctaagatactgccatagaaattagtgtatttaatgatcctgaagagaaaaaagattttttaaaaaaatacatgtagcttccatatttcaaaaattaaacatggatcataattattttgcttttctaatgttgtggttccaagaatgaagaaactacttcctcgcaagtctaactctgctttttatagaactcttaactccggttctattttttttttttttttgataaaccatatcggttaatccggcaagttccggtataaacgcaccaaagtgcttcagattggacttctccacgaaagaccactattctgtctatttcgaatttgtaataattttcagttaatgctactggatagttagaccgcctacagtttcgactagactttttagacaaatgtgatttttgtttttaaagaggatcgaattcgggtctaagaattttaccataaaccaaaggttctcccaccactagaccagagatgtttgggtatcctttttatagaactctaaactccggttctattgttgtttcacaattgtgattaatggtcccattaaaaacaaaagaatgcaagaaga

SEQ ID NO: 33261 - DNA, 762 bp, Arabidopsis thaliana columbia
taaacggatttagagaaatcaagaagttgctcaaaaatacactcaaagaccgaaatcgcacaaagaagaagaagaagaagaaggttttggatgttgcgaaagatgattatgtggggagatattctcaactcttgaagcagatttctagaagagaaggtggtgacttgcgttcgaagagcttaaaactttcatatgaagagaaaaagagcgattcgagagataataaaccgcaattcttcagacggatttcgtccttgtccagccttgaagttcttggttcatttctgaccgacctccctcgagacagttctacttccaatcaggaaactaggatatctgaagaccaagatactaactttggagccaaaaaatctgtattgtcatccgaatctccggtaagagcagagaaggaagagaagtatgaggtgcaagaggagagaagccaagaaaatcacctagacagctcaaaccaaagaatcctgcaacaagaaccagattcagttcctagtaccaataaaaccgcagaaaagacagagactttactaccacaaggtaagctcttgaacaaattaagctcttcactgtttgatgagagaaaggtactcaattctatggttgcttgttctacaggtttaggtctaagttctttagaaatttacaaacatgaagaagaagatgaagatgcctacttctgttacgtaaagaaggttttaaaagtttcaggcttcctcgaaaaccaagacaacgaagaaaagtggtact

SEQ ID NO: 33262 - DNA, 525 bp, Arabidopsis thaliana columbia
cctgaatgtgactgttgcgtcgtttcatttcaatacatttagatttagttcatgacggctgcttttgtttatatgcaactctaaaagctttcatttgttttaattggcagggctgcaatttaattttttctgttacatcgggtccaccaatgaattccgttccaaatcaaaattctgagctggtatgcaaacttcaaacttggtccatatgacttaactttttatttaaaagttccatatgataagcgcttcagttaccggatactgcttatatgttatccttcatatatgttaatctttagcacaagcatttctttgttaacttgaatttcatcttcaggttcttaccccaaatgttccggatatcactgttatttctcctgaggacgagcacctcaaacagattatagatacaatggcccttaatgtactggacggtggatgcgcttttgaacaagctattatggagagggggcgtggtaaccactttttaacttcttgtttgagctgggctcgaaggagcat

SEQ ID NO: 33263 - DNA, 834 bp, Arabidopsis thaliana columbia
ggactaagatggaggatacgatcgaggatgaagaataagaggccacgatggtttgcagaagaggaatccggtattctgagtaaccattgattagaacggtgatctgatccgatctgagtttttgaaattctctctggttcgttgcatcacatggatctggatcccctgagagcgtgcgacaaaacacgagatccgtaacaacgaaaaggaaccagatagagaacctcaccgatttgactcccatatcagcctaactatcctatcagttagttccgatttgatcgataaaacagagaagagcgatggatgtagcattcgaggatggatcgcaatttcgtttcctataagcgtgcgtgtgtctatgtcaacaaacaggcaaagagaaaattacctcggaagctgatggcattccggcatcagaatctccgtctagagatttggaattccgattgactagttggagttgaccatcatcttcggcggttagaggctaattaacggctcacatagtcacatgaagctaaagtgaatcataaatgcaagtgggtgggttttcactaataaagccctataagaattatgtaactaagcccaatatagtttgaaatacaagcaaagcccaatagagtttgaaaaacaaacgtagcccatacatctttcttggtatgttacggcttatggcgtaaaagaaaaacatttaactaacaaaacgggtgagataggtgagaggctactactatatacgtagtgtctagtttagttataaggccagcacagcacaacacacttataccgacaaaacatgtgtgtcatttaactcgatgacaaagcaca

SEQ ID NO: 33264 - DNA, 929 bp, Arabidopsis thaliana columbia
tgattaagataagattggcattatattcatattcttgtacctaatatataattgaagcacttgaacatatttagtcatatagtcttgaattttgttgttgtttttccctttttttgtggggtcaaactgagttgctgtaaatttgaacatacatatgaatatgcatttaaattgtggccaacagttttagaaaactgttatcaaatcaaagatactttaaaaatacaaaaaagtagtgtaagatacaagaaagaaaaagttgccactttctcatgtcgcatatatataacgtttctcggaacttgcattttctctcttcttgtttacaccttcctcgcctgttacgagtaacacgaatatttggacttattggatggttgccttaataaaaaggaaaaaaaaaaagaaaaagacccaagaacaccaaagctgtcgtgggctcttattgtttatctgaaactaagccctattactattgggcccaaaaatcaattacgtaaaagagtttgcctgttatataagttgtttactattgtggcccaacagataaaaaagggaatatccggcccattctctttcatcacactccttgaagaggtgataggtcatgtaatttgattaattaagaaaaacgattgagttagacgaagaggcaatggtaggagaaggatagtttgggtagacgaaacggtagagttttggttattctcagattcttgttgttgagagactgatgaactactagaaaaaattaccagtatctccctcaaggttaaaagcgtcatttacggtaaattggggaataaaatggtaaagagaaggaggctttttggtggtgggagtaggtgatgccaaagtagacgactactaatagtagtaaacaaaacctttggctttaacactctcctccaaatcccagatctctctct

SEQ ID NO: 33265 - DNA, 564 bp, Arabidopsis thaliana columbia
caagcgaggttggccttctatactatctaagtccacttagagaaaacacgggtctaaatttgtttgtgaagtttgaggaaagggatgaaacatcaaaacttgtggctgcgagtgatgaacatttacagagttttgatgcacgcgaagatagtagcacgaaacgaaagcgtcagtgtagttttgagtcacaaagttttccaaaagtgcgtgtcaaagttggtcgcgatatatcgtctgcgggtttagaaacccctaaagttttgttgactcctggtgatgacgaattcattgaggtatttgaacaagcagaaggaaacctaggaagtaaaagtggtgacaaagttgctcgcgatatatcatctcctggttcaaaaaatacaaaagttttgttgactcctgttactacaagaaaacaggtaattagtgacaacacaaaaggtagcttagtagtcgctaaatctaataacacgactatttggcgactaaaacacctagtcggtaatccatgcgtcgctatattaattagtcgccaaatcgtgcgactgttaggcgacatggttacac

SEQ ID NO: 33266 - DNA, 617 bp, Arabidopsis thaliana columbia
aatatctgagaatccgccacgtgtgattacggtctcgtgggtaacgtcttccttgttcggatgatccaatgcagcggcttatcgctatctcaaacggttggctctcttttgatgacgggtcttgtacatttgtgggaatatgctaattttgcaaaataataaatctatttttactagtgatacaaaacatataatttctaaataaattgtcgtttaaataaaaagttaattaataaaaaaaaaaattttaggtcatttataatttttacaaaatatttgataaataaaaaataataggaatgtatatactaaaatcaagattcaatttgagatgtatgactaaaacaattgatagaaaattttaattaacatgaaaaactcatcgttttaaattttataattttgtcaaccaattatatatacaaaaaatgttttaggtcattttatagaaaaaaacagaataccaaatttagtcccatttgatagatttcgtaatctatttacatgatgcttttatatcatggggccatactgaaaaaagaaggcccatgatccataggattaggcacatagttcacgaggactatcgagattgattaggaataagaagagtgggt

SEQ ID NO: 33267 - DNA, 551 bp, Arabidopsis thaliana columbia
attggatgaaactttgaatgagaaggaacccactatccctagtattgatgaagaaatgttaaattctggaaggcattctgcgtttgagcttcgctcaggatctccaggttctgctgctggttctgaggaagaacgtgcagattttggtgagctagcaacatagtctgataatttgaagcttaaccactacattctctctcttattatctatttaaaacacttttttctttatgttaagtgcatccatcacctcaactggtgcttcagccatctcctcctccccaaccacaaagaagggcaaggaagaggaagaactttgatggtgtcacagtattaaccaacaagtaataacttttccgttgcttcatgtggctttgattatttcattagctgttccgtactgatcaaatagtttgaacaggaacataagtgaaaggcttaaggatcctagtgatactctacgtaagagaaagaagatgccttcatccaaattaaagttttggagaatgaataaccagtcaaggaaggatcaaaatttcaatgagcccttg

SEQ ID NO: 33268 - DNA, 496 bp, Arabidopsis thaliana columbia
ggatagtgggttccttctcattcaaagtttcatccaatgactcagtgcgttcaactctgacatcctgttgttgtgcagcaaatgatggatgggacgtggggcttagatcatgtgcagcgtcacgcattctctcaatctcgggaacagttccaggagaagtggcatcgtttctctcggaattgggaatgcgctcttctgtcaagttactttgtctaggatcctggacttcagtgaattcctctgtgacgttacgaggactataggttccagtatcgaaagcaatattggagtctcttggctcattgtctggtcctgtctcatgagccgtttcaacatcaatttctccggtatgcctactcacaggttctgttgattggctgctcaaagcaaaaaaatatgtaacaacattattaaagaagatcaactacacagataaggaagattcagagcaaggtgtagtaaaggaaatcaaaactctatgaagagctcactcgac

SEQ ID NO: 33269 - DNA, 588 bp, Arabidopsis thaliana columbia
tacgcttccatggctttaagccaaacaggctctcgtgtagctaagccaccaacaagcctcctggttttggaaagtaaatcacctttcatccacgacattgttgctgagcttcttcacttttcttcttcgcttgatctgttattgttttaccagagacgacgaagacacaagggtttcagaaatggctcgatttgataaaacctcatggttcatgaattaaaccgggtacatcacactctaaattacggtctaaaatcggttaacagagcaattgtatggttcgtatgtcaaaacgcagccgtttcgtaaatacatttgccttgataaattttcacctcttttgggtttcttctactagtcttcacttccgtcagctatagctttggagaaactgcatcaatggcgttgagattgacatcgctaaaacggcgccgcggttgagtcctgtcgcattttggaaacccgaagcttaagtcatgtcgctgcgatgccttccccttgaacggagcttttgatcgcccgatttctatgccgccgctggttttacatgagttcgatcagaatcaacagggtttgatcgaagaaaag

SEQ ID NO: 33270 - DNA, 873 bp, Arabidopsis thaliana columbia
tgatccggtgaagtgttaggatcgccttgaaatttggttaaaatcggtaattaatttctcgaaataattaatacacttctctttggagactatgtacacaattggaaacttttaaatgaaatcagtttgttaaaaataaataaaaaattaattcacataattatatggaaaaaaggatatcgactaaataatagaaggaaaagaaaaataaatatgatgaaaaggcctaataacaacgacatccagtcaaagccttcatatctgtgtaagaagagtagcaatgaatcttctcaacgttctcatagcttcgggttagattttgacaccttatatcaatatgtccagcataaccatagacatttccgtaaatcttatgtttcgtctttaatttgacatataattctttgaaaacgacgccgttagggttaccctcggcaatgaaatccactgagaaagccgtgtgacttcgagacttacgttcgtgaaaagtatctaaaacggcagcgtttacgggaccaagactcacggcagtttcatcgggtccgtagtagatagagtacctgtaagcagtaagaccatagacatgcagaagaagtcattgcttcgagcatcagttaaattatgggaacatattaaaatatatttaatatacgttggactggtctaatcaaaatacctggagctagggtttttgacgaggaaatccacgtgccacgtggcggaggagggagagacggcgatggattggatggagaatttggcgtggcagtgagcattattgacgacgtgaaagatcaataaatatacagcgacgatggtgaaaaggccggcgcaacagggtgtaaggcaaacagtagtttccttgcaagtggg

SEQ ID NO: 33271 - DNA, 572 bp, Arabidopsis thaliana columbia
tgaacttaccaaaatatcttgatgcagagtttcaagcagagacctacaagattccgtcgtttcatgacttggtctcttcaccggcggcgaatcattttccggagctcgtttagatatgagaatccttttcctccctaatcctctagtaaacctcacaaaccctaaccctaatctctcatactcacgagtcgacttcatttcaaatccatcactcaaatacgccataacttaaactgaattttcagaagctaatggaagtataaagcaaaatccaagagaagataacagaagtagaaaacaaaaagattatgtgaatcgttttttggggagagagaatctgagactgaagatttgatatgaattataaattaggaaacaagaaaaaaaaaattaaggaagaagaagaagaaaaaaaaagcaaataacacgtggcgttatttgattggttaaatgatgaagtggtgatcgtggtcggtcggtcgttttcggctggcttttaaaaagggtagtgtcgggttttacacggcttctttttcttctttatatacggtgaagtggagaatcatgtgaaa

SEQ ID NO: 33272 - DNA, 618 bp, Arabidopsis thaliana columbia
cacaattcgaaagcgtacaaaaaaacttgtctttgaccttggttagatttagctggccaaagttgacttcgactatatcataagattcataacgtattaacattactcaaattaatatctcgaagactcgaactttcctttgtacttgtaacgtgtttaacgtcaaaatcactataatgagcattggcctatcggctatcgggcatgttagcgccaggttaacttagcccaagatggttcaatctgaccggagggagacattcttgacacgtttgttggttcgtctcatgggcttcttttagaccgtaatcttcagttgataaacattcttgctaacccattttaacgggtattaaatttacatatgaaaaaataaaaataaaattaaatatgacctaagttctttttgtagtttaaaaaaaaattgaggttgatcttgcatttttttgttacctggatattctttttttttcctggtattttcccctaaataaagtcattcttccattgcacaaaaaaaaaagagtcaatcttccaatgagagaaaatggatcaaaataagtaattaacctctttcaaaccaaatattcctaactatgatatttccataaacgacat

SEQ ID NO: 33273 - DNA, 834 bp, Arabidopsis thaliana columbia
actaatcgcgcctcggtatcccgtctttaattggtccgtaaactttgtagtgtttgaaatttgacaatattttcacgtaatatagatttcacagttttaactcatttttaataacgtttgaaacaaagagtgtatgacataatggtttagaacctttgaatggataaaacagagactgtttggaccgtttaaacttgtcttcaaaatcatttttaccaaaatagtttcttaagaaacaaaacctttgcaaaccttaccaacacagctacattgtaactataagtaaaaaaaaatgacaattcattcccatcaaatgactaatgttgagattccaaacagagaaaacaaatatgacaccaaatcaatagtcaatacaataaatggtctccattgtaatgacttttctaatcaacaagtcttgcacacatgaaaacgaacgaggattacaaaatacagatagaaatttctcttaaaaagattttttttttgacaattaccgctttcatagttatagctgatcaagtagaactactagcattatcattgtgagaccatcttctgaatgtgcaagttaccaagtttcttccagcaagaaaccctaactttgacctaatcatcgctaatctacttcctccaccaccattacttgaaccaatctctgccacaattccacctgcttgagccacccttggctcctccacaacggtttcaacctcaccatccaccaccaccactgcttcggtttcatcaccatccatactcaccactagtgtcctcctttgttcacgcagccaatctccaatctctccagtcacaactttacatttcttcacc

SEQ ID NO: 33274 - DNA, 555 bp, Arabidopsis thaliana columbia
ccagccacctccgtctcaggcacaacttgttgagattgtggagatgacaaacttgttttccttgaaaactcatcttcgactgttcccattttaagcttgggtgataatcttgtataggcatcaagatcacctgccaaaccatcagttttcaaactcgttactaaatcagtcatggatatccaacggttataccatggttgatgcaaatagtgacattggcaatgctgaacgcaaaaactacacctacatcgagtggcaactagagttacgaccagaagaagtggtgtaacaaaaaggataagggatttgtgactgctagtaattgatatgcctaacatcgtccactcgtaccgttcatgacagaggtccatagatcctcttgatcactctgagacatgttcataacattcttgcaatttccattgatgatatattgtgcctgcaggataagcggataacagtatctcacatatgtcaaaacgtcttatcatttatcctttttctttacttggggcatggagcattgtaaaaatatacacaagagaagcctatgta

SEQ ID NO: 33275 - DNA, 838 bp, Arabidopsis thaliana columbia
tttctgttcctatgactcgtaaaccgtataattgaaatttggtatctctagtctcagcgctgacgaagtgaatcatccaagctacaaaatgaatgtcattatctatttaatcatatccttaattcgtcatgtctgtttcaaagcaaacatagatacattttgatttgaataatttaggtcaaccattaacaaaatctataatggggtaaggtgtcaaatgaatacaagagggttggtatggtgggttagaagaatgttcataactacctctactacacacaaatctggtatttgtggtttaagccgagctaaaccatagagagaagccacatacataccataaactgcaaccaccaccaccactccacatgacaagagaggttcaccaaacttgacccgacccttattaccccctttgaatgtttggggtaagtaacatataaatatacagatgcattggagggagttttgtattagtcttcaacatgtcttgcaaaggagatatcgtggttggtgtggaggaaggattgtttctcttaccttcaaatctttttaatgaactctttcttgatcgtccatttccacaggtttctattcttttataacatcatgaactattgttattaatgctaaggatgtataattaatcaatctttgttacataatctgtagagtaatcgagtaggtagctactatgatcggaagccaagaatgtggtatgcattgaaccacaagggttccatggtgaggccaaatggtgatgataaaggtgcagcacgagttaagccacgtggcactggagtgtttctcctgagagaccggtgagtagctcacaaga

SEQ ID NO: 33276 - DNA, 885 bp, Arabidopsis thaliana columbia
gaggtttttgttttaatttgcgtaggcgtcacagttcaatacagagggattgattctgtctctagttcccggagatattggaaaaccgacggcgaggtcagagaaagctattgtgaacgacggacattgccggtgggagattccggtttacgagactgtgaaatttctcaaagatgtaaaaactggaaaagttaatcagagaatttaccatctcattgtttcaactacggtgagcaaaaacaaaattagaaatgtctcagagttttggatttttatttatgttttttgtgattctcttgtgtgcagggatctgcaagaggtggtttggttggagaaacatcaattgattttgctgattatgttgatgcaactaaaacttgcaatgtttctcttccattacagaactccagttctaaagctttgttgcatgttagcttcttcttttcgtctttttactcattaatgttatctttattaaagctctgaagatctcagcttctttttgtcgtttttcttttagagttttgtaaccttcgagtcttataattaatgttcttctgatttttaggtatcaatacaaaggcaattagagtttgatgatcctcaaaggtgcagaaaactagactcacttttcttttgttttataagtttttggatttttaatggaagtggcttttgtgttgttatgagttcttgcagagatgtggatgaatgtgagactccggtgaaaatgtcacaaggtctagatttgaagtcacatttcagcattggtgatgctgatgaaaatcgtaaaagcgattcacatgaggtatgttgatttggctgatcgtagtgcaatgtgatgcaagagagtttttggattttctcttgatgttctggtgatcg

SEQ ID NO: 33277 - DNA, 553 bp, Arabidopsis thaliana columbia
aagaagcctgcttaatttagacacattactattagtaatctcaatagttaaatttaccatcatctgtaagctcaaacgtgtctacgtgcgatctatacaactttataatcaccaatgtgggggattaagaaaaacgttttagtaataagcttattgtttatgtgatttaaggttaaggttaatggagtatgatttgcaactggggctagtggaatttgcagtccctctggttcagatagcgggttcggtagtgtttttcttgggaatctttttcgtcttccatcaggtataacacttttttttattgttgacattataacacttttattgttgtaacaaagtttcctggttcatcaaatttcacatatatgctttacgtattagtctatgagagataagagaactaaattggttatgtctcggtgatatcacattaatttataacaattatagcaagtatttgaagataaagctaagtacttgtggcatattaatatgaatatatgataatgtccataatgatagttcgtggcttgtggtcatgtaaacataa

SEQ ID NO: 33278 - DNA, 491 bp, Arabidopsis thaliana columbia
cctaataactacatctatgcccagccaacttaatttcccagaaaggcgaaaaaggaagtcgtaaaacgaaaacaaacatgaaattttttgaaatcgacaaaatatgttgtttggagcgtgagagaaagcgagaaattgtccgtaccacaagataatcttctctgacaaacttgccgcgagcggaggacagagaagctttcgcggaccgtcaacggcgagaagggcaagtttccggcggtggaggaggagaacggcgcggctaccggtcggatttccctccggataaagagagaagacggagcatggagggaggatagaatcggcgataacggagtgttgaggtgtggaaaagttctggattgaacaagagccattttggaaatcgatttctgcttcaaaatgatttcagttttagcttttgaggggttttagacgataaggcaattgaactggacatatactaatagttcattagttcgtgtctttttaca

SEQ ID NO: 33279 - DNA, 560 bp, Arabidopsis thaliana columbia
caatagctgttatcaccccaagaccagactccgatcccaagcttcgtcactttcaaatccgagccacccaatttcacttttgattcttccgaaatcgccggagccacggaatctccggaggctacagctctgaccagcttccggacgaaacttcttcttccatgagagccttcggaaacaacatagttgaaagggaaggtgaagtgcgtaccatggccatgctgatttgtttttgggttttgaaattggaaaaggaggaggagaagccaagaagaagaagaagaagaagaggtttgggcactgcgagaggtgagagactgtggatatggacacgtatgttgttggcgggccaaacaattctttaatgaataaccggtgaaattcaaaaacaaaaaaacaaaactgacattggttttctcttgggcttggttgggcctttgtttatttacttttcagttgggccttttagctttgttatgctgcttgtttctttttttttttttccttttttttttcataataagagacgcaaaaagaagaagaaggtacgatttgttaag

SEQ ID NO: 33280 - DNA, 446 bp, Arabidopsis thaliana columbia
ggcctaagatctcggtcatccaaatcgcgagtccgaaaaccgatagtcctttcaacataactcatctcattgctcccagacccttttcctttctcattcaaaagatcagcaaaagcaccaccgtactcaattctcatcaatctgactgcagatactgtataggctccacaaacaaaaactgttataagatattgggacaattcaattgcacttaacaatattgatgcaaagacttcaaaagactctttgtactcattaataataattttctaagtactcattaaacgcaacgactctatgtcaacctagatattcagtgtaacactatcactactcaagctagtggtaactaaatcaatggatttactctaccagctcgacgtggagaaacttccaaattcagattctgagatttccgcgacggagccaccggacctgaaaaatag

SEQ ID NO: 33281 - DNA, 523 bp, Arabidopsis thaliana columbia
cagaagactatccaggcaaaatccgatagctgagcctgtcaaaagagaagaaatatataaaaaaaaatgcagaagcgaattcaaattcttgaatagaaccaatgtctctctttgagataaatactgtatttggcagtctaacggtaatagatatatgctcaccccttgcagtcccgtggttcaatgcattgcccaaggaaagtatagtttgcatgattctttttagtttagccgagcctctaacctggaaagtgtaacatgcagtaaagtcagaatggaaaatcaccaaaattaatatatgtgtttcatagactatttgcacaaaaaatcgacttgcctcattggctgcactatgtatggtattcaaacctcttctaagatcagtaacctgtaggataaaaaaaaacatttactaatataagatccaggttattagaaactagaaattatgacaaaaatacaaactccagtcgatttcctacttgggagtgaactgaatcttgaatgagaaacccttagctta

SEQ ID NO: 33282 - DNA, 568 bp, Arabidopsis thaliana columbia
atcccaagagatgtgaaaggtcaaaattcttttgtaagctgaattagccaccgatattgaatgagaatattcttattttgttaacttaaaagaagaagaaatagcgaataaagtttcgatttctttgtggccttttctagaaaatatatcttttatcaattatcattcttcatttaaaattattctgactaaactaaaacatgtttggagatgtaccaatcaagtttcaaaccaagatttacaccaacctaaatactgtctcataacaaaaatgattctaacaccttccaaatttttgacattcttttttcctaatttttttccatcaaatggttttttcttaggttgcaaatattagagtatataatatgattatgaaaaactaaatgcagaagtggtgcgtcgactagtttatgtaatgaaaataaagaatatcgctgacttttagagcaaaattccaaggaccaccactccatatctagcacatgaagatgcatcataccggccaatcaaatattcagatttgttgtggcgtttaatgcaatatttgtggacaaatagtagatag

SEQ ID NO: 33283 - DNA, 443 bp, Arabidopsis thaliana columbia
taaacttttatagactaaatattgtacaagtcattttggaaattttttggataatttgggaaaatagcagtagacaaggttttacatgttgaaaatacaagtacaatattattttctagcttatattattaatgttataaatgaccaactttgttttctgatcttagtcttattaagacctttatgagaacaatgtactttgttttactcatctactgtcagaaatggagaatgcgcaaagaagaaaatagatcacaacgaaaacttgtcaatgattcaaacatcttggtaacccaaaatacagaactagtagtgcatctggatatctctctctcttgtttggttttagagtgttctctaaagcattaatgacagaaccaagaaaggcggctttcacctggatatcacagagagactatcccagaatcaaagcttacatgttg

SEQ ID NO: 33284 - DNA, 599 bp, Arabidopsis thaliana columbia
ccaaatcttccttgtttgcatattccaaactaaccctatacattccgcttctagagttgttctcctttttaatggaatatttttacttataacgatatatttaatcggtttttctttaacgttctatccaaggtatatctattttcggcatttgggttatcatgtttttgtttttttagagaagattttattatataaaataaatgtaattatgtgatcttctattgctttctggattgtttccattctataaacactttttgcttgtagataaaaaaatgtgtgtaaataaatagacttgccttaaacagattgttttttttaaacaaagaaaacatggatatgatgaaccaatgtttaataaaccgatcttacgaattttgacgggcagttttgttttactaacagtattatttgaatgatggagtgctaatgttgaaattaatcacgtgttataagtcaatattttcttaaggtgatctacgtacggcttctacatgttagtacataaaataaaaagattgagtgaatttagtcttctgtggagtacaaaagtattataacagaaatatgcgcgtaaatccgccatataccttgat

SEQ ID NO: 33285 - DNA, 378 bp, Arabidopsis thaliana columbia
ttcacacaacatttctatgaccaacctttaaagatgaatccaatggaactaattaaacaagtattgttgcaagaaaactaaaccctaagggatgatgtttagggaacccaaaggctttaattatagacacagatcgatccatctcaactgtaaaaaaatctgattgtgaatcatgagcaactaagccatcttcatcaaactcgcatctgaatcaagagcttgaagaaggaagaaagaatgaagaaacaataaaaggataaattagtcttttagagaaaaagaaaatacccatccttataatcacttgagaatatgcctgaattcagaagagaccattcttatctatggtttcctcgtaattgatcccattattgtata

SEQ ID NO: 33286 - DNA, 611 bp, Arabidopsis thaliana columbia
tagtataaaatgtttaatggattatgatatcacaatagcctcagggaattgaaaaaatgagcaagtatagtgaaatgtgacaatatagggaggtgaaaaatgtcacacggatacctttagatgatatgaaaagtggaccactcttgaaaacctgtcaaataatcgtgagttacataatattagtaacgatcatcagtttagtatcaaacttagattttgacaaactagagaatatagatagtcccagagacaagtaaaattcagtaaaattctcttaattgtttcagtttatattggtaacccgacatgcacaaatatataaacaattcaaaacctctgcctaatcactaggaaagtcatcaagcttctcttttgatgttacggaaatgtactcaacacagatattggagtgttttgctaaaacttcaatgagcgatcaaaccaatagggcttccatgaacagctaatcaaagcttgtctcacaactaatgtgtatcaggagaacctataacaaccgctgcctgataatacggacattgagatctacaaactccaattttcttataaaagattaaactttagcaatcattttcatactttgtcgtattttt

SEQ ID NO: 33287 - DNA, 222 bp, Arabidopsis thaliana columbia
aacattttgtttttcaagaatcaacattggatatataatcaagatcatgctaatattcaacctcttggattgcagcaagcttgcatctctctgtttgtttagccaaacgaatcttcttaaccacatacctacaatgaattttgatcttaaacaagatcagaacaacaaatatagatcaaatcaagaattaatcttcgtttaaggactcacgttcgtctctcg

SEQ ID NO: 33288 - DNA, 181 bp, Arabidopsis thaliana columbia
tcaagcatggttttcctgataaccaaacaaaagaatttgaaaatcataaatatcatgatctcgagatattatcatcatctgaaatctgaaatgattcaaataagaaaagtaccttcaaactctgatattttccagaaacgaagaataatcatcacaggctccatcttaaaattaggttcac

SEQ ID NO: 33289 - DNA, 261 bp, Arabidopsis thaliana columbia
cctctaattattctcatatttgatcattacaaattttgttccaacctaaactcctacagttacctaactataatacccccccccagcttctggaattatctaatcgacatacctagattaataatcttcaatcttgtaaataggaatgtagttatagaataatgtcaacttgtcatagattccaactattttcttcacgatacttgtcacactttcccccccattatcgtctgcattggcgacgagggttattgactggtg

SEQ ID NO: 33290 - DNA, 322 bp, Arabidopsis thaliana columbia
atccccataaatacaagttacaaccgaaatcatacattttgttgttattgtttggtagcacttttaggagtttacataaaaatcacctaaaatcactcaaggttagtaaatgaactgaaacaactcgaaatatatttgaactcggatccaaactccaatttccacctaatatgaaattgaaaaggtgaagattcccacacctatagtcctgtagtcccagagtagtgagtgcaaccagccaaccggaaaaaaaggaaaaggaaaggagattgagagagtccacattaaaggcccaaattaaagcccttaaagcccataggag

SEQ ID NO: 33291 - DNA, 583 bp, Arabidopsis thaliana columbia
ctttacctgagtttttcagtccatgtacgcatcgccgcagcctagaagactagagaatagagaaaagcttctcgaggatgggcctgttttaaatgggtcaagtagctaatttaatgggctgattaaaactccactgtattatttctcataaatgcaggagccgagaaaatgtatgctacgattccagtcactctttcatttgtcgcccgactaatggagtatgaacaaacaagatatatgtctaaaagtcaaatcctcgtttattttgtgtctacgattcaaaaacaaccaatttattatttgaaacacatagagtatatgtgaccagggtgtgtggtgtgcatacacgtcataattttgaagtctggataataggattataaatgtgaatgtgaatgtgaatgtgatcgtcccgattcggataaagactaaaataaaacaaatgttcggattctttaattcttattttcattgtatttattttacataacaaaacaacgtatcatatacccaaaatcgaatcgaacttttcaaatcgatgaactatttgttatagtgttgacagttgacatttttctaaata

SEQ ID NO: 33292 - DNA, 574 bp, Arabidopsis thaliana columbia
cgtacgatgtacatcagcaaacctcattaacgtatccggtaaaattcgtatactaattaatatatagatatatatttggcattatctttctcacatcctttgaacttcgatcaattttctctgctctccatacatatttatgtgtgtatgtagatttacccattcctctttgaaaatttcaagcacaagccagtattgtactaatccggaagcatatggcgtatataccttatctcaaagatgatagaagtatccggtccaatcacttgcataaaatacgggacataccataattgaccaattacataaggattggattgctttttaaagttagatggagaagaaaatagacaagaagatgtttataagtttttgttgaatgaaattttagattaaagctttatgtgatatttcattctcgctgtactaccaagagaaagagagagggtgattgatttgttgaattagctaggcttataacctttgtgggatgagtgtgtatatgagtcttaataagtgattagtctaacatgataacaatcaactcaacctcaacggacatgatgatcctagt

SEQ ID NO: 33293 - DNA, 502 bp, Arabidopsis thaliana columbia
ttctataaattttaaaataggtgaaactacctgtattcaacaaaaattggtaaaataggtgaaatacctaaccagccatttctcattgcgttaaagctggagctcatgataatggtcgtaacaaaatagtgtttatgatgagaccggtttcaacaaaactcaatccaagaaaattcgaagcctaaacatctccaaacacgggagtgagacattaaccgggtgtaaagattttcaataccgaccacattctccatcttcaagctcctcttcctttgtgtgctccctcgcttcttcttttctacgccgcttttccttgccctcaacctctgcttcggagacccagcctcgctgcaattttagaaagctccgagattaaaaagcttgacataaaccatatggagctaaaccacttgtgtgtctagaactaggctagagatcgacaatgtgttaacagtaaaagatatcaacacatcaaatggttttggacctaactgagtgaaga

SEQ ID NO: 33294 - DNA, 583 bp, Arabidopsis thaliana columbia
gaagcatgatgattgattttattggagcttctcttaatgaaattgctaaccaggtacttcaatctcataaaacactagttactcgtttgatcattacattatactaataaatccatactaacatgttatgtttttggctgtctgttcaaaagggtctaatagatcaacaaaagcttgacacttttaagttgcctatctatgctccacaagcggatgaattgaagcaaatcatcgaggataacgggtgtttcacgattgaggtattcgaaaatattatacacgccaagggagagtatccgttagaccccgagtttttaacagtctcctttaaggtcacggttggaggatcagtagcttcactatttgggcaagatggtatggagaaaacctttgagcttgtgaaagagaagacacaagaaatgcttcctcagatagccaaagccaaacccggaatgcaatacctcattgtgcttcgaagaaactgttttcatgatctatttagatctttgaaacgagacttaaataatgtaattgcaatgatgtgtgtttgtgtgtgtatgtgttgtattgtttgttattttaa

SEQ ID NO: 33295 - DNA, 501 bp, Arabidopsis thaliana columbia
tcgtgataggattttacaagtatctgcttcggatattcttgatgtttgcctcggagtactttctcttggttcattgatcgttcaagaggtgacttcggggtaaccggtatactttggcacggggcatggtgatgactgtcccttgcgctcagttgattgtttcccgaggcgacatagacggttcccaaagcgttttcacaatcggctcgggatgtgtttctaggactaacaccgagtccttgtatatgaacttactctcgggagtatgatttgcccgaggataccaaaccgttgcttcagagaaggaaaagccatcctccaacgattggcgaggctggaggttcgagttggcaggatgcgcccgagcctcaggttcttctaaaggtgaaaatcgaagagctctactttgcaccagaagaaacagagaagcttctgcaagctgcacatgtgctggaaatagcgcgggctcaaaagactaaacaaaccaaataggcgaagaaa

SEQ ID NO: 33296 - DNA, 1055 bp, Arabidopsis thaliana columbia
aggatcccttactggatttggaaagtcactacctagccagaattcgaaatgcaaagttaccgttttacgtctgaagtttcttccaaaactaaaagtggagtggagggatttgagcaaaaggtactttccggaactcaagttcttggagaagtatcagtgccctcaagttagtctctgcccctgcgatggaattggaatctggcgcaagcctgaagaagatgaagtctaaagcatctcagaactgagagtttctcggtttatcaagttttcttcctcgttgtctttttcttttgttgttgttgttgttgtgtgtttgcttcctcatttcccattgatgtctttctggttttgcgtgcaagtgttgttgtttgtgaacagttgaataatggaaatttgctttgcttattatgtgatacttgtgttttacagaagctacgaaggaagaagaaaatatattataatttactgagaaggtctacaagtgaagagaggctaagagcaagaaactctgataaactgcaaatgcaagagtactaaggaaagaagctctcttaatagtctctctgctaattgaaaggtcaagatacattactcagagattctggtttatttgataacaacagtgtaacaaacagacaacatcaaacaagaaacacatacaagaaataaaagaagcataagcaaggttgataataagcaatcttgagccaagaggctgagtcaagttatccacttctcaggagctggcctggtttgcaggttggcggttcgatgagtcggtttgtccatgggtagaaccaacagggccaacttcatcgtcaacaaagacgggatcacgctcagccaacagtctggcagccagaggaagaccacgagacttattcatcagctcatctatacatttcttgtcgttccttggtgactctttctgtttatctttaaccactgcatcatatatcttccagacactctgatgatcagacagcggccaaagacgatggatctcatgtttctgagcaacaaggttcttcgccagattctcatctctggtcgtg

SEQ ID NO: 33297 - DNA, 696 bp, Arabidopsis thaliana columbia
cacatatattcatttatctaatatcatgaaattatgagggaaaaaactgtaaaatcattccctaccaaaattgccatagataaaagaccacggtatacctgtaattttcacagcgttacgctttgattacttttcttcgtaatatcaataagatgaagatgttaaaaaaaaaaaaaaagtcaaacatgcgtcccatgatctctatatggccgccttcgtggttttaatcttctctaaattattcttgctcctccaattgataaaaaaacgacggcctcgattgttttacttcttcacgcgccgaaagtttgacttttacttatgtaaagtccacgaaatatattaattacattcttatactaaataactataagattatgcggttaagttctgacacaaaatttaacccaaaaagttttttttttcttttttgttttttttcgaaaaagcccaaaagaaaagttttaaaacacaaaatgaccaaatctatttcaattaattttacaatttaacttgtaaattttattttatcccatgttaaactggtaataataataactcaaataatatggtatcaaatattattattatgttaataatttgccttaaaaaatcggtgtcaacgatttggtaaaagccttgaagagtccaattccagataggcatggaaaaacagaggaaaaaaagaaagaatat

SEQ ID NO: 33298 - DNA, 526 bp, Arabidopsis thaliana columbia
ataaagtgatctatcaaaaatccaaatccgataatttaactattttttaatcttattttcaaggactaaaaatgattgagcttccaagatttgtttcaattagagaaattcacttccaattggaacgttacggttgcatacgttacactcaacagtacgagtgtacacccctcacaaaggaggagacagactaaaagttgccttttactaaaattaaatggcttaaaaaggtttaagtgagtttaaacccgaagtaaagatggttttgtatagtggaaataagctccaaaattttatggtatgaaccattttagattaaagtacatatattttttattctattttgtcaaacgattaaagtacatatataatccctaatattaattgagccggtaatgtgtaggtatggccaccaattggaaactggtgtgaatcactctcgagtcttgagacaagccgaggcacggcgtctataaaatatatgcatttaacagtattattaaaatatgaacatagtttataaacg

SEQ ID NO: 33299 - DNA, 438 bp, Arabidopsis thaliana columbia
tagaggatcccctgttctagtgagaactttgagatagtcttttgagctcgattcttggctgtgtgtgtgccattttgctgtggatttgtgtgtgttgcttccctcccttactccatgtttcgttgtgaacttcaagtgtaagggcgagagactccaagttgtggagattcctcgcaaacgggattgagaaaaagcaagcaaaacaccatggtattcaagtgggtcttcggaccgcttgagacgggttgattgcaaccctcgtccgttgggacgccacaacgtggagtaggcaagcgttggtcttggccgaaccacgggataaccaccgggccatctctgtgattgatttattgtggttattgtgttttgactcctctctagccacttggcaattattgtgctaacaattaaccaagttttgtggcttaagttttcaag

SEQ ID NO: 33300 - DNA, 536 bp, Arabidopsis thaliana columbia
ggtgaggtgcatgttcgacactcttcaaatgttgattgaaacttttttttgtgtgcaaagttgattgaaactttaatattttttcattaatcgcttaaagtgtagtagtgtcaaaatattgagatgtcaagtatagaacatactatcattttcaaaacaattgtgcaatttcagtataatcagtatttaaatcattaataacctcatgtgtaattaactctattatattatcgattttaaaacacaagccccaagacaatgtccctcattctatctcatcaaatgctcaactttttttttttagtaagaacattaattgggtgcattaatgaaggtcacagaaaagaagggttatagagggtaaattaaaggtgattgcacacaaaagtatgtctttcagtttttcacagaggaagctcatgacactcaccaaagcagcacgaatgaagttcaagttcttaattaggcttcacatactctacatcatctcctcaaaatttatatcatttcatatgttcgatcttgttttcatgtga

SEQ ID NO: 33301 - DNA, 457 bp, Arabidopsis thaliana columbia
agttctaacctctaaattggtaaaagctatttgctaggtaggtgtattatttaaggtttttctaccttctataagttcaatagctttaaatcttggggttgatcaatattattactaatgagtaatgatgcattattaaaaagagaaaattatcaaagtaaattatatttatacaaaagtagtagctaaattacataactaaaagaaatcggtaaacttacaaatattggtagacaagaaaaagagagaaaaagggcaaccgttcttctatccattactcgatttattatacaaagtacatgaagcctataatattacatacatgatacatgatgcatattattacatactactactttacaagtgatatctaacaaatgcacatacgttatattcctttagccgtgttgataggcaaaccatcatcatcatcctcaggtctcttcttataattata

SEQ ID NO: 33302 - DNA, 609 bp, Arabidopsis thaliana columbia
gttattagttgcatccaccaagtactctgtttcaggagagcatagttttctgtatgaattggcaatctccccagaatgtgggacccacgatcactccctctcttacgttgctgacatgaaaatctaatgtcatatgatttaggcagatgacgaataatttgaaaatgcaaaaagaatacaaatctcctcagtcaaaaatcttcttaaaccacaatctctaaaattacaaatgtttcggtattctataaactctgaaagccaaaccgcgctcccgaatccaagcgaagggcttccatattctttttttggaaaataaaaattgcatgtgcaatggtcttcacacattccagatattaacacaaagtattgaagcacgaaataaaataaggatagattgaaaagaaaaaaatagaaaacacaccactatcaatgcgcaacccaaaaccctatcagaccagattctctacaacatcctacggtcatcatcacaccctcacactcgccctttcccttcttattcgatgcattggtccaatcaatgccttggtccaacgttgctgccacaatgtctcctgacatttgtgttcatgttttggggctaattgtata

SEQ ID NO: 33303 - DNA, 583 bp, Arabidopsis thaliana columbia
tcaacctttgagttagattttgggtgtgcattaattagtacttgaactaaagtataaactgagacacttctttggtaaaatcaaatttttattagaaaatttgtttagtatatgcatttacaagtttcactcaaaaatgatctaatctctcgcattcaaggatttatttcaatccacgaacctctcaaaacaaaccccttaaacattgatgcatgtataagaattttcttgctctctcttctgagttatggtaatctctctacaaagacttaattagcactcaaattaaacaaaataagtggtggttgtacaagcctagttttaattctacggatcagtactaatcctgaatggaaattgacatgttttttttttttgaatatctggaagttcaggcccaaaggccttacatctcccagaggcgggacccataccagaaattcatcttctttggaaaagagatccttcccaacgtgtctcgaatccagcacctctatctgagagatttccactgggccaacaacacgttggtgaaattgacatattttctttttgtagatgacaaaggaacttcttcttatgt

SEQ ID NO: 33304 - DNA, 747 bp, Arabidopsis thaliana columbia
agtggtggtttgcatgacaatttctaacgtgtagttgacataattacatttatctaacgtgtagtagtctgaatctttacgtttcatcacatttgaagattccttgtaagcacaaatcgtcgtgtggtcggtctttaaagtcctgcaaaaataaaagtcaccgcggcggcaaaatggaagcaggcttaaacgatgttaggatatataacatgggaatatggagtggtatacttaaacatgatctccttgcattacattgacatggtcttgattgaattttagtatggcagataattcaacaggtcagcaaaaacgagtcaagagaacatgtcaaaacagaagtttgtattcaaactataagaagcgaataagcgatgagatgaaacacatttagagaggagaaaggtagaagaagatgaagttgcagcacgttgtgtacctggtggctattttcttcgtggtggctattttcgtgattgcatgtatagaagagaataagtacttagtctggattatgattattcttggtaagctctctacactcgtttttgattaatttgttttgcagaactactacgggtcttatgatctttttttgtctatcatgtgatcagcaaacaccaccaacattttgagcctcgtgcgtagattagctatataaaaaatataaggaagcaccagaaggacaccaagatccaacgacaattattctttgagaaaaatggcggtggcatgttgatagagcga

SEQ ID NO: 33305 - DNA, 584 bp, Arabidopsis thaliana columbia
tatggataagcgactagcgagaaatttggagtttgtatacaaccgaatgaatctggacgattctcctcttgtcttaactgatccacttgcatttgaagttctggggaaaggggatttccatcttagctcggaagctgttttggagttcagtccacggaaaaactggacgtatagaaagctaattggagtttatctcaagaaaaagttgcggagagaccagattttctggaattactagctacatgccacatctttgctgcaaagaccgtcactctttgctcactatcacaatccccctgataaacttttccgatgcttgaaatgaaacattgaggttagagagtcttcttgctactagatttacatataaatcatacatgcctgtatttacaatgttttattgttaaatagatatgtatattgaattacatacatattattaatgcacatttttatccggagttgtggaccatagaaagacatattgactcctcaaagtaaattctgcatgttacattgaaatcataggctaaatttgagatgcactatttttagaaagtgtagagaaaaggacaggaagaaat

SEQ ID NO: 33306 - DNA, 442 bp, Arabidopsis thaliana columbia
caaaccgaaatggaagcgttgatgcttgctcgttttaacaacgcattcttattcctcttctgatcatgacacgtttcttctccatcagaggataaaataattgcgaccattcatatgcattaaacaataataacgaaatcgttgctcacacgacacattagactattagagcagaaagccatcaaagattagagagaggagtaatttcacaaaatcaaacaatattaagataaaatggtcaaactacataatattctccggtagatggatcataagagagttattgttttggtttgttaacataccgaagttcaaacgggtttagagtttcatatacaaccgcgaatgatccacaaaagccaaaccatttcgtcttagatagatacaactacgttagactaacatcaccaaatcagacggatttagggacatgtggtgagag

SEQ ID NO: 33307 - DNA, 530 bp, Arabidopsis thaliana columbia
tgagcgtgcaacaaaagaagacactgtagaactaggagcagtcaacaaagaaagaaagactcagtgacttacgccccatccgatcaggtgcaaaatctaccaatgagccaaatgggtacccttccctgcggtggtgcattttggacatcactgtgcacagatgagcaaacctagccttgaatcataaaaacacaagacaagacagataaagaacttaaataatcttttctcattgaagtaaaaaaggaagaatacaaaccatctaaaggacaaacccttttacctgttccaacaagttccgtacagctaaagcaggccgaggtaaagcatgagctgatgtagcattttgaacaccaccagatattggagttctaaaaagcccagctcgatttcctccaccaccttgaggatgtgcaagagatgcctccacatcgattacactatgagaagtttcacattgctattactccgagctttccttcaacaacattcaagctattaatcctatgtcaagcaaccattacgtggta

SEQ ID NO: 33308 - DNA, 457 bp, Arabidopsis thaliana columbia
tttttttttgtaaatctcactttcttcttctctcttcaggctgtgaatattctgatttctgactaagctctctacaattctctctcatggcctcttctctcgacggtaattttctttttgggacagtttttagaaatttagtgctttcgctttaagatgaagccttggacttgttagagattttgttttctttttcaactcttgatgatcggcttatatatagtgatgcttttactcataatttactagtgaatttttattatcgtgttttacttttcaagatcaatttgttgtttgcttaatttggtaatggaaaagtcttttgtcaaaaaaaaaagctattggtgggtcattttactattagctattggtgggtcattttacttcacgcaggagctgcaagtaactctaatttgagtgatgataaaaagaaacgaaggaaaaaccctaagcctcg

SEQ ID NO: 33309 - DNA, 165 bp, Arabidopsis thaliana columbia
  unsure (1)..(165): unsure at all n locations
nnnnnnnnnnnnnnnnnnnnntaaagtcaaagagaaaagatgaagctgccatcctcattgaggatgatctgcaggtcgaagccaccgctggtggtgcttgagttgacccattcagggacacgcttccaggtcacgacgaactggcgcgtcggcgcgtgcccaagg

SEQ ID NO: 33310 - DNA, 459 bp, Arabidopsis thaliana columbia
tatgatataaaaaggtttaaggaatcgagatcgttatatcgttaaaaattgataatctcttctttcggagtatataagacaataattaagcgaatgtttatgccgccgaatgctgacaactatatcttacagtggtatttttgtttttctaaatatttttatgttccctcgtacgttaaatagtggctaaacccagtaattttttttgtaatatggatgagacaaatatatgccaattgaggaaagtgtgacaaaccctttgttttctttttgtaacaaagtgacctaatacgtgcttactcaaatccaatttcaatcatctaaaccacaatttggtgcatacaatatttatatatgagaattaaatatctcgtgagagtttttctataaaaggtacacgtacactcatgtatctacttactcactcctttcagaaacccaaaccctcattccaaaaaa

SEQ ID NO: 33311 - DNA, 441 bp, Arabidopsis thaliana columbia
gccagtgtgctttaaagtggaactgtaatcagaaaagatagacatgcttagccaatctctatatgaatgaattgaaagaagtttgtaaaggcatggatgcaagcaatagattctgatacggtcaataaaagagaattgcttaacaattttgcaaaacgtattggcgagtaagaaccgcatttggtactttccgggcaaccgccagacgattctttattggtaatgagaataattaacaattaaagagcgtcgcgaaaaaataatgtgtctcgacaggggagacacagtacgaatcgacataaggtgatcgtctgaatcaccagaataaataaagtcggtgatagtaatacgtaacgataaagtaacctgacagcagaaagtctccgagcctgtgcagggtcccaatccgggattacacatgctggttaataccagtaatta

SEQ ID NO: 33312 - DNA, 329 bp, Arabidopsis thaliana columbia
cttccatatatcaacaatgtaatgccgattataattagaatcgatcgtcttcggagacaccgcgtaaactaaaagtatacgagtgaggttttgctcgtttctaaaactgattttcctcgtgattacgatttacataagcatgcaggcttaggtagaattacaatgtgacatagaatcattggaagagaaaaaaaaaaatagaggatccatcaaaattgaactctttctttatcgtagactcgtagtatctttggtgagctattgcacttcaacaaatttgaagaataacaaatgatagaaagaaagaattagaggatccatcaaaattg

SEQ ID NO: 33313 - DNA, 498 bp, Arabidopsis thaliana columbia
tatccctccgcttaagggcaaatttatgatatgattgaaaccaaatatataaaattttgttgagttattaatatacttacaatgtaatattatggacactagtggagtgaagcaaagaggataatgagagtctcatgatgagacaataggaattggtttactgaaatctaaataagataattgctgaaattcaagtgtagtctctttttgtttgttcagtaacattttcgatcagtttagacttttgtatgtaaacaaggaaacaagaacggcgaactaaaacacggccatagtcaacgatggcggtgcaatgtgttttcatacaaataattactatacagaagcccttgtctttcgccggcatccacgaacgtttaaacaagagaaacccagagacgacagctaaaacaaacaaacgagatacaagccttgccttaattaatggctaacgtggatcgacttttatttgtgtacatcaaacatgtgacaaagtatggt

SEQ ID NO: 33314 - DNA, 440 bp, Arabidopsis thaliana columbia
  unsure (1)..(440): unsure at all n locations
taggcggctcaaagactggtgcatctatactacgccgtcattaaagcatttaaactacagactgatcttaattctatgctggaccagagggggttcttggacatacctcgatatcttggtcattgttctgctcactgtcttctctcgtcctcttcaaaatctttagaacnaatgatgcatttaaatcatggactggagtatgattgtagtaatcctcttttgacgatttngcaccgaaccactcctccttcttctccaagcaagccgctggaaccatntgatttctggtgctctgcttcttcttgacngngtttcgcggttcgatgacggtaccttctgtgatggtgtcccgcatgattttgcccagcacccttctttcttcgcatggctttcccttcccaagccagacatagtcgatagagnatcctctttttggcttt

SEQ ID NO: 33315 - DNA, 639 bp, Arabidopsis thaliana columbia
  unsure (1)..(639): unsure at all n locations
tnnnnnnnnnnnnnnnnnnnnnnnctaaagagtgagacattgccgtcgggttgtttgaggcgcagaggtttattggccactagtagggagtaaaagacggtgtcccatagcagtttccctggattggaagccaaggtgggccgatctcacaacataaaaccttcataacaacagcttccccctccttcctcagccctctggtattcttaattcattatcgctcttactccgtgcctcataactccttcctttccctcgaaaatccgccatatctttcgttaattgattcaccctgcttctaccagtatggcaccactgcaatcattcctcgatgtttcccctcactaacatttggccgttccttggttacagctcagtggcctacgtttcctgatatttgcggtccgaaacacatagaacgcagccctcccatattacttgtttctctcttttcaccttctattggattccgcagccatgtggtcagtcggccaggtatcatgttgattgctggtccaatgtccgactaatatcatctagtggtatcttcggctacatcaactacctcgtcgagagagaccgtaaatatatctcgacactttgccaatggtatgactttttctatagaatcccggcaaa

SEQ ID NO: 33316 - DNA, 355 bp, Arabidopsis thaliana columbia
  unsure (1)..(355): unsure at all n locations
nnnnnnnnnnnnnnnnnnnnnnnctaaagagctgcctgccctgcccgtctgctccgtctgagctccgtttaatcaccgcctagcagcaacacaccgtcatcgtcaccagcctcacttccaatccaccccgaagttcacgacatatccccgattcgaatccttccatttgctagatagcaatctggtagaattcgacgcaccttcgggagtcttccgccatgcgattattcgcctcacctctcatctctgccgtctctttgctaccctgtctctcgttcgccgtcagcttcgactgctccagcatccatgtagacaactagaattatcacctcaaggctctaggcggagtccacga

SEQ ID NO: 33317 - DNA, 551 bp, Arabidopsis thaliana columbia
ctctagaggatacaatgactctgaaattatttcaagaagttagacataacattgataaataaaaatatgacataagaatcatcgttttcaactccgcaagtctaactctgactgttttcatcagacacaagaatcactacaagttagcgaagatcccggtgtcgaaagaaactctggctgcgttcccgtagcctgtgagctgctcgattctccgttaacaacgtttgtagttggatgctgccaataccattgttggtgttgttagccatacggttttgttggtaagacatcggatcataccgcggattatattgcggatcatacctaataaaccaagaaaaaaattacattaactaaacaaaaccatggctagaaactttaccctaattatattccaagaaaagtatcctaacggcaaaaaattgcattggagtaagataaagaaagattccagtgaggtccagggtacctaggtaataattgaggcaaatttgaaggttgggattggttaggtttaactttagcaccaacgaaagcgagtttgcaattag

SEQ ID NO: 33318 - DNA, 452 bp, Arabidopsis thaliana columbia
gttgaacaatttcttgatttagaacgaaacttaaaaagagtggaaattctttaatgggttggttggcatggtaggtggccattaagaagatccatgaattggtgaagttgaggtttatatcatgtattagcctcggtatatagtgtgtaaaccttgatatttagtatgtagaagtatgactatagcttgtataagcgcggccatatctgaactcagattttgcttatatgaatctggctacaagaagcatttgtaaatatggtagttgcaaactttcacctgcaatatgtataaagcttaggtagaagtgcacaacacagtaatctaagtacataatggagcctcttatattgtgtaaacacaggtagataataatgcactgagtccctttttcgattatccacccaaattgtatgcaagtttttggtatgaattggatcaccatcatcatt

SEQ ID NO: 33319 - DNA, 553 bp, Arabidopsis thaliana columbia
gggtaccataacaaatctaacatacaaaactaaaaaaaaataatccaccaaaatcaaaactaaaaaaaataatttccaaagtcaagaaaatcgacatgtcagcattagacaacaacacaatcagctatatactggattttatctcatataaagattaattaatgatacctgttaaacctcagattggttcataccttctgtgaaattggaacaaagagcaatatcatatcctcgattttattttagacgatattaattttaaactcaaatgaattcatgcattttgcaattgtgttaagaattaaaaagaagagcaataacggcaatagaaaaatgtgataacgacgagcattattctttaactgacatgatcattaaataacatatacttctatatcactacaaatcttgagtctctgaaactgtaataataacacatctgctgatatgagaaagtaaaattaactggagtttgcgtaaatatatatttagtttcttatgtcatgcaattttattcataaatattaagaactgtgagtgggcccggtaatga

SEQ ID NO: 33320 - DNA, 537 bp, Arabidopsis thaliana columbia
cagattaggaggcaaaccagtaacgaagacgtacctaacattccattttcgcatcaccattcccagctaaaccagcctattttatgcacacatacatactatctcacacttgtcgatttctgattcgttcggtatgagcccatcaaaatcaacattactacttcaatatcaaaggaattagatagatacacaaagtgatacaagtgtgttcaggtattgctgcttatccactatccatgaacaccttttgaaagaagcaaagttttcactttcacctgaaatctaactgataaacgattcagaagtgcatttgtctgatcacaattcataagtgcatttgttacaaaagcatatcaactttgcgttccattcaaacaaaacagagattgtattagttcgtctacacataaacattaacatgaaacaaaagaccgataatagacaagaaaagtttttaaaaaaaatggaggcagaggagtctacttgaagagttgatccatgatatgtaaactcttaacgcttgggagaatgtggggc

SEQ ID NO: 33321 - DNA, 439 bp, Arabidopsis thaliana columbia
tatgttcatcttatatattggaataaatgtcactatcatagattgaatttgaagcataaagaatatttgagtcagctcagaccaaccaaagtaacacaattttcttggaattgtggcctaaaaaaatggtttatggttagtggccggctaccgtttgcattggaagttgagtacgatttgcactggaagttgagtacaattttgggaagtatatataagagatggattgctctatttattgccaattagttttgagttggaagcctacaatctaatacattatcataccacgatctgcacatgctcaacccaatccacatcagctcaatcagtagttgacccgctgatcaatgtctgagcatatcgagatgaatggccagaagaaccattatctcgttgagacgtattagagatattgcccacattgaaaatcgagtag

SEQ ID NO: 33322 - DNA, 723 bp, Arabidopsis thaliana columbia
agtttggacttgatatcctcatcgaatctatatagtattcaaaaagttcaaaatatcaaaacgaatagagaagatctcgagagattggatagttgtgcgaatgcactctgataaaccattctaacaacatacaatcaaacatgttactaacaacatttaggaggaaacaggttcattgatcactcgaatgtcacctctttatcatttccttgtattatcagtgatcaacttcactttttggagaggttcaacctattccaaaaggtaactgttttcccttcatctcaccatgtatatcatcatctacttcatatgacttctctactgattctagaacactaccataaaaaaacattctcattaacctaccattatatccgttcacattgacatcttccaacacaacaaatttgtatcttcacaatggaaagaataatgaaaattacgagtagaagttgtgttctggaaagaggttcggctcaaatattggcaagacccggtgctagagcggacccaaaaaaattaagggttattggaaaaaaaatattggcctatgattattattaaagaagtgtggtttctaattatagaaatgttacttttaagaaacttggatatttccatatttattttttaaaccaaatttagaattttaaggtatatttcttgattagtggttctgtttttttagataactaagaatatttttaattttttaaatat

SEQ ID NO: 33323 - DNA, 515 bp, Arabidopsis thaliana columbia
  unsure (1)..(515): unsure at all n locations
cgatcataccttttttctcttatgccttactcttgtagcttatttttgttgttgtagaatagagttaaagatcactcaaaaactttatttttctgttcaaaacgaatatggtagtaaaatgtgaaatattttatgtataccataaaaatcataattagcctacaaagagagagatgagatgaaactgatgagtaatgaaatatgtatatgacacagtcaaacatttttatgatccatgaatgtacctcacacattgacatatacttttgccaaaaaccttgaatccataaaattcttctatttccaagaccgataagttttaggtataggaactgccaaaagaagataaatgttggaaaccagcagttagtttcaacttccgaagagtaataggtgacataaatattagttatccagatcatgtgagccaaagggcgtcaaaagtcccagagagaaccagcataagatgtcttcaccattgtaagtnntggactgagatgaaccagacttattag

SEQ ID NO: 33324 - DNA, 437 bp, Arabidopsis thaliana columbia
ctctcttgctttctgtacatatgcaagtgcttgtttcatgatttgatctctccttttctcttgtcaatcccgccaaaatctaaacacatttaaaaacgaaaggcaatgtgcgttgttaacgtccctctctatcgctacctctctagtggaaccattacggacactcatcagtaccttcttctcacttctctttggactttctcccattagtgagcttaatgtcactaagctctctgtgtcttcttcttcttcaacttctcttgaagctgcgaaaagcattgcttcctctatgatttcttcacttccattttggtaacaactttctccaacgtccgttattgaaccggagcttgtacccccactggtagttgtagttaatcagaataattgtctgtacacaagctatgatcaacattagcgtgcgaatagatgagact

SEQ ID NO: 33325 - DNA, 232 bp, Arabidopsis thaliana columbia
tgatatgaacggtgtgaccaactcaggatcttaattgaaaaaactcatatacaatgtaacaattttgacaggttttgaagaattacaaggcacacaaaacagagaagacaagaatcaattaaagagaaaaaaagatgaagaaacaggttttggtgttttagtcaaggagtagtcctaagtctttttttagccagttcctccaagaacaccctttagcttcttgactgtagtg

SEQ ID NO: 33326 - DNA, 453 bp, Arabidopsis thaliana columbia
tagaggatcagcggatcccccactggttagttgaaggataggtccgtctaataagggtggagaaggaagcaaccatcgtcatcattttcatcattacgggatcaggagaggatttaactctggagagatcgtcgtgaatcgattactactactacttgaacctaatcgaaccagaccgagtaaataggtttagtgttacaagaccaaaaccagatatttatattatcgtaccagaccgagtaaatacgaccgcttatcgcctccaacccggacggtgaatcggaataccttctgggttaccgggtcaaccgggtcactgggtaaggattcgttttcttctcctccaattctcatttcatcttcagatttcttcatcgattagggttctggaaccttgtcatcggaaatcatttcttgtctttgtttgttattcgaagcttctcctgcttattt

SEQ ID NO: 33327 - DNA, 311 bp, Arabidopsis thaliana columbia
ctccaaagagcttacaaacagtcaataatcacataattcacataaaatataagatacttataacaatatacataagcttgagaagttgtaaatgttaacaatattattaacttaatgctgaagttgactttttgttgaaacgaagacttgtggaagctaaaattaggccggtgcctagttggtacctccacccttcccggaactcgtttgctgcttaccccatcgcgctgcaacgttccccgacaccacactcctcggtatattcactacctcagtctcttcctctacttctcgtgatatcttcgtcacca

SEQ ID NO: 33328 - DNA, 575 bp, Arabidopsis thaliana columbia
gatggtcttaaaggttttgaaaccaatgttattgtgcttcttcatcgactattgtctctaaagaatctggctgaagaatctgaagacgaattacttagggaaatagctagaaacttttatctatagctgttttttttataaagttagtcttgtggaacttttgatgagttttaagggttttagaaccgaagttatcacgcttgttcatagattattgtttctaaagaatattgtttggttatgttttatcgttttgaagaacaagaaagatggaggcgaagatgattccggaagtgcctcaagaggaaattggtggcaaggtatccgattcccatcttttgatcattttgttctgctttgtggaaaatcttgttccatttctctaaccgttcttgaaaactttccagggtctctgtattactaagtagagatcttactacttaagcaaatgttataactacaaaatcaaggtataatgaacccaaacattcattgaaatgattcaagttcggttcttagacacgcaatactgattatggttttggttcggattttcaggtcataggacaaaatag

SEQ ID NO: 33329 - DNA, 597 bp, Arabidopsis thaliana columbia
tattttgcatagcaccaccttttgatttgtttgagagaattgaagcatcttatgcatatatgctgtggtagtgattgtgtcgacacagaatatagttactccagtccggatcatcaccttctcgcactcttattatgttttgggtgattaatccccaggttgaaggaaacagcgaacgcattattgcgactattaaatctgagaaggaagagctggaggcatcactgaacaaagagaggatgcagactctccaactaaggcaagagttaggagaagcagaattacgaaacacagatttgtacaaggtactaatattatcaccttcttaaaacagaagccgacatgaataaattggtgaaccaatcgttcataaagactggttgcagcagtcttccaattgcattcacatttaacatctgaaatctcggaatttttcctcgaatatgatatacctaactttgtactgacattttgtaggaacttcaatctgttcgtggccaacttgcagccgaacaatcaaggtgtttcaaactggaggtactaaaccgtagccacatctcttttgtaccataacctacagaatttggaatctcgtga

SEQ ID NO: 33330 - DNA, 591 bp, Arabidopsis thaliana columbia
tagaggattagaggatccccctattaagacaatttagtttcaaacttttttttttttttttttttgaaggattcaggaagaaattaggatatattattccgtataaaatacaagatatataaaaccaaaaagaaaaagtaacatgatcggcaagttgtccttggctacacgttactttgtgtcgcgcataggtgttatatggtaaagatcgcaagaactcaagctaaggaacaatgcagaaagaggtaactaattttaaacggtttataaaaaaagaaattccttgaaaaatatgtacaaccaaaattaattcctctaaatattgaataaaagctttgtagaacaaattaaaatgctcagatttgttttggtctatatccctgtttcgttatagttttctttagtatacagtagaaggatcgtcttacatcataaaagtccagactaatttcagctggaacagcaagatcttgatgaatttcactggtgaatactgattaaagggttgtatacacacactttgcatatctctattcattatctgctcaaccttgtacacgtgcttctcaaaaagatatacatgtttgttga

SEQ ID NO: 33331 - DNA, 488 bp, Arabidopsis thaliana columbia
ttgtaaattggatgaaccctaattgagaatcgaattaacagacatcgtcgggtaaatattcataccgatattgggttggggctgaagattgtcagatgcggatcgacgaggaactcggcggagagctagtcgatgaatccggagagctcgtcggcggagagctagtcggcggagagctcgaagaactgatctatgtgttttctgacttttgagtttcacaaaagtttttttgttctaagtgttggggaattattttttttaatggcgcttaattgatttttaggcttaagtgttggcggaaaactgatttttagcttcccgcatagatatatttcggtttagcattttaaaacagcttttatatagtctcatttccagaaaaaaatctattatagcatttacgaaaattacgctatacttttgtgctatcaatacccatatttcttgtagtgttgattacttgttgtttctacagtgatagtttgaat

SEQ ID NO: 33332 - DNA, 482 bp, Arabidopsis thaliana columbia
gaccaaaacaaatcactaggtgatgaaaaaaaaaaatcactagttaaaatgttttaattgaatagtaaacacatagcaagtaacatagagaataaagactgcaaactataactacttataaaaatatcaaatatatttatcttatgaaattaacaaacaaaatttctaatagttcatatagctaataaaatccttttatttttctttcttgtgaaagagcttgtaactaaaaatagaaataaaaaaatatccatacataggccccacattacacacggtaatcgtatcattctcattggtcgatcggattcatttcttttggacaacttactattccaaattagatatgtaattacgtcttacgcgctgaatgttttttaatcataactaatacggatagtcttggtgtggtattaatcataacagtggcatataatactaataccaggttaacggttcaggttgggcaaaaacagtgggtt

SEQ ID NO: 33333 - DNA, 419 bp, Arabidopsis thaliana columbia
ctgaaatcggaagagaaacctgcaccttacatcaaagtcgactggaataaatggtgtgatgaggatgaggaggtcaactgtaagtcgtaaaaatatatggtacaagccaaagttctcttttcagttcaatctctagatgataatcgagaatcttctcatattacatgcttgattaagtaaaccttgtttgaaaagacataggaaaatcagaagtattctgatctctatatgataatttgtttctaacgttagactctttttcgtttctgtttcagctgaaacagcctctgatgatgagagtgcagtaaggtgttttctcataatcgcctaatgtatatctttctattgttggttagtaaagccaccctgtttgattaattccctctttattttcagagtttgttaatcaagatagtgaa

SEQ ID NO: 33334 - DNA, 286 bp, Arabidopsis thaliana columbia
tgatggaatcataacgatttggtcatacaagaaaatggtcttcctctcagtctcaggctttacttccaaaatcctgttttggaaacttcagtattacccacttggtaaacacgctcttttgtaactatatgtacattagtactaaaaacctcaatactttctcggtaattgccttaatctctgtaatatgttgccatcatggtgcctctcctcatagtttccactcgcctcagcggttatgtagtcatagcgacttttggtgttgtaagcttgtggcgtgttttgc

SEQ ID NO: 33335 - DNA, 571 bp, Arabidopsis thaliana columbia
ctctgtaaattattacaacatgtaccaatatcttagctcattggtccactttgccttttggcctttgcgtgttgactgggagaatttggtgaagccgtccacaacattcagaacaatacgaaggttccgattcgttctgacgtggaaattaaatcgatatgtagaatagtttgaattaaattaatagtggaaaataaacagtgtacgtgcataataatagtttcattttcttatatatacatcactaatcataaacacttaaagactgacaaaatttgaaatgtgtaagagccgctatatagatgtaagatttttctttatttgataatttcaacttgtttttttcttgttttgatcttcttaatagtgcaaggctagtgggtgtacttgttgagctgccgtagatgctttattaatctcaccggccatataggtttaaaggcccaaatgtatatttttttctgtatatgttcgaagttagtatcactttattaacacaccctgttaacaaatatggctcattaaagtgaattggaccatgactttcaaggattctaacgcacaatataat

SEQ ID NO: 33336 - DNA, 645 bp, Arabidopsis thaliana columbia
ttcatcttcttcgcccgaagaattagaggcgaaattccaattgagtgttgatgaaattatgactccacttgatgaaaatctgaaaccttcttcatcttcttcttcaaaacttttcaatcggaaaggaaaatttatttttttagaacttgcttacatcaacccaaaaccggacaaaagccgggacataagccatccgaatctctcgaagacgaatcgatggagacgaagccagccaccgttgcggaagaagccaatcgatgctggaagtttgccggccaacggtgcataacagagccaccgatgccagaagaaaagttttgactgcttaataagccagtgaaacgccccatgaaattgcaacagaagtttttataaaaactcttgccgacgaaatcatatcgaaaacttttctttctctctgaaaaataaaggagagagaagagagagagaaaagttctcagtcaaaaatatacataatatatgtcaattatttttagtttttgcacccctttcatttttctattgtattttatgcatggttattaaattttttcaattctttccattttgttaattatatatgaattttcatttttggttttctcctaactctatattaaattattcctaatatataatgttttg

SEQ ID NO: 33337 - DNA, 594 bp, Arabidopsis thaliana columbia
cttttcatgcgcttagaggtacaacacagacaaatccattgcttttgaaacatttacgaattccctggttggagctaattctctttaatcttacttcagggaacgccagcttctgccaaaaacattccgattttagttctgtttgtacctctttttctgttacaaggagctggggtactttttgctatgtatagattggttgagaaatcagtcttattaataaatagtggtagtggttcttatggaagatattttaccgcaacatcatcagctcgtgaattcctgggattctttcaacatggtgcaaggtacgttagcagaaacgaactatacataggaatctatggggaataagtcctcctaagtactaatctttctcatattgtaaatcacagattacttggctggtggtctatcgatgaaggaagtcgggaagaacaagcaaggctctactctggagaagctactgggtaaagctctcatcttttgctaacaagtcgtcaatttggctctgttaacaacaattttgtttgactcagatacaacaccttctcaccagaggttgtgaagaaatgcaaagctgacttgttgaga

SEQ ID NO: 33338 - DNA, 540 bp, Arabidopsis thaliana columbia
taaataatatactgtgttaaataaacttttatatgcccatacttttcattttgtttataaattttatcattcttatcacttattactcaaagagcctactacaccatcaatttcacaaactttggtcgaataatattctagttaaagaagattgttacaagaacacgcaagtgagaaatattatatccgatccagatcaaaagattactcaaagagccaacataactatctttatccaaatttgcaataacaatatgtagcttaatgggacatttgcattgcccaaactttgaatgccataaactaatataatattaccaattatatgttgtattaattttatataaatcatctccagatatatttttcccaataaaattgttcgtgtatataatcaagcctattattatatgatatatggaattctaatgttatgtgttgtatattattttctatgtttggttttgcacattatctaatgttgtaatcggtcatatgatggtatgtatagataatagacccaccaaaagaatctaggat

SEQ ID NO: 33339 - DNA, 470 bp, Arabidopsis thaliana columbia
tacagatatatatttggatgagatgaatttccttgtaagcattttggttttggttcataatgatgttaacagacatttgtttttcaatattcttaaaaccaaattcccaaactgatggatctaatttcaggcaaccatgaagagtatatagcgatcggatcaagagcaaataattacacaagatagcgaaaagacatcataattatgatcaataaaaattacttccatggcctcagtttcacttgaaacataaagaaaacttttaaagatattcttacagatttattacaataagtagtttataaaccctacaaaagtatttgttattttgatgaaccaaaagaatgaaagatcaagattcaagaactttgtcctgtgatttgcgctaacactagccttcttgatcggttaatagtgtggaaacatagatagagatgttcttcaagctcttgcaattgatctgagaattt

SEQ ID NO: 33340 - DNA, 423 bp, Arabidopsis thaliana columbia
tcgaacaaagtatgcgtattctattggtccatggccaatattattatactatctttaaaataaactaataaaatcaccaaatcttcttcacgttagaaccagaaaaataaaaaaagaatggccaaacctttttgcatcttatttagtgtaaattattatttagacgtacgacgtatgatttgtttgtttctacaaatatactgtaccatttttttgacctcgattagtcatttgttcgaaattttaagatgttgtatcaattttttttctttcatttttttaataattacaggaaaagaaggcttgagctaccaatcaaaaagtaaattagtagttaataagtggttgggaaaaaaacgcatttcgacaaaaacaagagaaaagggaaggccatcagcgagacaaaatcataataccttggat

SEQ ID NO: 33341 - DNA, 435 bp, Arabidopsis thaliana columbia
tgttgctagtagcctggtaatactagcgtcaatgagagatgttgacgccggtcgttcatcatcggctgactgtgtttgtctcggccatagccactttgctctgttggagtctggcggtcacaagaacttacgaacagacccataaagacttgagtattgttagacaacaatcacaacagttcttgaaacataactttgatatcgaaccgaattggtattgaattattttggttcatggtcggttattctagactaggtgtatcgatcggcatatgatttagatgagctcggtttgagaatttaatcgaacatattggtctgttattctatccacgtagagggtgatttagaaatcccacagttcaaaccatgcctgcaatatttcccaacttgagatctttgaaatcgaaccgaaccggtgtttagttactttgg

SEQ ID NO: 33342 - DNA, 565 bp, Arabidopsis thaliana columbia
tgcaaatcgttttatatttgaaaaatgggtatgaagttaggtcctatacaaataatacaagggggggttcgttgtcaataagataggcacaactcttactgaactgaaataaactttagtattgaacaaactgatttttgttttggtttatttatctttcagtagaggtaatgattatataaaagattctcaacaaactaaaatatacacatcatatttaatatcatcgagatattatcaactaatgtataaaagtttcaatttatgatagttgatattaggatttctcataaataaacaatgttgataataatctaattaatgcttaaacaatgtttacttacggatcttaacattataactttaataaaatagtagagtaaactataaaagcaacaattaattgaattaactttaaaaatatagcaagattttagaaccacaacaatagtttgatactaaataagtaaacttctagagaggtaagcagatatacccaaatagtatagaggtaaacaaaactttggatatccaagaacctcgcgtcggaaacaagtggcatctg

SEQ ID NO: 33343 - DNA, 405 bp, Arabidopsis thaliana columbia
actagattgcctaaaatcgctctcaaaaattccttaatgattgtaaatcggtcacagaaaaaaataactaaaaatagattaatgttggcaagcattttaattattgcagacaacatacacatgagaattacatttccaggtatatcaatggttttttattttttaatttccaacctggttttgataggaatctgtttggtaccaaacagatttaccgaacataactgcctaatgtaattaaaaaaagagagagagcgagggagagagagaaagtaaaagctcttactttggccacaagatagtccggatctctctctcagcttcacaattttccccaagtttatcggtccaatctagtcctcaaacctcaaccaaaaagctaacgagcaaacgcgcgtgatactc

SEQ ID NO: 33344 - DNA, 453 bp, Arabidopsis thaliana columbia
agtattacttactctttgttcaaaaaaaaggggaaaaacttactcaaaagaaaagacaaaaatcataattcgaatcttcaaataaatgcgtgaaaataattggttaataaatatgtttggggaattagtactggtgttagttcatatcataagtggcaaattttcttaaataatgcaataagagagacacatgaaattctaaaatcattggtgtgttaagttttggatattcatctatatatgttcaatgtccaagttcaagtaagtaactttcaacatgagaaatggttgaaattcaagtagagtaaacagaatcttgttttactgcggaccataatgtatatgagctatgctagtaacaaacatgcattttataaaaaacatattttcgttttcgacaatattataaaaactaaagtcatcttagacaacgctttaggttggaatcaatta

SEQ ID NO: 33345 - DNA, 460 bp, Arabidopsis thaliana columbia
actgtcttcgggccaaagtggtttatgagaacaagttggaagatggtggtttgataaacaagtctgtaaatcttcttctacaacgaaaggagactccttggtatctggtaaaatacaactcatttgctatttcttgctcccccccccccacccacgacttaagcctgccttcttgatttgttgtctctctctctctgtgtgtctcacacacacaattaggaagacagtacgggtcgggtgaatgtagtgggagctgaaggtgctctaggttttaatgaaattgtaagaccgtatgaagtaaaatcacttggtgaatccttcaaaagtctttgttcacccaaagaaggctctaaggttctttgttccttcattgttttcccttctctgttttgtccctagaaaactctaattccttgtgttgaaagttgtaacaacaacgtgatgttttccttaggttatc

SEQ ID NO: 33346 - DNA, 268 bp, Arabidopsis thaliana columbia
gaggtgaaaatactatctctttagtcattgtcttgctagatgtatcaaacatgtaatcgcgaatagactaagaagcgacatttactctaacggtgaagaacttctgagagcgcagaaagataattgcacagtactgtgctaatgaacatcaccgacttttcttgtctaaatgtctgatggagtgataggtactggacactataaggacaaacacgataggaacataacaagctgatttggctactgcgcaatcgttctaagttccgta

SEQ ID NO: 33347 - DNA, 556 bp, Arabidopsis thaliana columbia
tggtgagaacccaatagagggctctcactattggagatgctctaatgatactataattctgattcgaaattgcataactcaagatatgttggaaaagctagtcacttttactatgtgcaagaatgagatagttaagtttcaaataatgttttagcttcaagttacatctacctagacatgttatacaggtaaaataaaataaacatgttatgtaggtaaataaaacaaaacaacagtttactatatgtttttataagaaaaaataactatatgatctcatatggaatctgaatctatttctcgattatttttgagtttttttttttaattttaaatcaaggcatatgcgcaaaaaaaaaaattgtatttgttatattatgataagaccggacaaaaaaattagaatgagagcaactccaatattttggatttgcacataaatgagaaagagagattgaagatgatagataacatttttgtctgtactattcatcaaattgtttatgctgtctatttccaattaaatagtcatgatatgaactcaaattatggtaat

SEQ ID NO: 33348 - DNA, 628 bp, Arabidopsis thaliana columbia
tgtttatcaaattcaaactacgttattattccatgttatatagcgtagtgttcatacagaaaatagcacatcaatctatgattcatataggatacatgttatactcaaaactatcttcaaaacccaatactaaaacatgcaatttaaaaaagtctgaataaatttgataaacagatgacacttatataatttacttcaaaactcaaattcaaacatgaaaattaaacgcaaagaagtttgaatatatttggaagcttacttttgtctttacgacaaattgattacagaggtcactaaatatgattttcgggtctccattgcacaacttgaaattcgattcacctcttaattgaaatcccgattgacttatctaaatgatcgatagttgggcatattgagtagccgattgagattgtgaatcataaatccagctgtatgaataaaaccaattagctgttccatgtgtgtactacatatctccataaaacgattgaaaacgaaattgatcgaatcaaattataaaaaatcagatcggaggaaaataaactcttacctaatacttgaatcaaattgtgtagccaaagtattgaattgtacatgagctcatggttgttacggatgtgaagaa

SEQ ID NO: 33349 - DNA, 372 bp, Arabidopsis thaliana columbia
cacctagattcgagataactggttttcccttccaagctagtgcatcaagaaattccccatctcctagctttgggccagcgcataattgtggcaagcctgcttttggttcaccgtttgggaacaatgttgcttttgccagacctgatgttggtatctcgccagtagcttcctcctccactagtactgaaatttttggtgcaactccagcgagtttgttttcaccttttgggccaatgcaagctcctgtccaagctagtgcatctagcacttccacattccccccatttggttgcgtcccaccatctccgtcgagtggttcttcgctgttcaactctgcttttggttccctgccagcaccctcttcttccaact

SEQ ID NO: 33350 - DNA, 488 bp, Arabidopsis thaliana columbia
ggggttgaaatctctttctttgtaatggagcttcattatattggatacacagtatattttaactttttaagctattaaaaactctggttctaacttctaaaagtgatttatcccaaattgattagttagacataaaatgttaattaaaaagcataattacaaaagtttaatcttaaatttacaatgagtatctattttgacaaaaaaaaaaaaaaaaaaaaaaggaaatattttttggccgatcattcacgtaacgggaatgcatattgaaatatattacgaatactaatctactttatgagtcagaaataaataaataaaaattacagaagacgaagaagaagaaaatagctatagtaatatttagaggcggagaggccaatgaatgccttctctccgacaaggtaacggagccggcaaagttatgtgcgacggcaacttctcccctggcatcactaccgatacatccaccaccgtactcaccggaa

SEQ ID NO: 33351 - DNA, 558 bp, Arabidopsis thaliana columbia
catattcgttacagaaacgatctaagatagaacaggagaatacaaaaaaaggaaaaggatataaagttgcattcaaatcacgcagctctgaaatacagacaagggttaatacaggatttacagagattatggtcctaaactaatgtgtaactctactcccatgggaaagccgagtaacgacctataacaagaggcagttaaagctcttttaaacttaatagcctagccacatctgtgttaggagtcagatcaaactttttacctgcaagacttgagcagcatatctctgcgcttctgcatcctgctcagcaaatattcgtgcatcttctgttaccttctgttcttgctccacccgcatcaagaccttcatacatatcaattaatctcagaatctttctcagtcacaaacgagaaaagaagaagaacagattgatcatgcatatgcaaacctgtagcattgcaccttcttgttcctgcttatcagagaggagtctctgaacttcggccatttcttgctctaactgttcgacctgaagtgcacattcatgacaagtagca

SEQ ID NO: 33352 - DNA, 479 bp, Arabidopsis thaliana columbia
tgatttcaacataattcttcttgtatttgttgcccttcactcttttttggaagaagaatatatttatatcgttataccctccctttcttaaaaaaaaaggaccatatctatcaccaaacctctattcaaaaaaacttcttaaaaaaaaaagacacatacatgttccataaacaagagatttgatatgaaaccgaatcttattgtaattgcaattttgccttaaacatacaatgctagtgtttaactctatatcccactggcttactcacaaacaaaatctaattacatcacgcctcccatctttgcgaagatcatcaagttctaaacgaggaaaaataaatcatcaactttgagtatttcaatgaaccacttatcagacaattgaagtttaacactgattgtcatttctaatttattacatccaaaaatctgtttttacattgaaacatagacaacgatcaacttataaacacatacta

SEQ ID NO: 33353 - DNA, 764 bp, Arabidopsis thaliana columbia
tccactaaaataagaaaagccaccacaaaaaaaaaaaaaaaaagcatggatcaggccttaagtgttaaaatggcatcaagaatctaatagtcagaatctgcctctcccagagtgaaagtgtgttgtgtcttaatcggtatataattccttctccgggtctaaaagaaaccctttcaatctcgaaaagccacacaacaatgtccctccttctccctacgaatttacaacaatacccttcttcttcctccttcccatcttcaacacctatcctatctccgcctccttccaccgctttctccgtcatcgtacctcgtcggagatgtctcagattggatacctctaggggcaccagcgttcaaagcgccctcgcgacaaacgtgccctgtccagctagcgctccggccgatctcagcagtcgatcgtgtccaagcacgaccaggacatcctagtaacggtcgtatggctgctgatgcaatcgatcttctcaaggtctgagatttaacattgcgattgttaatctcagatttaattgtttagcttcactcagcttgtatttagttcttagagactgagaaatgtttcgtcattgagattttgatagagactgatttatgatttttatattagctctctctgtttctgtgttcgtcattctctttcactatataatttgattatttgtgattttgaaaacttcaaatgggttctacagactgcttattttactatactttgttttgttgtgcttttagtggtaagttttg

SEQ ID NO: 33354 - DNA, 475 bp, Arabidopsis thaliana columbia
atccacaaacaaatattctttagcccaaaaagtctacaaacgaatatggaccgaagacaatactttgcttctgtttcaggctttgtataatgctttatttcacacaggaatacatacgtataaaaattggtgaatctgaagcatatactttcatagtagttgggttttaggacctaaaatctcaaatgctatcccaatgttaatccaaaattttacaaaatgaggctcaaagttttcttttgtcaacctttcaatgttcgatactctctgtattcttatcttcagtggaatcaagttctttaacaccactgaatccaagttcagccatatcctgctttgccatcaagttcctgcataataatatcactatcatgatctaaaccctaccaacattccgcgatacgagtacgacccaagtaaacatgaactagagagaaactatgatgtgtgcaaaagtaagacataagacgtactt

SEQ ID NO: 33355 - DNA, 544 bp, Arabidopsis thaliana columbia
gtctttggttactgtacaagaagaagacaaatggtgatctgggttcatcttcaaagctcccaattggtttcgagatattatcgatattgccactcgcaatgtacttgaaccttttcacttcccttcttttctcaccgcactcatgcatatcatacagagcaatcgctatcataacaccacattcttcactggaataaaaacccaaaacagagtaatcacaaatctagataaaaaccctaaagaaatctagatcgacgaatccaaaagctttgaacaaagtagcaatgccattttttaaaagcgctaccatcggcagcacgacgaacagcttgaactcttttacgagttctcggccgaattgccattagtgcgcatcgacgattttttctatttctgacagtgaacaaaagttttaacctttttcgctctttactatgttgtgtgcacgagagctcaggcatcggttcgcttacgtgtcaattgcgcattttaacgataatggattttctgctaacgtgcgcttaacagataatacgcgggacat

SEQ ID NO: 33356 - DNA, 467 bp, Arabidopsis thaliana columbia
tatatagaaaatagacaaaatctaaaaatagacactaaaaagatctcaacaacaaatctaaacaatatatatatatatatatctttaaattatagaaaatcacaaagatatctccgggattcaaattttaataattattttaacaggttttctaaaatatattaaaaccatatatattgaagatacaaaatacaaataggaaatatactgacataagagatacaaaatatttaacaagaaattgtgttattttttgttcaaagaattcgatataaaatcttcaaaacgatcatatattgatttttattaaattgttacaatttcaatgtagcatacaatttttcttattagattgaaattgtaaattgacaacaagtatcttacatatgaatatattttaaaagaataaataatttgatctttagttatcacgggacggatttatatcgcgggatgggttaaaggag

SEQ ID NO: 33357 - DNA, 171 bp, Arabidopsis thaliana columbia
ccagactccatataaactcctattaaagacctcttgtctttcactcattcttctcttgatctcttcttctttaacgtttatactttatattcatcgaaagcatttcttctttgtccgtttacatcattttcgaatttgtgttttccctagaaattgtctttttttttttct

SEQ ID NO: 33358 - DNA, 555 bp, Arabidopsis thaliana columbia
  unsure (1)..(555): unsure at all n locations
ttctccaggacttcgaaaaggtacttatggaacgccaataggcatgaaatgaaaaaaaaagagaatgaagttctctatttcactttgatgtggaaacgtaaaaatggggtttcgtttttaaatactattatccttatatactactttattaatcatatttaaattaatgatatttagaacgtnggttgaatnngctgncataaactctgacatccccgtaccgtacgagcgnctgcctcnccctcgcgggcattttttccgatcgggcttctgactgttcaacgcaattgctgtcttggttcatggaccctcggattcccccccttgcctgttggctcttctcggatctcgtatagctccgcttccctttttttctctgacttgccttgttcccttctgtctatctgactagcaccgatgttcgtcctttctccgagcttagtttcctgacacgggggggtcgtggcatagttttttcgatgcgctcggttcatagtgtctttttcgttgatcaggggtttccctgggtttccttggttcgtgtcatctgttgtt

SEQ ID NO: 33359 - DNA, 506 bp, Arabidopsis thaliana columbia
tcaatttaatttattgttctgcaatcacattttccattcaaattcatttgacttgatttctattatatatacaccttattcaacacgtttctttaactgattgccagttacatcctaaaatgcttccgaatggaacaaaatatgtactccattttgccacgttaattaatccaaaaagtactcgcaaagaaattcctccacaacaagaaaatattagtgaatgagaagagatttatccatgaataatgtagagtcgtccacgtgttaaaagaaggatcgatgttgagaagtcatgggaacgaagaactggtccaaactgttcggaggagggttttaggtctaaaagctataaaaaacgttggttagttttagcccccaaaaaaaaacatgtctttagagagtcatataattcagaaaacgtttcaaatttactgataatttcagactactcagatgttgacatgtgttgttaaaattgagttcaaatgttcttaaaacattggagt

SEQ ID NO: 33360 - DNA, 459 bp, Arabidopsis thaliana columbia
ccggtatcttcaaatttgtaataatgaattatagatctgaaattatggtttctatataattattgtctctaatcagtaatcaataattggctactattgcagacaccgcattggagcattggcaacagaaaaacacaaaactttcagcacaattaacacgtataattattagtaatttgacttgatcgtattagcaattttcacctaatttattatacctatttcacagacacctttaacattttcaaaattgcaaactacacctaattaatgataaactcaagacataatttttgattatattagcaaaattattgccgtgattaactatagtagatacggtgtgccgtgcgtaattaaacaattaattattggttggaaaatggcgacatagacgacgtgacaaattctgattagctaagtttaagtcacatcaaaccaaaccgaaacggctgaaag

SEQ ID NO: 33361 - DNA, 909 bp, Arabidopsis thaliana columbia
gagatggttgcgtttggagagctgatttatacaattgaaacaaagtttggtgccaacaaaacataaaatcaaaacaaacatatatgttctaatcagttcatggacgaaggtctcagtcattaccttaaccataaacctactatggtctatctaagatacacaagagctaatcaatctaatctctttttggaattaactaatcaatctgattaaattgttcacagaaaaaaaagattgaatctttgaatacacactcaaaacttcaaattctagatgaaatcaagaagcatctaaccacaagttttaacagaaaactgaaaaagagaagaagcgtacggaaacaggtatcaaggtaggattcacggaggaattgtccaaggcaaataggacatggatcaaaatcggatccatcgtcaatagaaccgctcccgccggcgatctccttcgccgccataccaactcactgactcaggtctctctccgcttggcgctgattcagcgttacggcgtcgttgtgactaaacacaggttatatttttcttttgttgaaactttcaaaataatccttaaactctttcaacattcaaaataaacccaaactattttaaattaccaaaatttacccgtcactttgatgagtttttgtttgttatggttccagaattaaaaaaaaacattgcctttgaatttcatgataatcaaagaatatgatgaagaagcactacaaaccaattctctctcagctagagaattgcagatcattggtggaactgaatcaactccatggtttaatgatcaaatcctcagttatcagaaacgtcattcctctaagccgactcatagatttctgcactacttgtcctgagactatgaatctcactacgcgagatcagttttcgaaagtatcga

SEQ ID NO: 33362 - DNA, 497 bp, Arabidopsis thaliana columbia
caaaaaaaaaaaaaaaaaaaaaaactcacccaggttaaattttatttccaagtggttttaacaaggccccaaaatttttcctactattaagaataaaaggtagatttatatatggaaaccattttgtggtgaccaaaccagggaaaaaataatattagtttttcctataatttaaattattaaaggggggtcattgccaattaaatttctagagaaagttttagatggcattggttcaaggggaaccccccattaatccccattagtgggttattaaataataactcctttttccaaaaaaatggattccttccctttattagggaaattaaagaaagggcctgtagctatatatctatggccctcacaatagcctcatccccattttttagccaccaaggcaggggagggtgagagagagagatagggttttttaaggtgtgggaattggactatttatctaaatattttagggggccttctggtccttcaccccc

SEQ ID NO: 33363 - DNA, 533 bp, Arabidopsis thaliana columbia
tctgatttaactgaggtatggacttgggctatttgactaggagatatctttggtgacttcttactactactcacctctgtattctctgctggattttggcatatgcaacagcaaagtgttgttgatggaacaagtgaaggaagtgagctagcagtggaaagaagactgggctgattatgaatgtcagtaatgacgtctctccccagtcaagaagataactagagaattatgcttagaagatttgatggtagccttgctattctccatctattctcatcttcggaaaattgtctaaactatagtacccttatgtccaaaaacctacaatcttctgtcaaaatatgagaaggaactttttttggaccgtttgattcctgcattcgagtatgaagcagatgccaaatgtttctcttacttgtcttgcctgaaaagttatataaaactgaataagctgattcaataccaatcttttacccatatcctcatatgttggaccattactaaagggatagagaataactgcaagatgatga

SEQ ID NO: 33364 - DNA, 486 bp, Arabidopsis thaliana columbia
tgaagaaggagatggaaaaagtggtttatctggtttgaaagatgtgaagaagacctcgctaaagcgtcctggtgtccagacaaaagaagagaaaacagaaacagatttgaagtctgaacaagccttctttggtgtctcaaaagcacgtgaggctaatgtgaagcctcttgattcagttgagtctgaacaggccttctctggtgtgtcaaaagcacatgaagctactactgtgaagcctcttcattcaatttttcatgaagaagatgagagacaaggttggtttctgcagacatgtatatttgttacatttggttgggttaacttccttttgttgactgtgcatttggttctttgtcattgcagatgagaaaatagtatcagagagagaagtgagaaaaggtaaaagcaaagcgcagaacactcgaagttttaccgaagattcaagaagcaagaagaaatcacaaggcactaaaagttctttggata

SEQ ID NO: 33365 - DNA, 541 bp, Arabidopsis thaliana columbia
atctttaaatgatacatgaataaacgagacaatgagtaaataatatattttggaaaattgagacaaaaagggacaggacaaaaggaagctgtgcaccgccaactggaccgtggctgtagtcttctaccttccactgtcatagaaacagaataatactctttgttctttgcttcttccatggaaactctccacttactagaaataaataaacctacttttcgttaataacttaggccaaaacaaagattaattatatcaaaattttactagttaattaactttaaaatatactttttaattaggttaaaacgttctttagttgaaatttgcaagtgattagttatattagcttcaactaatagaaacatctcacaatttttaaatattcttgcaatgaattatttttttctgttgactttctcaaatttgagtattgatttctgaattttgaaatcatcttagaaggtataattgtattattaaagtttttgagttttttttttgataataaagtttttgagttaattgtgatcatacatgt

SEQ ID NO: 33366 - DNA, 496 bp, Arabidopsis thaliana columbia
gtcgtcgatctttgagtacatcatcacctagtgacgaggtctcctcccccaccactgctttgtgatgccacccttgagttttcctgcagcttaatcttctcaaacagatactgcttctctgcctcggcctcactcagcctctgtttcagatagttacttgcgtattcctcctcagacttatccattttcgctagtacaatcctctgcaacctatcagcctcccgctttgcttcatttgctttaagctggaacatgtctgcctccgcttgcttcagcctcacgattctctctagctcatctatctgaagtttcttcttctgcctctctgctttcagttctgaaacttccttggctttgtcttcgagctctctatcgcatgtctcaagatgcatgcgtgccgttcttgaacattctcatcttctcctcagccactatctccattttgctcaaagtctcttgtacaacttcaggaattcggttgcatgcatctgaggtg

SEQ ID NO: 33367 - DNA, 568 bp, Arabidopsis thaliana columbia
gtcctaagcttatccactatcggatcttccctaaagttactgaaattggcttggtcattggactctttcgaactaccctcgtcttcaaattcattcgtaaacctagcaattacaaacctatttgcagcctttctactagaatccgtcaatcttaggtttttcgaattcccacgaaatccacaggaaataaacctaaagttcgaaattttgacgctcggacgcagaacccgactccttgtaaaaaaaaccgcgcggagtcattagagcatggacagagcagagtgcaagacacatcaacaggtaatcggaaatcaaaattcgaagaagaagtttgtggaatcatctatgaatcgtatccgaagaagaaggagaaaaataacgcatatctttagggcaataacagtttctccaatggctcgtagcaaaatctgtagaagctaacaaagttagaaaaattgcagaagaagaagttcattttcttctcttcttacttctgtttttttctctggactgtttgacacgtggatcgaacctcgtctcccctctacggctattaaaaaaaatatat

SEQ ID NO: 33368 - DNA, 437 bp, Arabidopsis thaliana columbia
atcatgacttgcgagtaggattgtgctttaaagatggcgatgagctgaagaaggcagtggactggtgttcccttaaagctcagcaaaagtgtgtagtacgagagactgcaaaggacgagtatatctttgagtgcatcagatggaaatgcaagtggtcacttggagccgctagaatgaaaaagcacggacttgtcgagataatcaagtatactggtccacatacttgtcatcccattgttccagaagatttcaaatcagagtttgaaacagatgagattgaacgtgcggtcaggtatatgcccacacaaacaatttcagagttgaagaagtggtggaaaaaaaaaattggctatgagcttgaaacttctgatgtgcggttacgaaagagaaagctatcaaaagagttgttggagattgggatcaaagttttgaagatt

SEQ ID NO: 33369 - DNA, 297 bp, Arabidopsis thaliana columbia
ccttaaaaaaatctgaagggccttcatgtatccatctgaatataaaaacaaagaaatcaatacatgtactaataaaaaattccatccggcaaatatataaaatattaacgcaccttagcatctgaatataggcgtcaggattatccgcaagaaacttcattttcattgcaactaccttgacatcatccatctgcttaatgtgaaggaatgagtcaggcgaaggtgccaatacttctatatttggagctccaacaaccacagggaccgatcctgtaagaagctttgatcatttagtgc

SEQ ID NO: 33370 - DNA, 569 bp, Arabidopsis thaliana columbia
tgcctcttagaaaaaaagaaatatttttgttatttcaattttcaacaacaaggagcattgagaaatggccaatacattcacgttttgccataatcagttacaaagacgagacttacagtcagtctgaacaaatggagtttatcggatagcaccggtcatattagcaccaccgagggtttgctccttccatatgctgttacataaacatatcgcaaggattaaccatttaaactctactcagaaacttgtataagagccaaccaattactggcctatatcaatcaatctgcgcatgtatgtttttcaatacccaagtattggttttggacttaccgcttctcgcagattcacatgcctcaagtaagctcgttgaaggtttgctcctttgaagttggcattactcaactttgcaccctatacatataagatccagttaaaaccgtaactaaacactactcatttaagactacacttattagcacaaatcaaataaggctgaatataaattgtcaataaaaggaattgcttaccttcaaatttgcaccttctagatttgcccttctaagttg

SEQ ID NO: 33371 - DNA, 526 bp, Arabidopsis thaliana columbia
tgaagaacaaaataatatatggattgaaatttatacgtattttgcagtgtggagacgcaagaggtgcttgatgctgaactctccgctcgtgttttgcggctagtaaatgttatggacagtggactgcatagacaggtgttacatctgttagatacaagcaatttcattaaatcaacttgaaatattattatataatctctatatgtatggttctattactgcatttctactgaacataaaccatcaatacagctacaaaatttagctaaaagggcgtaagcctgtatagccacaattagtaacataagagtgatttcattaatgattatgaaattaattttctgcttgaagtgcacctgttggattttgttttctctcaggtaagttcactacattaatctcatctctaattaatcaaaaacacttctttctgcagagatatggtgaaataagtaaacaaaggcttgatcgtgccattcttaccttcttccaaaatttccggaagtcttacgttggtgatcaggcc

SEQ ID NO: 33372 - DNA, 453 bp, Arabidopsis thaliana columbia
cccctctaagtacataaacgataaacaacattattcgcccgcaaagctagaatccagtgttgtactctaatcttatgtcaaaagcactaaagattcaaaatgcagaatatttaaactatcttcctgcatatctccttaatgcatacaagctcaagaagaacaaagtaatagagccaaatacaaaaagctaatctaatctaatcagcctcaacaagtaagagtatgaagactgaagagtaaagatctaagaaaggtatcaaacaattagaagacacagattaacaaacagcagaatatcgaaaagaatcacacttacttaccgacattaagaaaggaatgatagtcgtaattgcttccattgcaaaggccacacaccattgcttggttttttcaacatcaaaattcaaaagacgattctacaatcaattcactttcatacaaagctatccgcga

SEQ ID NO: 33373 - DNA, 391 bp, Arabidopsis thaliana columbia
cctgtgtttctacctcctcattatatattatataaatatatatatatattatatttctacctcctcagctcagattccactgtggtgatggcctcagtgatgttattttatatcaatcaagtttttttctctcgttcctatatccggtctcttcattgttcattcatttgttgctatgtcattcattcaacacctgtccattgcccactctgttcaggccttattcaggttagagatatgccttttggagcttatagaacggtagcaaagagagacagctgacaagtaagcaggcacctctagcacaatatgttaagtgcctccatcaggcaaggccacagcgctcgtcaagcggtgaagagggcactttgtgaaaccttgtgggatcagg

SEQ ID NO: 33374 - DNA, 590 bp, Arabidopsis thaliana columbia
taataaagattctttcttctaaccccattcgctctctccgatcaacacaacatttgatctaacggtttaattttctcgagaaaccgaagagaaacaaacagaggtgcataacgattctgacggaaacttttgagatattttttttagagccaaaaggattcactttttttggttttatcttcgcatcgatctatgacgtacagcaatggcgtcgatgggacggtgcctgagctgaaattgagagtcgaagaagattccgataatggtgattatctgaaattgagaggaggatcaaatgaagaagatgaaggatcatcggcggaatcatcgagatgtccgataggatcggttacttctgtctggttctgggtgaaattgatctccttggtcgtttgtttgggttcattggcctttgttatcatcaaatgggttggtcctttttgattgaaaaggttcgttttttttttgtctctcgaagatctgatgcttattggttacatttgattggattagggtatgcataatgattctggtttctgctgggtttttattgttgaaattagggtcttgaatacatgtatgagtatgtg

SEQ ID NO: 33375 - DNA, 431 bp, Arabidopsis thaliana columbia
taaaaacatatggagttaatagttttaaattttcttaaataccaactttgtaggttaagaattccataacaaaaattgaccaaagcgataagaaatggtcaagtggttaacaattcataaaaaaatctgaatcaatggtcaagtgcttgtcatgaaacgtagtcagatcgattttatagaaccgtgtatcacccctcaagtaatcctgccgtacaagccgatgcaaagaatctgttttctgtttttgaattctttcttctacaatacatatgtaatttagagaaactaggttcaatagaaacgccattttgttgaaaaacatgtcagtgatgacaagttattattttacttgtatgaaaatgcatggagcaatacataggacgcactaagaacagtgcatgatgtgacaagtgcgtgcgcatgggaataat

SEQ ID NO: 33376 - DNA, 409 bp, Arabidopsis thaliana columbia
tgtgcagctcttttcttttaactgtaatttacattttaaaaaactcgcaacacgagttatttttaatggctatatataaacaataaaataataaatttaaacttacttatcttgtagaatacatagtaaataaataaatcttcataaatagctagaaaatcaaatatttgggagaaggaagagtatggtttgtatttatcatgcactaatttaattaagtttcttatacatatatataaaaatatggtcaatatcaacaaaattaaaagtcattgttgagtgttaattactaaagagttagttaagttactcgtgtacttgagttctaagtcaccatttacatgcagtgtttgtatggcgcactaaatgcattatgtccctttaccggacttgttcaatatacagattt

SEQ ID NO: 33377 - DNA, 436 bp, Arabidopsis thaliana columbia
ccccctcgtgctcaataactggacagaacatttaatcgtttggaacaaaaaatgtttatcataacaaattaacccatttttccacagagaacaataccattcgtaaccaatatcgagtagacaattctttaacaaaacagaaagcgacaaagatgaaagaaaacaaacataaaaccaggggagagaccgagagagagagagcacctttctgacgtggaaatataatccaataagagcagagaaatgtcgctacaacgataaggatattgtgacgtggcaaaacattggccatgaacaccacattacaccacattccttttgtctatgtacactttttatattgccaatttatatttgtagacagactagtgattagtgaatactgactaatatacgtaagagaattgcgattggaaattcggaattgaggagagag

SEQ ID NO: 33378 - DNA, 599 bp, Arabidopsis thaliana columbia
caacacaggcttaggtcacaatcaccggcaaaactaatgaaattagaaagaagtaaaacaatgaagtcctcataatctaacaatgcatttcgcaaggcagcataaactactgcagcacactggaaatattatccgcaccagcagttccctgccagtacttttaataaaagacgaaactccaaatttaaagcctcaaatatttaatcaaaaaatcatatttccatcaaattcctagatcagttagatatatgatgtcacacgtctgtttcttcgtttcatattttatgaacagcttgtaagaaaacatattttgtttcaatctaacttcatgttctggtacagatataaagcaacaagaaaatgcaggcacctttgcgactgattttgaaaggaatgacattatcattgtatctaacatcatgttctgcttcaatccagggtattgcacctattttaacaccaaaaatgaaaacttggtgattcttgaagttgttgcagaaagaacataggaaattaaaccagttattgttatgaggagttacctttactgctacttcctggtggttctcaatacagcatgatgtacttgagcaatagat

SEQ ID NO: 33379 - DNA, 489 bp, Arabidopsis thaliana columbia
tagtaacggctgctgtaaagcacatacgacatctcagtcactgaccaccagctcgtaccggttcaccggcatagtccagggccggcttagatagcctcattcttggacaatacataggcaggtacgtattggtctcgcggagatctggcccctgagtttcggcaatattgcttggttgtcaatgctcaatgctcattgccaaacaaggtcaatggacgtaaggagcaagcccaagttcctgtccttcctgcctacccaatcacatacccagcctttctgtccgatgtactgacgacatggatggcaacgcagaactgtgaatcgattgggtagaagggctcgtgagcgtgaaggcatctcttctagttacgagactggcgctgctaagccaattgatagaggccagggaaaagtcagcagggaggtgctgcgaagaggtacctcagataaggctgcaatacatgaaggtgttttcctggaagatgaata

SEQ ID NO: 33380 - DNA, 530 bp, Arabidopsis thaliana columbia
atcccctagagatatcatcactctctagattgtttatcttattaaaagtgtattcctttttaaccatttagggattgagacagtcagatttgtggtcgaaatatcgatttatgtgtaactgtggacgatgtgcagcttcacctccagcttatgtggactctattttagaggtatcaattgtgactgttgtttggtgtagtctcacatcaaaagctagtgaaatttcagtttattaatggctgagtttgagttagttgtgtgtggtttaaaatagttaacgttatatgatgcatccatttagggagttcttacgttggagagtgaaaagacaaccgttggtcactttgatggaagtactaacaaagatgaagcagtgggaaagatgaatgattatatccaagaagctatagatgattttttatcggacaatatcgatcctaaaacatgttgtgagatgattgagagtgttctgcatcacggcatccagttcaaggaagactcacagcctcattgtctgcggttacatgcgt

SEQ ID NO: 33381 - DNA, 1029 bp, Arabidopsis thaliana columbia
ccgtctaagagacatataaacatatgaacctgttaccttaattcagggtcgcgcacgtcttttcagcgaatttgtaggtagttaatagatggagataattatattagatcctaattcacctgacacgatagattctagtgttactatgtaggatataaattctagtgttactaggtaggatcatagtcgtgtaggaaataaatttgttaccgagtaagattcatataagcatataatactttgcgcgcgtcgctttaaacgaagtgtatgtggttcatgaatggaaataatactattatattataattcacctgacacgttaataaaatatttaggacaatttccagcaaattcaatgtaaacactgaagcaaaggtctgtcgagcatcttgataactttgtttctggacaagcggtctataaacatatactgtcaatttagtctgtgttttgcttgtgttaatatgtaatattgtttacgagaggcactataatactacttatgtctaactcggtacaaaacgccgttaccgcgttcatacaagatatagcatgacaacggtttacgttggtaacataagatgaaccttttcaatctgataattaaacattaacttgtttcttataaaacattcattacatcagttaacggatgggtatctcctccgataattatacatatggccactagaatccgctttatatacaacaaaattattctaatgacaccatcatcattatttataaaacaccacgttgagctgatctacttgcccatcgtcttccatctgtattctcctccgccaaaaaacttgccttgtcatcattctacgggtcatgtttgttaccaattctgttattaatatttccatatatttcactgcttaattaaataggatttatgaagatattgttaccgtgatcggtcccttgcatgtggcttgattgtggccatggttcggcacgtgtgcacgtctcccgacttctctgaattccataaatccatacaaacactaacatgatataata

SEQ ID NO: 33382 - DNA, 501 bp, Arabidopsis thaliana columbia
gtgattaactcatttggactgatctgtgagagatctctccctctctcttatcgttttctttttttttgtttccaatataatcgtttatgacattgttctgtttctctgtgactgtaacttgaaaatcttggatagagatgtgtgttagagaaagagagagacgagagacttctaaagcttgttggttttatagaataagatttatgtgggtttgaacacatagttattgggatttgatcacgtgatcttattttgactattgctatttaataagatggtgagatacttatcttattcttaatcatttacttacgatgatgatgatatgggaggtccaaaagtcctgtctgactattgctatttaatcacgtgatcaatagtcggtttccattaagaagcttcattttttagagacaaagatccacatattcacattaccttatcatgataactgctttgaaactaagagatggtggtcatgtgattagcggtctttgagaa

SEQ ID NO: 33383 - DNA, 579 bp, Arabidopsis thaliana columbia
caactttccgcacataagactttaatcgatttagcttccttgtcttcactctcacgcttacacgtatcttgggtttagatgaaaccttttaacccatttaacagactctcccacagttggagagcttggtataaggacacattgcttcagcggtttacgattatatgctgactaatcgaagttaaatttctacaataaaaacctaacaaacaatcaggcttatctatcttcttactttgagactgaagcagcgatgccggaaacgaagaaagggcgagctggaatacgtcagagcactggtgtcgcattggaagaccatcgccggagagattgtgcagattttgggttgtaggtttctcttataattgaaattattagcaagctcttttcaactgactacattcaaaattcacccttattctaaaacgtttcggaattccaatacaaactaaggtcttattactctttcttgcttttgcagagtttgttgtagtttgtgaaaagggtttgttcttcctaatatgtgcttttgtaatctttaacaaatacacacatctagtatgtatgaatgtgaggaag

SEQ ID NO: 33384 - DNA, 523 bp, Arabidopsis thaliana columbia
catgcattgttggatcgcttttctcgagttggaaacgatgaatctaagccagtattcaagctcttcctctacttctgctggtgttttgagttctttattgctcggtttcctaaacaagctcaatacgatcaagaagaagcacgggcttgggaacataagatcatgaagagcaaagaactcgtgctgccccgcaagaatccacatcgagatctttgtctcctcgtccttgaatgtctttattttcatcccaccaactgtattaaccacttgctccacaggattcatcaaatttctcacattctccacataaggaaaaccggaagcagacgaactttgcagtatagagttgcagagtgttgtctttcctgcatagttttgaccacagaggaaagctctaacgctatttggctcagtaagtggcatatccttgagtgaatcatccgtctctgcttcatctatcttcctaccattgtgtcccagtttctgataaatctcatctgctttccctgaatcttgaagcgga

SEQ ID NO: 33385 - DNA, 625 bp, Arabidopsis thaliana columbia
ttttcttctattctattctattctattctagacagggagagagagagagaaagacattttaccgtaacacgtagagaatttatatgtaagtgtggaggaataaatcacgatcttagtgccttactttacttgtatattctgtcccagtttccacaatcttctctggatcactttcactgtaaaaaaaagagaatgtacaatgagtttgaataagagaacagatccggtgcttatataacaataattaagaacttaaagagtgacccttgtttcttgttcttgacgcatttagtctgtttagtaaaagtctacttccaatgagaatagaggatgatgaaagaaaaacaaaacttaaatcatatttgaatagcattctgtggtggcattactggtatcatacacgagaaacatttctttcttgcaagatatactagtaagagtgtctatagctctttctattaccacacaagaagacacaagtctgttttgatcaatctctcttgtaattaattagcttaaaaaatcttgaatgattgcgagagaagggtcgagaacttacagctggatgagatgcaaaaaattcaagagaaagggacttgtgttaataacttcattgtgaggtggt

SEQ ID NO: 33386 - DNA, 406 bp, Arabidopsis thaliana columbia
agaggatccctattcaattcgtgaatccaatatgtcgatactagaaatctacgatagataatacatcagaaattattaaaactatttttgagtacctcaaaaattggatgtcttaacgcatcagtttggtctccggttgatgtggtaaccagagaatgggttaacaaattaacagacgaacatgactataatatgagatttcattaaaacatgttgaaagactaatgagttggtctctacgaacaatttatccttggacggacttggaccggtttgttaaaaagccaattttggtaccaacggccgtgtggtaattaaccattcccctggaaaaaaacctccgttttggatcatgtggcgactctggaaatccagaaatgagtttttatttcaaccaaaaagtcga

SEQ ID NO: 33387 - DNA, 639 bp, Arabidopsis thaliana columbia
ccctttgtttctctttttgggttttggttttccgtttctataatttaattttgggtcttcctggtttctactttagccaagtttaacagaaagcttaagcctaaggttgcagataataacactaagcctgtgtgaagaagccaagacttataagacttttgtttcttttttctctttttcatggtttattgattaatttgtgtttttaaaaaaaaattaattttatagtattgttgcgtatatataaacttgtcatgttaattaatatctcatttcttcatatacataccaaagccatcatggataacaattaattatgtaatcgggtgttggacatataatagctatccatgcgtttatcgcttgaatcgacggtgtcggttcacatacatgcacattgttaccggaggaagaatggaggacatgataactcctagttttttcgatgtttattttgacaagactacgaatgtaaacatgaaaataaaactcgactaaccaaaacaagaaagtaccaaaccagaagtatttcgattattcgttctttatttattttcagttattgcatacattaagagatttggttttccttgagtttagaacactatctcacttttgaaattaatatctagtgtcaag

SEQ ID NO: 33388 - DNA, 581 bp, Arabidopsis thaliana columbia
tgtaccgatttgagattaacgaaggagattcatggagattgtcaaaaaccacagttacttacttacttgctgctcaagcaaattcgacgactagctaaccatagaattgaaaatattcaaattttatagatattttggaggagtttacgtagatttagatacaattttttttttggtatttggatatttcggataaactcgaatttgaatcggatcctaatctgaaatttaaaaatatccgaaccgaacatcagaacgtccagagaaaatcacgaaaatatatggaaaagataaaaggaaggaatatgaaggaacgtacgagatttagctatccaagtcggtctcggagatgaaatctaaatctataaaagagcttcgacagttgtgcttgagaacatcagcattggtccagcggactaagacagtatgcatatgttaagaagacgatctgaaaaaagtaggcctcattgactgaatgcattagatttgatatcgaaggtagaactaaagatatcgaaacggtgcatacttgttaaagagttgcatgaaatttcgtacatttaaatgttagactttgaatt

SEQ ID NO: 33389 - DNA, 513 bp, Arabidopsis thaliana columbia
atatatttatactgtatgtatttttgaataccaaaaaatccaaaaaatatttgaaaatatccgcaaatatataaaaatatctaaaatattcaaaaatatctgaataaatactagatttctgaattgaaagaaccgaaaccaaatccgaactaaagcaatagttgttttgatttttatatggttctttaactcgagaacaccgaaataatcagaactagactataatcgaatcaaaaccgaaccgaataccgaatcgtgcagttcgaacggcacatgtggcacatgtgcatttatgaactaattataaatgaagatccatgtaggtgcatctaagtttgattttcttttttagtgtttcatataaaacattgagtattgtctctttaagtttggttttagagaggaaggaccgaaaagaagagtattaagaaccaaagaggtattttccgtaaaatatgattaaacctaacatatcaatgacaattagatggtcattcctgtgacttttgttag

SEQ ID NO: 33390 - DNA, 329 bp, Arabidopsis thaliana columbia
cgcagcgttttaacagaagtgtgaagaagaacggcgttggtctgaccattgcatcaatggggatgacttcatttactgatggacctagcagaagagtctaaattgacaggtgtaggtgagactagacatgttccagatctatcaaacaagcagacaataccttggtactctacccgtgctcattctcgctggagctaattctacagaggcaccagacgcaattgactccggatcataagctatcattaggacgaagcaatagagcatggttttagctgatatgcaattgaagcctggtgaagcatgggggtactgtccacgagagacct

SEQ ID NO: 33391 - DNA, 571 bp, Arabidopsis thaliana columbia
tgatctatacactctaattagccaagaaagtacgagaacaaaagcaaagaaagaaaacactaaccagggcataacttatggtatgcttgacgaacatttcgctttgtacacttctgactgcacccacaaacaaaaaggttgctcttttaagaaaaaaaaacccacacaacaaaacaaatcaatttcaaaatccaacagagaatgacaaagaagactctaaattcaaatcaaacgataccatttggtggcttcagttagggttttgtatttgccgtatttgcgtttccaggcgatctgctctcgacatcggtagcaaactccggtaatctcggataatggtctaaatctcccgccgacttcctaacaattcataaatttccgaaaaaatcaagggtctagctacagtactcactcaatttcgttaatctcatagccgagcaaatagcttaccgtttcgttgatcttgacgccggctttgggaacccaggcgaatttgttctgatgcttcggtggtccttgccgtgagcccattttcgatgagctgtgaattttagatcggaaaaaacagagg

SEQ ID NO: 33392 - DNA, 517 bp, Arabidopsis thaliana columbia
  unsure (1)..(517): unsure at all n locations
acttaatttgcattgaatatagttcgaacttctacacctaattttgtgttgcctatgccttttctgttaacgatcactctacttccatttactatgtttattgatacaaaaggtacactaattttgcaagatgaatgtttgtccaacataattgaacacttgttaggtgcattatttattatttaaaaatattcataaataattcaacaatgtgtaggttaaaactggaaatccgctcatcaatcggtgttcacatctgtctgtacacctagatattctatagaacattattgatcatgtaactgtatttacacgtggttaattactgaatttgctggtgacatcattctcgtattgtttgtagcttaagatacaaggaatcagacgtcagggttttcttcgaaaccactttcataatttaatcgtttttgaaacagaaatgagttatttacagtaagtaaatataacatgtttgattagaaaaatgaatanaaaaataaccattcgaatataattt

SEQ ID NO: 33393 - DNA, 607 bp, Arabidopsis thaliana columbia
attgaggaaaatctaaagaatatgtgtgtagtgtgtaccctttgagataacaattttttgaggcagtacttgtgtatccggacagggcaaccttcggttggacacaaatctgcctgaaaagttggatacgagtgtcagaaaacaaagcatcagatattgaatcagtagcgaataagtttatcatcacaatgtgagttctaatccaatcaggttttttcagaatgcagacctttactccagcttcattgcagacctcacaggaaggaacatcattgtttctgaaccaactgcgaaggtcaagaagagatcttataccaagtccaatgtttctctctcttgtgcggcacagccacttgtcccttacaagttcatcgagagttttttccttttgtgtcattgaaaagttcttgaaagcaggagggacttgctgttgactgctgctggcttcacttgatatctgagatattaacacaagatctgtcaaccgaaacaaagagaatacatttatacagtccatagcaataatagctttaaaattcattaatagtcttcacacactgatagatgagaatatctgagacatttgagattcgtttattcatattga

SEQ ID NO: 33394 - DNA, 580 bp, Arabidopsis thaliana columbia
agggtatatgttgctcttcccgagcttatcaaccatctcgcgaaacttgtggtagtcttctgctacggcctcaagctcccaacctacagtaccctggctctctcactggcgataaacttgatacactccatatcttttatgaacttcttgtgggaacgctccatgttttgcttgatgacctgaaacggttcaagctcttccgagtccatgtcttcattgaactccggagacagaggttcgagctcgtctaagtccatgtcttcatagaactcctgagaaaaggcaaaagatccattcccaactcggcttcttgacctatcctcttggagttccttatctatgcgttcagcttttgctacggcctcatctcgctcctgctgcaacctctctattttggcatgaattttatcctcccgagcgtgaaccaacattagccgcgcttctagctccttctctttcgcttctaggtccttatttttggccatgatggcaagctccttctccctccttaacgtactcaagcaaaactctgtgtcttctttgaactcctggcttcttgcgctacctcttggagttctta

SEQ ID NO: 33395 - DNA, 443 bp, Arabidopsis thaliana columbia
gactagagaccttatcaaatttcgcggtaacaacaagtgttgcaccttcttgctcctgccaaggaatcatttacagtaactgtctggacatatatgaaattaaaagggtggttacaagtagagatgcaaaaacctccaacaagcatggaagactccactgaacaacattccgaatgatcccaccgtcggaactatctctgcactcaaacttctgaaagacctgccctacctgatcaaaatccacacaggattaaaaccgaagcccaaaactaaagtctctctctgctttgttcattatcattagtagtatatacctgaaagaagggaagtcttgaagcagcttcaaacagaacaacaacatcaggtgcagatgtatattgtagcctccatgttccatctaacttcactggatcaatttcatcaccgccattaaacccttccac

SEQ ID NO: 33396 - DNA, 565 bp, Arabidopsis thaliana columbia
gatgtagacgcgatccagtactgtaaagacgagtaagtatcaatcatctgttttaatttttcacatgttacatatttaccgaatctcttccgtaattaacttgtggcgatgttttaatcacagttccgctgggagttacttgtttgtatcgcacaccggttttggaggagtttcttatgcaatggctataacttgtctcctacttcaacctggtcagaacttcacagctacaccaaccacaaattcttctaccttagaagaagatgattcgccttcaggggcttgtgatgaagaagcgttgagtatgggagactaccgcgacatactgagtctcataagagtgctttctcatggtcctcagagcaaatcagacgtagatggaatagtcgaactgtatgtaatcaatcaatctcttttgagaattttatcactttaaactacacatcgctcatgatttcatcttcttgttttggcattttataggtgtgctggtgcaggacatttgcgagaagacatcgtttactacagtaaagagctgaacaaacttcctattacaaaagatgaa

SEQ ID NO: 33397 - DNA, 552 bp, Arabidopsis thaliana columbia
  unsure (1)..(552): unsure at all n locations
tgaatggtcagttgtttgtcgcaatgtttatggaattgatagtaagtattatatcaacttgaactttgggacaatcattgcattaaatttgattggtatactggtagaattgaaactgagttatatttcttgcaattttaggtggatttgatgtttctaataagctggtaaattttttaagatatgagcttgccatatcccacataataggcgggggagtttggtcatttcctagacagatcagataacaaaagcatgttaatatgataggatttattgctttgatagtcctggtccttgacttcagggaatgaacttgtggcattacatagtcacaaaaattcataactcataagggtcaattgaaatgtcgtttctcagttaccttcacgttgagaaacttcttctcaagaatccaataaatattcgagttttgtaaagcganaaaacaaacacctcacgataaggtttcagtaatgatatttgatattgtttgcagtgtctgcgatgatgcanttagctaaacagtgtgcttttgaagacccagcgtgg

SEQ ID NO: 33398 - DNA, 551 bp, Arabidopsis thaliana columbia
tgaatgattcttattaccttgaataaattgtattaagcaagttcatctgccttgctcatatgttaataaaccaataagacaaatcgacttagtggtttttgctttggtataacattattactcctcacggcattttccttcccgtgccgtatgccgccttgtatattgattgccgataatggactgtaagtcatcttgtttttaccatggaggctttttctacatagcttaggatattgggatggatgataccaagtagtgcactgccactaccagaagaaccaagttttttacagattctcaatcatcacataggagccacggtggctttatttgctggtaactctgtcgaatcctgtcttgaatctaaactttctttaaactagaatatagttgaccttctactgagtggaaaacattctttagtttatatgtgactgacatagaagaacatgcgaaaagaccatgtccaagtaatgtcaacattcttggagaagacatctatatataaaaatgttcgtgcctcgtcgtatagtttccatgtagattga

SEQ ID NO: 33399 - DNA, 457 bp, Arabidopsis thaliana columbia
ttccaacaccaagactaagacaggaggcagattacgtgaaatgagatagtaagacggcaaatatattgtgtgcagcactaaaaagtaaaggtaggacgaatcatactagaagtaaagcaagaacgtaaacaaaaacaacaagtaaatcaagaggtaacacaaagcaaagaaaattgttttagcatactgaactcccacagtttgcacactattcagaataatcatgtcatgaaagtatgtaagtccacattactcttctaggatcctggataattcaacgaatgatgcagcatgtctttggtgaactgatagagggtccactcctgttcatggaaaagctttacgattaaaaaaaaaaattccatcttttggacattcatactttggatttgattgattatggaaagtgatggaaggtctgtatatgttaaataattctgacttcacggatccttca

SEQ ID NO: 33400 - DNA, 507 bp, Arabidopsis thaliana columbia
  unsure (1)..(507): unsure at all n locations
tttttgctctggcagttacactctttttcattgctccaataaaaaaatactcgcatgcatgcatatatatacaccatagtaaactccgcctcttcttcattttacccgtataagtctacactgacacaatccttaactatctccctttgtccttcttcatctttattacacatttccctcaaggtaacaaataatctttttaagtcacttttatactctttaaatcttagattgatatatgaatgcatgttaatatttcaagatttacaggtctaccaaacgatgtcggtcttcgaatcggagacttcgaacttccacgtctacaacaactacgaaatctaaacgcaattgtaaatgtaaacgtttctgtcggaggaggaaccggtagggagacagaactcgattttgtcactaantcttgacgaaattcagatgaaaagtggtaagagctttggagngatgaacatggacgagtatctagcgaacttgtggacaactgttgaagaa

SEQ ID NO: 33401 - DNA, 451 bp, Arabidopsis thaliana columbia
cctattcactgtttgttcggtaagcaaatcgtgtgctcttcttgttctttaatccaaaattggactctcagtaataaatgtgttttctttctcaggactctgcattctttcttcaaccttcattgtggggatgatgcttttggtccgatcttaccattggcctctgttctagctttgagagagtagctgtcaaatctcccagactgaagattcgccggaggaataagaacaacctgtaacttttagcagtactcacacatagtagaaaattgatgtaattcgggattagaattctgatcttgatcttattaatttcattcttcgttaataataaacaacattgcttgtatagtaacaaatttttgcaataaataaaatgccagattcagaactgcaaactttcaatgtatttagtgatactgtaagattattccaacttgatatactgaca

SEQ ID NO: 33402 - DNA, 733 bp, Arabidopsis thaliana columbia
aggatccccaaccataatgtagattaagaaaaaaaacttaaactccaaacctaaagagagttaaatgtttattcatctaatcacgaccctgataggtctcgttgccatgtaaatgctctcaatggtcctatacttcttcttcttctccttcttcaatgatgatattactctcaacatcaccatttcttccgtgcattgatcttgatcatgactatcatctttaccgaatatttcttcgattgtcttcttcttcttgatgatatccatatttttctcttcatcgcttagatgcatcaactgttgagcagcctccatctctatctccgttatcatctcttctcgtctcctccgtttattactctcgttcttcgttgattggatcttctccattatgaaactccaaatttaatatcaaatttccttgtgaagaaattctctctggtgttcgatttgatttattttatttttctgtgtgtttctagttgtggttaatttcttcgaggattacgtaatgttgttgagggtttttgaagaccatgagaaactgcgacgttggtgctgggaaatctctctctatatccctcatcttttcttaactatatttttgcaaactcgtccctatatttttactagtttaataatacattctccttatttattaagttacattttcaaccattacatagcctaatacatacaagttattcccaacaaatttgtcagaaacaactag

SEQ ID NO: 33403 - DNA, 606 bp, Arabidopsis thaliana columbia
cctactagtgtgataaaggatcttaatatatgtttaaagattttggttacttaatgattttttttgtttgggttataattcaagcgttcaacaccaatgttgaaccatgcatttccataaatctatctaatgggttgatgcctaagccaaccgatgcaactatacgtaaaagattgagatcttgtgcactacatattccattctttgacatccaaagctttccacttatcttcagttttcttcgttttgataaaaacaacgctccatctttgttttacattatcgtcatccagacatccacactagaactcgccatcagtcaaagaaaaacttctcaaaccaatattttgcagctgttcactattaggttccactaggttgtatatagaaaaagaagattggtttgagaagtcgcttcttgtcaaaccaatattttgcacctgttcactattaggcatagatagtaaccggcatctgcctatgcactcatgaaatccgtgaatcatatcagcttactggtttaggcgttaaaaatcggtgttaatcggctaaatcggccggtttagtgtttattatttttcttcaaatatgacatctttataagta

SEQ ID NO: 33404 - DNA, 722 bp, Arabidopsis thaliana columbia
ctcccatccttgatcttctatcagctcctccgatcatgacgttacggctactatcattcaacactatctgcaaatcatcttcactgtcgctatcccaatcatctccttctccttgtcctccatagcctccatcgccaccaccaccaacctgctgctcaattcttgtcgtaacttgcgaaacgcctcgatctgtagccaaaccaggtaacgctccagtaacgaaaagaccaggaatcgtaggtgtagaatcggcatcgggttcttcgatatcaaagctcatatccttatcgtcgccgccaccatcgacaattgcttgacgagtcgcgtcctgagtagataattttacggcatcgttgtccgaaaccctagagattggagctgaattaggttctgagacatcttgatcttgggatcggaggttgaggtcgattgaacggtgaggaagaggaggcggaggagggagaacaacgggaggttgaaacggctggagaacgtcggaatatagatctccgaactcatcgtcctcttccattggagtaaagagattggaggaagaagaagaagaacggccgattcgaattgaagctcacgagaaagagagagagagagacggtgaagctttaagggcttcttctcaacaagtctcggcttctttttatcatcgctagggtcttatttatacacttatttacccctttttttttctaccccaattaggatta

SEQ ID NO: 33405 - DNA, 580 bp, Arabidopsis thaliana columbia
gaaactagtttagtaagaacaacacaacacgatttaagaggtgttcatggcatcagcgtgatagctctcaagatctttgtcaagatcagcagctgacttctccactggcttctttccatttcctcttccaccaccacgaccacggccaccattaccacgccctctagcacgaaacccgcctcttcctcctctcatccctcctccctgctggttatgactgccaccaagagaaaacaagtgcaaattaaaacattaaccgaaacaaacgaaaatcaattaactacgaattttgatttattcggtttggttacacaaaaataggaacaaaacttttgtgaccatgcagtttaatatggaatgcagttgacaaatctcagttcggttctccgctaaacgaattaagagaaacagatttatacttacattggaaggcggcgactgacagtaggagctggacctcttcctcctctcccacctctaactcttcctctccctcctcctccttgtctacaagcatcagagaagattgtgtaagtcttggatttagtctcacaacagttattcatgcgattactgagaa

SEQ ID NO: 33406 - DNA, 477 bp, Arabidopsis thaliana columbia
tctacttcaatgttccttctatagtcaactaggccgcctatatcttcaagaccttaacgcgttacttctttatttattttttatttttttgcttagaattcgtatttcgttttgcgatgaacatgtaaatcataagataatttggaatattagttttcattcgccactaaatctttcaatacattattttgggtgatgaaagcacaacttggcattgaaagtttgaaacacataataggtttaagaaatttagtgggaagctaaatatccatgagattattttgtggattgtgcaaacattgtagagacataagttattatcggattgcagacgttgcaaaaatgtgtacacaactgttaacatatgatcatatcataccatatggcctcgtttctagaatttcatgtgctgttaaatgaagtaactgttaacatttaccatactcagaaatggatgtattatcctctcatatgatc

SEQ ID NO: 33407 - DNA, 567 bp, Arabidopsis thaliana columbia
tgtggtgtgatcaactggtacacagatttttcaatcaatttcatggacataacataaattcgcgaagagtgaagattggtgtttattcataaactagtgtttttgaaattcttaccgttgccacaggcaccataaacgccacaaagctctggcagatcaagaagtttttgggaaacaacgataccgaagctagggcctccattgttgatgaattgacaaaagcagtcaacatatgtcttgcctactgtatacacctcagaacaacacgcgaaactaggagtatggatacgattatcagttaggtaggggaaacaattcaactgcatctgccctgtctctttcaagcactcgtcctcgtccgactgagcagagacgcttgtagaagacatcacaaccacgaaaactgtaagcaacactaaaaccactcctatcttcatgtttccttgatgaaatacgtggttggagaagaatcttttgagttttgttatgatcttttcagattcgtttggttttcagagtcttgctagctaattggtactatatataatataatactgtgtgttttgt

SEQ ID NO: 33408 - DNA, 562 bp, Arabidopsis thaliana columbia
agaaaggtgggatacaaaagaaagcaatagtgatggaaaacgacacaacagtgtatcggtgaacagaaaacggcaaggtgtgtttggtgttgacatccacaccacacgtacaggtttatatcaaatctatcacatctaaactgctctctcccctgtcctccccatactaagccaaacaacatagtgacaatactattgaaacaaaacacatgaaatgggaaaaaaaaagttaaatatttcgttaaacctttcttttcaacttgtggatttaaaaagttaacacattaatggagaacaaaaacatcaaatttctattacattcgcaaagttaaaaagaatttaatgttataagaaatggacgtgtgggaataaaagtaacagggtttaaattactagtttcacacactagtagtataaaatttttggtttcaaaaagtcaactcataaattgacaagagaaaaaatacaaatttttttaaagaaagagatgcacgagtgagagtgagacgcacgagtgagagtagaagagtgttaatttaccttcacgtgtggcggtgtgaat

SEQ ID NO: 33409 - DNA, 401 bp, Arabidopsis thaliana columbia
tgaataacaaaagacaatgttgcgcttcaagggaagattgcctttggtctacaatgtctttttcttgcaacggaaacttccaataagcaatttgttcgcagtaaactgtgtatgctagtgttctctgcatactcacggattttgttcagacaatgtgttttatacttctaaattagaagttctaatgcataaagtgtttgaatgcgcgggaaattacctaattataatcagtccagctcccaactatatcattttgaatagttaaatggtctatccaaattagtgcaagacaaacaagagaggcaaaaccataataccccaccaacatttgtctcttcttcctttttcacataattcagaaacacgatcccacaccttcattactattactacagctagca

SEQ ID NO: 33410 - DNA, 415 bp, Arabidopsis thaliana columbia
ctttctctcttctccaaagtagaataaataacgcggcaaaataactaactaatgactcgatagcaaaacacaaacaatttagatttataaattttcattgtataaccttacaacacagtacagtatagctttttatcttaaaaatgtaaaagctgttttatagaaaaaataattcaaatgtatagatataaaatatttgagaccataaaaagggaaaaatccttaattaaatatgaggagggtgaaaaacatgagacttgtgtcctttccttaaccaaatataaataggagggtcgtgcaatctattgaaccagacaaaaaaaaacaccaatcattttctcagagagatttcttttgtcaactgtccttatccattgttgaagcttgaggtctctctcttttaactctttatgtc

SEQ ID NO: 33411 - DNA, 266 bp, Arabidopsis thaliana columbia
ctaaaagagtgagactctgttcatcttatgaagagatatcatcactcaaccattcaaaacaaaacaatacaaaaagcaatcttaagattctagaagacatgtaagaccaccgtcgcaactacggtggctcctccaactcgtgaccaccgtctggcctttcccggctcaggcaacaacattcccttctcatctgcgaccaaattgggtccaaatgtcaacattatcacatttcattacacaaaattgcagcaggtcacaagaatcac

SEQ ID NO: 33412 - DNA, 519 bp, Arabidopsis thaliana columbia
actaatatgatgcacgatcgaactcgcggtgatttcccgagaaaagacggacccaatttacctttaggaaggtagatctccggaatggatacgtccacgttaggtcggaaaccttccgaggtgttagcattgcaaagtcccctaatgaatttttcaaacaactttggattcccatcaatcacgtctggtgcctatacacacacaaatgtaaatcatattcattaaaaaaaaatcaggaatttagatgataattttcttgatataatattaatcaaattaatagaatcaagcaactacgtaaaatcaacaacaataatataaaacttgtataggtttaagccaatttcaatacgtaaattatttctctaattcaaatctcaaaaatcgtttcttgttttgttatgtttctaacaagattattcgatataatacataatacttttttcttaataagataaatcaagtgatatactaatatactacactccccgtagagactatagtctattttagtgttag

SEQ ID NO: 33413 - DNA, 568 bp, Arabidopsis thaliana columbia
aaaatggaggaggattttgcatatcctacagaaatgcatgtttcagtattttcaacttgtgttccctggaggttgtaatccatgaaacaactttaatatggactgtccaagacaatcatgtgtaaatcaatcatttgccaaatataatgattacaaaatggctaataattccttaatcagttaaataacagctctaacttgtgagagtattcttccaataatgaaacagcatgaaattagttgtttcttttcctgatcaacaacatcatcatagagataacacaacatgcatcgttgagaaaagaattacaaaaccgtaaaatatatttgtcatattagattaagcaaaacttcttacaagagttcaaaatctaaaatgaagatttaaaaaaaatacaacaacaaaataaagcactcttaaaataaaaatacataaaaaagccacatcttcctaaaaaaacaaagaaaaatccccctattatttttttcttttcacaattctcttttttttgggggtattttcttccgaggagagggcttaattatcttcttctttttttgaatattt

SEQ ID NO: 33414 - DNA, 685 bp, Arabidopsis thaliana columbia
atcaacaccattgaaataatttagtttattgccgatttaaagtagattaattatcctaatgacaaatatgattttttttttcttctttttgtcatcacaaatatgaattggtatcctcattggcctgattaacatttctaattacggatcttacctcttcgtgccaaagaagacatttggaaatatatgacccccataaaccaaatatatgtttcttattaatgttgtggaatttgggacattttttaaaatggacaaaagaagacagaaacaattttcctacccaaaatggcgtccttaattttttcattaaattgtaaagcctgtttcaaaagaaaattgactttttgttgtgatagtataaaaaatgacatttgactttttaagtgacaccaagattctgacaataacgaattatatccatgctaattaattgatagcttaattaacaattgcgcaacataacgtgatcaaattaattaagctacatatcaggccttgatccgtggtccaaataatcatcctactaaagaaaaccagcttgttatagtaaaaagccgaattcgtgtaaaaatcggtttaaaatattcggtatagactctaatctcgatttactccggtttggttatcgtgtgtgtgatcgtacttgccggtggatttgcgcggacacgtgggatgttgtaat

SEQ ID NO: 33415 - DNA, 1922 bp, Arabidopsis thaliana columbia
aatagcaaaaagtaacagtataaatggaacagtaacataccggccttaacaagagcctcccaaagctcctcaggcaaaatgcagccattatgctcaacatcaatggcttggaaaatcctgtatagctcaagctccttagcatcaatgtatcgacgaaactcctggtaatcaacacgcccatctcgattagcgtcgcagactctaaacaaatctctagcgtacttgtactcaggaggaatctgaagcgaacgaagacccttttcgatctgggcataatctaagaaccctaaattcgaattatcaaagaaatcaaacaaactacgaatcctgatctctctctcatccattgtctcacgtaacgccaatagaacatgctccatcgtgatggatacaggtttcttcatcgggttacggtttttgggcttcgatgactccattgctgattcgcgatcaatatcgagattgccccaaattagaatgctttacaagagaattgaatgattctaaggatcattcatcttcttgcgtatttattatacagagagtgagtcctgggttttgagaaagaagacctcacaagtcacaacacaacacaccaccgaaagagtcttcacgtcgaagaagaaacacaaaagtttggaaatttacttcactattggagtcagaagcaaaaagggttaatggtgttgttgtgggtcagtggctataaacgatggatggccggtgaaggaaaatccggctccgtcatctgtcaaccgcaagtgacggtaacatatctctctatcttccctccccctgaccttttgctattctccacgtgctattcccacacgacacgtgcgaatcagtcaaattgaaatcgtgcgttttccggtttgaaccaaaaccggaaatggtcaaatgtgcttgattagtagaagtaaaaaaaatgcgtttgaccgtattaaaaacctatccaaaattacagagagggaaaaataagtttatggagatttttaatttaaataattttgttagagattggtaatttttgtagcgatcttctcaccggttttgtctccggtttggaaattagaggacatgactaccaagattacttaggttaattaacaaatctttgtattagtaatcaataaccgaccttagctcagttggtagagcggaagactgtagtctgtgacagcaaatctttaggtcgctggttcgattccggcaggtcggatttttttcacaaaaacgcttttttttttttttttgccattctttgtacaattttgcagtttctcttcgctctatactgtctggaatgtgaaatctcaaaagaatctgacctacctagcaaatcatgaaatcacctttaaaaactcgctttggatgattgtgaaatgggccagactattagtgaaacagaattgggctgcgttacatttacaaactgagtgagtcggtgcaatttgaacatccctgaacgtgaacatacatacgtattttaaatgatttaatattgtgtatatatggtatacatgcacgtattcatacgtctttgggccgataagtttgaaatagaaggtaaaggcagtggttgagatttgcgatacgttagaaggccgcaaaggttgacagggcggtgaggccggcgtgcgtgcggccatccccaatttcccttcctttgtcaacgttttaatctcttgattttcttttaactatattctttctgtcgggatgtatttttatataatagctgtatttgtgtttagttatttgaactgttttcttagctacggtccatattcgtaatcgtatctatatatgaaatatcaaagacttttgagtatttggaattgtgtatcatgttgaaagaacatgaactttctacaaaatttgttttggtttttcgatacaattctttttaaacatatgat

SEQ ID NO: 33416 - DNA, 465 bp, Arabidopsis thaliana columbia
atgtgaaaagagggaatctttaactattcgattaccctaaatttgatggaaaaaaaaatcattcggaaaaaatatcaattagtacacaatgcatagacactccaacaaaaaaattgaataaacaacaaatcagctaagttctttttacatatcattcccactttccccctcccactccataagaaaaaaaaaaaaaaacagatacatcaaaagcaaattcatcacaacttaaaaaaatgtgattagatcaaataaaaaaggccatcttctttgataaattaatttcttgacacaaagaggttttatagtcaagaatcttttcgccatgaaaagaaagatcttagtgaacgaacagctttagacattgaggagctgttccttctcaacggacggtttgatatcggccggagattgatcggagacattattctccatcttcttgaggctttgttgatgatatacttg

SEQ ID NO: 33417 - DNA, 489 bp, Arabidopsis thaliana columbia
aaatcacataaaagagtaaaagtaggtctagagggtcaaaacttaacgttgacaaaacaatctttgtctgtcccgtatcaatgattatgaaagaaaatgaacacaattgaattaaagaatgcaaagaatcatccaatctttgaaaagcgatcggacaaattggatatcacgtataccaaagttggcaatgtgtatatttaaaaaccctatgcacaaaatttctttaaatataatcaatattatagtttgtttgttaggatatttgtgtaattaatcttggtaggtgagtcaacacttccctcctatttgctgcacatatttacgtataacacttaattttggattttattgataatagaagtatacaatacatttcgaatatacaaatagggtattcatttgagagatggaatattttgcatttccatatgcaatatgtcgtgaccaaatgggttttgctggcttttcatgttgaacttccaaatatat

SEQ ID NO: 33418 - DNA, 214 bp, Arabidopsis thaliana columbia
gctgtgatctctacggatgtattagctctctagataccttctttgagtttcttctatctgcttctcgtatgtaccattttgacaagattgttttccgttaatagtacaattagcgttggcgaaacaaaattcatttgttatatatcggttaactcttaaccaagtcttaacccaatctatcagtcctatgaccggccatggatatttcagattt

SEQ ID NO: 33419 - DNA, 569 bp, Arabidopsis thaliana columbia
ggaaaagaattgattttatagtctcttaggttactttaagtagtactttgcataagatctgtgatttgatgattgttatcttttgttacattgctggtggagtataataagatgagcaagaaccaacagaagtttgcgtttgatttaggttatttagcaactagtcctgttttggtgtgtttctaatctcactcactgggtctctcttatgtggaatataagatatttgatcctacgactgttagtgctttcatgctgggtttataatatggatacaactgaattcctggcattacattttttgttcagaaccaatgaactgtttgtttaggtgtcattgttatctaagtgcttgcatccttcttctgatgtgtgtgtgtcttgatacaggtctgtgagattttgataaaagctaagatatggaagatgtacttaccgagaatcctccaccttcaagattcttccaagaagatcttaacaactttgttcagccacctgaatcccttccatctcctttcatcatattctcaaacccgaaacctgaacttcctctccgaccatctctactt

SEQ ID NO: 33420 - DNA, 474 bp, Arabidopsis thaliana columbia
tctcattttattacgataattccaaattcactcttttatcaataaatatatctaatgtaagaaatgataaactataatttaaaaacatgaaaaatctattcagaccaataaatcttcatttttgtagtgttgtaaacgtcatacatccgacatcaaacagtaactaaataacagaattggaattttcaaattgtttaatatttatttaaaaaaatctgtttgaattacggataaaataattgaaatattgaatatttcttaataagttttataatcttaattggctattttaaaatatttggtttgggttttacattttgggccaaatgttattagcccattaaaataaaaagggtccaacgccgtttgttttgttctgacggcgcgtgactgtcgtcccattccacgtgcgggcacgtcatcttatatactaccaagtacaactgtacaaggaccagacaaccagcatctttt

SEQ ID NO: 33421 - DNA, 392 bp, Arabidopsis thaliana columbia
tagaactcttagaagcctctgaagttctacgaacaaccgttccatcaccgcttgcatctgtagacaagtccacttgcctttaacgattcaaatatgcgggcacagttataataatggaagaaacagaatcttctaggttacccctaaacctgcttggaccaaagctatggcttttgccagcaggacgccttctctgttctggaaaactgtttctcctggcggattcagattctggccattgcgcaggtaacacattacttcctggatcattcactttcaaatgaatcttctggatatacggttgaagcagcggttgtctaagaagctcagcagcctacgcagaagaagagcgatgaagttttactggtcaagtttgttcagtatcaggttgt

SEQ ID NO: 33422 - DNA, 448 bp, Arabidopsis thaliana columbia
  unsure (1)..(448): unsure at all n locations
gcctaatcaatacaattagtacatagttaaaaactactaacaatgtattgatcttatatataaaaaaagaaacaagtctactaatcacataaacggtcattatttcacgatacttgtatagattggaattaagcaagaatcttccgtaatcgattcagcataatcgcaaaccggatccttttactggcattatctttaaacgtcgcaagtcactgtaacaagaagaactaaccctttcaaagggtcggcaacggnttcaagcctgcacgcggtgggattcttgatacgagtctctctacttgatcttcttcttcggcctcgcctgctgatagtcacagtttgttcggatctcttttccgctgagttgcaccctgtggcgtctggtttccagaactatcctggttgctgctgccgctcttcttcttcctgccgttgtctgctcttgggt

SEQ ID NO: 33423 - DNA, 375 bp, Arabidopsis thaliana columbia
ccataattgttgatattctcaccacctagctacattatcaaaacccacaaatcgttatgcaaaaccaataatatttggcgacatcaccatgaaacacatttaaagttcaaattctgatccgttgaaacatgtatcaatttgagcactcaaaagcataaacataacactgtgatgagacgctttaacaagtttaaaactacacaaacgatcaagctgcgtaatccaaaacgcaagattcttctcataaaatgcaaagaaatacaaccatagaatccgcttcagctaaggtccttaagttagctctgtcttcgccttgtctcgcatctcgtggacattttatcgtagccggaaacatctctgctacactgaaacttt

SEQ ID NO: 33424 - DNA, 601 bp, Arabidopsis thaliana columbia
tttttcttctcgatggcttccttaagtataacttttaaagcaagcaatttagcgtcgtcgtcgcggacaagaaacacaactcctttagctccacgacctagtaatgacaaaacctcgagtcgattgaaatccagagctcggctctgtttctcatctccctctagcataatgtcgacgttagttaactccgttagagttaagacagcaatgaaagtgtatttttgtctctcttttggttctacgtagtaggcgacttcttatattataaagagagagagaaaaattaacgaatcttcaaaaacgtccactcgtttgctttgccttgccggggaagatttcaaagaagcaaaatagaataaaaataagaataagtcaataataaagaaaacgaaaaaacgcctgagattcgttgccatgcgtttgaccaatttagccttgtttaaaaagtgttttgttggtttgagtttgaccaaatgtgtaattactcgtcgtgtttaagacaaacacgtggtgttctagaggatgtgacgtcaggggtgacgttttacgtggaggcgaaagacctagaaggcgtggaggagggacgtcaatgccttggaag

SEQ ID NO: 33425 - DNA, 628 bp, Arabidopsis thaliana columbia
catttacgagaattttcaattttgttttatcaaaaatttctaattgaatatttgatgttgcacataaactgaccgtgatacatgtgcttgttctgtatatagatttgttgaaataacactagagtatgctaccaatgttacggatcacggtctccaagcaattggtaaaggatgcaaagaattaaaacatcttgaaatactaaactgtcctgttagtaaaacaggtcttatagaagcaggcgagactcttcttccattagatatctttacgcatcaggtaataaagatggaaaggaaggaggagtgcaatcttttgcacaaaataatgataatatattttcttttcatttgttgttaagattctccgagatcttctcgagatcttttttggaaatacgataagataggctgaataattcttattctgaaattttttggtaatgcgaaacctttgttttatatgttcaagaagaaaagaaatattaagaattttttttttgttcagcacacaactttagaacaaaattatgttaataattttcttcattttaaaccaaaacttcaaaagttagaaacatatgaagtaaataaaataaatgtgtaactataattgatttagttcatacaa

SEQ ID NO: 33426 - DNA, 881 bp, Arabidopsis thaliana columbia
taatgcgactaccattgaagaagattatgcccaagaaacatatatcgacaatgaaaataggcttctgctacaagggacaagaacaaaagacttgcctaagatgtcaagcacttcttcggctattgagaactttgagtcttggatattaaaaatcttatttgaaatacttcttctcctagttcaggtgttttactctcttcttgcttctttgcttgacgtctacactagacttgtttgggattttataccttcaaaattgtttacgtaggttgaggaaaaggaagaatgtgtttgggcctctgcctcagctgcttgctctattttatctgtgatagaggcaaaatacggagaaaccagctaaatggtcttgacataagggtacgttagtattacgaggctgaatataatctttgccctctgctatgtggattattccttctttaattctcctcctattttcatttggatctgtcctttctctttgtttttagaccttcgtaactatgatttctgtttccagctgcatgttaccatttctcagccaagttgtacttgctgatgagccagttactttccttgaatcaggttataaaagctcttctgggaactagcaaaaggaattcttggtcagaagttgttcattccaagcttatttgtatcatgacgaatatgttttatcaatctccagaaccagaaggctctaacaaagcaatttcaagtgcctcaaattttcttatcgaccaggtcgatctgattggtggtgtagaatacattttctttgaggtactaagaaaatatagtttattagactgaatgatctttctaaacattatccaaatagacacttcgatccccaatggttttctagcatattaagggat

SEQ ID NO: 33427 - DNA, 182 bp, Arabidopsis thaliana columbia
tctgacctgaccacagtcaatcagacgatctcttatccagttaaatttacctttaatttaaatttttattaaagtaatacataaacggagtttaaaaaattgaatactggctgggcactgtggctcacacctgtaatcccagcacttagggaggccgaggcaggtggctcacttgagttcag

SEQ ID NO: 33428 - DNA, 392 bp, Arabidopsis thaliana columbia
ttagttctactcctagatgtgtttgcaattctgagactgcaatagactattaattgagtagttttgtagtgacttcgcaaactcacatctagacttagctagcaacttatttagacagcaaaaaatctgcgtttgacatgcataggaggaataaaggatacaacttaatcgacactcgaattgaacaaaacattattacacgacaattgaatacaagaggagagaaccaattggttttattttaacatatcgaaatagtcctcttacattattgaagagagagaggaataaacttgaacatcaactttagaactgaaggagaaacatttcggacttgacttaacttcagtagacgaattgcaaatcttgactatgtgtttgattcatcctct

SEQ ID NO: 33429 - DNA, 530 bp, Arabidopsis thaliana columbia
aaatgttcgtgtatatatatacattaaaaaattgattttgaatccttagaatcaaatagagaaacaaaaaaaataaacatactgtgtggtaaaattggaatgtgatgttggtgatgagagtgaccatgaagaagaagaagaagacggacgccaactcttaagctgaatctggtaatcttactggcaagttagctttcctgtgacccctttgaccagaccgtctgtctcttcctcgtcttctaggcggcgttgctcttccacttgacatttttctaggcaaatcgctgctgattaaaactggtggaggcggcgaaggtggtggaggaggaaaattaggcaccggaggtcgttgccttgcaaatctttcttgttctgctcggtgatatctctgcatttgagagttcgatacaaacgggtaatgatagagtcaggatctttttactaactctacttttaggctaagtcagcatgagacgaaaaaatcacctgaactacaaaattgcgtcttcacaatcaaggaacatgcttac

SEQ ID NO: 33430 - DNA, 417 bp, Arabidopsis thaliana columbia
caaactctctcctctgtaatccattctttttgtattcccaaccacgtgattttttgattctgtaattatccatattctacactacgattattaagcattaaaatttatcgattggtgagaaaattaaacttcgtgattttggcttttgcagattattttgggagacgtcaggcgttgcagtaattcattgtatacttgctttggctattaaagccgtcacacaataaaagtataagcaacacacacacataaatagacacacttttttacgtatatgtgtgtcttctttcgtctctgttgggaatagatcttgtcctaagagatcagttcgagtctgatctaaagtgagaaagtttggttcttgtgttggtttttggaatcttgtctaatctggggagataatgggaatgagtctcg

SEQ ID NO: 33431 - DNA, 534 bp, Arabidopsis thaliana columbia
agtttctagtgtgtgatactgacgtattcttttctagacaatcttttattgccaaaacatgtcttgatgttcacaaggcaagctttaatctctctggacaaaggtagaataggtgtaatcttgcaataaaaagttgtttccgagcaggaacgataagagagattttcagaagacgagtgaagatatatctttagaaatggtgtagttcggaggacgagaaacgtaattggaaaccagttctcctcttcaaacgctgtgagaggcaagaaaacgccttctcggaaagatgagtattttgtagactctgaatctctgatgatgatttgatgaaattaaaagtactttcaagactaccaaaatcagatatgttctttctttttacttgaatgtttataactgaaaattgtatccatcttgcattctagacctactcacaatgatcgggataaaaaaaaaaaaacacagccaaatgatttattagaaggtgttcttttatttaataacatcttcatttaactaataatggagaaataa

SEQ ID NO: 33432 - DNA, 520 bp, Arabidopsis thaliana columbia
gttatggtttgaggcgctgaaagtgctgacattgcctctttacaggaaaagtgacaagtctagtgagcaggaaggaccaaatgttagcagcacgaatcgaagaagcaatgagaaacaacgagagcttagaatcactcacgactgataatgtgaggagagacgccgcaagaacccatatcactcaagagaaaggaagaagcgttaagcagatcagagaagtgagcaagcaacgaaactccagagacaaaccatcatcatcatctcctcctgcaagatcgacaggtgggaagacacccgtgagaaagtcaagttcaagttcgttttcgaaaccaagaaaagcatcatctcctccagagaaatcttcaaagccaaaaagaaaaatattaaaaacggttggatccagatcgattgctgcgagggggaagacgggttcagatagaagaccaggaaagaaactaagtgttgttggtttccggggcaagtcttcttcggcaagagctcttgatttacattttggcaa

SEQ ID NO: 33433 - DNA, 547 bp, Arabidopsis thaliana columbia
atctgattctgattcgggtgatcgaagatgaactgttggaaatgatgatgatctgcttctgtgtttgtttcagatcttcttggtcaattcagaaaccatgaaagcaagagctcaagttatgatcgaacagagaaaccacaagaagaattgtgctgatcgtggtcttcgtcatggtggtgctaaggtgattagacatataaaccctaatttcactccgatttggggggtaattcgagattggcaatgatccgatgatcctaaccaacacgcctaacatgttgaaatttgggttttattaaaccggatttaaacccaaaaccaaactgaatcaatttggttgaactgaaccggtttcagtcgaaattaaatcaaaccaaacaagccggttctgataacgatattgtcgtagtaaattcatctgttattttcgctccattcttgtttgcattcttgcactgaattgcaaaatttctttgcctctttcacatttcagctcagatttctcttcaagttttgcaaatttctctggataggtcaagaagagaga

SEQ ID NO: 33434 - DNA, 467 bp, Arabidopsis thaliana columbia
acaacacctagttctaaatgatatactctatatctactctctatctcaagttatatatgtactatgcaaaaattttattctgttttaaagtttcataaaaaaatctccattctcgtcagcatgcaagccctcggagtgatacaatcccccggaatccgtatctctctttctccgtcctgccaccgcctctcgctaccgtcacttgtcaccggaatttcacgaagaaactcctcctccttaaccttatccttccaatgcggttctatcttgtcgtgtccctctctatgtgaatatgtcatccctacttttacacttattttccgtttactgctcgttgtttagatttgagcgatcattgtcactgtatacatttttatcgagttggttgatttcttgattttgttgccgctcgtgaagcgatgacgttcgcggcgggttctcaggtggtgtctcttgttccgcttcgt

SEQ ID NO: 33435 - DNA, 580 bp, Arabidopsis thaliana columbia
caatagatttttattataaaaaaaaattagttagaagtatgtcaacaaatcacagacttttggagtttggttaaactatttgaccaagaaaaatgagaaaaaatgccacgtaaggatttcaaccctcgtactcagagacagcaagatagagggtaaaatcgtcattcgatgtaagatgtatttatcaagccagccaaacttttgtttaagccaccatatatattgtactattataagcatataaagtaatcttttattgcaatagccaatttaaatgtaaataacaaatgtgtgtaatgcaacaaaaataaagaaaattacaaatgaaagttcaatatctattgcagagctggcatttttaaaatcttcattttggttttcgggtgtcctttgaaaaggctgtcatagttctctttttttcttttctggggattactgtttaattcattcgatatagagtagttaatttgctgaaactcataattaattactttgtattaactatttactgtttctagtagatcatggccagtccgtaccgttcagacctacggaaccactaattagattgaaccaagca

SEQ ID NO: 33436 - DNA, 521 bp, Arabidopsis thaliana columbia
gataagagtactctggttttccattaatatatgaagattattttcagtttgggtttgaaatatccttgatattaaacgaaaagaataacatgagttggtaagtaaaacataataagacatgactagataggtaaaattacataaagcaaattagaaagtaatttggtcaacacctctagatttgtaaaaataagatattacagcatttattgttgttgattttcactatgttatttcaatgaaatcatttatgacccagttaaggaaattaatctggatttcttatcataaactttacctctttgttatccatgaaaatgccaaaatgcagaatcttctcccgtttcgtgtgaagctttttgaccactaattttcatttacacattaatgttttttccccgtaatttcacatcaaccttgtgcttaaacaacgaaagaacacaaaatcatctaaactggctattactattactaatacccttaaaataatctacctcaaacgaaagacgcatagtgtatgt

SEQ ID NO: 33437 - DNA, 513 bp, Arabidopsis thaliana columbia
  unsure (1)..(513): unsure at all n locations
tcactcgactgaaaggagaggagctntagagccatccttgtttgaggatctcgagaagaagtactccagcgtgaaaacctcaacccggttagaaagaaagcttctttttgaccagatcagcagagaagtactacatatgttaaagcagttgtcggatccacacccttgggttaaatccacaaaggtatgcccgaaatgggatgcaaacaagatacaagagactctgcgagatttggtcacaagaaaagacgagaaaccaagcaaatatgatgtggaggagaaggagttgcagtggctgagtttagaagatgacattgaaatcataggtagagagattgaggtaatgctgacagatgaactcataacagagcttgtggtaggtgcaatcttctagaaagttaaataatctctttgttacatagtttaagggaaggaaacaaaaaaaaaacaccaggataatgcagtatgtaatgacaattttatcataaagaagcatgtgccctgtaatgacag

SEQ ID NO: 33438 - DNA, 501 bp, Arabidopsis thaliana columbia
gtgtgttagccttcgggatcgaatcaagttggggtatgcacaataggaaattatgtggcaagtagcttaaatttacgcataacgtcagttattaagacaactgtttagtattttggacacaaaattatgcagaaatatctttgattcattaactttgagtgattatcacatcaacagaattatgggtcatagcagctacattattacattctctacacaacaatggatacagaccacattctatcacagaacccatcactttccatttcacatttatctatatgcatatagatagatagatagacgtcgagactatatatggttattggttaagaatgaaagagaaaaaagctggaggaatttgtttctaaggtccatcagcagattgagtctttcttaggttccagtgaagaccatcgtggatgctgcgtaagaagtcgttagtggattcaacttgacaagcggttgagactggccatggtgctatctacacactagtgc

SEQ ID NO: 33439 - DNA, 499 bp, Arabidopsis thaliana columbia
ggtattgttggaatgaattggaataaggaggttttagtgtttgtgtatcgttgtagtgaatgtttataatgtttgtgtgttttcagaagttgaatcctgtgatgaatacaaagacggttacacaagcgccaatccgaagaaccgcgagcccgagtcgtgccatcaaggagcagcaagaggcagtggaagagtgtaagatagtggtttcatctggaactgagttggctaagccacaaattgtgagcaggagcagatctttgaggaaatctcgtgatttcgatttcagtcccgaagcattgctctcaaacaatatcgatatcaacaatgttaacagtaacaatgcaactgcaggatcaacgtttccgtcttatacagctttgcttttagaagatattcagaatttccaccagaagagtgttaatgtcagtgcgttaagttcatctatgtccaaggcttgttccattgtcgaagcagttgcagatcttaactctgctacgaa

SEQ ID NO: 33440 - DNA, 270 bp, Arabidopsis thaliana columbia
cagttgcacggacgggagtatttcacggcagccatctagatccgtcgttacggatcacggaggtcgccgggaggataccgaaagagagaagaacgccggcgaacatgaaacacatgaacgctatgtacgtcgagtcgttgaccgatgcggcggacatacgttggtagttgaggataaacgggattaatccaccgataacagccgcgagattgaagatactccagaacaacgctatgtaagtgcctttccgatgcggcggagggtatgacg

SEQ ID NO: 33441 - DNA, 520 bp, Arabidopsis thaliana columbia
tttttcatgaagtaaagaacacaaacaaaaacccataaaataatgtaagatagataaaacaagaggatgtcgtcataaataaattggaatttggcatttaatgaaaaagggtgaaaggtgcttgacatacacgcgccgtagtttcttacccggaaagggattggtattgatgttaactagaccgggcccggtttaggctggggcggcggcgaaccgaccacctggctactattcttgtttgtattcgctgattctgcaaatctaaactcggatcttttatggacttggattttcgggtgggtggggttctgctaaagagacggcgctcttgtcattttaagtcggtcactgcaaaacgtgaaccctgtgactgtatttagagtctcgttacgttggatctctctccatgaaccgtccaaagtaggtcaatttttgtgggttcctcacgtatacaacgaagtacggcgctatttaattttccgaaaattttgaaagagacttttataccagaaaagtttgt

SEQ ID NO: 33442 - DNA, 232 bp, Arabidopsis thaliana columbia
tcaaatcattaatgtatatctgataaatatcagaccctctgctcactaggcgcatacctctattgacgtgcttcgtgaaactcgtcaaatctcctcaattacatgtcctagtatatggattccctacaggatagttggtagggaagtttaccatctgatcatgaccttcagacacttaatagtcttgagccatttgataatgaacttctctttcgtcttgcaccacttctgc

SEQ ID NO: 33443 - DNA, 607 bp, Arabidopsis thaliana columbia
acctcaaagactggaaggagtcaaatacgtcctggtggttgccattgctagctgaggatgaagcttgctcggaccaatcctctctgcaaaaagatttcatatgtcagtcatggggataggatcactttgatatgtggatgccctttaatgcaaatcagtatactaccatcatgatcattcaaggctctacttaactgtctcaattctcgacatctttactcgtccccttacctacgtcctcattcttatatcaatgtgaaaaaaattctaggacgtaggttgtatgcactaaccaagaaacttaaggttcatagcccattaggcacaaactattgcgcatagaaactttcgagttttggctgtgcaggaaaccagaatttgaaacgtcaaaactgctcttttacaaggacctgttgtacccacttggttttctatcatgtctcccttaagcattttccagcataaacaactctcactaagcattttccatcttatgtaaacttctttctataacctggtctatgtttctttgaatgaacttgggaaatgccagtacacaactcaagtacatatgaataaaccatcactgaagataaaacaaagtaca

SEQ ID NO: 33444 - DNA, 112 bp, Arabidopsis thaliana columbia
gaggatccccaaatcaacaggttgcaggacagttgtggattgcgtcggacgctatgcgatcgccttgtaagcggtaggtcatcagttcgaatccgatagccggcaccaaacg

SEQ ID NO: 33445 - DNA, 485 bp, Arabidopsis thaliana columbia
atatatatatatatcttgcttggtttcccttggtagcatatgaatcccaaatcttcatgatcgtacctggaacttgacgataccttagccaaaaaaacaatgaaaaatctgagaactctaatggctttctagtttaccatctcagagatggctctccacatccagtgaccagtggcacgaatttgcttgcctctaatcggattttttaacatattcgtcatttggagaactcctgggccaatctctttaccatttaactatgccttgcctttccacatactgatcatatcaataacctccacggtttggtacagcttgtgttattggttatcaacttatcatacaaagtactattatgcattgcaaacagatatccagcagttagcgaaggttaaaatacatatagatcccaactcgctatagtcatatagatcccagcattatctttacacatcgtgcatagtcatataacaagataaaagttg

SEQ ID NO: 33446 - DNA, 430 bp, Arabidopsis thaliana columbia
tcaataccaaacaattaatctaacagtagacatagagattagagattcctaatcaacacagccatgaatgaagaatatataaaaagccattttttcttacataagtgggaaaaaggttgcaaatttgaatctcaggaacatgaattaagctctaaaagcaacaatgaacagagaattccttatctatgagctcagtggaagattcaacaagcgaataatgagaaaagattcgtcatttagttagtatctaaagctgcataatttcgaatctataatcatcaatattccaaaacaaaaacacagaaatcacggagacaaaacatcctcaaattggggaaagacttgtgaataccgcaactaaaaaatcagatcccacgtgatataagatccaagaagagacagagcaagagaaacacttctctcacgtatc

SEQ ID NO: 33447 - DNA, 418 bp, Arabidopsis thaliana columbia
aaaataatttctttcttctaccaagtttatgtttactcaatttctcgaatttgtacttggaaattgcaaatttcatttggttttcttgaatcgttgttagatatttccgatcaaatcgtttttagataacactgtttcaaagtcaatgtcgtcatcatcatacaagaagaacgtatagtatttggtgtatcatcttgttgcttcttaagtcactctttctcgcatagtttttgaggtgacgaagttacgtatacggtgacgtagcaaaccatgcccataagcccaaattctaaacaagcctaagacaagtgagcaaggagtgggtaaaccgaaccataccaaaatgaaaccgacaaactcgtcgatatgtgccaggaccgggcttagaaggtgtgctgagggtacatgtgtacattgt

SEQ ID NO: 33448 - DNA, 523 bp, Arabidopsis thaliana columbia
attgagataaggggttttaccgcgaagaggtcaaggacgatgtgatcaggaagatgggagagatcgttgatgcgagagatgtttaagacggcggcgttgacggtgagggagagcagagacgggggagggcttctcattcaatcagtttgagatgattggtgttccagaggttgaataaaacgaaattgctgaaaaggctccgtcttcgatttgtatttgggtgttctttgaatccgccgccttcttttcgtcgcaatggaatctgaattttccacgatctatagttggtcgttcagagacgtttccagaaaaaagcaagagtgcgcaaggggccaatctttcctgacgcttttttcgcgtttgtgtaataaacgcgtaacgcggcgtttgtaaaaatcgctaaatctttcgaagtttcgatcctaccaattagagattgtgataacatgtttgtctttcagtgaacggggctcctaacgatgggccgaagttagattgaaagccatcgaattttgttgagtgt

SEQ ID NO: 33449 - DNA, 600 bp, Arabidopsis thaliana columbia
  unsure (1)..(600): unsure at all n locations
aaaaaaagtttttaatttaactaaaatataaacctacccgcggtatacccgtgntcaatatctagtacctagtataaatcaatttgattgctacttagtgctaatattaaaggaaaatgaagtttcactttatttcaagggatccacttgacattttgctttatgtaaatttttaatttaaattatacatatttaacattataattaattgaattttagagatctagtttattgtgtgataaagaataaagtttagtgctaatttataaaataataatttataaagtcatgacatgtataaaaagaaaaaaaatctttcactattgtggctccatttggaattttgttttagttagattttatacactaattgcaaaagtaacacctaatttttttttttacaaaactcgtttttggaccaaattttaatcggataaaacggatgaccatgcgtaatgcaaagataccgtatgttcctttagtgtgaagcataactatgaccagtgaccaccacatttagtggcatgaaccatgttgtccataaataatcatgtaaagtgaactaattttttggataataatcataagtgcaagaagaaa

SEQ ID NO: 33450 - DNA, 501 bp, Arabidopsis thaliana columbia
caactgtaataagcactaaaagttaataatttgctgctttttaagtcttgttgctgaatgatttaatcccaaagacgttaaaaaaaagacatgtaaatagtctttgttccaaaagtaccattttgagcgctttctttcgacaattgatgttgaacttgtaccaaataaaccttgaaaatcatacatcattaaatgtagttttttgttatatacttatattcatatggtccataatatatagttaaccatattatggaccatataaattcatgcagtcaacaactttttttttcctcattaaaagctactaatactgtagaaaatttttatcttacaaaagaaaggagaattattgtatttttattttaatcacatataaagcaaccaaagataacatatactagtatttagtatttgtaaattttttgcttaggattcaggttatgaatactctataaagagataattaaatctatccatcgaataaatcacacagcttat

SEQ ID NO: 33451 - DNA, 1789 bp, Arabidopsis thaliana columbia
acggccgccattgccgaaaatagctctggtaatcattgagacacctcataaaacgcatcacgaggctgaatatatatgagatacagatacaaaaatatgaggtggtaaaagaaaacattataaatagtgatagtacgaaaaaataacagtagaaatgaaggtggtacgagatgacactacaaacatgagtctaaattgataacgttgtagcagtgaaaataactaactgtaataaaacatttagtaagaaaaaaaatatccaaaattaatttaaataagatattcaattgtaaattgtactattacttttgtagcattacacttgtaaattgttatgctcttgattttgtaatattcacttttaatccatcaaaaatataccatctctttgattggttacaaagtaaacattaaaatttgtactataaaaatctcacattgagaaaaaaaaaccagagcagaaaaatttgtggagaagaaaaatatagaggtcaaatgtggcacaggtgatttgagagagagagatatatgagctgcctttagaagatacagccgccaatgtctgtttctctcgacacaactatcacttctcatttctcatttctcatttctcatcagtcaacaacttcataaaaaataaaatatatttcgcggttaattcgttccgttcttttttaatcatataaaataccccaaaagaaagctgtataatataagctacaatttcttcttcattttttatatcatgaataaactgtgtcgaacgaaaacattagctattatatatatatatatatatatatgctgctcactaccactcactataactctctaaatattcgaaacaaatgttgctacataagctaaattaaatttgccaaattattaaaacggacaaaagttgactagtaggctgacggtcaaacccctctatatcaccttcacatgtgacaaaactaaaagtatggttttaaaaccactagactaatacgacgatgtactggctgattgaacctggagaaggtggtggaagcaatcagctgcagtcggtcggttctcttggtttggttccaaacacttcccctgaaggtctctcaacatctttggtacattactcaatccacacgtctttatcatataacccactccccaaacatctactttcaccgcatgcaagcctctctccatctccggcgcgtatctcccacgttcatcctccctctcctcattgtctaccactttgtccgcggggcggtgcgggttaagctgtggggcctcgaccgcagcgtcaaacccacaaacaaaccaatccgtgtcagttgttgttgtggtcgtcgccgtgcttctcattacattatcccatcccatgtcacgatgcatgaaagaaaggtcgtgaagtgcaaggagcgctttagtcacacacatcagcgagtcgatgagctggtcaatgtttcgaggtttgactctgattccacgtggcttaaaactcaacgagagatccttctcgcttgccatatccaaatgctccgcgtgtggaactctttggtcgagaaaatcgtagattcctttaacacccagccattttcttttgcttgagtaataccttgtcaccgtatgaggcgttaactcggtcacataatctccacgatctattctctcgaagtcattgtagcatgaaggcctcgtagtgcaccgatctgcaagcaaaggtataagggaagcgagacggtaacaaggaaccaaggccttgattctatccgacggtgacgagacgttgaatgaataaaga

SEQ ID NO: 33452 - DNA, 524 bp, Arabidopsis thaliana columbia
ctccgatttggttcatcaaaatcgccgattatgttcgaagtcacagatgttgagaccgtcggttgagatgatgatcacggcggaagggggacgattttcttcggttatcttctccaatttgatgatgtggacgccgcatgaagctgatcgagagagaattcatccggagaaaacaagagaagagagacaatgatttcgcaaacagaggacagagaaaaaattgttttgtctcttaccttacccaatgggaaaccgccacgtatacgcacctaaaacatcacaaaatacctaagctaaggtgcgtaccttgatatatttcatttttctgatttaattttggcttctttttgtaaggattcagtactagaaactcttaaggaccctccaatggagttggtctaaaccattctagttagtggttattcagttgtttatagtcgtgttagtccattcaattatagtttagtttaaattagtatgagacataatataagatcgatgaagagattttcaacaatatgatc

SEQ ID NO: 33453 - DNA, 532 bp, Arabidopsis thaliana columbia
tatcaagctactacatcatcggtgcctcgcccctagtcgtgcccctcttggcgacacatggcctcgagtcaccgctagagacacccagcgcaatccatttgttgacagccgtcctggggatgctgaggtggcgacacgtcctagggatgctgaggtggcgacacggccctgagtcactacctacttgtcggccaaccagaaacagctatgtggccgatcggcatccgcatgattatggcggcccgacataaccgatcctcagccataaaacactgaagaagcttacccacctgcttgtcgcctaaagctggtcgatgatgtggccaacttctggccgcaccttcgccgcacacgcttgtaacgcccccgagcctggccatgaccgtcccgggtggcatcacaaattggaaagaaccagtcgcaactcgccaaagtcctagggttccaagccctcggccaaattgcatatggtcctctctccaccagattctccgcgtaggcttgctaaccattgcggcgaacctagtgttgt

SEQ ID NO: 33454 - DNA, 365 bp, Arabidopsis thaliana columbia
catatcacataatgaattggtgtaagtgtactcttgagaattatagaaaagtttacaaactaaatttagccaatttaaaaaaaaaaaattgtctgtataaaccgaataatatttgtaaacaaaatctttacgaatattatattacagagctgattgcggtgtggtggtatgaagttgtgattgtaatcgctattatcggaacgccttcattgtcgtagaggttatctatcgctccgggttattgcggcgtcgtttaggcttggatctgacgatctgtgtgatctgaagccctgagcatggaggtccccgttttcgtcgccggtgtgggaggattcatggcggcgatgtttatcggtcgagctttt

SEQ ID NO: 33455 - DNA, 588 bp, Arabidopsis thaliana columbia
cagtgtgctctaaagaccgcctaatttttccctcatcttcccctcacgaatcaccaccagtccttcagcagttgcttgatgaacacatcaaattttcaatttccttgcagtctgacaaagttacctattattctaacacaatgcgggttagtaactcattacgcccatcactccatcccaccacatattccaaccgatccaaactaacgagcactaaaaacagataataaatccccaagatgcaacactaacaaatatcgaagtactctccaacctcactgcaaatccgccacgacggcccccgaccgctccaccaggcgttaatcagaagcatttcattccgagccccgacttgcgcgaccacaataccgtcgtcaaggagatccacaactacgccagccgtcttgcaccgcatttattgcgctacccaacatcttcagctacagctacgtcgagtaaaccgggatcagggaaggaaaggaggaaggatgcgcttgatcatgcgctcagagagcttgtcactagattacagccgtacgggctgacgaaaggggaggtccttatgattgttaatctgggggtgggaat

SEQ ID NO: 33456 - DNA, 1399 bp, Arabidopsis thaliana columbia
tacatttgttggaaagtctgtcagttggtcttgacctaattggtttatctggtagtcagaaatgtaggtggttgactatcccctagcattagtctgaaagcattcaaactcggaacagacagtgtggtgatccttctgaaagaagtccactctaaagtatttcagtgcatttctaccgggactgaccggatcagccgatagagttttaaaaaaaaaaaaatggtgtggttaaaggaatgggtcaaaactaaatgagtaaaagttttgtcactcttagaaggggattttcaagctcttatatttactatgcaatgtaagtcaattcgaggtctaagaaaactcatatttgagggattgcaaactaataaacgatgaagttaaaaaaacaacaataaataagcctatagataacaaacaatataaaaagataactcgaatatttgggaccaccacatatgttcctctcaatcataaccactgtcaccgttcataacattctaaccaaaagctagcccaaggctaaagggaattatccaagctgctgttaaacaagtattcacaacgtttcatgtttccgaccaacgatcctttcatgttcccttctggatccaacagaaacctaaccggcaaatcactgcctgtcaccctcaacaatcccttttttttaagactagtgcccgcttggacgcgggcaatgatcttgaccccggtgtcccaaaccacatggccatcttttatgctgtctagcttccgcgtggtgaagccgactgttgaaattggtgtgtgattaactaattgctcacaagagtagggtgtggttgactcagcctgtcagccataaccctacctccttgtaagagttggccgttaactgtgaagagagataactgacaaaatgtgaaaggactatcagcaaccaatgagacgttccagttcgtattgttggagacggagacagagtcgacgaataggtctaagtaacatctgctaatgttgattagccctatcaacagatacaaccaaaaaccaaaagtatagagcagtattacgtacattctacaataatttcgaataggatggtctatctcgccatctccgtcttcatcttcagtcgtcgttgaatttggatcacgagatgatgttatttgagaccaagtcgttaaattaggatcacgaggttcaatttgagaccacgacattttggaattatggaaggcttagtacatattatgctaaagtattataatcagcttattctaagagaacagttcaggagacaacaatagaaaacatgatattgtggctttaactaaatatttataggtgttatcctataagttttgtcctcctaacaataacaataacttatctataaatacattgatgttttaagcaagtg

SEQ ID NO: 33457 - DNA, 602 bp, Arabidopsis thaliana columbia
tgaatcaaacaaacaaagtctaattgataaaatacgccatataaataaactataagtttctttaaaatatacattaaatatacaaaacgacaaatttatgaaacaaaaaagtgaagtcataagattaaaactattgtgaaatggatgacaaattcagtttcttctttattctttaaaccctaagtttaaattctttcaaacacaaatcgtagtatttgtaaaactgttattttcttgaaatataatttaacgttacattaacaaatcaaatggatgacatattacttaaaatttagattaccaataaaaaatcataaattcttcttttaaattgtaagatttaagtcttcccctttacatttagcaataaatagtttgctgcactggtttaaatgcactaatgcattgtttactgaattgtcttttgtttcatatatttgtctctactatacttttactaactttcccacctccaattaaaaaaattattacgaaataaacaaagtcatatctctctccacaacataattactttattcaacaaatattaattcctagtcatattttagccctcttcttccttatatattacatacatacat

SEQ ID NO: 33458 - DNA, 532 bp, Arabidopsis thaliana columbia
tgtaaatcttgaagtttaaagcaagtctacaattgaaatttgttttttttaaattttttttatggatattgtgtagataaagattatgatatgtgtaaagaaaatagacaagtcttggtctattaaaatgctcataatctctaataggatagttacatacaccatagttgtggttgtggagaaatgggaccaaaaaagtcaacgaaacaagtctttagttgttctggtttagcttcttctttgatctatatagttgttgacttccatagcatttatttgtacgcggttccatagaggggttgttttcatgcatgatttataaaaaaagattcagaccaaagtttcagccttttcacattaaatcatcaaaattcattagtgcttgttatatcttcggggccattgggactatgactactgactaggtcgattgtcccattatgaccccttgagtgtcctattagcccccttggaccggtcgagttgtctatgacttcaacttctacaaatgagaaaccctctattttggatg

SEQ ID NO: 33459 - DNA, 317 bp, Arabidopsis thaliana columbia
cccgggtagatgcctaattttatttctaatattttcttctttaattttttttttgctgattttggttaatttggtcagttacagctatcgattcaaaaaattagttatattattttatttaaaaaaacggttatcatttgtcaacgtttaccgtttgcactttagatcaacgtctcgtatagtctctagctgttgcacatgctctagcatcagttatcgactatgtcgtcatcggggcacgggagggctatgttgtaggagattttttagattgtggtttgacctgtatgtctctgacatggaggtttatcttgctg

SEQ ID NO: 33460 - DNA, 440 bp, Arabidopsis thaliana columbia
taatctccaagaattacctggccaataatcttcatgggcttgatgggttgaaaatttcctctgttttttgttgggccttgtaggaccctagggtttggatgacttggcggtggcgtcgttgacatggcgatgagagagagactgcaaccgtgtgacaccacaaactaaccgccacgacgccggagagaagattccacatggatcgtcatcgaatgaacccacacagactaatttgggcgaacaacgaattgacactcacttgttcacgagattcgtaacgatcattcagcatcatccacaatagccgttgtatggcatcatcctaggtaaccttcgacgaggaagctgacaatcagattcaaaacagcgcttcgacataacttgcgcaagagggctctcaagtggtccatagatgaagaagacgtagcacgttagggttt

SEQ ID NO: 33461 - DNA, 589 bp, Arabidopsis thaliana columbia
agtaacgtccgccagtgatcataagagcaatgatgaaaacacagaacactagagggatatgcaaacataagacaaattaaagaatctaaggttgaagtcaaataaggacatattgagtaagagttaataagataccagaaaggaaggaatcttctaagtggaaggagaaggcttgaaagtgtaaggctgaggaagtgacattggacctttcctctcatctccatcatccaacagcctttgaactctcttgttcctacagtactctctatcgaaatgtttcacctacaatttttcatttcttccattaattcccaaacaaatcatataaagattgcaatttgcaaaactaattgaaagaagagagtacccaagaggaccgacagttgttgacgaattgggttctagaattgctacactccttaggatagagaagacccacggtggcgatttcagttggttttttaccagattccttttctagacaagcgtaaaaagcatctctggcctgcaccaattaatgatcacttacaatttaacctaaatcacacaaatcagtatcacaacaacgaaaatgagaagagagaaagac

SEQ ID NO: 33462 - DNA, 480 bp, Arabidopsis thaliana columbia
aggaaaaagagagtagtatacacttaactatattcatccatatttatgattttctgtggtcaagacttggttttagtaatataaggattgtcttcttgttactgaaaaagacagacgttcgactcttaatataataattatcacgaggcgttattcatgcttcattaggtttatatgaccaatcaatacttctaattatataagcagttttattaacataacattcaattgtctcgtatcaaaagagcttttttctacattttgggcacaacaaaagagaaccttaattatctacacaaaaagggttatatttactttgaagtttgaactatgaaaggtctttaaactggtattcacttcacgaatgataatattcaaacgaattgaacttgtatgaaagtccaattaaaggttttatcgggtatatggcctcgtttatatgggcactaaacgaattgaacttgtataaaagcccaatta

SEQ ID NO: 33463 - DNA, 607 bp, Arabidopsis thaliana columbia
tgttcctcttttttttcaccattcagcggtaattttttttccaaattgtaacatgtggaccccacattattcctattcatttcttattttttgaggaatcgtagaagaaaattgttccttcccaaatttgatgagaaacaaacaggaaaacaaattaaatatttataaattaaaaattaaatttatgaaaaactaaaagaaagaaaaaacgtttcttctatttttcctctacactcattcctcttcattcctattttatcattttttttttcttttttgttcttttttagtcatgttcctcttcattccttgtatttctttataggtcaccaatcggatcctatatttttagggatagtgaaaaagagtggtaaacgtaaaactttgagctttttgattgatcaagtttatatatatactatcgtcttaaaaagcccattatgggctaaatttaggccgggctacaagccgagaaaagaaacgagtctttcatacaaacctggttcagatttggtcactctctgacgcgagaactagtctcaccagacaacaacaacaacaaaacttaagggaaagataatcgtttgtctgtgcagagagagagaga

SEQ ID NO: 33464 - DNA, 406 bp, Arabidopsis thaliana columbia
tggaaaaagaagatgttgataacatgaaaagcatcaattaattagtattgtaaagttaactaataataaaagaatagtaaaaatacagcatatatttgaggcaagggaaataaaaaaattacatttcagttacactgattaaacaacctcaccagctatgaattatcgcataggtaatcataagcatcttatgctaatagactagtagagtggagcagtgtatgcgaatatatcgaatagcttgtatcacatacatgtattgatggatgcacatgatctatataacttcagaatttgcgtgaaacggtgatatgcgtgaaattggaatctttggtttcttcaaggtagaagttagtcgattttgagaattagtatgtagcctatgattggtcgcactactgcaaac

SEQ ID NO: 33465 - DNA, 440 bp, Arabidopsis thaliana columbia
atcacatatttttcttaaaaaatgaatatatatatatacgtatataatatatccattaattatagttgtttatatctatcaaaaattaactgaaaattaaacagggttcatacttcataattctttttgtgaataacaaggttaatagttctgtcttctcaaatggatcttttacgaaaaaatcaacattcttctaatggaactaatacaagaaagaaaccatggaaacttttgggcctagttcgtccactatatttcgtcccgttattaagatattatctctaacttacgcgttacaaaaaacattagaatgagtttttccaatctctcaaaaattgtcttaaccatgttatcgttttagctccttcagcctcccgtaacatgcattatcgcagacctataatggttatagctaaggttatcatccaagcttgtgggag

SEQ ID NO: 33466 - DNA, 520 bp, Arabidopsis thaliana columbia
tacaggagatacttatattcaagtttgaagttcttaatgaacacatcatacaggatgctatggaagttatatgggagttttcaggtacgtatacaccaacacaaacctatgtttatattaaaccaaataaatcaatgattgtaagatatattcagtttacatcattttgcattgtacgatgtttgttgttaggagttacttcggtagaggtcaagggagttgataaactagaggtgaagggaggagaatttaataaaatcgcaatgtcggcgaaactaaaggacatagatgaatccgttaccgttatcatcaaggagggactagatgtacaaacacctaatattggaagctcaaatgggacaaattttaatatgaaaaacgcgctatcctctttccgtgtgcctgcgcgtgtgcgtgtgcctccgcctccacctgtgcgtccagcttccccatgtgtatgctgctgggcgtggaaaaaaatttaaccaaggaaatgagtttcaacatataagcagccaat

SEQ ID NO: 33467 - DNA, 167 bp, Arabidopsis thaliana columbia
gcacttatctaagtctaaacaatagcctaagaacgactactttgtcatctctctcttatgatactaattactaaacttattatgcattagctggtaagaatcatacagtcgagctagaagtcgcttcaaaagcaaacctcttcctggtcccaacaaagctccaacgg

SEQ ID NO: 33468 - DNA, 307 bp, Arabidopsis thaliana columbia
attttggatggaattaggtttaaggtaagaacgtacacgtacgggtatatattaacgactaaacttgatatagtatccatatatgatgcaagaagtcttgttctatatgtttaagcgttttaagcctgccaatttccaaattcatcactaacaaaagtagtagaaaatcaataaaaattgtactaatttaaaagtagatatgaatatatggggtaagcaaaaatttgttcatttctaaaacaattccatgtagtaatttatgtatcaaaatataacctttttcggacaatcttcggggaaggagaag

SEQ ID NO: 33469 - DNA, 483 bp, Arabidopsis thaliana columbia
  unsure (1)..(483): unsure at all n locations
nnnnnnnnnnnnnnnnnnnnctaaagaatataaaggaccttggagatagagcatcggtagagcgaccgagatggcgcaatccgcaaggcggggttagcttcctcggatctttttgacagaatcttggaggggtatgaggtgcggagaggaagggcgtctccgcggagaaggcccagcggctgctttcgagtggctttccgtgctgaggtcatcctacagtcctcttagtcctgccagttcccctgccggtcacctgccctgggcaagcactgggcccggcagacgccgcgcccagcccttccaggctgggtacctgactatatggggtacagcgtctggtacgcggtccccctcttgcccttgcgagcagcgacccttattcctacagccaagcacaagcaatatagccgccagcgtgccctatcaacgatcactatcactctcgcctatctatcggcttagactatgtagacatctattgta

SEQ ID NO: 33470 - DNA, 442 bp, Arabidopsis thaliana columbia
ttctatgtgcaggagagttggagcaggatctgcagatccattagcttcatgctccatagtaaagaagagaaacaacaacaagcgtccaatggtctcacacctcagaaaacctgtgagcgaccatcacaaatttgtgagaagcacgagcatgtaaccagtggagcacagtccaggacatggtcagcattgcattacaccagctgactaagaaactgcatatctaggaattgatttatcaccatacacactaaagcacaaaacaggacgcagatacattccttcaaaaccaagtccctactgattttgccgcattgttaggagttgaagatcatcaaggtgacagttatatgcgtaatatctctaggttaggtttcactcttttgttatctatccttccggaattttcttcaccagagatgtaggtaaaatcatagaggactga

SEQ ID NO: 33471 - DNA, 440 bp, Arabidopsis thaliana columbia
aaccaaatttggaattatagaattcaagttatgaattttctaagatttaatgtgattaatataggattaaatgttaaattaatgttcttactcttttcatgccaaaacagagacactaaatggtagtgaatattattacaaagttttagaaattggaatggctaaatttggactaagaatggactttctatgatttatacaagtttctagatttgtttttgtattaaaaatgaatttctgatattatctctctgttttcaaactcctctggactgggcgctaaaatatgaaaagtgcaggggtctcgggcgtaagaacaccaagacacagagcacagtcgctaaggacggcgggttctattctgtataattataaggtgtcattctgtaaagtgctgccgcgaaggggtacagacctatcgtgaccgtcagattagaatt

SEQ ID NO: 33472 - DNA, 597 bp, Arabidopsis thaliana columbia
ctgccatgatgcatatatatgcagctttcaaaaggaacaatcttgcgatggtgatgcaggaggaatgtgggatcaagaccaaggagtttgggtataagaagatggagaaaatggaagttgtgacgagtaatgctgatgcgaaacaagaaaggaagtgaagtcatgtttggtgatttttgtgtgtttaggatatgtgaactgttaatgtagtcaagtagattcttggtaactagttatccacgaggttcttcactggctaatgtaaccccttcttattttcatgtgtgtaagcttgcaaccttgttaccatttggcattttagtttgatttggcatgtaaaaatatgagaagaatgttgtagaatgcacaccaaacttgagtgcgagggatgacaaaaacaaattccaactcctacacaaaatagatttgtaactaatcacaatcatttgaagaacgcaatgtagtttatcttcatctacacaaaatcttcaaccggagataagcttcaagacgatgactgctgtgttaatgagcatgaggggtacctcatgtactggcaggcatggatcagaccaatgatttggcctttgggagagt

SEQ ID NO: 33473 - DNA, 510 bp, Arabidopsis thaliana columbia
cctgtatcaataagaacacaccgatcggcattgcttggctcttgtttgatcaacagagaagacttgtgttttggagtcgaggtaagctttcaacagcaaacaaagcagcaaaagctgaggcaaatgctcttggcactgaattataaggacaacattttcctccaggatgctaagcaagtactggaccctttgtgcgagatcctacagacttcaccaccacttaaaacgatccgcagtactcatcctctaagtttgtattttctttaagttacgcatctggccaagattaaggaatacaaatttcatcgcatcaagcgttgcttcaattctcaggcagatgattgggcaaagaaggctgttccaacacttggatcaagtacttacaagttaacctgtttggaacaaacccgagtctttgcattctttcttgaagctctaacgctttcttatatccacatcccgtttcacaaacagccttaacaagcgaattgtaactctctgggtcaaaga

SEQ ID NO: 33474 - DNA, 471 bp, Arabidopsis thaliana columbia
ctcattgtattagttttttttaataataaatttcagtggatatacacaatattatgtcggtttgtcctgccctccacaggccacgccatagattgtatgtagatggttcgtcattatgtgaaaatttgactgatacacataataaatactgaatgcatgacacatgggtaggatggggtcattgtcggtttcggcctgaaatgtacaattattggcttttgctttgcaaaaccatcactccatcgtcccataactactatagtactatttctagtcttattttggtaaaactaggtgttgtgtgttttttattggtatgatgagtcactagacttttctttggtaaaattttagtttatctgtagttggagatcgagagtcaatggttgagatgatcgtcgaacaatataaaaatcataaagattgtagaaagatttaaaatattaacatatattagttttagtaatattt

SEQ ID NO: 33475 - DNA, 182 bp, Arabidopsis thaliana columbia
gcgatccgcctcagtccgttcgacccgctcctgtacctgccgtacgtcggcctcgcatacgcacacttcgccgcacgcgtttcgaggaagcggccgctgcggccgcgagcgactcaatcgaacccgaagttcagcatgccgtacgtcctgaacgccgctgctctggccacgctcggccgccg

SEQ ID NO: 33476 - DNA, 813 bp, Arabidopsis thaliana columbia
ctttccgatgtggatagttgtatacatgtacaatcaaaccttagaaacattcaaagtacttatatgatacgatcagtcattggatacagtataaaaacatcataatagaacttttcgaacgttttatatatgttttacaaagttaatttacacttacttatcaatgacaatgacagccacgcagccctcagttgtttttgaggggcttgcttctgggttttgggccttggtagtccctagccatcatatcgacaaatacttcttgtctagataaatcactagatacttgatctgaatactcaaacccgttcttctttttgggattgatcattttcaacgattcagtttttggtttcaaatcttttaactgcaagtgaaaataaatcatgacatcacaggataacacttgtatatatggatgcactgcattaagaacaaaatatgtaattactgaagtaatcataaagtactcgtagctgttatttgtgtaaattgtatatacctttcgtcccatcaagatatccttagttccgatggccacatgatcatatagatgattgtcacctcttgatccacctaaatgcatatatagatcatatcatatgcatccatcactatcacataaaacgttataataataataatgttttaaaaaaaaaagataacaagaggtcgaaccatgaaaggccaaaagaataatacttaagaagacaagcaataaagctgaggtcattaacttcgcataactacacttcttcatctctaattaatcttccggaagatcccagaaaggaagatatagggcatactcta

SEQ ID NO: 33477 - DNA, 336 bp, Arabidopsis thaliana columbia
attccgttgattttaattgtattatttttgtgttttaaaatttcctataactttaaaccaatggtattcaatcatttttattaaagtttacaactcatcaataataactaataaatattgcataaaaaaccttaaaaattaatttttttgaaacaattttttttcaatctttttgaaacaaattttttttctagaaaatcaataaaaaaagaacagatggagtatatctcacagagattccttttattttaaatgtagaatgtctaacctaataatcaacctttacttaataaaagactaatagggcagtaataatacatatactgtttttacatt

SEQ ID NO: 33478 - DNA, 469 bp, Arabidopsis thaliana columbia
caaatacaaaaagaacacacttctttataatttccgggaaaattcgtttttatgtagtggtcgtactaaacacgcttcctttatgtggaatcttaaagcagtcccttttttaagttgaattcaacagtattaatctttttaatattggttccggatccgaccatctctgcaacatcgtactttgagagacaacactgtcgaagccatctacgttgtcttctttacttggagaactctctctgtctcttctctgtactttctcccttctctttttccgtatctgtcagcctttgattccgcttttatgttccttcaccacatatacatgtatgtatctacatcttctaccttgaacaagacttgattttgccactagttatttcagaaaaattaatcttaatttcactttgaatttatcagcgttccaagctcatatccggtgaagtttttggaggatttggttgttatg

SEQ ID NO: 33479 - DNA, 595 bp, Arabidopsis thaliana columbia
agatccaattctttttgaaacaagctgcaagaattccaacaatgacaagttgaaactttctacaaagcatgggaacaattcaaggactacgaacgcgattttcctcaacaggcttcactaaaggtcacttcttaagtatttctgtagaggattacgtcccaagtttaaaatttcactcgacaccgctagcaatggagatttcactaccaagaccgttcaagaaagacgagctctcactaaaaacctgattcttccaccgattttggtagaaccatccgttctaatgatttagatgcaaagcaaacttctgagctgaagaatattgtttgggttgccaaacaagggtgggttgagcttaagctctgcatgagtactcgtggtgtttgggtctatgctttggtttttggagaaccaagctagagttctgaggttagaccgtcgcctcttcaacaagttaaggataaggagaggacaatgttttgtcttgtacgtattcaaatatttttagatagttacttagtttacggttaagccaagtatacctacgaattacatatattacgagtaatcgtatttgtttgttgagtatattaat

SEQ ID NO: 33480 - DNA, 601 bp, Arabidopsis thaliana columbia
agaggatcctcaagatataaccaaacaaaatacctgtaaatattttaataaaaagatacgataaaaagacaaaaaaaaataaccggcaatatttaagggaaagttgtgatgaaaagacacaacaaaaatataaataactgtcaatactttaacagaaagttacgatgaaaaaatacaacctgaaaaataaccgtcaatattttaacggaaagttacgataaaaagacataaaaaaataaccgataatattttaacggaaaattgcgataaaaaaacataggcgttaagggtaaaagatctaaccgagaaaataaccgccgatgtaacgaaaatttgcaataaaaagacaaccaaaaacaactgtcaatatttttaacgaaaaattacgttaaaaaagaacacaactattctcgataaaagacataaccgaaaaaaaaaccgccaatatactggaaaggtgcgataataagacgaatgaaaaaataactgtcaatattttaacgaaaaattgcgataaaaagttacgaccgttcacatgtgaaaatgacattttttgagattgttattgttattagatttgtcacagattttgaggtttttg

SEQ ID NO: 33481 - DNA, 646 bp, Arabidopsis thaliana columbia
taacatctcccatgttgcagtggtggaagctgttcctttacagaaccaagcggctgcgcagatacttcttgagaagatgaaacattctagttcaaatgataggcaataccaaggaagaagaggtaggggtagaggtagaggtagagggagggggagagaagaagaagactctgcagtatttacactagatgagtgggaaaagaggaatactggtgggggggctcttccaacagctaaccatccaagcgacactacccgcgatgaagatcttgcatggcagcttcagaatcagtttgatctggaagactcttatgtgagtcacaacaacctttattatccctatgacccgtcttccatatgctcattattttgattagcacactttttatctgtctttcaatggcttattacttgtgttttgggatcatccatacagaaatggttacaataagagctttgttattgtaattttctgtataggggcaggagatgcctggagccggggcagcggatatcagaatgaatatgtttgattacggaagaacagaagataacttcggccatggaaggggaagaggaggaggaagaggaaggggtagagggcgaggacatagacggggaaagagacgtgtgtagattgtaatga

SEQ ID NO: 33482 - DNA, 500 bp, Arabidopsis thaliana columbia
tttcttgtttctcagacaataaacctgtttctggatctcaaacactgtatcacaaatgaagccaaaaccatcttccttaaacatggatctgtttctggttatctttcagttttcttcgttgcaaaaaacagagcaatctcacgccaaacactgcatgactacagaatgttactgatggaaaatgggtaaatgcatccttggttccataaacgtgtgaaatttgtgaataagacggaagaattcgtaaaaaagggcaatagtaacatccttggtttgtttcttttcttcaccaacaacaatacaaaacatctaaacctacgaagaaaccacacacaacaaaagaaaacaaagattgttgtagcttcatctgagaaaaaagtactctcgctcttagttaactttggtatattttctatctttgcacaagatgtgccattcttggagcactgctgcctgaagcgccatgtgctctgtttcttctgctgtcagcttagaaaatg

SEQ ID NO: 33483 - DNA, 399 bp, Arabidopsis thaliana columbia
aaacaattcgaataaaataagagtgtattgagaaagtagttactttttaaaacataattttaaaagtagtcattttattatttataattgtaaagtaatcatttttcgtatacttacatatgtacaatacttttagtatatatatataaatatatatacttaaaatattgaatgtattgtataaatttatgtgtacgacaaatgactactttgtatattataattgtaaagtgaatacttttataaatttattttgaaaaagtgacttattttcaacttattccctaaattaataactatagatatattttttaaatgtttatttagtttaaaaactatgaatttaggagagattactagctactcatttgaaaagataaactactcatagaagatgac

SEQ ID NO: 33484 - DNA, 514 bp, Arabidopsis thaliana columbia
taccaacttaccatctcttaaatttgtgttgcatcttgatcgagaataacaaagttattgtgaccatcatcgacaatcattcaaaattacattcaccgagtttgggttggatcacaactcacaagtaacaaacgtcaaacacagaaccaaatttggtcattttgagattataacaggctcatgaaatataactgaaaagatgatatttgggcaacaatatctgatcgtaataacgaaatatacatatctaaaagttaacgtgaaagcaaagtagcaataaaacataatttgttacatgctcgtgcatagtctgaaaaattcaaaaccagtcgagcattagtgtttttaacactgtacaaagatgttctttgagtgaaaacaaaatttcacttcttgttgcttcaataatggttgaaggctgcgacgacatcaaatttactgattgtggattagaataggactttgaacttaggcatgggaggaggtaggacgacggaagcttgtatgggtaggt

SEQ ID NO: 33485 - DNA, 615 bp, Arabidopsis thaliana columbia
  unsure (1)..(615): unsure at all n locations
taattcgctgagaggcgtgtgagaattgcctttttccttgaatataaaatgcactcccataatgtaatcaaacaaaagatataaatagaataagaaaaataacaactcagcgtaacggagtccgattaacggagtgagaaatcatctggtttctcgagagttctaagccaatgataatcgaaggaaacgaacggtgttgtgtgtgtgtggttaagaaaagaacaaactcatacgagacacgtgcaccgaagctttttcccacgtgccaaagagtttcgtcttcgttcacacagaaccaagatgggtggtaacgaaggtaggaccctaaagcaccagcctacaacacatagatgaaatagtatatgcgtttacatggatttgatgaattgttgtgtttagtatataagtatattgtttagaattatcaaaaagtatactttataaaaagagtggtggtaacatatttagtttctgcaccaatataaaaagaaatatggtgatgtctaaagaaaaaagagagaaaacttagccaccaacaaaatattagaagaagattcaccatgtgaatggaagggtaatgtntttttcctttctttattttgaaatgaagggaag

SEQ ID NO: 33486 - DNA, 522 bp, Arabidopsis thaliana columbia
ggagtagatataaaaactcgtccacatcttatcaatatgttattcaatttctatcacatcatatgtgagtgatatacatatatgaatgtgatttttcgtaactatgagaatacttttcttatggctgtgacttctccatgtcggcataatttaaattcctctgtagaattggtaaagtaagaaagaacaagttgacatattcatagttcattattatcattaaaagtgtactttcgtatgaaacagtttggtcggtccaaatttatttattttttcctttggagttcttttcatattagccttttgagtgtggaactcaaacacctttcccaaccatccaattccatacagcctcatggaattgttatctttattgatttgggaaattgtactagtgtccatatactattgactagtgtacattccagttaattcatgtttttatactaattgtatttatattgaaatcatttactattgagacaggactgaatagaacggggaaaagttgcagattgcggt

SEQ ID NO: 33487 - DNA, 514 bp, Arabidopsis thaliana columbia
ttgtcaattttctatttgaaattaaattagggtttggatagtactcctttcacactggaatgaagttttaacaaagattttccacacaaaaaaaaagcattggtggggaaccggtgacggagtaccttcctgtgtcgggctttaacaaccaatattttttgcaaattagattgcccagccatctaggtcacacaccatcaaatgtcatgaatgatatattgtcgtgaagctatgattatctttagcttatttactctattatcttgtacgttcatacaaccattcatatataatctttctcaaagaaaaaaaaaaagataaaggaggcatgtcacctgaaacatattggtcatagcataatttgcattgttagaaaacaataatcgtataacaactctttctaaattgagatatttcatacttacccacactcttgaaaaatatatgtacgaaaaatatcttcgtcgaccgtgattagacagctagtcatatctcaaattattccttttattag

SEQ ID NO: 33488 - DNA, 435 bp, Arabidopsis thaliana columbia
  unsure (1)..(435): unsure at all n locations
gcaagcatgagaggtacaatcctcaaagccagtgatattccaggacatatccagggtatcttctcaatgtctttttatttttaagagttactaataattttttttttaaattaatacatgctagatttatttaattgatcataacacatgtactgttaattttttttgattaataaacataattatatatatatatccgcacacttgccatatgtcatgatctcgcgagttactaactttctaaactgtattttatataataagatttggacccatggattgcctgatttattatggttctttttggctttggtctaatttggatttgatcccatttagcttaaaccaataatgaccaaaaaatccgggntgttcatttggacatgaacagcccagttgacatctttaatggggcatgagncttgtaatgtatgg

SEQ ID NO: 33489 - DNA, 632 bp, Arabidopsis thaliana columbia
gctttgattcattcatactctaataatagaactcatacgagatgtaaaggtatttatcacaatagattatccatgagaagttaagttcaagcacataaactcctaattctgttttatgtgattaaatatatcttaacaaacaatcatcaaaatagctttccttttaaacttgcacgaaaacataattgttgcaacattacagtatatcatcattgattgatataagagaacaatacaaaacgactactagtatcaaaactaaggaagaagaaagaggttcaccattatggttgaaagaaaccgtctaaaaccgttttgtttttttcttcttagagaagctttcaggcgtccggttttcttgtttacgctttgtccctgcaaaccgcttaccaccgctctcttttgaaccttttgcgtttgctttcgcctttcttgctgcaacagctggtcgcttctgacttctttcgtttgaagcactattattcccagattttttgttgtcattgctgctgctacctctaggtctcatctttgtctgcgcggcgttttctgataaggtgtttcttatcacaccagattttgaagctcgacacattgatatgaaagattagcctccatgttggagttggtgt

SEQ ID NO: 33490 - DNA, 508 bp, Arabidopsis thaliana columbia
atgttagagttagatccagagtttaaaatgggccgggatcttaggcccaatggacatttgatttgtataaaatttctctaaaacccctaatatccagataaatctctagcaagattcagatgtgtatgcaagcagtagaacacgcaacttatgaggagacctttcttgcgcaacactcgtctcgtatattaatatatagagatgtagaattgatataagtctcttttagcttatgttattcactactctcatgtaactataaatacatcttgtatgtttcttttatctcattctctcattcttttccaggaaaatcataacaaaaacatttctgggaaaatcatcatcaattttcaacaatttcttcgattcatcttcatatcttcatcttcatcatcatatcttctccaaaattcatcatccttattgtacgatgagagaatcaagccattgatgctccattttcttcatcatttctttcatccaccaaatcgaagaaattgttact

SEQ ID NO: 33491 - DNA, 474 bp, Arabidopsis thaliana columbia
gacctcccaacaccatttaggatcagcatctctgcttagcacctctaacacttcaattagggccctcaatgtggcaaacaccttcctcatcttcaagatcctatgaaaaggagggggaaaaaacaaggattaattatttatggtttacaaaaagaagaagacaacagtacatctcagaaaccatctccactacagaatcccatctgtataagtgaacagaagctatcaagataatttataaaaacgtccataccaaacaaattaatctacacccagaaaatcactgccgaatgaaagaacaagcatcaacacaattcaggacgcatgtttcagatttagagaatttcagccattttctagggatagaatccaaatactgtcctaaaaaaacaggaaaccacaaggattacagatgcacatactcccccactgttagaagaactagttgttcctgattccctccacttttgctct

SEQ ID NO: 33492 - DNA, 584 bp, Arabidopsis thaliana columbia
tttgttttgacaggaatgttggctgagctgcaggaacacgtcgagtcgatagatttggccaatggtttgatcttacataactagtctttgtttttcgaggttcttttttttaatatattatttggatctttaaatgttttagatcttcactccattggaggtttggttcctctccttagctatctcaagaactctaatgcgaaaattcgagcaaagtctgccgatgttttgactacggttgtccaaaacaatccaagaagccagcaacttgttatggaagcaaatgggttcgaaccattattaactaactttattgctgatcctgacattagagtccggaccaaggcactcggggctatatcttgtaagagttactatttctagcaaagtttgctttgagaacccaaaagtttgacagtttttttcttgctttcgacattgcagctcttatccgtaacaaccaaccccgggattacagcattccgtctggcaaatggttatgtctggctgcgagacgctttggtctctgataccgttagattccaaaggtaaatagggtctcaagaatatgtattaggtagatg

SEQ ID NO: 33493 - DNA, 575 bp, Arabidopsis thaliana columbia
  unsure (1)..(575): unsure at all n locations
taacactgtaatatctctttcttgaaggagtcttcacctgcgggaagtccgtctgtggataattcatcagtaaacatgggtgaggacatggatattgatgttgacaagaaacctgaacaagaaaaaacagaaatcgtggaactagatagtccggtgtcaaaaacacaaagagtgattgaaaacaaacaagaggtggaggaagaggaaaacgtcgaagtggagagtgaaaataaaaccaaagctaatgtagaggacaagactcagtcgattgatagatcaatggaagagactggcgatgagctngtgaatagtgctgcagagaaattggttgttttagcttcccttgaaggtccaaaatcgactcagaatgaggaagaagagaaggaaaaacgacttcaagagcaaaaggtatttacttatcttttgctatatacatcagagcaatatcgtcagaaagcttaataatgtgtttgaataagccaataagcacgattgagaaaattgtgttgtttcgttattgcagaaacggctggagttagagcgtaaagaatggagaatgaagatgcaagaaaagt

SEQ ID NO: 33494 - DNA, 407 bp, Arabidopsis thaliana columbia
caagaatctctataaactgaaacatgcatagatgtaaaacatacttgaaatttgtggggggggggggggggggggggggaaaatatccactttaggtggtggaattgggtaaacaagaatcccccttgttttttaaaaaccccattagaaaggcacccgggttttaatcacgcgaaaatagggaaaccgaaaatttagttgatcaccaaagccttgaggattttacaaacaaacccaccttttttaaacccacatcattatttcccgaatggttacggtccatcatcaagtggaacaaattcaccagggataggattaggcggtttataaaccgttttagggggggccctttcgggcgggggaacttttgaggggttgggccttgaggacagggtttcgcccgaaaa

SEQ ID NO: 33495 - DNA, 525 bp, Arabidopsis thaliana columbia
aagtattgatcactttggtacaaatgcagttttataaatatcatacttaccacttttaaaatcaatttgaacctagtaaatattattctttgtataaatagactagaaccatgtttgtaaacatataaaagagctatatatgtaaacattagaactcattataatatatacgaagaattctgaatcttacatggtttcagagctatatatatcagaattaacagaagtgagtgcgtgaaggcacaacaacaaagagagtgaagtatatttgtagaagtcagggtatgttatcgggcatgcaatttcttgatggtctttagcttatgtgtgtcactctttttagtaatgaacttaacttccctttttgaccacttcagagaacattaaagagagaaatcgagtgtttcgaatctcattcaggatgatttttctctcaaattttctctttctaatcacaatctcttgcgcagtcggtgggggttcccgtcgattttggtgacggtgaggacccatggttcatggtgt

SEQ ID NO: 33496 - DNA, 445 bp, Arabidopsis thaliana columbia
aagttggatgactactcagtcggagtgaacataacgactgtaatagcatgaacccacactatagttagctccgtattaaatacactcaaatcgataagaaagtgccaactaatatacttcgtgtgtgtgtgtggagtggtggggagagcgcaaagagataggtttagaaaaatagtacctttataccatcatctaaatcctttaagctatccaaggactgacagctaagctgttgactggtctgtcctgatacacttggacgagatatgtggtttacatctttagacagttcactgtttaaggatttctcaactttttctttctcttcctccaggttccttactgtacacattccatcaactgactatgacccagaaacagcttctgaggtttccttatgttgatctgaccaaggcaaacgtagagttccaagaagcacgacgga

SEQ ID NO: 33497 - DNA, 391 bp, Arabidopsis thaliana columbia
gtgctttaaagcgggatgtcttggtatttaatattcttaaatggagtaagataataaatttatattgtaatattaaataccaaatatatatattttggtgtctttttaattaataaaaaaataacaaagacacttattctaaattaagaagagtcgattaacgaaataataaggaatgaaattctcaattatgaaaaacacctgtcacgaaagtaaacgggaaaaaaatcgcacgatagataattgcatcggtgctcagtgctctgtttatctcgttatataataatgttagagaaattggatgtgaatgcaatggggcggtttaatgtgaattgatgagtagacacaacaagagtttggtttggtaatggtagcaacaagccaagagcac

SEQ ID NO: 33498 - DNA, 541 bp, Arabidopsis thaliana columbia
cgactctcgactcttccaaagccttgagtgtccgttgaccaattggtccgaatctcttctccaagcatctgtaggataaaaaagttctaatgccatttcgaatcaaaatattttgaaaatatccatggctagtctggcagcagaaactcaggaagacatccacctcccttccaagcaacaaagaagcagcagaagatgaagaagcagaagacattgctttggttaaaaacactaattctgcagctggactcgaacaacgaaaagctacacatgtgaaacagctttacaacaaacacaccacttataaaaaaaacactagtagctaatgtgaaaacaaacaagacaaaaaagacaaaaactttacgtagaaatatataaataaacagagcaatgatagatttcaaagtatttaaaagttcttaatagatatctatcaaaatgacagcatacaaagtagcatttggtttattctttatatttttttgccgaacaaaatcaaagattcactgctccaagacatgatcacttgcttgatagatta

SEQ ID NO: 33499 - DNA, 697 bp, Arabidopsis thaliana columbia
  unsure (1)..(697): unsure at all n locations
cccatggtttatatcccaacatatatagggttcgaacaattttgttgttattacgcaggcattcaaagttttttggaatcattgaaccgccttgaataggaggtcaatatcacagaatatggagattggagagttagataaagtgtgggatacgggttttgctctctatgactaattcgacccaaacaaagattgattaagtcaaacaagcagcgaatatgaaaaaacgatccattagaacaacagcccatcaagcatgctagctcggtccaatgcgcttctgcacaataaaataaatttggaagagtaaaatcgaaaaaccacaagagagacaaaaggaactctatgtcagctcttagcttataaatagcacaagacattgttggcaacaatatctggacttgaagtcattacctagcaaatttaagagagaattgttgcctacctcgttttatttcttacttttctgtttttcattcaatatgtcggttttatgttctgtacgttattgttctcgttcatcattaataaaaaaagttgtttcctcgccccaaaaactttttagttatttatgttacaactttggtaaaacataaagcganacttttgtgggacaataaagagagtgtgaatgtacatgtacctatgttttctatatctttataaagaatattcatgattagagggctttaaatat

SEQ ID NO: 33500 - DNA, 438 bp, Arabidopsis thaliana columbia
tgaacctacacgctgccagtgtttgactcccttaaacatggacatgtcattgtcaggtcatagtctatgacactccagtgtttggttctcaccatttctcgttaagcttttcgaattcttctcctcagacaaaagctcctcttaagaaatccaagtgggttgatgatcttcacaataggaaacctctgaatgaaatggtttgagtagtttccataatgcttctctttgttgtggtgtttctttctcgacttgttactaatattctctcattcttatgtaagcaggaaactgttattctttccttaaattgcgccgcagctgccaagattgcctataagaagataccacgcagctggagacttcttcccagaacttttccattatgtacttgtaagccctcgtgatatttttttttgccttgttgatatcttttcttct

SEQ ID NO: 33501 - DNA, 551 bp, Arabidopsis thaliana columbia
actgacaggaattcaaacggaacagaagtttataagatcatttacttgatgatattttgatcaaaatagagtatatgaaaatacagaaacttccaactgacttacacaaaaatatataccaatatttaacaataaatagaccaaaatggcattattatccaattcgttttgaaaaattgagcgttattctattgaatacctaaagtatagtctagttcaaaaaaaaaaaagaacttaataagaatctctaccaatcttataaaattttcaaaatttgaaaacatactccataaaaagccagaaaataattcaattagtcatggccgaatttaaataaaattgactttggttggaaatgctttttctactggcgcaagtaagagccgatacatgtttatatcagaaaagccagaagagagagagattgagagcaaagtttcatttgttgtgtagcctttgtctctcgcatcctcatttttcaaaatctcactctctctttcctctctgctttcatttgctttctataaaccaaactcttaaacaaaagattt

SEQ ID NO: 33502 - DNA, 598 bp, Arabidopsis thaliana columbia
  unsure (1)..(598): unsure at all n locations
tcttgttgttccacgatatttggtttgtagatattattagattattatggcatattggttacacaatctaaaaaatagttagataaagcttggagctatgtgtattgaagtgtttggagctgttaggctagtctcctgcctctcgtgttcctttcagacctcgaataacataatatttttgtttgtgtgatatttatgcaaacattgaattaattgtagtgtatacactaaaattcttttgtcgtgcttacgcaatttggtaaattaataaacccaagaccccagcaacaaagcataacaataaaccaaaaaattatcatcgtttcaaaaatgtcaatatcattatgtcactcaacatcattttaaaaattcatattcttgaaaatcatacaaaattcagactgaaaattgctagtccattatattaaaatgaaaacaaaaaccgtcttacgtcttacgtcatacgtaaaatattataatcttacaaattagtttatcatgcctataagcagaacgtgaacattgaactttcaattgatatttttacttgttgggaagttagattaaagtntcacctagatatagtgtatttgatttg

SEQ ID NO: 33503 - DNA, 526 bp, Arabidopsis thaliana columbia
gagtactgtgcaagtaacgagtccatcaactttagaagatggattatattggttactaagaaaatctcaaaaagtcaaaatctaacaaatatttcgtgttgtatgaggttgcgtgcaacttcaattggatttcttagttaaaaaatagagtcatcaatatagattcagacggctgaatagtcttataaatatcttttatttttgtctaagtaaatttgaaaacactgcctatttttttgtgcaccaaatacgtcattacggagttgagcgattacaatgagagaaacacaatcggacattattcaaagtgcatatcagctaaatcataagaaaagaagctaaaacaacaagagtatatatatagaattgagaaactaaaagaaaaagtaaactattaaactcaaggtttatataaactcaagagcctaacatacaacacaatgatcgaaagtacttataaattcaatttttattcaagaaataaaatgaaagtgtcaagagagtctatgccctcattttttagttg

SEQ ID NO: 33504 - DNA, 595 bp, Arabidopsis thaliana columbia
gatttgaatataaacaggcatcggctgacaaaaaacatggaaactcaggagcttacagatcctacaagaagacaacaaggtttaacgataacttgctttagataccgtttgataagccttgaagatgtgttgtatatatagctaacttgtttctatcttctgtcgatctttagtcctctgattctgttcccaagaggagtgtatgggaacttaccaggatggttcaagacggtctttctcttcgagtttccattttacagccgaaatctccctcaagaggtggctgtttagtaactgcttattctgtttcagtttcatcttttatatcttactttagtgtttgatgagtttggcttctctttgttgtatgtgtgcaagaaagttagggtagactccaaaacagcaaagagaaagaagtaaaagatgactgatttgtgatactcatatttgagttattgttcttcacaacactctttgataaaatttgtgtaaaaaattgcccgtaagaaactgaatttgtttgaaatattggacagtcttgacagattatctcagttgtatttggttctttttgttatgtgattttgttttttgg

SEQ ID NO: 33505 - DNA, 502 bp, Arabidopsis thaliana columbia
gaaactttaccgaaaattttcgtaagattcgattggatagatcaacagaggaactaaaggaagaatcccacacagacagatcaacaaagagcagagagagaggaaaaaatagaatctgtgactctgtcaattttatcgactcatgtttgtttcaatgacgaatataccctttcaccaatatcttgcatttgattaatggtcgtggtgaagggataaaaatgagaattcagtgtctagccgtgatgacgtgaaccgttaactcgtggaaaactgacaagtcatcaagtaacagtcaccgattaaattaagcctaatggacgccacgtgtacggcgcctgtgtcagggatggttatggataaggtggttttcttctttttttctttttgtaatgtttggatgtgactttagtgggatgtgtgggaaactgttttatctactttgaaagtaaatgaccaatatgtggctaggccatttaaatatctaccggtccaagctttatga

SEQ ID NO: 33506 - DNA, 625 bp, Arabidopsis thaliana columbia
ccgtattgatccccttttttacactgttgcattttttcaatccatcacaaaagacttacttctgattcattgaggttgatgtttccatttacaggaaaatgcaacaagaaggtttggatgttcagaacaacagaaacgctgaccactatggagcactaattcaccaccttgctttgatccggaacaagcgctgcctcatggcttatgtgtgagaaccacgtttcctatcagtaacactatatctggacactcaatttcttaaaaatagctgcaattggtgtcgctatgcaggtacaaccgagcagaaattgtgcgtgatttggcatggagagtagggcttgaacttctcgaccttccctctgaaatccaagagaagctcactacactagagaaggaatacttcaaaaaccattcggttgctctaaaatcatacatgggaaaagtaggaatcgagttgaatgtcgtaagtcctctttccaccaccctggcttttattaattaattggatttttcttgtatggtggacttgtaactagtaatctcatcttgatccatttcttgaaggatatggccctcctaaagatccttatatcaaggtcagaattttggatgatattgatgaagg

SEQ ID NO: 33507 - DNA, 211 bp, Arabidopsis thaliana columbia
tcaacaaagtgctgcataagttaagagaatatagagaggatatattacaactctgaccagctacagcaagttagactatgcctaagtatcaaataagtgaaattaagaagtcttcaaggtatcaacatcttccaaaccaaaagcaggttgtagtgatcaacatgttttcaacccattaaaccaagccagctagcaaccagctgacaccgct

SEQ ID NO: 33508 - DNA, 515 bp, Arabidopsis thaliana columbia
  unsure (1)..(515): unsure at all n locations
nnnnnnnnnnnnnnnnnnnnctaaagcttagcaagtatccgtacattcggcacaaacggttgaatgtgacaaatgcattccactgtagccttgtcggaaacattgtggagcctctaaaccagctgggcgaagaattgacgttcaactcccccgtcattcatattgaacattcgtcttctactccatcgaccggagcgcgcccgtcgtccacgttcgtcgccgatcatctgcgtaacgcggtgtatttctaccacgcgattgagcgtcttgcccgagcttatcccgatagtatctggcttgaagcgggctccaactctacaatcaccaccatggctggtagggccctgcgtccgacctctgacatagttggacagtcgcatcaccatttccaagcactcaacatcactcacggcggccggggctcagatagccttactgagacaacgctctctctgtggaaggaaggccttcgagtttcattctggcagcaccacccgtgcaaaaagaccaatatg

SEQ ID NO: 33509 - DNA, 129 bp, Arabidopsis thaliana columbia
caggtagcgcgccaggtcaaacacgggaatgagcaggccgtgcaggttggccacgcccgtgaaccattccggcgcgttgggaagccggtaggtggtaggcaggtcggccagttcgctgccgtcctggta

SEQ ID NO: 33510 - DNA, 601 bp, Arabidopsis thaliana columbia
tcagctttaaggaaacggttcagcaattgagaagatctattggatcaataacaatacattctgctttttgttttattgtaaaattacacgttcttatacaaatggaggtagcatcagtcctcagacgtgcattcccatagactggttaccagctccagagaataaagcctccaacatcagactgaacaatgcaactaaatgagctttatttatcccacaagagcaatgaacaaaatctactctagagcctcttactcttgcaaagtctgttgcaagaatgcctcctatttacagcagacaacgcttctaaatgtgtggtggtgagtcaaacttaaaagacaaggatgtttcctgatgcgtctatcttatcgaatggaactgctaattacttttaggcaaaccaattttcacatctggagaagattgttcactgtaacagaaacagaatttgttctttgcaggtcctgaaagaagattgaatcaatcatcacttcaatacccagcgtgtgcaaacaaatgacaacaaatggccattaaactcagaaaaattgagccattaatttcttaatgaaaattttgcttccaaattcatatatacaaa

SEQ ID NO: 33511 - DNA, 370 bp, Arabidopsis thaliana columbia
aaaagggtcaatcatttgccgtaaaagatttttttttgaagctatatactttccaaaaaaaaaaaaacatttaaaattaacacaaattcacaatcaagcacacgaataaaccttagattatccagtttggccttttgtattattaaaaagaattagcgacagacggcctgtaatatagaggactgaaaacttttcaacgatgataagttaaatctttaaggttgtctttttttttgttgttgtggaaattctttaaggttgtcacagaaataggttttcttcatcagggttactttttttttttggtagaattcagcatggttacttctaaaaggagaaaatatatataaaggaaaaaaacacacaatta

SEQ ID NO: 33512 - DNA, 594 bp, Arabidopsis thaliana columbia
ccctacaaactcacacttgttctcattgtcaccaacacataatcggttatgcaaagttggtagctttagcatataattcgatctaagctttgagtattgagatcgatttcaatctagaaactgacattggctcctaaaattgagaactcctattgaaaaacctccaaatacaacctaacaaagacagaaatcgagctgacctctgagattggtttatcgtaggcgtttgtgttcactccgtgaaaagtctgaaccctgaagatagaagaaacagagaagaagaaaccctttagaggctttgactcagatttggaagaaaatgaaatcagaaccggtttaattcgggtcactacaaaaatgggagaaagaaatgagagtagaaaacgtgcagaaacatgggacaaagttattgtataagacacatgacttggagctctcttatatgattttctgctacatttttgtcaccccaaacatctttattctggtccctttgttcattccatatatcaaggcttctcgaagacttgagaaagtctatgtagtattttaataacttggtgtaagtagagtttatggagttgaactgaactg

SEQ ID NO: 33513 - DNA, 536 bp, Arabidopsis thaliana columbia
tcactcaagatcaaggttcttattctgctctttcccttaccaatgtttctgcattagctatcatagaaataacattcaattaatggtaagctgcttacgtgtccagagaaacaatggctaagaatcttaaggaagaaggaccttcatcactcaaaccgctcgatgtaccaaaaatgcttgatttaatatctatgttaatatcagagaagaaatggatccaagagaatccttcggatgctctaccttttagagtaactcggttcactgaggaaagctcttgtcgtagcaaccctcgcaccacggatggattgagagcgatatttgtgaatatgtcagaatcgctgtgtgacggagcaaatggtgataaaaattccaccaacgttggtatgagccagaaacctaaagaaagatcgagaagcaaggtaattgcggattgtcataagctgataaagaagataacagaggaaaacgctggaggttatagcataactaaattcaagaaagcctttttggagaaatttggataccgtttagaa

SEQ ID NO: 33514 - DNA, 946 bp, Arabidopsis thaliana columbia
tagtaacgcccgtctaccaccgactacacccaatttgatgtagacttgaatccatcttggcttatatatcttgagcaagaggagcgtgataaagatattaattctcgaataattggagaaaatagagagaatttagaggaaaaacatggacatcgatgattacgatacgttactttaccaaagagaggaggaaaatttttggttgaaaacctgaaaaagaaaaaaaacagttatcttgtcccaacataaaagtttgtaatatagttccattctaattagtcaaaataaagaataaacatcaaaaaatatatttttatttgtttcttattttcaaaacatttttaatggtataatatttgtgcaagttacgagactctctcttatttctctagtatttttttaaagagagaaataatctaatttttctgccctctggtcaaaatatgacaaaattgtccgtgtttctttcgctagttctcattatgattcttatatgatggttggtcggctatatgcgcaaaatactctggctttaatagtaaagatatatggtttgttttccgacaaccttgctttgacgtaagtcgacttgcttccggcacctatcggttttgtcagcgacggttggtcggcttctatctagagtttgatccattcggcttctatgtagagtttgatccattagtctctatgcttttaattatgaagataaagatttttttcctccgtgatactctttttggcctttttggtttgatttgccgtcgtttgagggtttggttatgggtgttgtcgtttgggtgtctcttggtagtttcctccaccaaatatttcaaccagatttgatcgacatatagtatgtttttgccttcgtctttacatgatttaagtcgacaaaccggctgtgactattagtgacgaattatctctatttctaatgaggctt

SEQ ID NO: 33515 - DNA, 467 bp, Arabidopsis thaliana columbia
agtacctggagcttgatgagaagctttgaggtggtgccatcggaggaatgaaatagcgagtgaagagacgaagtaagagtcttgaacttggaatggagaagagagtatgcagcggaaggcaatgaaggaatctcgtcccaaacgcaatcaggattctgaattacatacttccagatttgaatcgcgaatttagggtttattcccgctgattcaaattccgatttgatttccgaagcatcgaacaccgatttcaacttcatcgactcttccttgggaattctccgctcgccgtcgccgatattaaaagacctaaacttttaaagcaaatcccctccgtcacaacaaaaattctaagaagatgctaaaaccggtttggttttaggtggaaaatctaaacccggtttgattttgatatttgggggaaaagtaaaaaccggtttgtcttaacggtttttagcctttgtggt

SEQ ID NO: 33516 - DNA, 327 bp, Arabidopsis thaliana columbia
aataaacaaaagcttatctgacaaatattcttgaatataagcgaagacaaatattctcaattgttgactattatacacccatccatataagattatcattatgtatatcagtctctatcataaactgtagattaccgatacttatacacagagaatttctgtctagccattcctattaaaatcactaatcaacaacgacttcattttttatacaaaatttctgacatatgtaaacagtgtagactgcaaagacagagacggtagttgaagtcccaacagagaaatgtcctagataaaattacacatacatgtttagtcttatcttgg

SEQ ID NO: 33517 - DNA, 399 bp, Arabidopsis thaliana columbia
tgcagtacaccagagcccgatgtttatccatttttcaaagttcggctggactctctttggtgcggttgatgattatgtcatctggtgcccagcttacccttagtgctaatgacttgatgtttatgcgaacttaggtcagctaaatgttttcatcaatcattttaaagcagtgcgagaatcatccgagaatgatatatgtgcctggcttgtatgttttggcgattttgttctacgaagcgtacgttgttattctttggttttggaagaaggtaaaaaaatatttactaacgacccttccttttttggttttcttttttggaacctccaaagacatttgcgccggaaaacaggttgccaacgaacctccctttcaaattaacatagcggctttttaataaa

SEQ ID NO: 33518 - DNA, 486 bp, Arabidopsis thaliana columbia
tattacctatatatattctgatgatataaaaataaaataaaatcttatgaattcttaataaaataaatctaaattttacctatgattattccataaattcattgcaatctaaattttttcttttaggtttgataattatcagcttttttagaacttatctttgttttttgttatatatttatgttgataatttatttttttgtatttatctaatgaaataaaatttctacagccaagaaaatagggctttgataatttactctaatacaaccttaaaaaaaagaaaaaaaaaaattgggatgtaagtttaaaaataaaggtacagcacgattggtttgtaatcaaggctttaagaaaaattaaggttgtaagtcagactttttttttttttttacgtcaaaaaaatttcataaattaaatagtgttgttacagtgatgtttttgaagccaactagggaaaagttcagaatctgaataaaaacaaga

SEQ ID NO: 33519 - DNA, 552 bp, Arabidopsis thaliana columbia
aaggataccatcaacaacacattgaaatctaatggctccaaatcttctgcaaagattctgttctgataaaaccaaatcagaacacacacaaaaaaaaaaaaaaaaaaaaagaaagattctgttctgatacgaccaacccattacttccacgtttctcaatgaaacaaccttcaacatcatcctttatatacattctcaatctcttccgctatctcaggtaaaaacaaaacaaaacacaaaaatggcaatctcagaggcatcgaaatcgagccacgagctcccagtaacaacagccgaatccagcgggaagaaagcaaccgcaaagaaactgactttaatccctttggttttccttatttactttgaggtcgctggtggtccatttggtgaagaaccggcggttcaagcggctggaccgcttttagcgattctcggtttccttatcttccctttcatttggagtaccctgaagcctaatcactgcagagtctccactgcgttccaggtattctcaattaaaccaaatacacaaagatcgtactttatatgtgt

SEQ ID NO: 33520 - DNA, 554 bp, Arabidopsis thaliana columbia
tctggaaaacaagtgaaactgtatcaatattacataaacctcaaaattatggtatcagtggttacttaatagttaagaacgagttgaagatccatactggagcctcagtgtacagtctctctagttgcattttttcctttggcttttagtaatggccttatcttctcactagacccactctcttattccttctctttaatctacaccgtccatccaatttggacgcaccagatcttatcacacataccattcacttcattgaaaaattactatataacagaaaaaaaaaactcaattggtttgagtaactcttcttttaagctcctcaagcttactgtaaaaaaaaaagtatatttgaaatttctaaattttcaatataattatttattaatctgttttcatttcattagtaaacagtaaacacaacatttatatttgtgttgtcatattttcgtacttaatgaatcaaacaataagatcaatgctatttttatattttatgtaacacagtaacttttatttttccaactcttttgactgcacagattttagta

SEQ ID NO: 33521 - DNA, 520 bp, Arabidopsis thaliana columbia
  unsure (1)..(520): unsure at all n locations
cctaaaaaataaaaaaaaataaaaaaaaaaaaattacaacaataaaaaaaaataaaaaacatgtataaactaaaaaaaaaaaaatatatataacaatcataccaaacaatgaaatcaagccgtccgtatccagaaactctgacctagctaaaagaacggtccaaatctattcctacattccttgaatatatgaatccanagaatccgcaactatactctgctgctgctttgatcatcatcttcctcttatagcttccgagaaaattatatcaatcaccatgtcgaggatcttcgccattcttcctctcgctgctgtatttattctcctccttgtttcaccgattgtagccatcggtgtccattactgtggatcgtgtttcaacctccgtttctcctcgtgatggctttgaattcagattgagttctaaagttcgatgctttttgcttttggctcatattggtcggtgtaaaaattagattttttttccgggaaattttgtttttgtctgacttgcttttg

SEQ ID NO: 33522 - DNA, 488 bp, Arabidopsis thaliana columbia
cccccttgtaaacaccaagcttaaatcgaaaagctatctcacaagagtgccggacaatccggggaaagcaaaaattcaggaaaagttttttgagttgacgggagttagattaactaggaagccagagatgaaaaatagactcgaatatatgcgaaatttgtggcagtgtaacaaaatactaagtgaccgcactggtatttcgattaattcgataataggaaagatagatatgccccgacgtttggtggaaagatagaattcaggtgagttcttaaaacatattagcatataatatctatttatatttacatataattctattttataattcgcctcctcattatatctcaggaatttgggagaaatggcaaacatgtgcgagtgttgcaaaacaggcctattctatgcaaaaagatacttgatcaaatttatagccaacatgatgtggagcaggatgatcattattctccgcatactctacgaacaaa

SEQ ID NO: 33523 - DNA, 483 bp, Arabidopsis thaliana columbia
tggggttttatctaatcaaccttctatctctcgggggaaaaagaaagcagtcggatgttcaagcatctgctgcctctgggattagttctgttgcatcgttgtttcagatgtcaagtcgtagtcctctacgaaggttccagctactagattcagattctgaagatgaccatccatccaccagcagagatttaagcggagaagctaaaaaacatgattcattctcaaagaatcaaccatctattgcaagtaaaccgaagagaaaggaacctggatctatcccctgtattaaagatctgtggaaagatttttccccggcaagttccaagattcagacaccagctttcgatgatgtttgtcaggactattttatctccatcaagacgactagcacagctcagaaacaaagcagtgctgtggcaagtagtagcaatagcggaaatcataacttgactggctttcagcaaactgagctattccacgatt

SEQ ID NO: 33524 - DNA, 528 bp, Arabidopsis thaliana columbia
tcatggttagtacttatatgtcaaacttcaaatctccatcatatgcttctttattgtatgaaaccttctgattcatctcatctatccgcaggttaccactctacggagagatcaaaatcgctcttctcatctacttatgttacccgaaatcacaggtactaactacagtacaatgcaataaaaatctaatgagaattcattctcattcttagattcacaaaacgaccaatcttcttctcttggtttctaacagggacttagctatgtctacgagaagctactatgtccatacatgtcaaaacatgaatctgacatcgatcaaggaatctctgtcttaaagataagaggacatttagtaattgctcaactactgcaatgtatcttccactggagcctccaaatcttcaagcaattgcaacaacaattcaccatctataaggtattcaaaacaaacatatacatcctcaagctttactgcatcagagcactctcaccaaatccatcacttcctttgtctacagaataaaa

SEQ ID NO: 33525 - DNA, 582 bp, Arabidopsis thaliana columbia
tattagtcacaaaaaaaaaaattattagtccaccgtcgaaggaaaaaaacaaaaagcagtagacaattcttgaagtaaaattaaagggatagacagataacgtttacgagaggaatcatgacacgtgaacatggagtatcggtcaaacctggcaactgggacatttctttaaatacccacaaaatatcacttttgaagaagtaggaaaaaacaaaaccaaagaagatctaaagagataaagagaatgatgaagaagcaagtgacgatagtggcggctcttctgattatgatggctttatgttccagcttgaatatggtggccgaggctcaattaggccccggagactgctacgacggttgctccaccgcctgcgtccaacgtgaccgtgagtactctcttctttcttagtttccccaaaggtttctgtctccatttgtataataactccttgtcgatcttctcttttcttcagcgagaaagacgtcccgatgcgatcgcaagtgttccattcgttgtggtccaggtaaacattatgaaaccggatacgtaccgaccggtctgtgatacatttgtctgatttg

SEQ ID NO: 33526 - DNA, 157 bp, Arabidopsis thaliana columbia
ggtatagctacagtgcaaaagtttcatgcgttgacctaggcaacatgcagcacggcaaaagtcgtcacttcaactatgttgctcgaaaacagagcaaaatgctgagaaagtataccgaaagcacaggaaataataggcaaaccatcgtaggttgtag

SEQ ID NO: 33527 - DNA, 275 bp, Arabidopsis thaliana columbia
gatttttcacagctagatatgtatgccagaagatatgatctctgtgttattctattttcttataatttgttaatctaaattctgattaggaagatataatcataactaggttactactaataccctgacaaaattcagcttggatatgttagaatcagtctcttgagcataatagcatctttgtcataaaaccgagttcagagaaatatcttcactacaataaaaccattgaaaaaattcgtgaagatagtcaccaaaataacataagttttaac

SEQ ID NO: 33528 - DNA, 571 bp, Arabidopsis thaliana columbia
cttcttcttatcgctcgatcgacgaattccaggcagtggcattgactattgctgcatttctttctgggtaagccgggcctctcggtataggcccaaaccattctaaggcccaaaccattatattaagttggttggtccaccaaagtcagcagcagctagaacaagagcgactctgcagctgctcttctcccgcttccttcctgttagttagcctcagagatcctcgttccccgataatggatttgggaaaactgatccagctgtctgcgctgctgtgcccatttcttctatcattacactttagaatcgctggggcctccgcccacatctactcttcccagcccttccacgatgtcggtaattctctcctcctctacggtggcagcgagggcatcttcgcctcttcccgatctttaatcaggtatattctatggattacattttcaactcttttgatgctctctactctactctactcatcctccctcctcactgcaggtttgagaacatcactctctggaggacaattacgggtaagggccaccgcagcaatgggttagttcaagcagtg

SEQ ID NO: 33529 - DNA, 491 bp, Arabidopsis thaliana columbia
tgctggttttaaatcatgtatttgtgtcttgcttgtctttcgtactttagttagaagcttggacttagaagcacgccacacacagctcatctgcttaaaaacagaatctttttgtcatccttcatttatattgaatcttccctgtaatattatccaagtataaacattaatatgcctccaaatataatttttttttctgtatggcttcaaatgcgtcacatgattttgcattcatgatggatggttttaaaactaagatggtaaacagtacaaaaaaaatcttttttataaaggacttgtatgtggttaagtaaattttatttcattccatacaaaaactagttcaatctgaataagttgtttgatagcaaacatgtacggcttgagcattgctaggtactcgttcctatgtggaattccgaccacttcttgcaaacattgtgaagtcttccctagtagtaagtccgatgtccttgcaagcctgtctcgcc

SEQ ID NO: 33530 - DNA, 529 bp, Arabidopsis thaliana columbia
ctgctggaataggagttgatttactttcaatcttgtgcaacaaactcgtattatcaaccacttgagtcggaataggaccaggcatagtagcagggacctgagtaagatgagtagccccattctcattacgagggaccgtctggtgatatgatatatcagagtgcttcatcctaaccatttcaggtgattttttcccctcgttgcaaagaggaacatcagaagaatttccacctttcctacgattcctacacattagagaaacaagccaaaagctcaccaacaaagatccaacatcaaagtattccactaattcaactagtttatcaaagatgtctccagcaaaacatcattcacaaatcacaatcatatagcctttaaagaagctataactacgccagtacttaaagagagtaatatcagcactgaatcagcaaagaaccctaaatatcgtagaggaattataccttttcttatcctcgttaatggaggttttcttctcggacttgatgatcacgtcttaggagtaaca

SEQ ID NO: 33531 - DNA, 446 bp, Arabidopsis thaliana columbia
caagaccaagagctaaaggtaatacaacaagttaatctataaaacttcggtcgcaaatggcagtgatattcaaaaaacgaaacattatattgatttacattcaatttaaatagatttaaaaagtttctcataacaatttaacaggacttttattagtagagaatcaatcaaatttgttaaaagagaaaacatacataattgattgtccctcaaaaagaaaaacaaagagatctcaacagattacagtgattagattagtgtacacgtatttagttaacaacaacaaatcaaaaaaaaaaaaaagacatattacacgttccctcctctcacgcgcaaagcatctctttgactaatcacatcttttctacgctaatcacatcactatccaaaataattaaccatccacctaaattatatacatacaatattgccatttactatattat

SEQ ID NO: 33532 - DNA, 513 bp, Arabidopsis thaliana columbia
aaaaaaccatcaaatctaaacaacgatagtgacagtagtacgatctaataaagctggagattgaagatcagatgcaaggagattaccgagaagaagaccgtccatgtcgaatatgacgtgagtgattgatcctctgccggcggtgacggctgcaggattcgacattgttgattcgataccgataacgacgaaccgaatccagtttcagtcggaagttagtttttacgctggagagtgatgtcactatgacgtataacaaaaggttcatgggccgtatcttgtaaatgggccggttcacatagagagtagaagttttgctcatagtgaagagtgctaataagagatgttgaaacttatacattggaactaaatatgtttagtcttcttctatacaaaataaaagtgaagattcgtatacagagcttttgttaatccaaagaccaacaacggccaaaaaatttttcctcttgtagagctccgtcgtgtccttcagatgattcaatggttgttttt

SEQ ID NO: 33533 - DNA, 498 bp, Arabidopsis thaliana columbia
ctcccaaggcacatcccacatgatcttgctgggtttcttatccatcttatccagatcagagcactaaatggaagcaaacattcagttaataaaaacaattttgagacgctaatggaaaacctgcatgtgaaatcgtattctagttggttaaacctgtaataacacgactctcttgttggtcaccatgacaatgcgtttgtatggaacaaggaaatgctcttcatagcaatcagacaaagcaaattttgagggttccctgaatatttctgtacagccaaagtgccgacttgcttctgctagatgaaggagcatctgcaaaacgagataaccaacataaatcagaactagtttggtgagtggcaagcgtaactagaagaatgtaagttcgtggctttctggcaatatttcagtataacttacaccatatcgtataaggagcttagaatgtaaacctattagattgaaatattaaacaataggatagccgacttgtaatat

SEQ ID NO: 33534 - DNA, 750 bp, Arabidopsis thaliana columbia
ccatgtgctgggtatatatatataggtagagaaatctttacaaatgtgcatatatttactaagtcaacataagttagtaattgttgactgcttatttaatgaggatttgttttcatattttagatatatatgaaatatccaatttaaaaatgtaaatgattttgtaagacattaaagcaaatgatgatgtacatgttggtattggatctcgcacaacctggcccggcccgacccatttcattattaaactcataaatctgataaaagttcaaacacatgtaagggagaaatgagactataaattgaaaatggatcggtcaccacggaaagggatcctgttcctcatacaaaaaataaatatctatgaaaatttatgttcattagggaccatattttatttctcataaatggatttgtaaagtaactatttacctatcaaatattcagctatggaaatcaagatttgttagagccaaattcacagtggtacgaaagatgccgaaaatagaagcgaagtctcatgtcttttctaaaagttttgaatgttattaactccagtttgcagtctttgttacacttattgtacatagaatatcagaaagaagtttgagtagagttacaaaatcatcaaaccaattatatttagcaagaattcaaaacaggaattcgttaaccaataacaacaaatatttttatattacaaattaattgacctaccagtaaccctctcttcttagttacttgcaagta

SEQ ID NO: 33535 - DNA, 210 bp, Arabidopsis thaliana columbia
cagagaattagagatctgaatgttgggggattatgcacaggataagttcagggatcagcttgttaaaaacagagattttggggtaaaagttttaaaacgttagaagttttaggtctaagttgtaaggtatcagaggattacgtgaaaaacatggtccagtgaaagtttaggcggtataatgcagtacatggtaaaatgtgatgagaaaag

SEQ ID NO: 33536 - DNA, 551 bp, Arabidopsis thaliana columbia
tgaactcatttgaaacacaaagtaacccaattttccagtcagtataaatataagagggccttcaagatatcaagataaacagcctctaaatgtcaaaatacatctaacaagatccaagaagagaaagaaaggtcaattactctagagtgacctacaagtggaacatagcttcaaataagctttagaacatttgaagagaaaagaaaaatagcacataggcggcgtttccaaaagtgaaactgaatttgtgatcccatcatccagtaatacaagcaagatatataatccaggaaataatcagaaaactaacaaaaacataccattgaatctgcttccatcccagccactcctgtaagcgagccgcaaagcaaaccaccatccccttgtaagcaacggaataccttaccactttcacgtgcagcaatctctgctgattcgaggtcccatccatggataacagagacaagatgtacctacgggccaattcaggccaagtgaactcattaacaggaagcatatgcagcttatttcttttagcagaaagtgtactg

SEQ ID NO: 33537 - DNA, 585 bp, Arabidopsis thaliana columbia
cgatcaaacgatatattttggttaatttggactgagcataaggaaataaaccataaagaaaacaaagagatcaacaaatcagatttactaaaaaagggaaataaacacatatatagcaacagcctatgatatataggatgcttgcttttaactataaatctagacatgattggcccaaaagttttgatattgttagattcattgaactatatcgacaaatcaaactaaacacgcacttattttctacaaggtctctctcggctatataatgatcgagacctttttcttttagtgcatttaactttttagtcagtaaggaaaaaaaaacttttggtcaatagtcaacgtcaaaaaggatttgaaaatattgttattaatcaagcaagttagtcatgaatatgaattcgtgtattgaaaatttagatggattcggtggttggaacgcataaaacattttggattgatgtttaaatgccaaaagagtgaaaacactatatacagctaagattagaaaccggtctagtagtcacattcactggactttcttgtacttgttcttcagttaacaattagctttacttgttg

SEQ ID NO: 33538 - DNA, 387 bp, Arabidopsis thaliana columbia
acgactctagaggtaccatgccctattttctaacatattttgatatcatatcacccataactctcaaatatatgccaaatttgatttaacaagttcatttatttgttatatgattgagaaaatttgacatttgggacattagaaaagttatgatttatctatattatttccaagactatcgttagtcaaaacagaaacagtgaaaaacatggaatactaagattcgaatgtaatagttcaactattttctctataacaggccaacaaacgttgaaactccatataattcaagtattcgactcttgtccaagcttaaaaaattgggtttggtttataaatatcgtgattataataatatacatgtgatcaatcgaagattcggagact

SEQ ID NO: 33539 - DNA, 459 bp, Arabidopsis thaliana columbia
agaagaaaggagaacagattaagcatcaagagacttaccgcagctaaggagttgaaaagaacgacggacggcgaagaaaaacacaggggaagcggcgggatatgtatcggagaaaagagacagtgtttagagagaaagtgtgaaacctagttttatggttttggatcttatggtctgaagcgaacgggtcattagggttttttctgcaattttttattttatttcctttcttatgtattgtctacaaatcctttcgtttttccctttgtcaacttttgccccaaattccttccaaacgtttagttttacgcaccatactttcttatattacatgtagacccagttaatgtagtttttttttttaaaatcaacagatccattaaatgtagttaatttcttaacttaattgtaaagtttgaatcttgttcttatgagagtaatttagaggaatttaagtat

SEQ ID NO: 33540 - DNA, 538 bp, Arabidopsis thaliana columbia
tgctgccaaaaacccaagtgctatcatcatctgcagtgcatttacgttgatgctgcaaaaaagaaatggaaaagattagtcgatttgtaaaatattataatttgtatgttactctatttatactcataccatattttaacttaagagtcgagttagtataaagaaaatgtgtagtatggaaaccagaagagatataaggtcaattcttgtttatttaccagattgctagtgcatcaatcgccacctctgcgtttttcaaattcccagtgagcaatactaatatcgagttgtaccataactccaagctgtaaaaaataacgaccaccaagtaataatcataaattaaaaaaagtaaagtaaattaacaagaaaaaatcaaacatataacaaaagaaaagtaacatgaattataataaaatattcagtgtataatatatatgcgtaactgtaacggtcggatcagattctcagtgtaaaagtatcactaattgatatttatattgtttgcagagcttttagattcgataagcttttagga

SEQ ID NO: 33541 - DNA, 475 bp, Arabidopsis thaliana columbia
ggtttgttctgctcacaaaggttgtacaagttctttgacaaatagttttgtggcataattttagcagttatgtgacatatttaacacatcacgaagacatttcaacatgtaccatttttctcaatatatattctagcgtttatttatgaaaccaacctttttgattttttgtttataaggaagactttttattaattaaatggaaactcttttggtttgacaaaaaaaaaaaaaaaaatggaaactctttttgtatggatttccattgaaatgttttcccactcctttttccaacaagccgatccagtccacacattctaatcatctgaaccatacttttgacaatacaatatatatatacatagataaaggaagatgtggttctttaattccacaattaaatacataaacattaaaaagtgatatatgggctttacgcggagaaggcggtacgacggtgcttttgacccagtaa

SEQ ID NO: 33542 - DNA, 449 bp, Arabidopsis thaliana columbia
tataagaccacagtttctacactattctctcaaaagaaaaaaaataggagatgattttccaaaaacaactcgaataaacacagcctcgaccctcgagaaagaacaagtgtggacaagaatattaaagcgttttatgatacttaacctaattgaatcaattgaatatgaaaggaaagcttaaaaatttggtacaccattgtagcacagtattttacaccattgtagcattcattgattcgaatcagaggatttgcaattaccatggaagaagaccaggtcaacttgaaaccgctctgtttcggttccaggcgcagtataacataacgtttcaagtgtttggacctaatggtagtaaaatacataatgaacaacgaaccgattggactacatgtgagtggtcagagaaattgaagcaggagtaatgacattggaggactggtacagtaaat

SEQ ID NO: 33543 - DNA, 518 bp, Arabidopsis thaliana columbia
ttgttcatttcaataaagctttagacatctagttttcctatagtcagtatccattaatacacagctggcgcagatatatatcagagttaaacatgtataaatatatccatgaaagagtgtaaagacaaatccaaaagctgacctagacatgatgccaagtgtttgcagctcagtaagtaaacctgaaaaagaccaaaacgaaaaatttacatgatctcatactaagaaaagtaatctcagataagaatcaagcacatatctttgattgaatccattcagcctttattactaaaacatactgaaaaaaagctaaaaccctaaagaatgtggatttgataaaccagagtcatcagctagttcctaaaaacaacagaaatcaggtctgaaattgattctatgaatagaaaacctaagtaacaaaatcaaaacccgaggatcaaaatcactcggatttgaaagcgaaaatgtacttcaaagttggctagaaaattagaaattagacagtttcaatactataa

SEQ ID NO: 33544 - DNA, 483 bp, Arabidopsis thaliana columbia
cgagttcacgttccaaaccggaacgctacgtctcgccggagaaacctctccggaaatccactagaacttgggaacttagtctctgttacaatgctttcaagctttctctcactacactcctctctctctttgatctcaacaaactcttatcacgatctaacggaattacagagaagaagaagaagaagatatagttacagagctcatgcgaaaagaccaaaacgccctcaagcttgttatgactttagtcagctcgcctcacgtgtttctcacgtgcttcgcttgaatcacaacagacttcgaaccctctctttcaccgagagtttctcccacacttagacccgaagactaaaatctgagtcacttcttacaattctccaccttgactctgattgtcttccttgtctcaacttgttctagttcttggatctcccctccagtacctgagattcacctctcagttctcagtaactcggagcatat

SEQ ID NO: 33545 - DNA, 619 bp, Arabidopsis thaliana columbia
tctatagtaagctgttctagctttgtgtacaaagataccaggaaataaatgattaagcaacgctattaaggaatcaaaacatgtttataaatctcgagcacattgtactaaagctttacaagtacaagagctaacaaaaacatagtacttacaatagaaaggatgtcttgtgctaaccccttttcatacattggcggtccaactttggcatcaaggatcactttccggactgaattcgatatcaactagatgattcaagatcaaaactagcttcagccacttgttactaagcagaaattacaaagcaaagcaatgacaagatagtaattaaaaaaacaggcattaccgctaaagcctcttcaagagtaggaatcctactacttcccaaggttcctttaacaatctccgagacatcgagttccttgatctgcaaaaagatcatcaaaaggtttatgaaaaatggatgcaaaaaagcatatcccaaaagctggtaaagagagagagggagagatgagacctgtttcatactcagatctccaacttgaacagaagagttcgagcaatcgctgcagatcctgactgtgcgtgtgatagaagatgataagaagacacagatgag

SEQ ID NO: 33546 - DNA, 627 bp, Arabidopsis thaliana columbia
tgccagcacaaactacatgtttctttgaatcatagccagattaatcctaactcgtcgtaccagtttcaagaatatcatcatggagtcacagaaatttgaattgggcatatcattaatgaaaacgcaagagctatttatgtatatggaaatcgattcaagaactgagtcacaagctaagacgtagtttcttcaaaacaaaaagcttctttattagaaaatctgtttagtaaacttacaagtttcactcaaacaattatctaatctctaacgttcatggattcctatacaatccaagaacctctcaagacaaacccctcagtccccttaagcgttatactttcttacgtgaggcgagctgactaaagtcataacacgtgaggcgagctgactaaggtcataacaagcttgagggtgttttggtctttttcgcatgagctctgtaactatatcttcttcttcttctctgtaattctgttagatcggagatagagaaaaagagagaattgtaatcaagttctagagagaactagagagagaaaacttgtaaagatacattgtaaagaaaggttctagtggatttccggagagattctcggcgagacgtagcgattccggttgaggaacgtg

SEQ ID NO: 33547 - DNA, 535 bp, Arabidopsis thaliana columbia
cgtggagatatatcttgagacagggatatcaattgggaagtccaagtccaaatgggcaatgtccaaatgagaccaaaccaaataggactatgatgatataagtccaaatagaacatgtgtccaaataagaccaaccccaaatagatcatgactaattggacaacccatgaaacccaaataatatgatttttttattttccgtcaaaaccgcaaaattatattttcgtacaaaatcaaagaattgcatttttatgcatattagaaaattacatttttcgccaaaacagtaaaatattttttgtaatgaaaatgtcagtataaaccctaatttttaaagaaataaggaaaaaaaattcctctaaaattagtaaccctaatttttaaggtttattggacgaccatgtccagatgggttcgcctatttgtttgcgggctaaaatgggcttttagcccataatagccgctttgaatttgggcgtgccattataatttggactggtctagctagctcatggtcataaagcccatttgagag

SEQ ID NO: 33548 - DNA, 510 bp, Arabidopsis thaliana columbia
ccgtcccaatactaaaagcttttaaaaggggtttacatgtgaaggaagtggctcatattgttttgaagattagcctaagtatatggaagactctcggtcaaagagagggttaagtcaacactctcagaagaaagccatgtgagacgcacgtggatcgagttgccaaaattgtaacggacttgaaggcatttcagtgatttcgcattgttttgttagcttatcttcttcttcctctttcgagtttgttagattggagagtttgttaccgattaagagagaggttagagagagagaaagctctgagtgtgagagttgttgtacgatacactgattccaaagttctagtggatttccggagataacttcggcgagacgtagcgttttccggttaaggaaatgtgaactcgttaaacctctgtgtcatcgttctttgactttctctattggtcaatctatttacaaacgagagccgagttcgaatagagtgattgtgagttgagtattgaagat

SEQ ID NO: 33549 - DNA, 1573 bp, Arabidopsis thaliana columbia
taagaaaatacaatgtattcatcaaacactgatatataaaagaaaaaagattgttacctacacaaattatatagacatatctagaagaatttacatgctctcattagttttcggagtcaagctatgcaacattttttccaataatttgtttttatcatgttttagatgaatatgtaatctgtagggcacgaaatagtacaacccacgagactacacatatcatcatcacataaaacaatttaatagttaatgatttcaattttcaacatttattgagatatgatgtggaaagattatagggaacaagtacaagttttaattgtttatcttcatattagtggctggtatgtacagtttgatattagttgctggtatgtcatttagtttgacgaaagaacaacatttttcttactattttttttctgtttatgtggcagtccacaatttttcttactctttatttttatttttttatttttgtaaagatctaacttcacttcaatctcacaaaaacacgaatcaacttcagcactaagaatcgaattgatcagaactgacaaaaagtaaaagaaaagctgaacacagagaatttaacgagttcacgttccaaaccggaacgctacgtctcgccggagaaacctctccggaaatccactagaacttggaaacttagtctctgttacaatgctttcaagctttctctcactacactcctctctctctttgatctcaacaaactcttatcccgatctaacggaattacagagaagaagaagaagatatagttacatagctcatgcgaaaagaccaaaacgccctcaagcttgttatgactttagtcagctcgcctcacgtgttatgactttagtcagctcgcctcacgtgttatgactttagtcagctcgcctcacgggttacgcttgaatcacaacagacttcgaaccctctctttcaccgagtttctcccacacttaaacccgaacactaaaatctgagtcatttcttacaagtatctcagctattctcaaaagatcaaaccctctttatgatccggtgggttcctttgtagactcaattttcataaaagcttgatcgatcgagattcatgcttcattgggattagagaagaaaagagagagtaatgatgattagtttctttatcttttccatgcaaaagaagaaaagcattaacatttgaaaaaaaggtaaagaaaataattaacactctttttttttttttgcctttttttatcccttggatttaaccttctctctttacctttttttccccttctcctttaatactttaatgatcactcctgtcccctttagatccgatgaacaccaaaaagcccttttccatataaaattaacatgcgttttttcttctttctaatttcatatctattctacagtctcatacctagctaatatctttttgaataatttattattataaacactaaacctcaaaattaatgcgtacatatatttttcgcagcgatacgtaacacaaagtataaatactttttaagtttttcacgatgacatacatatattagtaatattaagc

SEQ ID NO: 33550 - DNA, 966 bp, Arabidopsis thaliana columbia
tatatatatattgttacaaatatgtaattttgttagtaccggtgctaccgacgcctaacttaaagaaataaagacacacacgatttaacgagttcacgttcctcaaccggaatcgctacgtctcgccggagaatctctccggaaatccactagaacctttctttacaatgtatctttacaagttttctctctctagttctctctagaacttgattacaattctctctctttctctatctccgatctaacagaattacagagaagaagaagaagatatagttacagagctcatgcgaaaagaccaaaacgccctcaagcttgttatgaccttagtcagctcgcctcacgtgttatgactttagtcagctcgcctcacgtgttatgactttagtcacaacagacttcgaaccctctctttcaccgagtttctcccacacttagacccgaaaactaaaatctgagtcacttcttacaaatggaaaatcaagctctccaatcatcacgtacgaaaggtaaatttaaggtaaaacttaagtctaaacgataaatgcattcaagaaaggaaaacaaaatgtgatttatgttaaataaattttggtaattgatttcaaaatcatgtattaacttgctataaaaaaaaattgtaaataaataacatcatttcatttatgtaagtcaaaatatttgataccatattcattaatgtatacttgcctatatggacaaatacattagcttttcttttttttagcttaaaaatcctttccttttataaagtatatcaccctggatacaagttttctgtgtaaaggcgtaaacttaccacatatatatgacatatgtataaaccacaactcaaatgaacaaacatttgagcacactagacctaatttatattattgccaccacacgggattgaacatttaagtaagagatattatttatactttatgattagtttagttc

SEQ ID NO: 33551 - DNA, 449 bp, Arabidopsis thaliana columbia
ctcagtagccttctctctcgttcaactccaaccaataatttaattttaaatgcaaaaattcaatatatattaaaatatttttaaaatctaagaaatcatttttttccaacaaaaaaaaatccaattgaataaggaaaaaaacaagaattttggtcggtcctaattaattaaatttaatacaggtgatactttaccaaaaaaacctttaaaaccctataaccaattccggcaaaataaggaaattggcctttggtaaaaggaatggggaacaatttggataattaaaatgccgagaccgttaaattatggaagactttagtgaaaagaccattaaaactaaacttcaattcttttagaatgacagttttatatttagggaaatttgcaagaataactaacaaaaacttataaattaagaaagtaccacaaggcaaaaatatcagctatac

SEQ ID NO: 33552 - DNA, 575 bp, Arabidopsis thaliana columbia
tcaaaactctatttttaagtaaatttttgataaattttgtattcagcgattattattgtaaatttatacttacatttgataaatgttcatctttcactctcacctgctttcgatctattagtttttctacttccaaacaagttaactctacgtagaatctggagtagcctatttgcatattttctctgtgaagtaaagcttacagagccaatacaagccgttgtgacttggccaaaggtgtttttgtttctactcgctgatctttttccaaggcaatttggcttctttaggttgtcgtgggagtgaaggctcttctttaaagaaactagttgctcttcgaggttatggattctgaagctcgttgactcaaactcatccaatgttgcatctttctgcatcaagaagcataacggtctgtttcttggccccgtttcatcatcagtgcaagggctttgttgggaagttaagggtcttgagcttgggacaacactaccagagaagtctgcagagtttgtgaatctgaatgagtccgacagtctttaaaagcttggtgtgtgtcagctgttggataagag

SEQ ID NO: 33553 - DNA, 573 bp, Arabidopsis thaliana columbia
  unsure (1)..(573): unsure at all n locations
nnnnnnnnnnnnnnnnnnnnctaaagcacatagtgaggtgtccactccaagcattcttcattcaggcacaagccgtcacgtcacttttttttatcatcgaagaccatcatggaacgcttcccccggtccgccgcggacgcacaacaacttcttcagcttgccgaactgtttaagcaatccgccgagataatcgcagaggaatggaacaaagaggatttctctcggattaaggccgagaccaacagcatcaagagcaatctaggcagtctggacactgctcggatcctccctagcccccgtctgcacgaggcaacgcggactgtgcttgccatcacaggcgcacgaacggagctggtagcagagccgtacagtcgaatccaggaagttgcctgccagtattttgaatcgcgggcccttttcgttgctgctgagcgccgtattccagatcttcttgctggagcaggtgagtatgggctgagcgtcggtgagattgctgaagctactggaatagaagagcggaaactatgtatgcttcaagtgcttcccgatcaaacatactgtgacaaaagatga

SEQ ID NO: 33554 - DNA, 511 bp, Arabidopsis thaliana columbia
caacgatatgcataacattttatatattaccaaatttcgaatgattggacaaagtactattatcaagtatggagacataaaattctagccgagctctcatttgacttgattgcagtttaatgatcctttcttttggacatcaaaattactttcccacatatgcgatatatcaacaacttcgccaaaataagtacttttcacccacttccaaattagagtttttaacggtacaaaaataaatctttctagtaagcaaggtaaacatctaatttcccccgtgttctgtcattttcctcttataattcaaggattaattacgtagaaaccacaaaaaaccttgtgcccttgtatccaatgtcactttttccctccttcgtgcgttcatgtacttttcagttttcttgtttcccgtttcacccatatccagctctcccttttcccttccctattactatacgggtagcccaaaagtacctgctcttgggcagcacatgattacttctctctgatt

SEQ ID NO: 33555 - DNA, 617 bp, Arabidopsis thaliana columbia
tagccttcaatttcctgtttttgttttcgtttttctcatggctttgcgcattcagtgtgtggaggagaggatgcgaggactactgtttaatataatacgaatatcaaagcaggtcagtctactttctcttctcatgcctccttagatcttgttgtacctaaatctttctgaagttacaagagcttttgcagcggactgatgcagagaagtgtagaaatcggacttttatcacatctgatatccggaaagaaattaatgaaatgaatcagaaggtgaaagaggaatgggaaaagaaacattctggagaagaaaaggtaatggtttgtcctgagcttaatatctatttgtcttagttatcagtagtaatgtctagttttttttttttgtatattcattgatgtagaacaaagaaaatgatactgaaaaagaagaccaacgttcaaacgaagtgaaggtatttagaacttgagccaactacctaaacctttggagatatcacatacgtacactgaaagaggtttattgatcacaagtcaggcaaataagaaggacgaagataaagagagaccaaggctgcaaatgttgctgttcgtgcagccgttggaggagatgatagg

SEQ ID NO: 33556 - DNA, 589 bp, Arabidopsis thaliana columbia
cttagtcgtcgacgcttaaaagtaggtcccacgtctcccttcgtccgatagattctcttcttggaatgcttgtcatttcccttcacactcttctaaacaaattgactacacactttctactactagtactaattacctattttttatacgttaactatatcagtaatgatctaatatacacttcgaaatgtgtaaatatgtagtcttcatcgtttatttgtttgtaatattagtttatatcttcaatagaaaatttacacttttagcaaacaagttatgtttgtcgttgcactttacaaaagatggtaaatataacttctctcagctagttcaaaattcaaaaacaaaaagacaacatcagcattgaagatcagtgagctttaaagtttgtcaatataacgttatgggccatatctataagagatataggccctacatacactgtttcacacattttggttcgaagtaaagttgtaacttttaactgtacatttagaaagaaaaaaacacaccaaaaagccattattctctgctattacaatgacgaaaacgattatcaattgattaccgtgggaacgcagcgaggtgt

SEQ ID NO: 33557 - DNA, 364 bp, Arabidopsis thaliana columbia
tagtaaaggttgaaagaggaaaaaaaagtttataacattaagaagatttgaataacattaaaaagatttgaataattagaatcttgaacttgacaatatttcccgtacatcgcatgacacccccccccaggttatcccttaattttgaattcataatggtgtaattgtcataaattcacaagtgtgtaatattcacagctttatttttaattataggttttccattttaaaagtaatgaaattaaattttggtttaaaaataattaatagtgtagtgtgtgtagataatagatatagtaaatttatggagtaagtagaggtgggaattttaataaagttaaaaaagtattgaataggtgtagtt

SEQ ID NO: 33558 - DNA, 571 bp, Arabidopsis thaliana columbia
tttatattaccttaattctcataatgataaaaaaaatttctcttatgcaaattttaactgtttttaactaaaagtatgttcttggttcccgcgcactgactttttcaacgagaaaatcttttgattatttagaatttttcgtttgccgtagaaaatgattgaaaactttgttgattgttctattttatacagtattatgtttccacatttatcaaatacaaaacgaaaacctaaataggttataaaagtttgattttcacttatagaaacattcccatcggagttattttttggttcttccgttttcttttttgtgttttcaagattgactacattttgactccgtaagttatagaacttaatgccaacagactcgattttcgatttgtcttcgcttccatgtttttaattaaattttttcggcatgaaaccaatcaatacatttaaacaatttgcaaatcatattgtaaaacataaaaagaataaaaatcacataagtagtgaggataagttctttatgcttatcttacctgagggggttctagagtattggtgaccagacatgaacatg

SEQ ID NO: 33559 - DNA, 564 bp, Arabidopsis thaliana columbia
gatcgagtctttttctaatacactctatctaattgatgccttgcatctaactttttatatttattggtaagtatacaataatttttttcccgtaaaatgcgtatagatttggttgtcttggatttctataactttatgtcgctaggagaacccaaaagcatattaaggcgtagcaatttcactatagcacggaatgcgcaaggtgttggggttaatttggccacagcttgtatgtttggctacactcttaatttgtcttgtccatcaaatttttaatgtcagtagtagtcacaacatatggaaggtccttggcttatgctttacgtaaaaacaaatcaaattattgcttgtgattacaaaacttggacataattcacataatcattccaaaacatctcaaacagatttttcccccaaaatttatattaaaataccaaataaccgtcgtaaatagaggacgtagcgtcttccatgattttgtaaactgaaataaataacccaaaattccgattcgagaaattcatctgtaatcactttaatgatgatctttattaattgaataga

SEQ ID NO: 33560 - DNA, 230 bp, Arabidopsis thaliana columbia
ctattttcgtgtctttactatttacatagagattacacgacatggaaataatagtacatggtcaagtttatatacggacgactctcatgaaatcctacaacaagaaaacaaagcaacatatagtataatgtgaaatatacactgttaagcaacatattacgtattatagttatttttatgttaatgacgtacaatgtacaaattctagtattcttcacctgaattatttg

SEQ ID NO: 33561 - DNA, 491 bp, Arabidopsis thaliana columbia
tattaaaaattaaattattttatacaacacaataaacaaattaaatgtctaaaaaaacactagagataaataaataaaaagaaagtctagagcatggttcaaagtttggtctcttctttaaaagtacatccacatcgaagaccttcgacattatcaagagcaagcgacatcatggatccggacttaacaacacaaacctgcaaggcataacaaaaatcattgtgctggagtttttttacttgaaaacccaacactaaaaaaatatttctgggaccatacctttcaaaaccaagttggccatccatttactagtaaaagactgaaagcattatagatttaagcaacaaatgtagatatcagaacactaaagcaatgtagttatgaaacatataatatcaagctagaaatggtataattcagataaatgataacccaacaccaaaccgagccatcatctcccaaaatcttacaaggcaaaataaacaaaaggc

SEQ ID NO: 33562 - DNA, 553 bp, Arabidopsis thaliana columbia
gtttgcaatttaacggataactcgcgcaacagttccaacacccgagcttttgcattctcactagcttcatggtatctgcaacaaaagcataacatgatatatcaatacatacccagtattattgaataaatttcttttggatggttcaataaaacgaggaaacaacctgactaaagcaatttccacctttggggtcgtaaaccattcttctccaaccttttttcctttcgagtctaaggcaggtttcagctgttttatttggtcttcccctgcagtaccagcccagatagatggcgtaaaccgtttccccttgaaccaaacagactcatgctctcttgcatatgcgatttcgcctttcgggccaccaagtgaagcagtggtggccttaattcttgatataatacggtgaaaatcctcagctacctacacatggatgtcttgactcttacaaatccgacaagatcaccagcaccattatattcccccaaaccagtactatatgagcatctgtcatcgttcaaagaaatacagctgcaattgttgaatacttact

SEQ ID NO: 33563 - DNA, 544 bp, Arabidopsis thaliana columbia
atatgactaatttagtcggaacattacgattggcaatataatcataatgcttatgaataaccttttggttctaatgttattgtgaaaatactgttaaaacatgatttcatatattagtttatctttggaaacgtaaatagttgacaaacgacaatataaaaataaatgtctgctgttcaatttaactaatcattgaaaatacataaacgcacgtatatatagacattggatagagtcggtacacgtatcgtctatagaacctgctcgcacgtcaacttatactatattcaaaaacctcacttaaacaacaattgaccttttttcctaaattttattagtatttctattgaaaaaattcaatgaaatgaaacaaatcccaatcggtacggacaaaagtctccaataaaaaaggaattaaaaaaaaaaaggatagtgatccgcacgtagccaccactactgtcgttgaaaatccctctatataagattgtctcaaattcgattacttcatcaaaaaacaaaccaaaaacagaccctaagaataaag

SEQ ID NO: 33564 - DNA, 350 bp, Arabidopsis thaliana columbia
tttatttgttaatcgtagtggatatatatgtctggaaacgttggatcatcgacttcatatggtatatgcaagagaagtgaaatgaagttgtgtacgtacccatggtttcaccaccggtctcgtcaccgtagaaagtggcgtgacatatctccatgggcctggtcgatagtatccagcgacgaactcgccggagatggcgaaaacaacgaaaactattgagaagaatttgttaaagctccaagaacttgagattggacccattctagcctctttttcttaattcttagggtttgttttagggttgtctgttgatgaagtaatcgaatttgagacaatcttatatagagggg

SEQ ID NO: 33565 - DNA, 577 bp, Arabidopsis thaliana columbia
cctataccctatactctaagtccctataccctataccctatactctaagtccctataccctataccctaaaccctataccctataccctataccctataccctaaaaccctataccctataccctataccctataccctatactctaagtccctataccctataccctatactctaagtccctataccctataccctataccctaagtccctaaaaccccaaaccctaagtccctaaaaccctcagaccccaaacccacagaccctcaaaccctaaaaccctaaactcacagaccctcaaaccctaaactcatacaaaattttatggttagtgtatatcaacatatatgtttgtttgagtgtcgcattttgaaaattgaagttataaatagatttacttgtgtgaattgacatttcccattaataaacccttttaagttggacaatttacttagcaaatattttaggagtcaaagaaagaacattcaatgcgagtggaaacattgatgtcgaagttccccagatgtttcaccaaagcaaccacttgagctgtcaataaaagcttgaacacttgcata

SEQ ID NO: 33566 - DNA, 420 bp, Arabidopsis thaliana columbia
cgactctacacagaggtaaaatgtaagatacaatagttgagaagttgaacaaaaatggcataccaaacatgattgtagttaattgattgtacgaagataaatgcatgtagcattacccattactccgatccgtctctcaataattaatgtagaatagagaaatctctcttcatcatacaatgtcattaaagatatcccacacattaacaaagaagttcttactaaatccctaaatcaaatcaatataatgcattcttgctcatcaaaatgcaaccctcaagaattcaacgtctatacggtacaatagggaagacaatgtctaatgactcttcacatttcattgaacatatataagcagaaaaatttcaaactatagttgcagaaatttccagcccgtatgaagaagagaaagaaatgaaa

SEQ ID NO: 33567 - DNA, 497 bp, Arabidopsis thaliana columbia
ttatatcataacgaagataagattcatttaaataatcaaatgaacaattactgtgaattccaattagaccgcatattagtattaatgatgtcgtatctatttacaatccatgaacaatgaacctagaacaacaatccaaagcttttttaattttagtgaggtactaagtgagtttgacagaaaatgagtgttcagcaacaaaacaaatttagccatccctctcgatagtaattcaactatgcacaaagtatcttttcatttaaggaataaattaagacccacaaatttgacctatttgcaatttttttctttaagaattaactactattacaaaaacaaataacacaaaatttacattactataaaattcaccggtcggtatcaaggactccgaaaactctagccaacctcaaggacaagaaacagaggtaaatagcgagtaagccccaccgacaagcttatcaagtctcatcttcttctttggcattatcacaagt

SEQ ID NO: 33568 - DNA, 664 bp, Arabidopsis thaliana columbia
aatgacatatgtttactttactgtagaggaatctttaaattatagccgaataatttagttaagagatcttttcataaaattaattactagcttgaaggatggtttcataaaattaattacatgaagaaggcgtttaaaataaatatgccaattatattaaaatcccattataaaaaattattattctcatcttttattcctctacatatataaaaaaaataacctttctctttctcattacaattaggagaatataatttgacaaattaaccactttgactaagcaacttcaacactttcgccatcctaatccacatggtcataactcataagtcataaaccttttagtggaactagattttctccatgacatcttactggattagatcaaagatatttttaaggaacaaatcattaatttatattataaatcacaggagaacaataaagaataaggaaaatgcatagaaatgccactaaccatccacttctatggctatttccgcgaatcaatgcaaagtcattcatttattcccaacttgccccatatgttttcattttcttaatcacagattcttctttattatttttaaccatagaacaaagagaatataacctttaaattttcactcatttcttcatcttcctctccacaaaacccatt

SEQ ID NO: 33569 - DNA, 288 bp, Arabidopsis thaliana columbia
tggaacaggatttatagatctgaattttgtttttagaaaactcatcaaatgatatgattgtggcctgttgcagactcaaacaggaccaggagataggccgcttgctgagataaggctaaaccgtgtgacgatccacgccaatccacttgctggctaagtctaatgtggcagaaccgagccaagccaaaagtgttgttctctttatttgtttcgatagagctgacatgtacactcagaaactgaactaagaccactgttatcaccaattaaaaagtttgtactggagga

SEQ ID NO: 33570 - DNA, 596 bp, Arabidopsis thaliana columbia
caccatctggatctggctctagatatgtaatcctaagactaaaacaaggagctgaaacttttctgatctgagcatacaatctaggcatctgatccaccgtattattataaatagcccaggtttgaccagcttcaaactttactccttccctcagcctatcaaagtcattaaatttcaaaccagcacatccagaaatcttttgtggtactgcacctgctgaacctgaatcacacaaaaaagagttattatctgcctcaagattctgagagatccccattgcaactcccacttgagcattcatgttaaagacatctggcaatgtttctttgcaaagatcaatttcatggagttgctttccgcttccagactcttcttctcctgcacctccaatatcacctgacactcttttattgcctagatttacgtaacatcttcaggcttgctgcgattttcagtataaacaatttcaccatactcattcctctttctcttctcaccaaccttaccagcacagctcaaaccaaatgagcatctatttccaaagaaatgtatgtctggattcttacttgggactttcttctgttgttgcaaggaga

SEQ ID NO: 33571 - DNA, 440 bp, Arabidopsis thaliana columbia
gggacacaatgtttaacacatatttctatcgtactcgcaaatgttgaaaccatcatcgtaaataaagctacaatgatcaaaacactgtatatcttttttattgtttgagtcgccattatttgaagagatgaatttatgagtgtttaagcttattaaaatcttgtttgtgttatatagcaaaaaaataattagcaggatgattaatgttgagttggcttttaaaactatttttactttctatagcaaaactatttttatccttttaaaattatttgtgtggggagtggatgtgtggggggggttattttaaccaaacggttttgtggtgcatttgtgttactaataagtgagttttggttatgtattggctgtcctaacaatctatcctttcaaattgttgttgtcaagaaacctacctaatttggtgtaaagttgtagat

SEQ ID NO: 33572 - DNA, 804 bp, Arabidopsis thaliana columbia
ttgaaaggcatataaattattcattaatgtatagttaagagtctgatccctgaaatgagactaattaaagcattgtttgcgaggagaataaatgaataacagttggtgttacgttttgtcgtttatcataaacctagtcaccaatcacgcttaattagaatccaatttacaacaatcgggagatatttgaccatacaataaaaataattaaataaacgtatttattgttttactaataattcgttgacagagactttgatttaacaatttatttactcgtatcacaattagaatcataaagacggattagaacaatctcctaacgatcttgtcaatgaccgaaatagcacgcgcatcccgcaaaccggccactaaggttggagaaaaagtcatttgtagccgaaattttaaatgtcatatgatcatggggtcatttttgcgtaacgtttctatctatgtatatacctattgaataagtaggtaaatgacacaaagtaagacttaattagataaataacaaatgctaaaattcactactagaaagataaacagatacaaagactagataagaaacgataactaccgtaagcaatttgtctctaaagagacgtggtcacaaatatgcatagctaaaccggagatgcaaggatacataagaagttagtttttccaaagctactccaaagtatgatgttgtcacttgactggttgtgaaaagcaaagttgcaacataataaagaatgattaaatggaaccaaaatgcggatacaaattgcgtattgtgtgataatatttctaagatta

SEQ ID NO: 33573 - DNA, 480 bp, Arabidopsis thaliana columbia
gattttgtatcttttaagactcctcctttctcaagctctccaacgaggtccctaagagagggaaccttcatggctagagttctgtagagtctagagtatcgagcccgtgtgccatcagctgttctagctaaggccagtgaacttagagcttcgggcaactgaccaaacacttgtttcatttcctctaagctcatgttttctaaaaccgaagtccttggcacaactctcactatttcgcctcctttaggttcttgaatacgggcatccgctttgatcacgagctctgagttggagttagctccgcattttatgatgaatggagctgaagagcctcctgtgttgaattgcaaaacattccattgagacacatcggtttcagtcgaagatattgaatctattgaaggtctcttttcgtcttgaagattgtcctcttgttctggaattgtctgcagtccaataaaaaaaccagcacgtaacaag

SEQ ID NO: 33574 - DNA, 561 bp, Arabidopsis thaliana columbia
ctaaagactgcccaagaataagttatcaataaccagtttgtgatctctgaagaatattactaaagttaaaatgtaatccgatttaaatatcgagtctccttgtttcgacttaagctggcaattggattgccagctttcttttaacgcattgaaattacctgagtaaataacgcattcatgtcttcaggtttttatatagcgtctggagacacggatatttatgcaatgtaatcaacgccagttgcaaaaaaatgaacccggattacttatttaaccgcccatagcatcaacgcttacggaactctttgttcactttcccacagcacttttaaaacattaaacctgactacggaaaatatcagccatgataatgtttgaaatggctaatttgccatagagtgaaaaaaattagatgaaattcagtaggttgaaataatcactagcaggtaattatttcaatgatagtgcgcaattgatctacaacactgcgtacgggagagagtattaatcggatcatagtcacatcaagtgactatgatcagggtgacaaccggggtaatt

SEQ ID NO: 33575 - DNA, 545 bp, Arabidopsis thaliana columbia
atctcgtaatttcccagcgactttgaaacactctggacgcctaagagtcttccaggcctctggtcaactttattgactttcgatttcgactactgtgtttttaactgatggttttttgtcttaattggcacataacaagaataatagtttaagtgttgtgatccaccctggtaacaagatatactgagagtagagtcaaacgttaatggagaatgcttaacaatctcgtattacagaagtaacatgtgaaagaaaacgatgatggtctcttagtatcattccaacgctaaaacagaaacaagtaacaagtaatcgaagggaaaggtgaagatatgttttgtaactgcacgatagagtaatgatccacttaaacggcctacgggaaatgcaacagaagctgctcagaaaccatggatcttgatgttatctttcttcacagagccagcctgttcattgagacgtatgagaaacatgatcgagtaacaatctttttgttagcctgtttgtgaaagagtgtgatttttacatggactaggaacgtggag

SEQ ID NO: 33576 - DNA, 458 bp, Arabidopsis thaliana columbia
taataaagacaaaactaagttgaaaaagatagaattccacaacaaacaatgacgcaatcgataaccaagtcaagtcaatatctaactaattaaatagcaaaatagtagtagatgttaacataatcacattcgtaatattctgtaatgacgcaaactcggaggatgcagcgacataagaaccattacctaacaaaagtaggaaactctcttgtaatttgaacaatcttccaatagtttgtccattatattatgttttattagtgtactatgtaatgcaagattcgaacatatgtctaattgttctacatggaccaggtctcaacattatgaatcacatcagatagttcggaaaactctattaaaatgactactaactctataattgcctaattgacatccatatagaggacatacgctttcgtacagatggaccgtttaggtgtcttcagatacgacct

SEQ ID NO: 33577 - DNA, 400 bp, Arabidopsis thaliana columbia
ggctcatttgccagacaaggcgaacaactatctgactccggctttatctgtacttgagaagaacacatgagaagaagaatcattgattccattttgtatattgtacacatctcaagctctgatacgcattacatgcatatatacatacgtacatgtataacttgtacatacaagaatctctttggtctctttatgtccattaccatttatttcttatattcaacttaaaatttgtgtgctaatacaaacaatccaaggccaccaacataataaaaagggtgtgaaaccagttttctattacacaaaactcataatattttgaatgataaacataaaaagtatcttcattcattatcagtaaacattgaaacttcagaagatctcagactttgtcttattt

SEQ ID NO: 33578 - DNA, 579 bp, Arabidopsis thaliana columbia
taaaagagtgtttctttcaactagtaataaagcttattttaaaagacgttaactttatccttctaaatagagtcttagaagtataagagagcatgattaatgtcccatataagcattatcaacggctggttccgagtctgaagacaaactatgagcttagaattagaacttcctgagttataaaaattatttttctttttttttgcatgttttaaattgtttttttgtagtgtaaaaacagtagttttttcccagaagataagtaaattagggtttgtttatctgcttccaattctatggctaattaatttggatactaattaaagcgttaacagagaggacgtatgtatttcttaattagactccaagtttttcttggcccatttggatcaaaagaccaattgtatgggcccataaatgacctattctgattactagagattgagtaaacggctccactttttttttatgagcctgtctcatgatctctcattctctcttcaaatctctatcccatatatgtatgtttattagtttgaatttcatttaaaatctaattttaaagtttaaaatgttagt

SEQ ID NO: 33579 - DNA, 601 bp, Arabidopsis thaliana columbia
agaatttttttatttattttcagtccatagttaaatttttagtttagtttgaactttaatagaacccgattggttttacaaaaacaatcggttcaattttggtttatcggtacaatcatgactcagagatctgagaaccgactaagtcaattacagagatcaaaagaccgaagttcagacgaaacaacatgaaaaggatttggttttagacttttagtcttaaaactaaagtctcttatcatgtagcccaagtctcagacatgatgaacaacaagccacgaaaaagataaagagggcaggaagataaacagggtagtgttcaagtaacatggacacttagttctcttattgatacagatccttattgatgaagagaaaagctgtgtatttagacattaggaggtggccaaatcttcccgaaaagctcatcaacacgtttcgcttggttcgcataaccttcaacaccggctgataaaagctccactgatgcaggacccatagatgaagccaagcttagctggtcccatttgaccagctaaaccagaatcaaacagacacgggtgagacactggtttagtgaaccgagagcaaatgagtgttg

SEQ ID NO: 33580 - DNA, 357 bp, Arabidopsis thaliana columbia
ctaaccaatgtaaacatgataacaaaagatcaaaacgaaaatccgatctctgttcaatatttcagaaggcaagaaaaagcacaagaatcaatctcctgcattcaggagaaagaagccttcttggagaaccaatattcagaaggaagcaagatcgaacaatcattgaatcaccaatacgaagaatgaatcacagatctaacttgcattgatccattgtggctatagattattaccttgttggttacagacatcaatggtggagcaactagtgatgacagtgagacacatatctttccttttgagccatgaattatggcttgcttcaggtagatctatcgtgaagattgaatgacatca

SEQ ID NO: 33581 - DNA, 607 bp, Arabidopsis thaliana columbia
tgttagatctcaaatcatgtgacctttactaaaatgaaatgaatcaatttgtcacaagttttcatgtcttagatccggtttataaatagtaacggataccaattgagcgataatttgaacccggtatgatccggttttgtgagatttccggtttagtataaagcagaaaagggttttacaaagtcgaagcctttaaaactaagtttcttcttcttcttccttgcgccggcgggttcactatctctcttctctctctcaaaaaccctactcaagcacaagcttcttcaatcttctccgtaatcaacagtaagttttcttctattccttctcaaagggtttgtgtcaatagaatgataaaccctaattttgttcatggttataatcttaagtccttagataaagtatcgaactttattgtcatatagaaggtaacggaaccagttatggaatctctctttgcgttggtgacttataaccctagtttctgtgattcgcaagtttttttttaccaaaggtataaagtctgaactttttgattctgaactaattttgtttgttgtatcgaatttgagtagagtcatggaagagatatagacagatgatgaga

SEQ ID NO: 33582 - DNA, 434 bp, Arabidopsis thaliana columbia
cagggtagactatccccggtacctttgatatgatctttatctttctctttatttctttctcgatctttctgctccatcctctcccgttcccacctatcggattccctttcttctcttccattctctttgggttcactcatgacactaccaacaagcacagatactcgacggtcatttctatccttgtctcggtccccccattctcgatgctttaactcttttcttttcttatctttttccttaaatctatcttcgtttttggcatcaaccttgttttctccgacggtttcacgtccttccaaatgagacccctccacaggcgcagagagatctttaggcccaacctcagttgggccttgcggattaccgcgggatacaacccacgggtccacatttgcagtcgaaccttcagcaactctcttccctctatggta

SEQ ID NO: 33583 - DNA, 441 bp, Arabidopsis thaliana columbia
tttctatttattattcccttcgttttttatttttttatttcatttgctgttctttattttgtttgctgtttttttcaagtttctaaaaaaacaattaaacgtcttagaaaaacccaattgtatcatgtagcataattagtttttttttttaaccagtaaatggtaattttttttaaaaaccttcgagcttttagctaaaacctaatatttttattgtcgtactttttgaatctcttttgaagcccaatacttggtgtagctaaactagcttaagttttgcgagtctagtgagaacaagtttcagcgtaaaagaacttgtacattagcaagtttagtcttaacatttcaccttcttctttcttgtaccaaaaaaaaaaaaaaaaaagtttagtcttaacagtttatatttatcatttatcagtaaaggtccaaggcttgtag

SEQ ID NO: 33584 - DNA, 501 bp, Arabidopsis thaliana columbia
agacagttaatgtagtatatagatggggttgagggcaaatgattacttgggagatggtgcaatgcatcagagtgatgatgtggaatttaataagtgtgcatttatgggcaaaggaagggaactagtagtagaaagggaaataaatacagtacaagtaagaggaaaacgaaaagagagatagaaaccataataatgagttaacgcagacatagccgccattttcaacttctcactcccacttacaacttctccttctgggcaagttttccacatcaatgctcgtcttaatcaccattaatctctactcatcattaatacgttgaagcccactatttcaaaatttactaggagtatttattcgtgaaaaacatttaaatgtccctaattataagagatttaatttcatatttattgtattaaagagaatttacattagctgtcgaaaaaaaaaaaaaaagagaattaacattattttacagacataaaattttgaaaatagat

SEQ ID NO: 33585 - DNA, 732 bp, Arabidopsis thaliana columbia
taatttaattatttatttataatttataatttatctcaatttataatttataatttatttttatttataatttgttggtaatttttaaattataaaacattttgttggaaatttagtagaatatatcaacatatattcaactggtaatctatgattgggaaacattctaacataaataaccctataaagggtaaagatttacatggaatgctattaggattttttcaaactaagacttaatggagaatttcataaaaaggtattttggacaattggctgcaaactgggacgcggatcctggatcttttagtcggatctgtatccacccactgatgatatcacgcggatcctgttcaaattaaatttcgaattagtagtaaccaattagacttattgggcccacaaaatagaaagaccaatcctcttaaaggatcttaaagtcttcagcaacatttaacatattaaagaaatctgcagtaaactaaataaatgcaaatcttaccataacaaccaaaggtttggattattaggcaaatctttgaatatctatgccgtttacattaactaatttcagtaaatgtattaccataacaagcaaagttttaaattgaaatttgtcactacaaaaatcactgaagtcacgcaaatcacgaaaattaccttaccaaactaagcccaaatattctaaggattatgcaaaacttatcataatagtcccacggacggttttac

SEQ ID NO: 33586 - DNA, 573 bp, Arabidopsis thaliana columbia
ctttgagaaactttccttccatttgccgatggagatggtctaattacaaaacaactcacgtaaatgattaatctacggacttaaaattcgataacataaaataaaaagaaaaggaacaatatatagtattaattatgcattggtgcacataattagtgattgcaaaattcacaacgattctaaatcccattagattgtgaatttggaatgtggatgtcggtgctatacacaaaatgcacacgattagcaaacttagatgcaagtgcaacgcgtcaaatttggggagctaccaaagaaggatagtaattactcattaaataaaaatgtgactactaagtttggggagaaactgaggattacgtatataaaagtgtggggagctaccaaaagcgagatcataattactcattattctatagctcttaatctcatttactttctacaccatcttatatcatcttcttgttcttccattgggaaagagtcaaagagagatcgagagagagagagaaagaaagtatgggaaagaaaggagaagggttctttgtgagcagattaagggctaatgtaaga

SEQ ID NO: 33587 - DNA, 569 bp, Arabidopsis thaliana columbia
attaaaagtacatagtccatttttctttggccaatacacttgtgtatggtttagatttatacttgtgtatggtgttaaatatacttgtgtttggtttagatttaaaagtaaaagtgcttcgacagcgtgacaggtcctaaattcttaagatgatggcactgcttcttggtttataacaccaactccaggggaagcagtgagtcctgcttcgaggactgtaccaacgtctaggggaggaggacatcctaagtggtccttaaagcccattccaggtgaagcaaaccctccatattggttctcagtaaaatcattgcctactaggttggcatcaacatcatcacgggtttttctctcactttctaggtacaacataaccgatgtgccaatatcctcttctccagcagcaagtactggcctcacaacattaggtgtgctttcagctccttcggcatgtgccatatctaaacccgatgggctgaaatcgattggatactctctatcaaaagctagagtccaaatatcttcatcagagatatcccatctgaacactacgacccacccattagtgt

SEQ ID NO: 33588 - DNA, 631 bp, Arabidopsis thaliana columbia
caaagagccaaacgaggattgaaaaaaaagagaggcaaactgatttttctcaacaccaaaacagaacatttaatagtaaactcatctcaagcattcatgatgatggaaattggaacaccttttatgcttatttattaaatgtacatgctctaattctcctgaaagtctcactattcataacttcatatccttttgtatatatcattcctaaccaaaaaatgaattcaaaagaatgtgtacagagaagcagcagcctgatactgtgaagattatatatgatacttacaatgctgtaacttttgaatacaattgaaagtaacaaggtgatcatatactaaccctaaactatggaagctacacaatgtgaggttcatagagctaaaaataggccaagagaagcaaaggatatggttagagaccatgatatgattatgttgtagcaagaattggcaattgagaattaaagacatgaggatctgctaaagcaaagttctctggtaaacaacttagcaatgttatacaactgagaaatcctaatcaccctaatttccacgacttaccaaaacctacaaaaactaagtcatgaatttccaattcctgacatgcgcggaacaagtagtccaacaagaga

SEQ ID NO: 33589 - DNA, 548 bp, Arabidopsis thaliana columbia
gggacttaccaattacaattacatggctctgttttgcggaaactattgcgagctggatactgttttgtgggtttggtgtgatatgtcatatgtgttctgtctctctgtacccaaatttgttaatgaggtgaccagcaaacgaggatattgaccataacgattatgactttcaggtcagtagtctcgtccggtcgaggatcatcaaagcaagtctcgtctagactctagtcctctttaatagcgaagaccttgaggcaaactttcttgggaaggactcctgataaccagtagagagctattgaagctggattaacattcagagaaataaatgtgaaagtcaaaaaaaaaaaacgttcgaaagagagaatccaaatgtgaaaaatcagaacacataagcaatgacgtcatacttgataagttgatatcatgaattcgtggcacactggagaagccactataaaagcggccgcgtcatcgataaaccaaagaagaagcaataacaacatttggtgaagtcagaagaatcaacgatgacgacggcgacgaac

SEQ ID NO: 33590 - DNA, 456 bp, Arabidopsis thaliana columbia
catatctagtacgagtgactcggccaagctgactctcccaagtaaaaaatcaggttaagaaaatttgttttaaatgtggtgaaaatttgggtttatctgaaacaattacacactaaatgtaaacgtaaaagtatatacaaacaattgaggtagaccgtagacccatatcacatttcccatggatagtatgatatgatcatacagacttaacagtttttccacctcaatcagttttgaatgtctcccttgttgacagtatgcacatttcagcttttctaataagaaatatttcttcaagacactcttagatatcaacattagtgcatggtcaataaagaacagtgtattacatcaagaggacatgtatatacatgcaaagagagggagagaaccacgttttggtggaaaaggggaatgaagaggttgacaggcgttgcctttggtgacattgcatgg

SEQ ID NO: 33591 - DNA, 578 bp, Arabidopsis thaliana columbia
tgatagtgtctgctccacccaaacacaaacgcagactatgaaaaatcataggaaatgacaaagaaactattttaggaatattacaatttaggtagaatatcaaagatctcctcaatttgctgtataatggtcatctaatttccaacttatcaacttcctttgttaacaatttaggtagaatatctaagatcttctttctattattggcgtcaatcagatcgattataatctgtcaatatccttcaaggtgtcaatcaagttctattttgtttccctctttcctctctcctcttgcccttgtctctttataacatgcgagctccatttgtacatttttcttgattttcaagtctcagatggagaatcttgggttgttcaaattcttttgctattctgtctctttgtctcggtccgcatagtttctgtttcttgtttaaattcagatgggttaactttactctcgcttcggaagcatttggacaaagtaccaccagaattaacttcgacatggaagactaacgcatctgaagccactccatgtaactggtttggtattatctgtgatgattctaagaagg

SEQ ID NO: 33592 - DNA, 488 bp, Arabidopsis thaliana columbia
gtagtcaatattttcttaagattatattagtatttataaattagtacaagacttaattagactattggataactttatctattttatttagatattgtttagttattttattaatattcataattatttgaagatattttcagttaaagtcttaattattttgctagattttgcctaaaatcagtaaaactaattcagctgttaagtgttaccaatgaaaaaaaataaaaaatcagttatcttcaacaaaaatcactaaaacttgagctagattaattaagcaaaaaaaatcagttagattctggttaccatttagaactttttttttttttttttgtacaaggcggttaccatttagatgtctcaccgatattaaaaggtttacgtggtaccttttatgtgtctttgattcctataggcgcgcgcaacaacagatctatggaggagaaaacctttgttgcaactggtaatgactatgacgacgacaa

SEQ ID NO: 33593 - DNA, 443 bp, Arabidopsis thaliana columbia
gaaacaaacgtaaagggcactattgtcttttaatgaaaaagaggaaagaagttcactttcacagcgaaacagtacctggccatggcgatcaagagaaaagttggtgcagtagcaatatcaaaatgtaaagcagacaactttattgttctaaaagcagagatttcacattttgttcaacgtacgaggaccccattcatactcaaaaggaagcatcataaagctttgaaaaggagaaacatatgaagagtgtgaccttacaccaaacagttttctatggaatgcatggttttcaaagcaaatgacctaagagagaatatctgacagaagttgatttgccgccgcctttactgcatcttaagctctagaacctgcaaaaaagagttaagagacttagtggagacgagaggtgactaggtgagggaaaagtcactttctaagttaag

SEQ ID NO: 33594 - DNA, 523 bp, Arabidopsis thaliana columbia
gtagttatgattcaattagaagtgttctaatttgttttaaaaaaaaaatcgaaacccaacttcgattttttgacagtcatggagttagagagattcagggtaggtcttactccaactgtattctacattcccggtttcataactgacgaagagcaaactcagctcctaaatcatgtaaaactctcctctccaattgtttaagcatttgacatcttgagattatatgtactacccttctgctgtcttgtaagatatatggagcatctggttccaagtggaagacattaaagaacagaagattacagaactggggtacacttgcttttacttttgtcttcattagattgtcttcctggttgttgaagagacataatacagtcttgagcttttggcttgcctcttcaggtggtatggtccatgaaaaggcgcttgttccacaagagtgtaagtcagaatgaaaaaaagtccaatccaatcattcttgattatcaaaggttctagatactagtgtatgtatatatgt

SEQ ID NO: 33595 - DNA, 679 bp, Arabidopsis thaliana columbia
ttaacggtcttagccccaagaaatctctcgtcaaaccttctcctccaccgcttttagtactcttctctgatcctgcggcggctgtaacttcgtttgttctcaagaacccgccaaatgtatcgtcgaatgcttcttctctgccgtgattatcaaacccggatgcgttgtagtcttgaaacaaaacatgattgttgttgttggagctgatgaatccagatggtgacgtcatcatcgccgccattgtcgttgtgaggttgttattatgagttgacctctcgtaggccgtggttggtggtaaaggaggtgtctttgtagagcccatttgggctgctttctggagcaatgcggtggctgacatagccggagaagcaagagagaacaaacttcctcctcctcctccaccattactagggttagggtttgaagatgtgagtgcgtgaggctgaggagcaagccaaggagggatgatactatggtggtaattcatgatatggtcattgctttgttgctctttcttcatgggaaatgtatggagatggttgttgctgttgttactattattagtattacgattgttggtgtcgaagtgaaggctattgatgatgttgtggttgtgggaggaagatgaagaagaagagacgtttatggttggctgtgcttgatgatggtgatgaggatg

SEQ ID NO: 33596 - DNA, 303 bp, Arabidopsis thaliana columbia
tcaagtctgcgacataataccacagaatgtgtagatctcttaaagcttttgaatcagtaccaatttacacaccacttgtaaacatttactgcagcaaagagattcacagccgcgcagactcaggtcgtcacatgtctagaaaagaagttgaacttcatgtactagtaaagatcatcgcaattgtttagagaatttacaaactacatgattttttgtgcaattgggaaaaaaaaacaattttcagattgactatctgcatcagagacaacaatttgtagcatcgttcctctgtctttggttaca

SEQ ID NO: 33597 - DNA, 551 bp, Arabidopsis thaliana columbia
acagcttctggaactgctgatcaatctgtgtacgatttgatgatgaagtcagattattgttatacgtccaggatggttgagatgtcggtaagggctgcatccagagaagacaaaaaaaatggaaaaggcattgctggtaagaaatcacatggattttgaagatgcaatgattatatagaaatcctagattatgtactcaatgcaaactccaagtcttaccttgttaatatcaggtctggagtatgaagctttgtgagcaggaggccactcaacagcatctgaactatatgatacgaccgggagatcacttccatcctgacgggattcatcctcaactctgttcagcttatccactagctggttgaattccggtttcagagactcgagctcattgattacagcacgcaacctctgtagcacaaaaaaaagaccatatctgaggacactactaagtctagtaacactaaacaacattcgaaggttaaaacagaaatacctgaccttcctactcccaagtctttcttgtggaagcgatgcctggtaatctcgat

SEQ ID NO: 33598 - DNA, 517 bp, Arabidopsis thaliana columbia
agaggatccccttgagaaaagagtaacaaaagaaggtaaaaaattaaagtttgaatttgttcctacagttctcaaagaggcaaagaacatttcttcaccaacaatcaatacctaaacttccctagtttttttttctatatatggctttcactctttcatcttttcttatacttttgctaacctaaacaaaaaaaccaaacttatcaggaaaatggggattaccaccgctcttctcttagttatgcttatgtccgttcacacttcctcgtatgaaaccacaattttaaaaccatacaaagaagataactttcggtctcttgtcgcgaaagatgccaatttatcgatgctcacgagttgtgcgtctctaacatctggacacacgtcaaggaatcgggtcacgggttaacccgcattcggtttacgtgctgcggtaaaggaacacatgcaaagccaagttacaatggaagaatccaacggaatgatgttactatcggtcgcgtgcaagttgcatagagga

SEQ ID NO: 33599 - DNA, 546 bp, Arabidopsis thaliana columbia
cgtacacagattgatcagcagttccagaagctgtgagtattctcccttaatataattgtcggtaattctgcttaataggaattcaaacactataagctctctgagctttaggaaccctgagaaataggggtatgccatccgatatgtgtcactggttttcttgctttacatctacctgtttctgtgatcaccatatatatacgatgtttgggtcacttattagttattaccagaaaaactaccattcgtgatggactaaactgccaatgctgcttggattttctatttatggtatcatgtttattggttgcgttttgtggaattcttctttggttttgggatattgaaacaagaaatgagtctatgagactcaagtgctactccatattaatgtgggatgatcattgagactttaattgtgctcctgaacctgcagatcttttgatttcctgctccaaaccaagcaaccttgtcaagacattcatttctaggtccgaatggtcttaaaaggcaatgggttgcccgaagtcagagataaaggtatag

SEQ ID NO: 33600 - DNA, 487 bp, Arabidopsis thaliana columbia
ggcttcctacagccatatagaagtataatctcaaatcattatccacacttggaactatctctaaagctcatttgttatttgatggcatttctagttcgatatgccactccttaaatccgttgcgttcgtgaaggatcaatggggttcaattcaggtagctaggagatttgtaccaacttgtagctttctagaattccttgtacaatgtgatccaagtaaaagaaagaatcggttaaaattttcaatataaaactttaaaatagactactagtactagtttgagctagacagtgactcatgtagaaacaatctctacaacataaaaatctacgaaccataccgggttaccaaacgttcttctcaatctcaccaatcggtttaagctgaaaacccgaattagcaaaatcttcgttcgggctgttttggttaatccggtttacatgttttctcattgctcattttcattttcccgccgtgacagagcgcg

SEQ ID NO: 33601 - DNA, 585 bp, Arabidopsis thaliana columbia
gtttacaaatgttctttgtattaataaatagagatgttgttgatacgtaaatttcagcttcagatttttaataaaattatacattccttaataaaaatgtgtgaaagcatgaggaaccacacaactcccaaaccacacgacattatcgtcatttacttgggctcatacgaagcgttacagtattagtaaacgccataatttaggaaattttcagtatagttatacaaatctatactataacttttggtactgcgctttagccaatgtcattaattcagttacgtaacagactccaacgccaaaacattagtataaacaatattaagaacgtggcattaccaacaatccaacaaagatgttctcacatcgaaaccaattagaaacctaaaagatatagtgaaggttgatctctttctttaacatgccacatttttgcatttcttcctttatttgcgaggttaaaatatgttcatttgttaaagaaatttataaaccaatgtaaaccatccatttaaattctcattcacaaatcaatcgttctaatcgaaggatgccaagaataaaagcattgttgtcttgttgatt

SEQ ID NO: 33602 - DNA, 479 bp, Arabidopsis thaliana columbia
ataaatttatatgaaaaacaaaagatacatgggttcttattttagtagctaaacaaattatccggatattgataaaaacaaacttaagactaatacaacatgatagaaaaatggatctcaagaccctaaaacaaaagtgaaattcgccaccaaaataggccacttgatttggctgtagactaaccattgacaagggcaacatatgagttccacactcaaaagttaattaccacctcatcatgtcttgagttctaacttcttaacccatggagggcacatgatatgatagtcgttgctataacgaaatatgacatgttttaaacaataaaaagaacagaagaacacgttgtagccatcatgatcctcgccgtagccaacaaaattaataaaaaaggtacctgggcaacgacatttacagttgagacaaattggtcgtgtagaactactgttaagttgcaattcaaaccctcacagatatt

SEQ ID NO: 33603 - DNA, 644 bp, Arabidopsis thaliana columbia
gtataatagcaagagattggagcaacaatagtgtactatatgtatctggttgacatttttctgataatgataattttgaattcttggatgataaataagtacaagtttaaaattttggctcaactcagcttctctctgtttcattcctctgttctaatttcttaatcctctacatacggtaatttggctgattgagaatttgggtttcatataatcatctccatggattctgaaagcaatattctataggagaaagggtaaaagaatagaccaaatatttaaggcagtgtcttaaggaacataatgccacaattgggtcagatgaataatctttatcattgtaaagcctaatattaagaagaaaaaggagataattggaaaccaaaagggagattaaagtttacatacttcataatggtgaaagttcaagcaaagtgtgtgtagattatgactatattattgttttgttttacaaaaaaaatgatatattcttgatatcttttggaagtagcaagcgaggtatatgatcaacttgataaatagaaataacgaagtatttgtcggcgtccacataccaaattttcttcacacatgaatataataactcttagattgctggttattatgtgaacatgtttttgaat

SEQ ID NO: 33604 - DNA, 546 bp, Arabidopsis thaliana columbia
ctttatttggattttatagtttttgagttttcttcgtttttgattctctctcgcacagatttgttttgatggctttcccgtcactttcgccttttcaggttcttccgttttattttctcacgttcttctcgataccgatggttactttattttcaatttgacccctttactccgatatttactttattttacaattttacccctttactactttattattcatttaacacctcatccgtgccttccttgttaaagtttttaattatgtgatctataatgtattatgtactttaacttattattattattttataataatttacttaacttagttgatcctgttaatttatgatatatcaatttagtaataagataatttatgtcagaagcttattataagatgtgggcttattctaaagaaaagattatataattgtggatagtgttctttttgctgaggatcatggatggattttacaaaatcttctctcatgtgcattgtttttgataaagtttctctcataattaaattcttgaattagacag

SEQ ID NO: 33605 - DNA, 402 bp, Arabidopsis thaliana columbia
tctacaagatccctccttccgtttttaaatcataaccagctccgtttagcttgatcagaattacatttctgaacaacactttttagttcagccaaacactttttatcaagtatcatgaaatttgaatcttaggaaacattttgcattatttcttcttctctaaaatgacttgggttgattccattctcacacaccaaaataatttcacaagaagaggaaaaaggttaagcaatgtgggtccaattaacgtcaagttgcatgcgcaataaatcacccgaagtgttcatatgctatatagtctatcgctttgcttcgtcgttctctcttcactcatatgtttcgtcccaattctcttttaataccttcaaatttatcaacaacaaaaagccaaagaaacacaat

SEQ ID NO: 33606 - DNA, 357 bp, Arabidopsis thaliana columbia
ccttcttcaaaaaagaaaagaatagaagaatgagaagttttctcaaatttttggaaaataattatttttgtcacagttagttagcgaatggagaagtagaaaaatcagatatttagtgatactttcttggggattcttttgatgtttaattgaagattggctcactgattttatctttgaaggtcttagtaaacgttaatagcttgacgttatcattagaaactcaaaaaacttaagtctctctctaattattagctttcaggtttatcgtggaaggacttgtcaatggcagacgtacctggatacctgcgcacttgtttggatatggggaagatagctttcttagcaatccttgta

SEQ ID NO: 33607 - DNA, 491 bp, Arabidopsis thaliana columbia
agtgagctattaacaatgttgctgtgaaaaataagtaaatgaaatgtctcgaaatttagaaatttctgaatcacatcacactactgattgaatattcatttcttttaagattttttcgaaacatgaaatttgtctacacgtcagaataattagataagactttatatgctgtaatcaattctcaatttttttcaccaagtgacaacctaacatctgaatctaacttgaacacgtctttacaacgaatcgacgtcaatttgtaacaaccggaaaagtttatgtagtctataaacactattatcaatgcatatataaagtataaactatagacaacaagagactacaacaacagaaacacagtctaacaaggtgatcacaacctgatttgcgtactactaagagtttgagcaatggctagagataatcagattcatcaatgatctaatgtcttgccttgatgctgctccagagattcaaggagtgataggaat

SEQ ID NO: 33608 - DNA, 494 bp, Arabidopsis thaliana columbia
tacttatttgcatcataccatatatcttctataaaaagatgcattttagtgacttagtggtaagaatatccttttttttttttttttgtcatatgataattattaaaacagaaacaaaatgacagaaaaataacgagaaatacaaaatgaaatttaaactttactttccttagacacttgattgtgaagtcatgaaggctctccaagtgctaagtaaaacttagactgaaaccttctgtcttgaatcacactcccaagaaatggaacgcgcgatcagatttgcgtttgtggcaatatgacggaatgtacaagattcaaatgcactaacaatctcatggatttgtgttaccaatttctatagaaaggctatttggacggctgcaaaacggcgttaagtgcggctggacagtccaactctattatcaccgtggtaagaatatctctatatacattttttgtcgcacttatcatgattaatcaagtaaacataattg

SEQ ID NO: 33609 - DNA, 521 bp, Arabidopsis thaliana columbia
  unsure (1)..(521): unsure at all n locations
tgaagtttttatgcgattcatactatataagtattatatactacctagttatatgctagctttgtattgactcatagagtcatagtacaaatgctaaaatactaaagctacacagagtggtagaaccagctgaaatatgtttaaaactacatgacctaacccaaccattacaaatttataaacaaactacatcctgaaactccagaatagacgatgtagctcactatgaactataatgtatgtttaatgtcagaaccaaataaatttaaaaaaaatgtcagaaccgtacgagaagaacaaacaaaactttttgtagtttgtttgtatatatttctaagtaaaaatgctgaacacaattatacaaccaatatatgtgatctaatgtgctatttaggaaaatttgtcgatgantaagtactacgtcagagtcaaagacccatattggtttagtcccgactatagatacganaagtccagcaaacattacatgtaaattttggtaagatgtgagagatatatat

SEQ ID NO: 33610 - DNA, 562 bp, Arabidopsis thaliana columbia
  unsure (1)..(562): unsure at all n locations
atcccctacactctcttactgtttctaaactgaaaatgaaaaatgcacttgatcgcaaatgtcgacaccactctatgggtcgggctctcatcaacccgattctcatccgggttatttgatcaaacttatccctgccatggtttcagttatccaatgtgattttgtcgatatagaaaaagttgaagagcttgtacttgtattaatctcttatggatcatgaaaagagagttttagaagtatgtgtcttctatttgcaacaaaaactagcaaatatagatgacacgaagtcatattttgtcttggtctcgtcacttcacaagctaaatcttccatcttaaaaccacaaatacttttaacaaggtgcaccagtaaacctacacgacttttgttctaataaaaactttgttctaacacttattttatgccttatcattaagtgtagatgtcctaatctctcttgaatatttcaactgtttcatacaaattgagcaatcatcggtaaagtctataatctaccgaatgttttattaaactatgattnaatgtagcggtgtgagtgatg

SEQ ID NO: 33611 - DNA, 614 bp, Arabidopsis thaliana columbia
gtacccacaacttcttcatcgacactaactttttcgtgcaagtcatcaagatttccgtcttcatcttcaccgtcttcctcgccagcagcttcgtatccaatttcatcacaatctttatctcaatcttcgtattattcagttaacgttatgactaatttggctttgtcaacgaaagttactgattttatttgaagtcaacacctaattgatgattttaatcataaaaagcaaagttcatgataaatcaccacgaatggcaaagtggtgatttaaatgacatttttcctcctaaaataaacagaatagaatatatgatatacttacagctattgtttgctagtatccaaataaaaaatttgtacacaatcaatttatattcactatgtattttggttttaaaactccatataccttaagctatatgatttagttttatgtttgttaaaaagattcaagcccattatgagggctgagttgttatattataaggcctaattaaacccaattaagataagcccattgattcttatggcccattgattcttatgggcttaccggcaaaaaacatgaatgttcaacacgtgtcaccaatcgcggacgtacaatggacggtg

SEQ ID NO: 33612 - DNA, 1253 bp, Arabidopsis thaliana columbia
tccccaggctttctcttccctgaaagatataacacatgaggagctttgtatgtagtaggaatggtttggatctgacaagcaataagtagtaaaaagaggcaagagatgtgtgatgtaccagcaatacaggagcaaaacgtccatgataagtaggcagaaagctttaacttgtcttcgataatgttgtacctatggaaacacgacaagagtaaacaaagagacatgaagctccgtttcaaagagtgaaaggcaagggatggaaaccagatgggatagttagtgaaagcatgaatctcgaagtcgtcagctgccaaagtttgaaggagctcttgcatgccatctaagtaggagtaacctgacctcatgcactccttaagccctgcaataaagaggattgaaataggtacgaggaaaccctctctctgtgtatttacctatctatctatatggcaatctcaccttccaaatcaaaatccctcccatctataaagaagtttctagcaagctcctcctaaaaccaaaagtcagaggagataatatgcagcgcacaagaaagaaagagtggtggtacctcacctcatcaatcaaacccttttcaaattcgatccagaccatcgggtgcttgcactctagtagttgcttcattggcattctgatccacaacctcagtttatcattgatgaatcgagaaataaattcgaggatttcactttctcacccgaagaaggccggaacgtcctggtaaaaggggtcacggacgatggtgtccatgacgtcgaagaggagaatcggaagcttccttttccgagagatttcatcaccactgctgctgcccagacagcaagaacccgaggcccgaacaggattcttcttccacatgttgggtttcagattgatgaattccgccgatgtgtgcatcgccgccgccgccatcagaaactacctagtttctagttccgatcatcatcatttgtaaatgacaacaggggagtcgaaacgcagcgtttagagagaaaatcgcagaggagaaggtgattggtccacgtcagtaattaggatgacgtggtgaagaagaagtggcccatgacttgcagcacgaaggagaatgaatgaattaaataagaaccgtttcaaattcatctccacgactcctcggcctcggagagctcaaccgccactttccttctccttgtttatataaagcagagccagccaccttcatttgtacacacgaccatcagagctacgtacga

SEQ ID NO: 33613 - DNA, 550 bp, Arabidopsis thaliana columbia
ggcggttaacgagataaggaggaggagataagaggagagagagtgcattttcttcattctctttttctttctttctttcttcgaagttagagagagaaagtgaaatcggagactgagaattctgatcaagagagactaaaggttgaagacgaactatgtgagagaatgggcgggaggattctgttagaggagttaatgttcctctgtgctacagtgtatgtttgtaactgtaaacatcactcgtaacctagacgttgatgtgactacacgtgtcagatgtttgaccacagtcttacggcgttgaatagtatagtcaaaaccctctatattacttggaggcttctgtctagagaaacacagaaaaaacgaaattgaagatttataaggaaagtttcagactttttatagataaccaaatcaccacacaaacatagaattttaggagacatcaatggaaataagaacatcaaagcatagattcacacacgctctcacaaagagaaatcaaactgaatcagtttggcattacttcaaattttagactagagag

SEQ ID NO: 33614 - DNA, 522 bp, Arabidopsis thaliana columbia
tgattagttaatttaaattataaaaccagattttgcgcaccctaaaactttgttcagacaaaaccaaaaccctttttgttctcccccatcaaatgatcaatttattgaaaacaaaattccgagattttattaagcgttttggaaaattggaagttagtgaaaattaaatatatagcaaaagacacgtggtttaatcgataccactggttgttagtagggactttggatcggtggttgagattttaatgaagtaaataacattagtagtaaagcagtgagggagggagggtaagcaatcgtgaccgttggatattggtagtggattaattgtagggccgatgtacgggtgtgtttctcgactcttttctctttaggcttttctaagataagcaaaatttgtaatccaaaaacttggcggacaaggcaatttcccctatattaattatgtaatggttttagggtttttaactttagctgaaaataaccatttcttcaaattagggttttacttttctgtgaaca

SEQ ID NO: 33615 - DNA, 499 bp, Arabidopsis thaliana columbia
tgatagacatttggtaaatccaaaagcaaagtgcattaatttaaacagaacttttaacaaaaacaaaaacaagtaacgctagtctacgacggggcaataaacaaatagtagaaaacacgagtctttttggcttcgagagaaagactttgttttttcttgcataaacgttacgataatttcaaattgtcaatcctacttttaagtagaatttgtaatcactcaatggtcgtcaatacattgtccacattcgacctattgaaggaagattaatttagctataagctttcaagggcaaatccgtcagtctagctttcttttatctacctctgttatcaaaagccctctcgtatttaagatgattgacttcacatgattttcaactctctatcatctttccagtttcccacctatctctctcacctttaaattcactgtgtattaaggaaaaaaacagagacttcgtcttctcattgcttttccggagaatttgagaccagaa

SEQ ID NO: 33616 - DNA, 157 bp, Arabidopsis thaliana columbia
aacatccgccagtgtgagtgtgctctaaaggttgctacaaaagcaactcctataatactgcaaatcagctaagcattggaatatcaagtagcagtacaagagactacctgatttgtacgaactccaacaggtgcactttctgagggacctccgggga

SEQ ID NO: 33617 - DNA, 569 bp, Arabidopsis thaliana columbia
gcttatctaatcttatctgacaaattccaacaaaagcaatgcgaaatgaaaatgatgtaattgagtttaaaggtgaaaatggaaacctgaagtcgatcaagcaactgatctttggtgaaacccattgaatcgaaaaaatcaaaaatcagagaatttggactgagaaaggagcaaggaactgcagattttgttgagaagacgaaagtttaggttttgcagattttgcagtactggattgaaaaacattaaaccgtcttagtaaactagaggattacacattgggcttttcaatccgcgaccatacttaacttgcaaatgcctaaaaggcccaccttttaccacagggccttaggaaattccaatttttaatttaaaaataaactggtttaagttgtcaaaaatggtgcaccaccaattaaaaaaagtcatcattaatttgggctacgaaaaatatctttacaagaaggattgattgtagatatttgaaactgattgtgtagagtttagtctcggtggcgtattcgctgatgattgaccagctttctccacgtattagacgagtttgaatg

SEQ ID NO: 33618 - DNA, 577 bp, Arabidopsis thaliana columbia
ttctcttttctatttaaagttaaaacataaatctttacttaagcgatgaaacataacaataatatatatgttacataaacgtgcagaagaaatatagattaacatcaagcaagatctctttttgtcaagcaagagatttagttcatccaattctcgattccaaaagtcttgtctttctcaacaaataacttataattataagagagtactttataccatttctaattatcatatcctacaacatcaaatttgcaaaatatcaaatttatataaatttaaaattctgtagattctaattagtttttatttatgtggtcagctttccaagaaagtaaattgacgcaagccttcgtgttcaagacttcgagcaccaatccagacctcatcgtcgttagcttcagaggaaccgaacctttcgaggctgccgattggtgcactgatctcgacctctcttggtacttatatatgttctatatgtttaatcaataattactattctttatataaaacacacccccagtcttcttaattcatatgtaaatcataaatcttaaattaggtacgagatgaagaacgt

SEQ ID NO: 33619 - DNA, 625 bp, Arabidopsis thaliana columbia
cccttatgatttttactaaataaacagcagaaacaaataaaaagaaaaaacatggaagaagaagaagaagaagaagtccagcttcactcacctttcgctttctctatcccataacagaaacccccacattgctcgaacggtcgtcataattccttgaaacctcgaaaatccaaaaacccatatccaatcttcttcccatataaattaagatttttatttatttatttgtttacttatttcaattcccaaaatcctctgcctcatcatcttcaaactgttaccacgtccatagggttgtcgaagagctaggaagagccttaccaagagcttcttcttcccctaacatttaggtatttcattcgtaatttatcttctttttaatttaattattgtcgattaccaaaacccttttttatactaaaaaactgaatccatttttccacactaaaaggagaacacaaaaacttcatttcaagttcatgtttgaaaaactaagaagtgtatggtttgtttgttgacaattaatgagcattttttcccaaaatacgttagaacttaatatgatagaataaaacttgaattattcatggcaatgagtatagtcatatcaataatgggtgatgga

SEQ ID NO: 33620 - DNA, 501 bp, Arabidopsis thaliana columbia
gactcttctctaagtggtttgccattgccccaaaatcttaagctagcagtcacattcaatattggaggtgatgacagcactcgtgacccagttgtgttcattcctgttcttgataagcctctatcttcaaactgttattacgctattaaacggcatgggaagcattcagggtatgaagtttaatccgcaaatctgaaattcttgaatctttcttcttatataacctgaaaaagtttataaaattttggttgcattgcagggaagcgtctggaagtgcaaaagaggacgatatagtctcctgctgcttttgctatagttttgttcctgaagccaaaccaaaacagttagatccttttgacatgtaccaacaattcaagatccatcaaaaggagccttcctcgcgttgttactacgcaacatctgtcgctcctgacggggtccaccatggtttctgaggaaaaagagtggacggttgaatactcgaggttccaagactttgaa

SEQ ID NO: 33621 - DNA, 562 bp, Arabidopsis thaliana columbia
gttatttaattcttatgaattcgtgcgtttcgtcttgttcatgccaagtttgtccaacatgatataatgcataccatataatggaagaagtgttttctgaattgatgtgtataatatctttaaatttttttgaaaattagtataagtgattaataaatgttccaaaacatgtatgactgattcttctttagaaaaacaattcccttaaaacagaaacaaatgattctaaaacaagtacaagtacataaattcccttagcaccagtggcggacccattaaaagagaaggtgggttagttgacacaagttaaaactataaattcaatttaatgcatcaaatatgtcaaagagaaagtagctcggttggtaaattttgtgtcattgacacctcataacccgagttcaaacctcctccatgtcacttattagtaatttttttactttttatatgttcaaaaaacaatatatgaaccaggtaaaaatgttttctgggtccgcactgcttagccaagtatacacaaaatcactagtacagcggtcaaatcacggtaagacatacacat

SEQ ID NO: 33622 - DNA, 769 bp, Arabidopsis thaliana columbia
ccctaaagattatattatattaaaagataaaaacaattgaaaacattaaaaaaactatattgtgtaaactagttgaaataggttactcacaagtcacaactctcctcttcttttctttttataagataaatagtcctagcctaaaaaaaaccctagtcctagcctcctcctaggcattcgaatactcggattgaattccaatcatattcattcgaatttcgagattttggattttgaagtttaggtttcgtttggatattttaaatgtctgatttggtttcgagtcatgttcggtcggttatggttttcatatttagaactggtgataattcaaaaatatttagatcattagatagatacggggaatccatggatacggttagtattggttacattcttccttctttaattatacataatatcttggagagatgcatatatgagatatgtttaagtttcgattaagctggtgaaaacaaaactactcgcaaaaattggtaactcgtttttatacccatattgaagatattatgtggtcctcaaaatcaggaaacctatgcccgcaaggtcgcaactaccaagctcctttgtcgaaaacatgcaagagattctttcattctaagtttctagctttctaagcccgggtagtaacccaagttttattgtcttccagattttgggcttttctagtggaccctctctacttagggctttctaatacgtttggtagcagaaaggtagttaatcagcaattagtgtgttctaggtg

SEQ ID NO: 33623 - DNA, 702 bp, Arabidopsis thaliana columbia
attaaaaaaggttaagtgtgacagtttgggagaattaccagaggatgaaggcgatctcagacatccatgatttgcctcttttgtcttctttaccttattcgtctctcattctttgatcccctttccctttctctcaatcttcctcacttacatttcttatctcactccctctctcactttctccttcaatgttctctcctctgcgttttcacgaaacagagaaccttatcgttccgtcttcgtagacattgaaatcgatagagaggtgattcattactttgattcgcgatcggattctgatcattactctttttcaaaaatcgatagattcttctccgatttcgtaacaccgacacgaatttgtttttggctttttctggtttttgcaggtgttgatttgattaggtttaatattgattcggatgaagggaagagatggttactaatagctacatggatacgcgatcaaatttgacaagtgtgaatcgaggatccaatgtggatctcgaagatcgattccagagggagctcgaatctttgctccaacaacatcgtaatcagcaatcatttggccgagaacgagaacgagacattgatgttcacagaagcggaacgggcctcctaccgtggaaggattgttgagagctatggataatcagtacttgaacaataacaaccgtgatcatagagatgttgggaata

SEQ ID NO: 33624 - DNA, 722 bp, Arabidopsis thaliana columbia
atataccaacgaattttatttcattttgcataaacaattttataataaatatcgaaaaatggtcaaatgatataagtttgggtaattgggtgagataatatacccaatgggcctcgattaacggtgagaatcgcaattctcacaacacgttacatttcctaagtgttacatatcaaccgttaatgattcttctttcttctaaaaaagcttcaacttctaatttctgccagcaaaaagtcattccagactttttatcaatcttgaccaaatttggcatccattaagaaaacttaattccctagaatgtctcatcattctttttacttttatagtttactttgactgtaacttttacaagaattacaacaatccccacatgtttacacttttacagattttggggcaaatctcaaactaaaataagaaaaggactccataggcttactgtgtattcttttcatctaccattactatttcatttcatttcatttctattctttttttttttttttgttcattcacctaattttatcgttacaagtagcaacaacaatgatgataataataatagttacaaagggttaagaatagggctttttcttttcttgttgagctccacttcgattgaactccacaagctttccccaacccatcaatctttttttgtttgtctctctcgtctgaccgtaataacaaaaagaacaaaaaaagcaaagaagaat

SEQ ID NO: 33625 - DNA, 589 bp, Arabidopsis thaliana columbia
tatccttgagggacactgtgatccttaaaagcatttgactttgacggatagttgaccagagtcacgtggcaacatctgagagcgagtacacatgtacatctacgtaagcagtggagaattagatactctcgcactttcctaatttttttttttttttcaggccaaatctagctgtaatagtatttgtctcccttcagaaaaaaaaaacttctatagaaatcttcaattcgagaaactaactagacgaaggtttctctttttcgtctagatttgattcagttcttgatctcgtctttctcactcgaaggtgttgttcagttttattgggtatgtcttgtcatatttcgtcagttcatgtctttgcttgcttcaatctcagtttgacgctgttctgtgctgttatgttttatatgttttcagagctcatgtgtttgattcgattccttcattatcgtgcttcagccctttttagtccagatatgaatctctctttgttgaagtttcgaggttaacagtttccctgtaatgttaatttggtgaaatgtttgatcagttgatgactcttttttggattatatgtagttttaag

SEQ ID NO: 33626 - DNA, 375 bp, Arabidopsis thaliana columbia
tatgctgaatccggacagaggaccataaaagtagaaaaaatccattgttagtgtccactcctaaatacatgtactagagcaacagagatgatgttcgttagtatctatagtagcttctccagggcacctataatcgaatcgccgaccagatgttggcatcgatcatattgcataacttggggatgggcgaccatgtcaaagagtctgtggccgacaggcagcatgtgataggacttgaaagcatccatgtgtaagtgtcactgtcatataccagcgctctcaccttaagcactggaccacaacgcgcgataagttccctcgtgaaactctctttagccgacgcacacatcacaaccaatcatgtagcgggcgaga

SEQ ID NO: 33627 - DNA, 546 bp, Arabidopsis thaliana columbia
tactatacaatttgataatttgtttaagcgatggaaatttgaattatacaatcaatcatacaagtcagtttgacaaaatatatatcatacaagtcaatatttttgtttctgttactgttatccacgatattcgaactatgtctcgtagtccaagaaccggactggataaaataccccctcctaaacaagattcgaatttggttaatgggtaaaaaacttaaccttataattcactaccaaattctaacatatcactctcaaaagtataattttacccggataaatttatgagtttgactttgtggatgaaggttacatgggtaataaatggaggaaataaaaatttattgaggtgggggttcaaaaactttgtaaatgtagtactgtagctagttttagagaagttttattttatgacttttgtccaaccaacccacgagtccacggcccaccagcatgtgagatatttagccaaaaatgagtaaatgtagttgcccataatctcttcttctcatctttttgacgttaattgccctattgagccat

SEQ ID NO: 33628 - DNA, 434 bp, Arabidopsis thaliana columbia
cgtacattttgatggattagctattaaaacattataaataaacgttcatttctcctacctctaaacacaacacaccaatacaattccaatctctcagattgaatctctagctttaaacgtgaaaacaatacagtatgagacttcagacttttatttagttttttttttatgttttggtttatgtttttgcattcttagtaattttgtgtgtgataaacaaaggatttttatatatctaattagtaaccaatgaatttgtctgaaaacttattagtcaagagaatgtattggtgtttaatatcaaaaggtagaaagtattttcaattcctaaatattagttcttgaatattagctaaagctaattttcatttgtttaagtgtcacatgtttctagaaagcatgtagataagttcggtgatttaagggataaggag

SEQ ID NO: 33629 - DNA, 594 bp, Arabidopsis thaliana columbia
taagatatttagataaaaattattattattgacgctaccaaatgttgttcatggcttgaaatgaaatcgattttgagccttgacaatgtttcattgtcttccaaactcagcatctcatctttagatgctgctgctgaagctggagtcactgcaggaagattctctattgccgcatcttctcctactcttcttcttgttactaacaattcaacctcttcagtcttcaaatgtatctgaagtgcaacgaactgtacaacattgaaagttgacaaatatattagcgtatgtgatactgaaatcatttttgttattgaatcatattgaagtactttcgcatcaatatatataacaaaaaaccactttctactgtgacaagtctgatgataactgtaaagggagagagagtgctcacttcacggagctgttttacaagcaaagtgggtcggcaacagagatatggctgtggtaagtctggtatacattttgtatccagcgagacaagcttgacatgaatatccaactgcaagaaagattaagtttaatcgaaatccaaactaactgcaatcaaaaatacaggtcgacaagaagaagaga

SEQ ID NO: 33630 - DNA, 520 bp, Arabidopsis thaliana columbia
ttttgcttcacttttcctctcttatactattgttttcattaaatatcttttcctactttaattttggtgtcccataaacattaattaaattacgtctgcttggttttcctaagaggttaggttggtggcttcaactctattttcccttgattacaattcatatgacttttaaattgaatgcagagtaaagtcttagagaaagaaagattgatttttgcctatttgattagaaacatatgtgtcattgtcttcgatgaatattctcctctgagactattattctgagttttgtttctaatttttcaaattttaggaataaagtgagtataattgaagccggtgctttagagccaatcatcaacttcttacaatcaaatagcccaacacttcaagagtatgcttctgcatctttgctcactctctccgcgtcagtaacaacaaacccatcattggagctaatggtgtggtcctttattagtcaaggtcattaaacatggaagccacaagctaaagctgatgc

SEQ ID NO: 33631 - DNA, 500 bp, Arabidopsis thaliana columbia
gatcccttcttgagaccttgaattcttgttatagctaatatgagtatttgtacgatttctaattgttatagcttaatataatgagacattgtttttcccaaatttcaaaagttttatcttggattgctaatttgttatacctgaaatcttaaaacatcagtgctggatattttcaaggcgatgtagatgttccttgcgtgcttgaaaacaaaaaaaatccaaacgattcttttcagttttcatcaatcaattgagcacctgcttccttcagatttatatcactatgaaattagactttgaccgcaaaaaaaaaaagagacttgatggacttagggtagcagagaactgtacaaggtgtttaagattctgaactgtccgaattggtcttctgtcttcagttttgtttcgaatccctcccatagatgtattatataagaaatgtaggttatgttcatgatttcttttttttgggagcaacaggttatgttcaaaaatagtat

SEQ ID NO: 33632 - DNA, 496 bp, Arabidopsis thaliana columbia
cctcaaggccgccagtatgttcttcagacggatcagaaaccttatgaatctctgttgtaaaattaggataaaacggaacggagccaaccaactaggtctttttattttatccttttttactttggatgtttctgcatcttttgggaacattttcaggctgatccattgtcgtatattatcatctatctatctagtcttttcagacaagaactcgcttttgtttggtttcctctcaagaaatgttcagtctccataaagaaagctttttccttggggtaatcattagtggtcagatatgagggcataatcgtcattgtcatttgaaatgaccttctggtcttccggacaagaaccactctgttgcttgatgtttctgtgtgactgtctccacagtccacagggaagagagcttcttaggtaaagtcgtgattagtggaaatgattgagggtataatcgtcattgactaattcagcagtacgatttaggaatgtggtt

SEQ ID NO: 33633 - DNA, 498 bp, Arabidopsis thaliana columbia
caatatcaatgacctttgctgccattatattctcttagggtcttgctaaatttgttgaatggagtgccaacatgatggaggaggaagctaagaaaaagttgaaagctgcagaacttcaatgcaagaaagataaggttaaaatgtgggcaaactacgttcctccagctacaaactctaaggcaattcatgaccagaactttacgggaaaggtaacttgtctgcagaaattctttctaaatactgtccttctcctttggttattgagttattggttttatctctctttaggtagtggaagtggtgagtggggattgtctaatagttgccgatgatgctgttccatttgggagtccagcagcagagagacgggtctgtctttcgagtatcagatctccaaaaatgggcacccacgtagagaagagaaaccagctccttatgctcgggaagcaagagactttctgagacaacgacttattggcaaacaggtattgtgttgag

SEQ ID NO: 33634 - DNA, 586 bp, Arabidopsis thaliana columbia
ttttcatacgactcaatttaaattcattatcaaataaataaaatatgtatagatttgtatgcatgtcacagtcagatacaaacaaaacatttgcctaatataaaacagctaattttaagacaatagacagcgtgactttgtgatgtgtcatatgcatagtcttaagtaatattggtggagaatcttatccttattggttcatgtggaccaacttggcccaagctcattgcattctatcttgttcatccaaaacatatactttaacattaaattatattttaaaaagattcgtttctcatgcataaataattcaaaacataacaatctaaacgaaaattctttagccggcaaaaaaaaaaaaaaacgaaaattcattattgatatgtataattcaagataatagtagtatgttttattacagatagctaataggtgcatgggttggtcctaagactttgggacctcaaacctaaaagaatattatatccatttagttaagattaaacaaataaaaacacaataaattgaagtagtgattttttaaacaaaactttcaaagaactaaccatttaaaactaatacaagt

SEQ ID NO: 33635 - DNA, 529 bp, Arabidopsis thaliana columbia
gattgtgcaggttcgtattgttcttgaaggcgttgacaagttcaacaatctgattgggtcagtatactattccgatggggatacagttaaagacttgggtttggagctggttgaaaatgtacgtgcctaaactagatggttatttggttttcgacatgattacatattgaactaattggccaacaaagcttggctttgccacaacgatgctggcgtaacttaaagatataagattaacgttgacctgttacttagtttgtggttttcttggtagatttgatacagcagttgtgatatacgaaatgcaaatataatctttggatggtgttgaataaaagttgtgacactggctactattccttttgctcagggtcttgctaagtacgttgagtggagtgccaacatgttggatgaagaagccaaaaagaaattgaaagctacagaacttcaatgcaagaaaaaccgggtgaaaatgtgggcaaactacgtccctccagctagcaactccaaggcaattcatgaccagaat

SEQ ID NO: 33636 - DNA, 802 bp, Arabidopsis thaliana columbia
ctataatctgttaaattcagataatatctattatttttttgttttgttgaaaaatcaaatctctagtaacattaatgagtatgaatcgtgtctggtagttggtacgaatcgagatctcatcaatgggtttttttaagctgctttgagacgtgcgtaacacgaagttgtccactatgacttgctcttgtacttataagttaaaataatgatgcagcagaaaacaattactattttgtgagacacgtatatcccaacaaaacaatatgtcgtagaacgtgctaattaattagtgaatacctacgtgtcacgatctcatgagattggtgtattactgagaactaacgatctcatgagattggtgtattactgagaactaatcactaataaacgtgaatctcgtgacacatattatcattatgcctatatatacgtacataaaacaagacattattacaaacacaaaatatagaaaaagaaataatgtattcagaggaaaagaaaagcagaaattatggttcaatctttgtctactgcttcttctgtttcgtactcattgtggaggttgcaagattcgcaaaaccttatatcaaccttcaaaacctaattgagacggaagcagtagtagaagaaggtttcatggcggtggggaactcagggaatcttccgtgtggctcgtcaaaacctagctctgcctctgttcgtgctcatgatgaacagaagctctcgcaagcagtaacaacagatacgagaactcgtcctccaaattcgtactgcgtgaagttccagtcttttgtcctatggc

SEQ ID NO: 33637 - DNA, 458 bp, Arabidopsis thaliana columbia
atccacactcttaaaacgttcaaaaagttataaaaagtcaatttgaaaaagaaaagaaataaccacatttgaataagagacttggtaataccaaaagaaaagcaaattggaatattgtttatttgatttaggaatttttaatccgaatttaggttttccttggtttgagttttttggtttaatgaaaattactcattggtatataaatctattatgaatcgacttgagtggttttggttcggctttgatgtttaggtagatagatttttaaagttcaaatgtatataaattttggtgtttgtatacattttggttcgatttgaatcgacttggtttatcttggttgtacagtcttaattaaattatttatcggcatctttagtaattaatctttttatttctctttggtttgaatgtataagatatgggatgtgatctctaccaagaggctatagaga

SEQ ID NO: 33638 - DNA, 905 bp, Arabidopsis thaliana columbia
atatcggggcgttaaatttcgtgaaaggtgacaatagtgcaatttattgaaacataggggtcgaaaaaggagattctcaaaactatcgggtcatttccaaagttccaaaaagtttgaaattttgtgcgggcattttttatccgaagatgcaaaggaaaaaaacaaaaaaggaaggatttttatttttttaccgtgatagtaacgaacgagacagtgacgagacaacaatcatcattcccaataattcttctcaccaagaatctaaaatccttctccgatttcctctcatggcggcggaatcaaccagaaactcttctccgccgtctacttctcagtcttcaagccctataatcaatttacccgatgaccatctcttaaccatcttgcttcttcttcccgtagattcaatcctctccttctcaatgacctgcaagcgatacaagtctctagcttgctccgacagtctctgggaagctctgtgtgaacgagaatggggaccaacatctgtagatgctttaaagttgtcatctttacgagatgggttttcatggatgttgatgtttcagcgagtttataagatggattctgtttgctgtcacaagatctcagacccagatgatgatgatgaagaatcttcttcgtttccgatccctagagcttctcattctctcaacttcgttaatgatcatcttgttctctttggtggtggttgtcaaggaggttagctttgctttagctatatcatctttctcaattcttaccttgttgaaagcagattgattttcgatattatcgactcgagtttctcggttacttttcggttagctagatgagtgtgtcaacacacgacaatgatgctagttggattattagggaattacttcattaaatttgagatctttgtg

SEQ ID NO: 33639 - DNA, 1768 bp, Arabidopsis thaliana
tctgaaagtccactaatcccgtggtctcaagagtttgaaaatttctagatcaactttttacccattcttgcgaatagtaaaatttccataattgtcgccaaaacattctccaattatgctaatataggaaacccattttctactatcttatatatatatatatatatattggtgatataagaataatttaaaatgcaacaacaactatagatttcattggaacacttcagaaccatgaaactttttgctattattttgaccttatatattccaccaaattctcgatggtgaaagggtcaatatttctaaacatagaaaacttaacatgactataaaagcagcccttgaactccgcttattattcattcattcttcagtctctcttcctcaaaaaaaaaaaaaaaaaaaaaagtttaaaacaaaaactaaaaaaatagaataatggcaagagttcaactattgttatgcttcaccattctatttgcatctgtgacccttcttgacctagtatcagcacacctgaaatttaagccatctttgcctcaaatcgaagatccaaagacggtgaaggatgtagagccttacaccgttaaagtagtaatggtctttgtggccgacctcgagaaggaatgtcccaagacaaacaagttcaaggccttctttgagaaacttagaggattcgccaagtatgtttgcccaataagaaggattggccaagtagattacgaccgggacatgaaggccaaagccgggggtatcttcaaggccatatcttcttttgcgattggaaaggtaacttcttcttcaaggtagaaaaattatggctaattaatagactaatttatttactacatcatgcaaatatatctaacagattagggaggaaattcaagaggaaaaacaggaggctattgatacctttaggttcatgaaatctgtcgcggctaaaattatgggaggtcgtaagaaagaggagaatgaagaaaccatgacactaacagctgaacaacaaaaggaaatcaaagaaggaatcttgaaatgggaaaccattattactcggatcacaaacacaatggtatcgagcacaaccaactctgcttcttccaatgaagagtctagtgttgggaaagaagcttccagcgaaaacagcaaaagctctggtaaagaaagtgagagttccgctaaaggtgaaagtgagacatccgctaaaggtgaaagtaagacttccgctaaaggtgaaagtgagacttcctcttcaaaaagtgctggtggaagctctacaagcgctactaaagaagaaagttccgctagtcagagcagtggtgtaacagtgacacaagtcgaggaagagacgtccaaagatgtttcgacattcataatgaacctcgaaaagaagtgtccacaaaaggaggaatacaaggtcttcttcgagcaactcaagggtacaatgattgctccccccaaagaaagaaaaggtttattttctaggattaaatctgctgctggtaaactatcgggtgcgatgggagttatgcggtctagaattggaagcaaatcagcagaggtagtgcatataagactttatccttcaaatggatacaacaacaatatccattaacatatttcccttaaaacatttgtgctatgtccacaggttaacaagtctatggaaacttaccaagagcaagtgatgagaactcttcaagagttagataccatccacagtcagattgtgagtcagaacaaggctagacagaaggatctttga

SEQ ID NO: 33640 - DNA, 667 bp, Arabidopsis thaliana columbia
ctaaataaaacttacttgtgaaaaatctacttaaaaatagagaggttaacttacttctgagttattgcagagaagcaatggatattgatgaaaaatatccaaattgttttctggagaagcttcacaagagaatcaacttgatctccaagaagatcaacctgcaaattttctcagtttcatatgattcactaaaaaatctcacaatcacaaactgttttacttcagtctctgcctttgtaagaacaaaagctgttctataaactgattctctttgccttaattctgcgataatatccatagttgaatcaatctttctctccaagttttgtaacctcaaaaaagaaacataagatcattatagttaagatttcaacataaagttttggtgattgttcttaatagccatttttctactcacctgaaagttaccatctttaaatgactaaccagaaaaggagctttgcaaggtaatcacatgtcttttctttgtgattctacagaccaaagttcttcactttggccacatttcgtaatacccaatcgatgatttttggatgttgaaaacgtatttagttcatgctcgactagattgttgtattgattttggtaagtgagaaaatcaaacagcaattttattgatttataatatttcgtttagtagataagg

SEQ ID NO: 33641 - DNA, 580 bp, Arabidopsis thaliana columbia
cttctttttcacaggttgaggttagattaagggaaggaagagcagtgaacattcatatgttctgtggtcgtagacgggtctgttgctcgctaccatgaaagctttggataatcttggattggatgttcagcaagctgtgatcagctgttttaatgggtttgccttggatgttttccgcgctgaggtgatcttctactctcagttgaaaggttaaggatttgtagaacagttttagtagtaacatgttttcttttgtctatcagcaatgccaagaaggacaagagatactgcctgatcaaatcaaagcagtgcttttcgatacagcagggtatgctggtatgatctgatctgatcctgacttcgagtccattaagcatctgttgaagcagagctagaagaactaagtccctttaaatctgcaattttcttctcaactttttttcttatgtcataacttcaatctaagcatgtaatgcaattgcaaatgagagttgtttttaaattaagcttttgagacttgaggttgttgttgttggatcataacttcacccttttattagcaatgttaacttcatttatg

SEQ ID NO: 33642 - DNA, 843 bp, Arabidopsis thaliana columbia
taataagtcacgaaagggtttaaggtctaaccggtgttataagccaatcaattttattgtataatctaaccggataagtaacattaaaccgagaacatttgtttctagagtatgttctactgcttcatcgatgataccgagagttcttgattttctcttagatttttgttttgtgtggttgatgttgcaaatcagagacaacatattagtttgggaaagaagacaactcatagatttagatgtttgtatgtatgtaaatgcatagacactaagacacattatcacacatgtcattgtcaacaactcaacagtgacgaataaggatcaagagtcaagatggacaaacttcaagatattttatatagaaatcagtctatactagtattaatccaagttttatgttttaaagacacatctagtcttcattatttttcatttcccttaattacagttatagtgtcaaagagaatagtgagttgtggttagaaagacttgagtacaacaacaaaaggttcaccactaccaaaagaaatctataattgtttagttagtacttagtagttagaggaaggtttagttaactctcaactttgagctttgttgggacttgggagggatgattacacctaaatatgtatcatcaaagcctggcgtagactaactgagattgataggcaataaatcggaacttgttaagaaaaacaaagtgaaattgagacaacaaaacaaagtgtttttaggaaaatagtcttgctttgagagttttcttaggacccttataattcataaactcacaatcgattagtgtctagcttttcaagataatatatttgagaaaattag

SEQ ID NO: 33643 - DNA, 540 bp, Arabidopsis thaliana columbia
tcggcaaacatctgaagaagtttatgatcaccgacgattgttttctccggcgactattcgacgatcagacaatcgattccctaattaagatggttttgtttctaattttgtgtttctttctattaatttgattcgagtactattacgatgtctctctgttacttcgtttttccgaatcgtgacgttaatccatctgcttttatgagtccagaggttgattgattttgtatttcatctgatggatacttctgatttgtgattttttttttaaaaacttttaattaggttttgaaagatcattaacgatcgcgagactttacgattgaggggattttgtttggatggtcgtagcatcaccgacggtggaggatggcggtagatacggagggcggtggagagccgtgacggatgaagttacggaggaagcggtggtcgtggctggtaatcgtaacaaagtgggttttgtggctctgtttttggtctcatattgccttgttcttgtctgatctattggatactttttttttttgatgtacagac

SEQ ID NO: 33644 - DNA, 383 bp, Arabidopsis thaliana columbia
catattatagttaatcttcacataaaagaaaatttctgagaaagatcaaaacaaggaaaaagggatgcagagaagctcatatctttgataatcttctcttagagtagagagatcacagatgattagaccttcagaattaacaaaaccacaaaaatttcaaagtaacttctgactttgggaattcaatttaccaaaagaaaactcgaatcacaaagagcgaagataaaccgtcttcttcttcttctttcaggcaaagaagacttcaacgatctgttacatcaaaaaaaaaagtaatccaaaagaatcagaacaagaagaagagcaatatgtagaccaaaaacagagccacaaaacccactttgtttcgattaccagccacgacc

SEQ ID NO: 33645 - DNA, 584 bp, Arabidopsis thaliana columbia
gtgcaggaatactcagtctttgtttcttcgtcggattgatttctcaagagtttgctataggtatcttcgtctctacccttgtgttactcttgctctacctttgcaagagttggtgcaagagttggttgaccaatccaactgcccaagacttggccgacgaagttcagacgcttctccaattcgaagatatccctcattccagcggtggtgaaatcgtataaatagtttttgttgggtcaaaacatttaagtccttttttttttgctattatgttggataaaggccatattatagtctacgggccggtgaaaatgaaagcccaaatagaaccattaaacaaacagtgattgttactttgcttgtttttttctaacaatttttgatccgaaaacccatcattccaaaccgaacaatcctagaccgaaatcatcaaaccaaatccgaagaactaaaatactgcaagactgagtcatataaggttacaacttacaaactgaaactaaagaagaagattaaacagagttgcttaataatagacaaagccattccttcgtctagtgatttcaattgtttggccagattgc

SEQ ID NO: 33646 - DNA, 748 bp, Arabidopsis thaliana columbia
aatcttgtataaaaaattaaaaacttttattcgttgaccaaagaaaaggaaaaaatatctaaaaacaggggaaaacatgtatgtcaacttgggccattaaaccaaagaattgtagacgagtctggggaaaggttctcactattgggctattgtagcccattgggtcattagaccaaagtccttagctaacaattacgccggtgcaatgttctagcgggttcttcaataatctatacccgacccggtccggacccgaagctgcctaactgtctcttcactccaaagacattttctacccaaaaaaaacgattttgagaaaaccatctcactgattagcaagatgtcgtcggctcgttctgcgatcacaaagctaaagctggctcgatcctttggggagaggcagattggtgcatcgcgttcggtggtatcgactcgaggaccggcgattcggtacttcagtgacgataaaggtcgtgtgctcagcgaagaggaacgcgcgaaagagagcatgtatatccaggttcttcttcatcgtcgactttttctaactcttgatttatgtatcgatgctataatagtttgtttagccgctgttgcttatttggattcaatgtttggttgtcgaaattttgcttcaagttagcgaatactggtaaaaatctgatctcaggaaatcaatcaaattatatgaaatatcgtttgggaaattgcgttagcattgatttttaagcgacagtttcggggatcc

SEQ ID NO: 33647 - DNA, 357 bp, Arabidopsis thaliana columbia
aaagaaaatcaaattgcgattcagcatagttttgaaacgttgaaacaatgggtcttgtcttagatgttgatcaagaacagaggacaaatctcacccagtagaaactaacaatgttgaaaattaaagcaaatataatcagatgagagacagagaactaagagaaacaacaaaccatgttcttgagaccaaacaaaatgaagaaacagatgtataaagccagttaaagagagaaaaaccgaaacatagatcaggttgacaaaaaaaaacgcatagataaagcgcacaaaatgacatgcccattggaggacgcctgacttgagtgtacgagacacattgaagtaactcagcaacacattg

SEQ ID NO: 33648 - DNA, 718 bp, Arabidopsis thaliana columbia
taccgagaggataataggaggataataatactaaaataaaattgacgtaattgatgatgaaacatgttttattttccaaagtgaggcgttaactcttatattgttgattaaaatcacaagattcacacaatatcaagacgcaatctatccctatccatttcgaaattacaataggcatacattaacgtgtgtataaacaattttaaggactcctttatgtggtaataacaattttaaatatgactactattatacaataatgatttccaataatagtaattaattagatgccaacggagaaaaatattagaggccataacaggctatgacaaaataattgtgatttgagctatgataaatcgttgcattcaaattttatttagttgaggatgttttaatgcatatagtaacgctgatatatcggaaattaatttaagaaccgtccaatggaaagagccgacgagcattattaaataagatgcatgagtgtatttaacactaatattttaattccgtccaaataataaagacaaaatataataactacgatttatctatatgtgtatatatagtgtcagggaagatgagattgttgtctctgtcttagaatatatatagagagaatcaaaaaaaaaaaaaaagaatatatatatgagaaagagttattaagagattttagtgtcggtgaattttttgaaacttcttctcttttgcggtt

SEQ ID NO: 33649 - DNA, 460 bp, Arabidopsis thaliana columbia
aaataaaaatgtgagtaagaataggctaagaaataatactaatacagtatccttagaatacataattgtatattattaaggataacacatgtaatgtttaggaaagatggccaatgataaatcttataagaaacctaactaatattaacaccggtaagatttgttctcttaaaacaaatcctatatacacaaaaatgaagaacaaggacccaacatatgtctctcatgtgaccgaccaacacatcctcagttgacctgtctgtggtctaaccttgtcttcctccacaaagctaacagaaataattatgaatgttagtctcttccatgtgtcagtatattattggatcttgttggagcaacttgacaacatataaaagcacgaggcagctcaatactatcattccaacaagagaagtgcttgaggagaaaaaaaagtatcaagacttcatatagccagatt

SEQ ID NO: 33650 - DNA, 529 bp, Arabidopsis thaliana columbia
gttacaacaatagcaaaattagtgtcaaggaaaccttaacaagcttaaggtgtgcgcaaagagcatcatcaagtgttttacctctggaaaagctccgaaaagtagcgagtaccgttgtataaaacgaaccacatcaaaacaaccaccaaagaatctgaaaagagttgaggaaaggcaaagaagatgcaagcaaagatcttaagtccttgtaaactagcaaaaaattatctcaattgacagtatattattcagtagagactataatccaaactctgaagttgaagacaaaattttaagaaagtagctttttaaaaacaaaattctaaaattgaacagacacaatgcttaagacgacaacacaagagaacagaacacaatgccaccatatatcaccaaagatgtaaaaatcaaaacttgcatctttctaatgaaagggtaaatcgaaattggagcacagataaaccaaaatcgatggagagaacgaatgaagcatggagggatagagtgaggaaaaaaggatactgaagag

SEQ ID NO: 33651 - DNA, 994 bp, Arabidopsis thaliana columbia
ttcacctttgcactttgaatggaccatgtgaccaaaaaaaaaacctacattcggtcataatacataaaaataggtgatttttttccttcttattatagtgatataagctaaagttattccatcgtttaacctaaatttgatttacaaatgtgagaaaaatatcctacttagctagttttggtgttgattacttacctgaattatttttacagttattttagccatattttgttacgtgaaagtatgtgtcttcgagtcaaaaggcaactattggttaactgacacaagaacgaatcttcggttgtagtcccaacatcccaagttacattatatgtataacacacgcccacggtttttcggttacttatttgataccaacaataaaaatggtcaagccatataccaacaataaaaatggtcaagccatacactgacaatcattaagtactactatcataattttcgtttatgtcattcactgacaatcaaagttattttcacaaacaattaccatgcagtcaaaccaataaaaagttgagtttatttcattaattttctaaataatcttaaatataataactggccatgaatgaaaattaaaattttttgagtaatctacataagattgtgacaaagacattaaatacacataaataattggttttcattttcaatgagtctggaccgaaagtaacaagtgtattagtgtaacgtcaatattattattaaacaaaaaacaaaccgtgttgtaaaatgactaaagtaaccttaaccgacaacgatagttttaagaccaaaccagtagaactctcctccttctataaatctctgcttctcgttgcctctccaaaaccctctcaaactcaaatcaaccttcttccatttttcaaattacaaacatacacaacaacaacaaaacctcttactcactccaatggctcgccttctctttcgtcttctcgtagaatccaacactccgtctccggcgattgat

SEQ ID NO: 33652 - DNA, 441 bp, Arabidopsis thaliana columbia
tgataactcatctgtatagtatttcctatgtgttctaactaacttaaactcatacccgttcaggttatgttccttccgcattaacacatgatgatgataattgatgtttgtgatcacctttgggaaccattaggatcaagattcatcaaaagttggaaaagtaaaataatcctaaccagataaattttggattgaatttttcaaatcaaatcagaatacattgattctgtatatcttattgaaaaatccatcaatttacatcaacaattttatatctaataattaatttagagagaaaatttataaaagtttattagagcaaataactcaaactcggattttatagtcgttatgacccggtttgactattgaaacgtttaaccgagaaattgggactcaattaagacaaccgatactagacccggatccagtgttagcggg

SEQ ID NO: 33653 - DNA, 511 bp, Arabidopsis thaliana columbia
ccaagatccattcacatgattctcctttgtttctaactatctacaacctcaagatgagccgacactaaccgataaaacaaaaacttgccctaatgagaacagcttcaagattgctcgaaattttatctaccaaaaattgcagaaatcaatccaatggatctcactttatatcaatcctatgctactgactaaaggcgatacatatcgaatatgtcaattcatatttgtgtcggttttcgaggcgattcagctccaatatcggttctttaagctccacaagttcatcaaaattcaaaaaaaccacaacagatccattatctaccaaatcttgctgagatcaatccaatggatctcacttatatcaatccaacgctatgcaccaaagacaaaatatatagaatctcgattcctagaagtgtcggtttttgaggcaattcagctccaatatttggttctttaagctctacaagttcaccaaaaccacaacagatccaacagtttgattctagac

SEQ ID NO: 33654 - DNA, 342 bp, Arabidopsis thaliana columbia
cgaagctcccaagaagctcaagaagagaatgccaatcactagagaagacggtgagacagagtatgaagagtacattgattacttcttccctgaagaatcacagacgatgaatctcaagattcttgaagctgctcataaatggaagaagcagaaggtcgatgctttctgaggagtattactattaacgtttccttagtgttgttatatatcaaaacttagataaacttttgtcatcctacttctctctgtacattctcacttatctgtttgatttagcatttagcattcacttttattatccaagcaaattcaaatcgttatctgttttttgtttctgaggaa

SEQ ID NO: 33655 - DNA, 771 bp, Arabidopsis thaliana columbia
cgttccttttaggaaataaataagaagcaaagaaaatactctctactagttgatgaaggcttggaagggagatgacaaaacgtacgtagcaaatcaaagaggaaaatccaaccctatccacacagtttttggctctttgcttgcatcacaagtcacaaagacacattgattctaaaaccattcatttggaaacagaacacttattgattatcctaaaggaaactaaagaagggagctccaactctggatggttttaactttacgtccaaatagacaattcaagattccttaactatcctaaagaagtttaggttaataaaaaagttttgctcttcctacaatctctagtgttatcaaaatctcataaaaaaattgtagacaaaataaaaataaaaaatataagccgctgatgttaagccctacgacaagatttacataaaagttaagctacaaatcctcagccaaaacgattctaaacatgtatagagaagaaaggtaaataatatcagaaacataacagtttgagtaattactgcttactttgttaagttgccctgttccgtaatctgattcgcattcgaagcttgtcggttggatgcgaagaatgggatccgatgcagccaatgcgggagagcaaacctggagaaacatgggttaaagaggtgttcaaacgggctccagtctccagcaaagctcataatgcgaccatcgctactatattccaacttcttgtgacgccgaaacttgcctttgagcaagctagtagatact

SEQ ID NO: 33656 - DNA, 608 bp, Arabidopsis thaliana columbia
taaaaacagcttaaaattacggatatatataacacgaatattttgctacctctacttaacgtatacttccagttttctacaaacacaaactgcaacgtttttgaggctacgagaagaaaaaaatgtccgtcacgttgcgtcacttgagacaatggctgtcgtcacattcacgccatagaaaattttggccatcttacccgtggtcgttgacctggaaagatatcaatagtctatttcatatacattcacacctatgtcaaataaaatttgactccaaaaacacttgaatataatagtgaattagttacaaataagcaaattttagttaggtaaagaacaaatagtaaatttgacaaatgagaatggagaagattaaaggtaaaaatatattggaacgactctaaataaagttttgtatttctctttttctttcttctctattactatatatttctcatagtcttcattaccctaacaccacactagtcacacacttaaatgttcttccgcctttgacgccttaatctcatctccacaacccttgcagtcaagttggtaagtctcttaaaaatgactttcttttgtttaactttaaatggcactgagtt

SEQ ID NO: 33657 - DNA, 639 bp, Arabidopsis thaliana columbia
cgtggatcgttagtatcggccgccagtgtgctctaaagccactgtattttctggaagacttcttgaagaatgtgccaattgtggccttgtccactcttagaaagtcagtatcgtggtgaaagttctctaaggccgacgtgactttatcccattaaaccggggaaagcagttgaaagccgcggggattatgtgtacctgctcgtttaggaagtcggtgaatcgctctcggaggcttctccgaaactccgccctgctttcgaagtatacaacaactggcgactcagtgagcgagtctctcgtccctaccttacacctagatatgcttgaggaatagactaaaggtagtaagaagtaggactgccggaattacttgcaaatccgcttattgcagtcgaaatttatcacatgctcccaagaatcgtcccttgctgccttaaaatgatggtgctcctcggtttaagccaagcccactaaggagatccgtaaagatcatgtgattaaatccggcgcgtgctcgtcgcgtgtcgcgtcgtcaatgccgataacaatttcgatataggttcaagaccaacttgtggtttgcgggaatagttctttccacacgcgcgagattcaggatgatctgccagagttcaatag

SEQ ID NO: 33658 - DNA, 1186 bp, Arabidopsis thaliana columbia
aaactacatcgatgtatcacttcttcacacacaatactctcgattagagaagatcaatattgaaaaaatcaaaagagaatatagagactagaatcttcagcaccatctttagattctacttttcccaagtagtttcgtaaaagatataatcaaatattgtatagtttagtgtatttaaatttctaattgattttatgttttaaataaatatatcgctttggtattcaatgtaagttttttaagaaacagatatagattttttggttcgatttttgatctgaatcgtttaaatcgatttttttctttgtaaaaccctaaaactaaaatatctattcttctcaaaaaagacttttatatccataaataaagtctaatttgagtataaaagtcttttccgaataatagaaaatgaccaaaacacccttgtcttcacaaattggtagcaatttagctaaacttggaagggtttttacgtaaataaacaagaataaaaagttcaaatgaccttaaagtttctaaaaattacagtaaaaccagagaaccatataaaccgtgaggtgtctccccagaaacgaagacgaagacagattccagtcaaagaggcagttgggcatcgacgtgagctttgacggtaccctatctcctccgtttcctctctctgtttctccgaactccggtgagtttccgacgctctctctgtctctctctcgcactctctgtgccattctcttactcttcagtacggttctgttttctgaaatcgattagtctttggttttgtcaaaagcccataattttaccttcatttctgagaaattcgacgctgtttctcatgtcttacttgaatgtatgtctttgttgaaaacatgtttggttctttcgttttcttttgcttttgacagtgctgaattcgaatttttacatgtagggttttagcaagagaatagcttgaaaatttgggattttttgtgtttggtatgagcaccaaagatgtctgaattgcatgtcatcgttggaaaacttgtttggttctttggcattagcatttattttaacagtgttgaatttcgaatttctctgtgcagggtttagcaagagacgagattgaagaaatctgggatatttttaaagtatgagcaacaaagatgaggctctacgagctaaagatttagcagaagattggatg

SEQ ID NO: 33659 - DNA, 505 bp, Arabidopsis thaliana columbia
actctccctaacataatgtcaaacattacaaaaacgagcatagcttatacatatgcacgttcatagtctagatcacattttcaagctcactggcacctttcccacaaagcccagttagtttatcttttagtatctcaactgtaatttccgcctccgcttttaacaccgtcaaattttctatttcttcttcatacccaaacagcaaagattttaattgctcgacctcaggagcacataagcttctctcagagtaacttctttctgcattctcatccctagttgcgtgctcttcgagttcagctgacatttcatcatttctatcagcaagagctctacttttagccatggaagactctagctcagactttaagacttcaagattaatcaataactgattgttttcgtccatataccgcgtttcgttgactagacaatggttaagggcagattccacatcagtgtacttcttctgaaactcaaggtggctattagagcagcagctaag

SEQ ID NO: 33660 - DNA, 960 bp, Arabidopsis thaliana columbia
gtcataagccgtggttttctcacgtttatcatagataacagattgtcgatcagcttccagttccaatattttatcctccagctctttagttctctttaattggctggattgtgcctttttcctagcttcattctcatcaatggcatcttgtaatttcatcagaagttcctcaccatgcttcttggacatggtcagttgatattaaagttcctgcagcttggtgtcatactgttccttgatgaaaatgattctcaacgactcctgctgtggagttagtggggctttatagtcggccttctcacgagcgcgattgcattgaactcttctgttttcaaaatctgctcagagagcttctgagtgagatcactgcacctatttttcagtgtttcaagctcactggcaccttgcccatatagcgcggttagtttatcttttagtttctcaactgtaatttccgcctcagcttttaacaccgtcaaatatttcttcttcatacccaaacagaaaatatttcaattgctcgacctcaggagcacataagcttctcttagagtaacttctttctgcattctcatccctagttgcgtgctcttcgagttcaactgacatttcatcatttctatcaccaagagctctacttttagccatggaagactctagctcagactttaagacttcaagtttcgttgactagaaaatgcttaaggaaagattccacaactgtgtacaaggtggctattagagcagcagttaagttgttctgcaaggtcattgatacatatgtcagactggatctttgtaaacataagctgaacatctgcagccattagaaattgaaatattttttctatagaagactttttcagattcacttaagatttctgcaaatcttgtggagcttgtcagcataagtctctcattcagttcttgtgaaaacagtctggatatctgctgctactg

SEQ ID NO: 33661 - DNA, 518 bp, Arabidopsis thaliana columbia
atttaatttctccgtgactcaaaaaaaaattaggagtttttactacaattattgaaaaaccccaacggttagattaatatcagaaccgtgttacataattatcagagtttattttctctttgatgagctatatttttttattatttttttgtgtgtaaacaacacaatgggttcttcaatgtgaagacaataattaagggtttttgcttaccttaattaattaattaataattaccttacgacggttagaaataggatctaattttagatttcatcattaaatgaagaaaagatatggaaatcagtatgaaatatggaaatcgatcgaatttaaaaaattctatataacccgattgtatgttttcttcaaaatgtaaaatatggaaatcgaatttaacatgtcaactttcactacttaagttgaagtagtaccttaacccaattcatctttagcgattagatatagtattgaatgggcctaaaagtatccggcccaattgattaatatcttatttgac

SEQ ID NO: 33662 - DNA, 497 bp, Arabidopsis thaliana columbia
ctttgccttgcttttggagtgaaataagacatatatacccccacgatttcgtttgagatatcattgcaaaccgggttatggtttcgtttggtattggtttaaaatatacggttataatgtgcggtttagaaaaaacagtttgtgcgtgacgacgatcgtcggatttcaatagattaaacggccgagattaaacattgtaacttcccttgctttgcgagttaaaaaaaaaactgaaacacgagatcaattcaaacacataagattctgggtttcaatcatcgatctttggtcaactgtcgtgtccaaggagctacgattgttgaaaactgatatcatgaaattaaaacgaaaatccgtgcattctatttgttatgggtatcagaatataaccaaatctttttttcgtttatatgtacagggatcgatggacgactatatcatggttatatgtggagagtggttttgttcttcgactggagagtggatattggagatat

SEQ ID NO: 33663 - DNA, 838 bp, Arabidopsis thaliana columbia
ctaataactaatgttttcatttagtctaatgactttagttcagtttctctttacataatctaattgatttttttatatatttaaattctcttattctttaatttgaattttatttttgtttatataatagcaaaagtgactgaatcaatttacaaaatgatatttaggtaatttaaaaaacttttgaaaaattgaatctatgaaaggttagtttgcaaaaattctgcgtagaaatttatagaaaaatattatttttgtcctcaatgcatggaatcagttaagggataattttatgcaaaacaaagaaaggcttatgaaaatgtgtggcgttgcaaaatttttactagaacaaaagcaaagttgtggaaaacattgcgaaacgtgaggaacacactaatgttcaggtacgaaccggaatctttcggtttacctaatatgttatcaaaacagctactcaaagatgggcctgttttgggccaacgagatttgtttcagtcgatatcaacacaaattagtaaattaaagttctacgttttatcggtgaaagtcaacggtttcacagatccctggacctaaacagtttttttaaaaggtataaatttttttgctgaccaatatcgtcttcttcccgatctctcagcttcttccatttacaattctaccctttgcctcttggaacctttgaacgaaaatggcggaaacgatcggctcaggtacatctttcttttacttcttcacctttctcaattgaatctttcgtatgtcaacatgcgaatgttcctggactaaaaatgtatggacgatatcgattgattttgtatagtgattgattttagat

SEQ ID NO: 33664 - DNA, 539 bp, Arabidopsis thaliana columbia
ctgtatagagtttttttttggggtcaaactgaatatgtttagagtatattttatttattttcttgttatctgatgatatctttgtctttctcttattgtcaaaagcatataatccgacttatcaaattttttattttataactgactaatcaaatatttttttacttaaaatattattgataattagaaaattagatccaaattctacatttgttcttttctctaatctctatagttttggattttagttggtaacttttgaattcctgaaagtaaatttggtaacttttgggtagtaatttgattttcaaaaagtttagaaatgcattaaagtgtaaaaaacgaaaaacaaaaacccccaagataaatagttttttgtttggggggtaaaaatgataaatagtttgggatgtggatgacgtcaacattgatcagttacgagattacgattttataactcttttaaccaaagctaatcacttcacccctctgttttgttcaccccaatcaaaaatctcaatcccaatcacttcgcttct

SEQ ID NO: 33665 - DNA, 499 bp, Arabidopsis thaliana columbia
tttcaccatttatactcaccagtcaccataaccagatctcaacatccacaacgacataaagaaagaaaaaagcagaaagatagcataaatcattcacacacaagtatcaaggtttgataaaaaaaaaagtgcatatagattgcattctttgaatatatgggtttatatggacggcaaacatgtaaggtaacaacaatagtagatacaattgtctttatatacacgtacgtgtaagaatgaagtaaacgtgctccaactaccaaagcccacctatcacatttcactggatatttctttaccaaaagaagaaaaaaacaattcactatttttgtttcctaccaaacctgaaattattatgatttcgagatgggctgtctgttacattgttgagatgatttcgagactaccaaagccattactgggcaggctctaaggactattatccatatccttaatcttcttgggaatgtcagtaccaagaagattctggcctgaagca

SEQ ID NO: 33666 - DNA, 518 bp, Arabidopsis thaliana columbia
caatcttccttcaacgaatctctctcttgcttcaagctattcacttccctaaggagatcttgacttcttttggtctctttaacaatttgtttcctcaggctttgcagttctagctccgaaagatctgcttgccttgtcaaaccaacaagctcgttcttaagcttctctacctcgtcctcatccgaggagttaatcgcggtgtccctcgcgactatatcattcgaactattggtcgagtcatcagtgctgctgataccatgatcagaacttccggaccactcggactccgatatacgagaaggctcttcaaacaaacttttagctgaatgaagatgcttagtgggatgtctcaaaggcttggcaacttcttcaggtgtatttggctcaatgacacttccagagcttgacattgtactatcagattcaattgatgctcttcgtctcagttccgcaaaccgcgcacgtttaccaaatggcccttcctataaatacaacaaagatagtagaacatcaagaga

SEQ ID NO: 33667 - DNA, 608 bp, Arabidopsis thaliana columbia
tataaatataggaaagtatattaagagagagcttgataccacaacaaaaattactgtttctaaaaactaacaaaattactacacttccaattataaattgttgacttcaatgagtttttctttttttttggatagctaattaacgaatgttcaatcaatataaggagaaagctttatatatttgcttttgaagtaaataaaaagtatatggttgactactacaaatatcagtgttaagcattaattgtttcaaattagcacttagctattattgttttttcgtaattgacttcaaattgatgtgaccacatgatgaaattctaacattcttgtcgctaacaaactgcattattgtttcttattaaccctaactctctcactaatcgataccgcaataaacgtaactcatactaggattcatctaacctataatacgtctttccgtaattctttataatttggtgcaaccttgatggatctccgataacagatatttttatatagtttgtcattgttgacacacttgccattactttgacatgtatttgtttttcatcatttggcatgcaaaaagcaagaaacaaaatgaacctaattaaaaggagaca

SEQ ID NO: 33668 - DNA, 533 bp, Arabidopsis thaliana columbia
tcgaacaagataattcatactaagtatctcactattttctcgatctacataaatcatcttcatttctcttgctaaatttattttttcaaaaaaaaaaaaatccaaaacaaattaatggattttagttgcaattacattgatttggtaaattatgttttgcaatttccataataatctacttgacattgaacgacttcaaatttttaaaaagttctatctgagaatactagagataatatttagaacaaaaaataagttagataaattggaaccggagctttgtagttatcggttaaaaaggccgccttttcacgtgtgtctcggccacaaatgttctaagacagagaagtaagattcagtgaactttgtttgtctcttatcgaggaaccttcgggtcccgtacgtttaatttgcgtggacatattgcgccacatgactgacccttacacacattcatacttgtactttgctataattcccacgtggcaattaaaaagcctggagaaatggatacatcaagaaagaaaatggtg

SEQ ID NO: 33669 - DNA, 860 bp, Arabidopsis thaliana columbia
  unsure (1)..(860): unsure at all n locations
taacataatatctacatctgaatcatcttcctcacaaagatttcgttccattataaaacctacaataaaaatatatataatagtatgatcaaaagtgataaaagtgactttgttctcaagcaaattcacgagccatgactactataatgatgaaaagagatagactttaccgtgaaaagggaagaagaaagaagaaggagagaagaaagtccgagatgtaacgtgaacctagatgtggaaggaaaaagaaagtttttggcaaaggaacaaggcaatatgtaatattctcatgagactgtatgattgtgaaaatctcaagatacaaggcaatattttgattgctataatttacacatgaaatcagtttgagattcattcaaatcttttcaaataaaagtatttgtgaaaatctatcaaacatgaataacatgaaacttgaactaatcattgtgaatatgagaaccaataacattagaattaagactctagtaatatacacattagaaatatgaaaaccaataacacttaattttaaagtcttttaatgaagatattgtaagtctaagacctaataacacttgatttacataatggatttccaatcaatgaatgaataacattagatttgggttagagtttaactctattaacatccactaaccaataacacccccttaatctttcttttttaacttgattatattttcctaagacttgagagcaataatatttaccaacatgccaaaacttactaatgttgttgtctcggtatagtctgatcttccaaaaacactaactttagtgtcgcatccagagatgatgtccaatatgtgcgattgcaaaagaggaagagantatgg

SEQ ID NO: 33670 - DNA, 1004 bp, Arabidopsis thaliana columbia
gagaaggctacaagctcagaccttctgatttattaggagtctactcttacagcaaacgggtgaatctcggtgttggcaattctggaagcgcacgtggtgaatgcgtttacactacagtgagctacttcaacataattcattttcaatgtcatcaagaggcaaaaagagccgacgctgctcttaaaaatccgaagaaagaatgggaaggagctatgttgcgtaacaatgaatctctttgcaactctctcttccctgtcaagggtccctcagttcccttagcacagtatcttcgttacgttgaccagtactgggataatctcaatgctcttggtcgagccgacggaagcagactccgtctattgacgtacgacattgtcctggtaagttaaaaattggttctgaaacttactaggtgttggccttcggttcaattggcagttggttaaaaagtgtcaattcggtttggttttaaacttgatcgggacttgattccaaacagctaatcaagtggctctgttgatttcgtttcggatttaccaagtgattcactgacaacttttgtttcatctgtagatgctggctcggtttgcaacaggagcttcttttagcgcggattgccgaggtggaggaagagatagcaattcccgtttcttgcctttcatgttccaaatggcccgtcatcttctcgaccaaggaggccccggcaacgcacaaacatggctagatctgtttcatcgtacatttcatcatcatcgacatctacagcaacagcgccatcctcggactcgcgacctttaactcctggatcccagctatcatcaagtggagtataggaaacggttcagttcatgatggtaaactcgcttctatcagaatcatatgaatcatggctccaacaccgtagggtctttctccagcgggggatttaccatactttcatgcaacacgctcacggtcgggtagcttctcagcgctgcagaaccaaccagttcaggaggcaaaac

SEQ ID NO: 33671 - DNA, 627 bp, Arabidopsis thaliana columbia
ccccatatctgtcaatggagatgcagttgtcaagtactacaatgttaatgacatatcaaaagttgtactagtgcttatatctgcatcaagccatacactagaatatgtagagatttgcaaagcgatcacccaatactgggatcttcctgaaggtatctccttgagggaaggggagattggtttaactcaagcaaaggatagagaggatggcaaggtttcagagatcactaagtcagatagtgcaaatatttccaatagaagtcatacccagactgtgtttgacctccctacatctactttgggtaataccaacagtgctgttacaggaggttcatgtggaatacaggggaaaaaattggctgctcgtgttacctacctgggtttatcgtttaaacccaacacatacaataatcattacacaaatggagaattggctgtatctgctgctgccagtttggctgtcctatcgtcagaggaaacccatgaacctgaccttcgcaagtataatagtgccaagaaagctgcatcaagtaacatcttagagcagatgaaagctttttcattagtagcccccgtttcttctggcaagtcatgataagaaggagattacagagaaagatgtggttg

SEQ ID NO: 33672 - DNA, 501 bp, Arabidopsis thaliana columbia
ccctcaaccatgttactcaagaccttcatcctcatctagaacattagttattccatccaaaaacagtcattgggtttgagaaggaaaaagaggcttcaatgtacgtagagtggcatcaagctcaaatacctaggctcagctctttctcgccacatatcataatatctgtgacattctcttcggcgagataatcgtgaaaatattgactgtgggggacacattacctcggtcgcgctttctcattttaggatcaaacactaaaaatataatcattatcagtttttccttcaacttaataaatttaacgcctatatcttcgttgttattcctacaataatcatatttccacaaacgttatttttcgtagaaaaaacttttaagtagtcttcttttgcaactttagctctcatctccaaaaatacagctcaattctataaaatcaacataaatataactctcatacagatcttctaaaaggttttcgatcacatgcattagatt

SEQ ID NO: 33673 - DNA, 578 bp, Arabidopsis thaliana columbia
gtaattttgtaagtttccaagaaaattttggtactaattcagcaatttgtgtttctgatgaagttatggatataagttcgacctttagttagtccatatcactccaaaataataccattttttctttgggattgaaaagaactctaaaagttggttttttgttaactaagtcccgtagcttggtttattggattaaaacatagttagagagttttaaaaaaatatttccacaatttctttacaagctgtaatcgtgttttgaataaaagtttgtgaatctccttgttagacaaccaaaacaatcgcaagactaggggtgtcagtagtgtttttcatcttccacacttaactaataatttgttgtttaatgaatctaccatctattactatatagttttgttcaactttaaaacgaagatgatatagaggaacaaagtagtccaaatttcaggtgactcacacaagagaaggaaacactaaaattgagacactccatctactgattactctttttcgacatgatggcttacatcaaccatgttactcaagaccttcatcatcatctagaacattagtta

SEQ ID NO: 33674 - DNA, 525 bp, Arabidopsis thaliana columbia
tcccggtccaaaaaattctgaagccttgaagggaaacgaccgtgcatggcatcttcttcatcaaaaacggtgttctctctttgatatttgatggatgtaatgacttagatctaaattaatcaactacgtgcatttttttaaggataaatatgccatgtaacctgaaacattgtataaatcctacgtaactagagttggatgatggttacatttgatctagttttgtttacaaaagaactgttttgatgcaagtcaaaaggggtgtatatattgtaatgattatctttaaaagaatctgtaacaaagtcctcaaacaataaacgaaagactgcccatttgatgttgagtcagaaattttacaatacaataaaaagaagctggtttaaaaacaaacagaagaagcttcagtcacactacaaaccgcgagacaaaaaaatacctagaagctgagagacagtaaaacaaaagttaaacgctgaagcactcttacaaaaacttatttcggataacaattcatcagtgaat

SEQ ID NO: 33675 - DNA, 515 bp, Arabidopsis thaliana columbia
cacggcttcccatttctttactaacaatgacttcttgtggaagtagctcataataaacattgcttgacgacgatgatgatgaaagaatggtggagaaacgacgactcactccacaaagggatagacattaatgggcttaaaatgtattgggctttatttattaggcccattaagcaccgccgaacgtcgtgacattgttagctagctcgccggagcaaaattcagtctgtgaaactttcggagaagaagggatgtcgagaggatctcgattcgttagggctcctgggctcttactctgtcgcgttaatcttcaacctcaacccaaaatcccatctttttcctacagtcttcgctctgattatcgtcttcataatggtttctccaattacatcagacgtaactcaattcgaacatctccggttatcaatgccttcctctcagataactcaccatccccgtcaccatcaccatccccaattcgttttgttcacggagttcaatgcttaatggtcgtc

SEQ ID NO: 33676 - DNA, 644 bp, Arabidopsis thaliana
  unsure (1)..(644): unsure at all n locations
tgactttgttctaaattaaccactacttgtatttgttaaaggataaatgccatgtaaccttaaacattgtataaatcttacgtacttaagagttagatctatccatgtaatctagatgatggttacattcgatctagttttgtttatagaaaaactgttttgatgcaagtcaaaagtgggtgtatatatatgtaatgatcatcttttataaaacctgtaaaagaagtctccaatcaataaacgaaagatggcccatttgatgtttagtcagaaattttgaatatacaaactgcaaaagtaatcaatacaataaaaagaagaaggttaaaaaaaaacagaagaagctttagtcatcgctacataacaatccatcagtgagtaatatatggcagaaaataaatgtcttctcctgagccacttgcatgcttcttagaggttaaggaacgaccacaatgattttcaggggggaggtggtggatacactctgccatatttagagggtggtggcggcggtgaatatctcttgtaggcagcagcatgcgagttgaggaggaggaggaggaggaggaggangaggagaaattggaggtgaatagaccaggtgcggangaggagaatatttgtaagatgcaatagctttctgt

SEQ ID NO: 33677 - DNA, 1178 bp, Arabidopsis thaliana columbia
ttaatcgccacttttatataatttcatatataatctatcttttagtgcaaaaaaagtaaaaaaaataatttcaacgaaactcaagtttggaaccgcaatccaattattttaatcaaatcattgactaccgaaatatttttccaccttcaaacaatctaaaaagaaaaataatttttttgatcaattcaccaacgttatttagtttataaaacatgataaaagatcctccaaaaatataaaacctagactttccttaaattttaagaagtgtacttttgttcactcaatttattatttctctgccaaattctctatattcttcacacgtaattactatctagttctcgtccatttcctttatcattttctcattgtcttgtaaattgaccactctaatgatctctattatttcctctagaatagagtatgatttatctccaatctatcactctatatatagagtaatcctacaattttctctattttaaagtaacatatagaatgaggatggagagaatgtactatatcatagagttttagaggacaaaattaaagtgggattggagatgctaagtatgtaaatttggttcggttagctatcataagggaccgagtgctatatgacaatgtattataggtaaaagaagtgatattgtctcctgtagatttagtgtccttaaccgttcatcaaatctatgtgaatctcagtagtaggtagttgggtgaagaacgtgtgaagtctatacaactcatattactcctcaaacattttctgataatatattgcatacattgaacctctttttaaattcaaaacatcaaaggtattgatcttacatagaaaaaaacatagactcttatgttaatgtgtctaaaagtctttgacaaaaatcttgaatagctaacaattatttggcaaaaaaacttccaagaatctctgcaactttgctaatagagaaattacttgaatacttttaatatttataattcacttaactatcacttaaaatataaacatttacaaccattttttttaatgtttctcaagcctgatgatttttttttttttttggtaggaaaagggggaaaatccgccaattttattaaaaagaaaatacgaaattacattcggatagttcttgaaaacgcaggcccatttacatcctccaaaacaaaag

SEQ ID NO: 33678 - DNA, 565 bp, Arabidopsis thaliana columbia
ttcttcggtttggtgatacaacattactatttatgatttttgtttatctaatgttataaagaaagttattaaaagaaaaaaaacgtatcgtctcgctcgctctctttagatctgcttttcgtttttgtttgtcccatttataaaaaaatcaactggtgggagctaacgctcgcgtcttcttcctcttgacgttattggaattcgtagtcgttccgattcactgagccgactcggcgtagtagtagtagtttactactggtgatgtgttgttctagctgtttgtgatgatcaatttctctacattggactgaagaagagagtagtgttgataaatggctggttctcagcgacaatgctcggagctccggtgagaaatcctgtttctacggcgatcaagcacactcgacggtggagatgtttaagtcatcgagatggcggacggagaagagcaacaaaatcaaaatcgttttcaagttgcagtttcatgcgactcaggtaatttcactctcggagaattttccgattcccggtcaaatttttttctgatgatttcacggggaaaatg

SEQ ID NO: 33679 - DNA, 632 bp, Arabidopsis thaliana columbia
tcttcggaagctatctttttctcctctaactgatgctttctcctgatccttgtcaatctgtatagggtttgagccaccccttgggttcttcttaagctatctttttctcccttaagtggctctttcttcatctccttgcttacatgcaaatctctcgcagcttgactcgaatgtgtcatcgttaacaaagaacggccctctacactatacttgctgctaaagaaagctacaagtaacagaaccagagccactgaacagtatctcttcattgtgatttctcttcttgtaaatccgttaggattcttgaaagctcgtatcttattcttgtgacagtaactgagacaatcttggatagagatatgagttagataactagagacttctaaagcgtgttgctttatagaccaagatttgtgtgtgtttgaagaaatagttattgggatctaattacgtgatcttactttgactgctgctataataatcagattttgagtcacttaccttatcatttactgatgatgatattactcagcagcatctacattatcatatgtacagtacacattacctaactcatgtgcatgctttgaagtttaagagatggtggccatgtgaatagagaacgtgactac

SEQ ID NO: 33680 - DNA, 526 bp, Arabidopsis thaliana columbia
gaatggtcaaagatatataacaaaacaaaagaaataaaagagttgtcgcatgttcttatataaacgatttatatattataactgcattttacattattgtattgtttagccgagtcgtgcgaatggaatatcaaatcgtcatccttttgattttgaatgacaattatacagtaatggagacacacacacaaacatataaactattaaattctactgtgaaacgctaagtcaataagattaactggtgtaaagctgtctgattaacaaaaacttaagtgtgaaagctgtcttttaccactcttccaaacactcgtaagtcgtaccaaatctagttctttatttattttttaatcgttctctatattatataaaagagaaaataaaactattaacttctatataattcataaaccattgattcctaaagattacaaaatcattgatctccttcttcttctttaactttaagcactctctttctctctttctctttctcttgtcgtcggagaatggagaaagataatga

SEQ ID NO: 33681 - DNA, 509 bp, Arabidopsis thaliana columbia
caaaaaaaatatttactatattttatttttatatcatcataatatatttatttaaattagtaatataaggcattttatttactatataaaattttttattacaactattatattttactaatccattttctaataaattatttaaagtcaaaaatttacagcaataattctacagcaataaaagttatagttacagccaacataactacagcaaaatctctacagcaaaaattgtacagttatagcccaaccaatcacccacaaaactccaaagtctgctcccactgtaaggtaaggttactgtagattacgacttaacatcgtagaatgatgtcatatatatatgttactgattaagtacggttaatagctctaacataatatttgctattttatttgcatgagttattgattagagatggaatacccaaaaacctatgaaaatcagtacaaataacaaaattatttgttatgattttactagagatcacagggttactaggctaagc

SEQ ID NO: 33682 - DNA, 499 bp, Arabidopsis thaliana columbia
gttttgcaagcaatttacttgagtcctctatcatttccttcataactctacaataacaaaagaaccaaatattacatacttgtacggaactctgcagacgaatctaatccaggttacaaatagttctcttacttgttcggaattatcacttcatcatctatcagacattttcttttccgtgaaactcgagaagactccttcgcagccggcgtagggatgatcgagaactgtggacttgttccccctgtaattcaaagtataggttaacacgctaaaaacgtaactaaaagtatattaagctcatatttcaataaagtgtgcaccttcagaaattttcaaccgggaaggtgttttgggagtgacagtaactggagtatctgttgcattaaattcgctactagggtcttgtagaacagtcatgtcagagagaaacctttctcgggaaccatggagattcacttcagaagtttcagattgctctttatgagaccatgaaaca

SEQ ID NO: 33683 - DNA, 795 bp, Arabidopsis thaliana columbia
ctcttactctcatccttctctcacaacattagctgctcgtgactcgaaactccacagatttcgattgctccgttgtaaagacgatcacatctggtgcgccggcgaaggaaccaacggatctgttcatagccgattcagaccaatcggtgacggcgtcgtagcgctcgcgaacaatccagtttccggtaaaccttcaagctctgctgattactctttctttccctcggagttaccggctcggccggggaatgaagtcacgatctccggcgattcgaggaagaaagtagctaacttggaagataacgatgcggttagatcggagagggtgttatacgacatcgtttcgaaatcgatttcttctgtggctttgattattcaagggatggctgatgaaactctagaatcagctaaagagtatctaaggaacttgattgattcaccggagaagaaggagaagctggtgaatcttcagaaccagattgataaaaggtctgatcttagtaaggagacgttatcgaaatgtgttaaagatcagcttgatatcttggtagctgtaagaacagggcttaagtatttcctctctggtaagatcagaatccctatgaacgaattggtagagatctttctcttcttgagatgtaggaatgtgaattgtaagagtctcttgcctgttgatgattgtgaatgcaagatctgttccaacaacaaaggcttttgtagctcttgtatgtgtcctgtttgtttgagatatgattcagctagcacatcttgtagttgggttggatgtgatgtgtg

SEQ ID NO: 33684 - DNA, 247 bp, Arabidopsis thaliana columbia
cttcttaatttcaaatctgcaatcgtactttttcgagttctataagtgaactcagattttagctttgtttttttaaggttcataagaacaaattggattttgagctcacagtataaataacccgactttgattactgggtaatattaaaatggccattgtagttatcgttagtagttttgggaattagggtttaccatttccgggtattacattagataaccccccttccttgccccctcaatcaat

SEQ ID NO: 33685 - DNA, 413 bp, Arabidopsis thaliana columbia
tttaatatagggttcaggaaattaatagaagaagaataatgagattgatttacacaaaatatggtaattgagtggggcaaaaataggatttgaatttcgagtaagggggtcaatttaatatttgaacccaaattatatactaaataccaaataattaagctattaaatttttttttgtaaaagtcatggggtcaagtgacccccctcctgaagctgtacctccgccactgcgtatcacagctttttttttctgaaatcaaagtttcgatttttcaaagtagggggaaatagattcactgatcatgaaaagtctactaatatttcaaatatggatgattattgtacccaaacaatagacttctaaagacagaatctcattccaatctgcgtagtacatatagggctattattgt

SEQ ID NO: 33686 - DNA, 503 bp, Arabidopsis thaliana columbia
acaacaacttgttcgattcacctaaaaagtaacttccacaacatcagaatcacaaacaatccaccataaactcaactgataggtctcagtaacagcttcaagataaagaaataaaacagactgaatttaaaccaactataagtttccagattccttcaagcacgagacccttcaataggacaagccttgggtgtaaatttacagtaaaaagctcattcctttttcaaaaaagcattttaaacaccaaaacagaatgcttgaacccaattacatcagcaacagagcatttaggacaagccatgaatataattcttcttttggcagcgagaggtcctaggttctattcaaagaatgcccttcacttagttttaaggataagacctaattaccagctcaaaagtcagaattatagaatacagagacatttccgtattagattttaacctagggaagctatgagagacgagaactaagcaacacacactgtcatagcagtaaagagc

SEQ ID NO: 33687 - DNA, 242 bp, Arabidopsis thaliana columbia
ttgcagtacaaaatcgaccatggatggaaacaccataggatcaacaacaactatcatgatatgtactaactattagagaagaatgctaaaaatttcgttaaccaagctctcgcaattccgttgaagtctcaaagatgggcaaaagttatgggaaagtagagagtttcctccttttggttattattaatgatcaaaagctagaaacaaaacacaaactgacaacaaaaaacaccgcagcaaga

SEQ ID NO: 33688 - DNA, 534 bp, Arabidopsis thaliana columbia
actctagagccatgttgaaaaacaaagaaaaggaagtgtttcgatatagattgaagcagcggtgggagtcattccgatagatagggacatagatagacgaatcatagagaggcacccaccctcaccctctcgtccgagtgttcaggggagggcacgactgggctgctaacggtcacaccaatgctctttgttcggcttctaaaccataatctgttgaatctcctcatccgtagggaaggaaggccaactcgagtgttctgacattggccctcgcttcggaccctcagttcttctggaaccgatgtgtccttgtaatctacactctccatggtccaaccattgttctttatcaaacctccaagttttacctgttttcacaatgttaatatgatgataatcaaagagataacaatggaatatgatagctttcaaatacacatcacatacctctgcatcatcaatggaatctacaataagagcaccgccaaggagagatctttgataaatacattacgacccttgattgccattgtg

SEQ ID NO: 33689 - DNA, 614 bp, Arabidopsis thaliana columbia
ttcagaacggagaataaaacgaactaagagaccaaatcagtgttaagaagatatacctgaaaatgcgatttgttagaggactctgtttaggcatccgaaacgcggtccgtgccgatgacggataggcttgggtccggcggagaatctaaatgcggtggacgatgctcggcttgcggcggacggaacacggaccttgcggcggacattggacgtgtaggatctttggatttgttttatttttttgttcaatttttggagaagagagagtttagggcttttgcgtagggttttgcgtaagggagggatctgatgcagctgcacctacaggaagctctgtgaaactgttgcttgctgcggataagtgacacgtgtcaaatccgtaatttctagttttcttctacattaattggttttaccggaatattgagaaaaatagctagtaaacattatgatacaaaatagttaacaaaaaaaatatttatttatagaaaaggtaaataaattaaaaaagtttctcggcatggtggtaatatattaatattaatgtaatgattttagaatatatttcaccacaggtgaatacatccaggaaaggagaaaagaggtttttagtt

SEQ ID NO: 33690 - DNA, 831 bp, Arabidopsis thaliana columbia
tcttaaaaaaaaccacgtataaacttgtaactgactacgatgatttatctcattctcatatcttatttatcgctagtaaaaaagaaaacaaatgtaagagagaggcccagcaggggaacagaagcgggtcccgacataattaaataagtgtagaacaaacgcgttttttactcttctttttccttaaccacacgatcaccaccaatactagctagacccttttctttctttttttttaaagtcctgcgggggctatatatgtatcatccatatatacaatacgctgttaaaaaataacatagtaagagtctgtctatacatacttgtgtgtttaatttgtttgtcaaacaaaagttcaattagaggctccatcaacagttgctaagtagtgagttacgttttttcgatattcaaattaatcctacgtaggtactactaagattacaaattagaaagctttgaaaaatactagtagtaaaaaggggcagatgattggtaaataataatttaaattgtttttagtaaaaaagggcacagacactcacacacacactgctttcacgacccatgtgagttttctttcttctccatcttcacttttttaagtagctagatgacaagacagacagctatctctcttttttttttacgaagaagaagatcacaaaaaaaatgaattttaaaaagggacctttaagagagatggtgggagagagagcaatagagagagaaggatatcccccccacaaatagaaagttagggtttattggaaaacaagaaagagagtgtgtctctgtctgtgattctaatagaggtgtagtacgtcgctt

SEQ ID NO: 33691 - DNA, 429 bp, Arabidopsis thaliana columbia
  unsure (1)..(429): unsure at all n locations
tgagaaagcaggataagatccatattcaagccagtcaggtggcagatgtctgtaatatataaaaatatacaagtatatatagtgaggatattgtagctagcgaggatctttttgttaagtaaatagtacattacgtcaagtaaattgtacattacgtctgtatctgtgtgtggatgtatcagtgagagaaaattgagtatttgaggacatcatttgtagtcaatttaatgcacttttaaaagttgaaaagaagtgatgaatagtactaacagttgaaaagaagtgatgaatagtactatgcaaagccataacccataaacaataagcaccnaaagcattttttcgctgccgggcttcgaacccggcattctgatttagtatcaaactaaaatgattgcattaaatgatgtgctgcatcgaatcttttgt

SEQ ID NO: 33692 - DNA, 629 bp, Arabidopsis thaliana columbia
tgttgagatttgtttaatctgctaatgaagaagaagaattagtcgtgagggagtctttggttttatacaggttttttggataaactggataagggacccttaacttctagtttccgtcagttgtgaaagtacgtaaataccccttgggttttaaatgagattttaatgaagtgtcgaaaaatgccacgaattgcgatggattttttttcggagttggagaatattacatgtgtcgtgtttggcatattctttaccacttcaaaacttttaattcatctgtctctcgaaaaagtaagtatctagactttaaatttttgccactattatatctaaatggattttctactaccgaaagtaattgtgtttgtatgaaggaaaatcaaaaagtttcactcaagaaattgtaatccacacttttttcatttagtatatcggtcaataatatcattctacatgtggcacaatggttgaatgatttattatcggaatgaaagactgttgttttggagttattatatagttacaattttaaatattaagattatacaagagatactagaagaaattgataaaaaaaatcagagtgcatggacggagaatatcatggaatataatagtataatactgta

SEQ ID NO: 33693 - DNA, 743 bp, Arabidopsis thaliana columbia
taccatattcaacatcaatatctatttcgatagggctcgatcccgaatgcgaaaaaaagcaagcaaatcagagagtataaccaaaatgttcttcactataacctggttcccacaatatccttacaatgcttattccaattgtacattatttaaacacatggactataacatatataagtttttgtaaaagagtgtgtatgagagaataaaactaaccgaagaaaagtgtagtgatccaatctcatttccaaagattgaacctttttttatatatataataactttgttcgcttattcatttcttgatcttcctctgctgcttctttggcccggaaacgactaatctccttacagaacaaccacacctcgctctgaaaacaagcacggctcgcccattaggcggacagtcttcttcagctcagcttccaattcacggtgatgaacacgaggcaactcaaacattcccctcttgttgctggagctcttgacgcattcctcagtctcaagctgaatatcaaactcaacagctttcctaaggcctttacaattaggtttgccgcatctctgcatagtacacaagagtataacaagccaagtagagatggcagcacagaagatactcaaagctaatgatccatacacaatcgggttctgcaaaatctcttgtttgactaaaagagagagatctgaaaagacctcaatcgatttgagggtgatgagtttgacgtaagggaagaagagga

SEQ ID NO: 33694 - DNA, 878 bp, Arabidopsis thaliana columbia
cgttcaacagcaagacgggcatgagcgtcttgctgcttcttcaaatcttccaacttctctactagagactctcttacttcaggaggcaaatcctataaaagtatcaaatacatcaacattcaatattctcatatggggtttgcttctaatagaccatagattatcaaattctctacaaaaacacaacctagaaatgacattatcaaccttaagctctacactagacaagctaactgagtcaccagaaagaccggaacttaaacacaaattctaccaaaaaacactaatttacagagaaaaggaactgactttacgaagaaagcgttcaacagaacgcatctgattcttgatggagacagtcttaggtttcttctctacacgcaatactttcgacctccgactgcttcccgccgtctgttttggttccgaatcccttctcttggcatagcctccgtgcgccatggctgaaggagtttgctaaagctttttagaagttgaagaaggaggaagagttgagagaccaaaattaggggttgtgttttttcttctttgttcggcgttagttactcttcaatcggacgtcgaaacgctgcgtattagggagataaacaactaggttgaaccggattattttctgggttaacaggtatgtcggaatgtgatattagtttatggaaattccagttttgccctaggtcgcttaatcgtttcgtcagaaatcgatttcgtgtttgattgctcgatttttagatttatcagaatttgtatatcaaaatcgagcgaacgaagatctccggattgctgcactctgctacatgcctttcgaatccgtttactgcatcgccggagaagtaggaatctgtttacttacctttgga

SEQ ID NO: 33695 - DNA, 512 bp, Arabidopsis thaliana columbia
cgctcaaataaatcgggaaacccacgaagcattgagaaagctgacaaaatggcttgtccaaatttaatatgtttttttatcccacaaatcctttagagctaatagtatatttttagttacatcaaatgtctaaaagtcggtagatataatcaaatattggtttaagaaaactctttgatcaacaccgtttaatttaaacaaattgtcggattagatacaaccacctagtcaatggactttactacattaatgtcttgatttttgattctttctatttctttggagtaaaccgagtcggtataatctaatagttggaattagtaggtctagataatgtctcgtttagtatgtgactgttgattataaaaatagttacatgagtatgtgtgcttgatctttttgctcgtttcccggagtaattaaaagaagcttaattgtgttggtgagaggagtttataaaaaggataatggtttctgaaactaaagtgtgtgtttactgtgtagggtgatgt

SEQ ID NO: 33696 - DNA, 207 bp, Arabidopsis thaliana columbia
  unsure (1)..(207): unsure at all n locations
nnnnnnnnnnnnnnnnnnnnnnctaaagtatgattatgcgtagaaattccagagtcgtcagtatagtctggatgcgagatgataatagtatatttgtacttattgcgtgcccggaaatgcgtatatgtcatgtcagagcatatttgttaatcgcataagttcatctcctgtgtatgcctctgaatagtccgcctattcaaggtatat

SEQ ID NO: 33697 - DNA, 575 bp, Arabidopsis thaliana columbia
gattagtttctataaaattcatgattgttgtgcgagtatctgcgtcacttgaaaaaaaattcagactctttttcattccttcataaagctaatagtgtacagcatattttgacctaatcttaaaactcaaatatatagagtcttacaaacgatttcataagcaattgtctctctcgattttctatctatagattagagcttttctttgacttcgtgacttatccagttatccttaacaactaaatcgagattcacttgtataggacaagaattaggcaacaggaagtaacaatctcctttgaattacaaaaactaaaaagcatcacataatgagatattgtttcgttctgcaagaagagaaatttgtctcaaaatagaagaaaagattgattttataagcttaagattatatacaaagatatgtatcaatttcttagccgtgtaatctttaacagagacttctgttttatgcaattaccatttatcattaacaaaacaaaacaaaaaagttcataggtcgatcaaactatacacagatttattcagatttctttcttacaatgccagcgtggagt

SEQ ID NO: 33698 - DNA, 284 bp, Arabidopsis thaliana columbia
tcaggaaaactcttctaagtttgggggatatatatgaaacattgaaaaaaggtgatatcaagattcttccacttggctgtcaaaaagacaatcatgcgtaataaaactacagaggggatctttggtgaatggtttgtttcaaactgtttctcaacacactaagtagcgatcaagattcaagatacgagatcttgtcatgtagatggtaaatttaattgtaatgatttatgtcatgtaaactgattcttgatcttctataagtctttgcagtttcgatcgtatgc

SEQ ID NO: 33699 - DNA, 563 bp, Arabidopsis thaliana columbia
taaagaatttattgcttccgttagtatatatcaacgagttttttaaaaaaaatccgaagacataattaaggaagttatacacaaaaatttagatatacgactgttaaaaatggaaatttattgcattcttatataaatcaacttatctcaaaacattgtctacatcagtcagatagtatatcagaattgtaagaaaaaacaaaacatattacttgcaaaacagtagaatgaaaattcatttttatttttttcactaaaatgatgaaatgacaacagttgaataaaataaactgaaaactgaagaatcatttcactgttctaaattttaccagtcagcaaatatgtgaggagaaatactgtgacaaattactggaaagtaaataaaaaatggttgtgaaaggaggaaaaaggctgtcgttttaaggggacaaaacgacaaggtggatcaaaccaaaaagtacttaatattaaaacgacacgttgttcaatggtctttgcggaccacccggatgtttcccgtttagtgcaagcacaaatcccttttcgcgcctctttattccttt

SEQ ID NO: 33700 - DNA, 883 bp, Arabidopsis thaliana columbia
cattttattttccttttcttctagttcattttttatagtccaatttctttttatctaacttaataatttactattcattgattttaaacctttttatttatcttgtgtaatcgaattatttgttgtcgatccagaaaattgcgtatcgaattcaatatcattaatggtattttctccatgttttctgttgttagaagccggccataggcgaacatggagtgccatcgtaagttctattttctatttgcttgcctgtataggttatatggaacatgagatgttgttatgttagctttgtgcttgagctttatgttcatagtgactccttcttactatgattcttctcgagtagatttgttttttgggcggattctttgtttttatgctcttgagaaattaagtaaacaatttaggctcaaagagttggtgattagacttagagttgcttgtgttccatattttcagttgtatattttgagttagtttcattggttcaagctaaccattctctctgtgtttttttgtgatctgattccgtttaatagatctcatcaaaactttgtttaaaatataatttttctagggttgttaggtagttagccaaggcaaattagagaacaaactgtgttctgttttgtttagtgatctatccatcatcgataaacctctctatttataagtttcacagttttagaatcatgtcaaaaaatgaaccaataaatgaaggcataaagctcatctcgtcgtcaggaaaattacatagctatcaaaacgtcgagaagtagctaactacaaatctctaaacataaatcaaattttcattttgtgttcatacacattctgatttcctcaaaattttagaagatgacaaaattctgatttt

SEQ ID NO: 33701 - DNA, 786 bp, Arabidopsis thaliana columbia
gcccaatgatgattttgggtttgatgctctccgccggccatcttctgatgttggatctaatggccgtcaaaggaattcgaatgttcagtctagtgtgcatgagattttgtcttactacacagacaaggttccaagtgctgttgggctcaacgtgtcggaggtaattttgggaagtcacttacaacatatgaaatttttttgctggatatgtcctcagtctatttttgttcttgggtttttagcgcgatattgtagagctagtggaagacgatgttcgatctgctggcggcttgagcccgaacgtgcaggtaggtttttttcccgataaattactactaaggtgttattctaaatagttcataactggcacaatatatgtataatatcaagcgggtgttatttgtggttattagcgcgacaatgttgagccagtgggagatgatgttcgatcctcaggtgacatgagtccaaacccatcagttagtttttttgtagcagttaactcatcttttagttgttattttaaatagttgaaaattattatcttctattgttgtgcaggctgctaacaatgttagagaggggcctgctacttttgatataatggaatccgaagataaccctggcgtgagtttttcttttttctttttttttgattgtagtctttttaaactgtcttatctgttgtctttttctgccatgattgcgttgatgacttcacctaactttttttacaaattgttatcaaggcaatgattgttttgagttataattctgagaattttt

SEQ ID NO: 33702 - DNA, 558 bp, Arabidopsis thaliana
cttcagtttcctctttttcttgctcttcctctcctctgaacccatctcttcatcactctttctctttttcttactcttcctctcctctgaaacgatctcttcatcactcttcctcttcttcttcttctccttttttctctctccactcctttgctcgtcttccaacttctccttctccttctcatcaacaacatcttcgtctttgttcttctttttctcctttatctctgcgctcttttgctcgtcttctaacttctccttctcatcaacaacatcttcgtcgttgttcttcttgctcttcttcttctttcgctcctttctatctgcgctcttttgctcgtcttctaacttctccttcaccttctcatcaacaacatcttcgtctttgttgttcttcttcttcttcttctccttctttctctcccttcgctcttcgctcctttgctctgcttccaacttctcgttcaccttctcatcaacaacatctgcgtctttgctcttcgtcatctttatctcatcacgttccctaccataaactgattccacactcacagcttc

SEQ ID NO: 33703 - DNA, 403 bp, Arabidopsis thaliana columbia
  unsure (1)..(403): unsure at all n locations
ttatttataaagcacatatccgagcatgttgtaaaaatatcatataaaaaatagctaagttaaaataatatccgagcgtgttgtaaaaaatcatataaaaaatcatattaaatattgcaaataagaataattaaatcttaattctgtcgtcttcattggttgttngatgtgtttacgtgttgttgagggttaacgtggctagacgtctctccatcattcgtcgccgttgtgcctttgcgccgctgaggtgagcccaaagtccatgagctttccgtgattgattggtccattntttgattccttcctaatggccgatcccttctgtgctgactgcanntctgagaaccagtgttttgggtttttgctttggcttttccggcgtttcatgttttttttcttttct

SEQ ID NO: 33704 - DNA, 471 bp, Arabidopsis thaliana columbia
  unsure (1)..(471): unsure at all n locations
tcgactctaactctagnccatcatgggctttagcaaagacaataaaacccatagctaaccccaggttctcacagaccccctgtaacacatagaacacaaccaaaatggttttcgtgcgtacttcttttgatctacatattgcttattgcaggagcacatttcccgattgcactcgatttgatgtattcactacttcatggtcaatgaattaccacttgacaaccgtgtgtaggcatgaccaacatctaatcgtacacgtatttcggaccgtacacggaccgtttattaaccgtcaaccaaccgtaactgtataacatggctaatacacgtacacgttaaccgtgaaaatagatccgttacggttaagacaatatactaactgtcaccgttaattaactgtacacgtatgacacacgtcggttaaccgtattgttaacacgttaaaaatatagttgtcantgtatataattc

SEQ ID NO: 33705 - DNA, 438 bp, Arabidopsis thaliana columbia
cttgtaagaataagactattaggtgttatttggaaactaattaaagatgaggggtatatttgaaagtttaggtaagagaaatgaagtgaaaatataaaaggagagcaaaaaaaaaagttgagaccttgaattggcagcagcctccgtgtgtgtgaccaaataatgtttggaggagagtagaagaacgcttcttctctcaatttcgacgacaacgtgaggaagaagacgaactcgtctctctcgcgtatatactttcaatatccacttggaagaatgtctgcgagggactatcaataaccataacctaccaggttacggcaaccgtttttcaggtgacttttgtgttctattgatcatgcttaaaatctcacctttgttactaatcttaatcagtgcacgacgatttctcgtggtccgttttttgcgtttccattacga

SEQ ID NO: 33706 - DNA, 639 bp, Arabidopsis thaliana columbia
tactacatgttaaagtgggttcgcttgactcatagtaaagatttttgtctaaaaatttatactattaatttgacaaagaacaacaaattatttttctcttcaaaatcaatatctaattatagtttgggccatttaaacaaaaaaaataggtttgggccgaattcaataaaaaaacgtttgggcctgttgacagataacatcaataaaatttgcttcggcttcactcggttcctcatcgtcttggagcaaacttcaaagtgacttgcctggcgtcgacgtgtcgttttccagaagcagtttccggcgatctggtaattttttatgctcaaagttgtcttctttcttctttcttctttctccagtttggaattctccagtcgtgttcgtctggattcttgtttgaattttgtatctgatttgtttggtaccgagttattattcttcaatgttgaaaaatctagctgcattttttgtggagtttatctgtgtactttagttcctgaatttcaatatcgcttaccattctcagatttatacaaaactcagaaacatgaagatgcactctttggttactgtcattgcaataggttttatagagttcaaatccagttatgttgtaatgctttctgatgatgatga

SEQ ID NO: 33707 - DNA, 582 bp, Arabidopsis thaliana columbia
cctactaccagcaacaatatcagtttccggagttctgtgctcagaagttccaccagaagactctattttctctatagatttgctagtttcatcaaccatagaagcaacatgaatttcactccgtaacggtctggacagcctaggcgagctggatagagaatcacatggaaacactgaatccctcctaacagcaacaataccaccagaaggcttggatttctcttcacctttgctagtttcatcaaccacagccgaaacatgaacttcactccgtatccgccttcgtgagctggataaagaatcacataaaaacagagagtccccccactaccagcagtaatattagttaccggagttctgtacttagaagttctccaggaagctttgctttctcttcatgagtttctacctcaacgctttcagtacaattatcttccttatgcttgatgccatcttgagaattactgtagttagctgtaacagatattttgtgttgtacgcctcattcactgccaccaatggcgaaatatgacaaggactaacagaattatcagatactaagcaagaattgacctttgaaga

SEQ ID NO: 33708 - DNA, 185 bp, Arabidopsis thaliana columbia
tacgaatataagatttaagagtattttatctttaattttgttttctattattggttatctatctcttctatcttcaggctttatgaataggattaaagaagatggggaaaatggtagatttgaaagatatttaaattattgggattactatactaactatttacctttatccttggtcgaaagag

SEQ ID NO: 33709 - DNA, 847 bp, Arabidopsis thaliana columbia
ctctagaaatgcgtaatgtcatactcgaccacttcactctaacgaagacttgcgacgtcatcatcatctaggttagagtgcaatttagaactgctgcgcgccactctgcaaccaaaacacagcaatgaaagagtcgcaacactgagcattgttcaactctgtgacagtctgatcaatttacctttgacgacgacgctttttagatctttttggttcatcttgttgctcctgtttcctcttaaggtttgcccttggagcttcatccattagtgggcaattaacatccgaaagaagatggcgtggtgttgaggagggccgaagcatatctttatcattatcctgagcaccaaccaccatgtacatcacttccagggaaacccatacatacccaccaacaccaatttttgggccgttgctcagcttgcacaacgccacctgttcgcggttaatcacatctaccttgacaatcaccacgtcatgaaaccccgtgaattgagtattctcttctaatgggccacggtagatgtgctgcacaacaatttatatatgttagctaagaaagtaagacctaatcaaatactacactgcttaaattattcttacttctccaatacgccacaactcagggaaagtaattaaagctgcaccaacaggctgaatgtgaaggtgggctaaagccttgtccaaagtgtcgaaactaaggacagactttatcttgtgctttctcttatgagcacttggaggataacgacggcatttatactgacgaaactgtgggatctcttttgggatccttctctttcaatatgttccaaggcttcagcaattgaattaccgtagcacacat

SEQ ID NO: 33710 - DNA, 574 bp, Arabidopsis thaliana columbia
  unsure (1)..(574): unsure at all n locations
ccggggcacaccggggagagcgacaaacaattacaaatatttagaaacagagggagtatgatattaactagtcaatgtttacttcagcccaaaaaaaactcgttttcttgagtcgcaacaaaatcaatcacataaattaattggaaaatctgtttaacaattttagtttgaaaaaacagaatgaacaaaaagacaaaagaaaaagaaaaaaaaaaggtcggtgccgtattgaatatcaccaaagtccactccacacccaagaaaccgcaacagccaaaacgaccaatgataacgcaactgagattctacttgacgcgtcagagacgctaactgcttccggttgcagaggcggagacacactcttctcaaagtcttcactaattcaaaacacaacaacaacaacaaaaatatataaaacagttaacaaaacttccaaaatatgaattttgaataatctaagattcattaaaattaccagaaaacactaaaattaacatttttcgaatattactttccttatttagtanattcagtagccaaaatattacgttgaaggagaaggacagaaagtgat

SEQ ID NO: 33711 - DNA, 526 bp, Arabidopsis thaliana columbia
tcccccaaaaaatcaaagacttaaaatgatctaacattttttctcaaataataaggtcattgatccttatataacatggaatcactataacatttataacctacattcttgctcatatatctctctccttttttttccaacatattaacgactaataataaaatttatcaaccattttaaatctctaaatggaacttattattacatgactaaaaaataaaaataaataaataaataaacgaagctgatatggaaaagtcttctctttctttttttttttttggtaagtcgatctctctttcactcactttaacccaattggccgctattttccaaagtctgtttatttttttaatctctctctcttctctctcacccaatttcacaaacccgaaaccctaattttctcgggacactgaaatttttacagcttctttcctcttcttcaccggggagatttgtcggtactaaatctagggtttttgggtatcacggaggttgaagagagagaaaaaacccacaatgg

SEQ ID NO: 33712 - DNA, 531 bp, Arabidopsis thaliana columbia
catctggtacacggttgtcccatcaaacaagagtcatcatcgtatacacatgttctcatccacctcaaaccgctacctcatttcactcttcttccccttaaggacatcattgtctccgtctgattttcttccatttcagtctaattatcggcagtgatttgtattaaaatgacaaactctatgttattcacttatcgatttaaaagtcttatgttatctcttaaaaaatttatattcttttacgagtgacttgaaaagtacattcgaattcattgtcataatgtcattgtaaatgttttaatcattgctttttgtgtataaattcttacaaatacgagaattgaataaacacggccggtacaaaaagtaatagtacaatgtttgaaaatagaacttattttattttattatgggcttcttagtgagggcccattgaattaacaaaagggctcaagaagttcgtcttgcgtctcttgtcttgattctgtgtcgtattgaaagtgggccccgaatgagatgggcctggaaaac

SEQ ID NO: 33713 - DNA, 577 bp, Arabidopsis thaliana columbia
ttacatgtcaattcgttacaaaatagatacaagaattcaaacctataatatttcagaacatcaatgattattattaggtgtttatggttcgttttctgcttcttttgcatgatattgttttatcttacttatcattcttcttactgacaaactcggaattttctttttaacgacatagctgaacattattaatatctaaatataataacttgtcatatatgtgcttaaaacaatgatagctcactgtttgagtgccacaaaatgttaaacatgccatgttagtaaaatcatgccatgtcatttcattcttagactccaatccacaaacttgatgttgatatatatcgtgtgttgattgtattttgtttttaattatacggtgtgtcaagtaaactatctggtcactcgccataagtaaaacaccaagccaaccctaagtgatgcttagacgaaatctttgttaaaccttttgcaaaatagaatttgtatgaagatagccgtaagataaggacattaaatttagattgattgattaaaccacagattcaatacagtagtatggttattgatagattat

SEQ ID NO: 33714 - DNA, 537 bp, Arabidopsis thaliana columbia
cctcatgaattcaatcataaagtgctcttattactataaagttttatcttttttctttcttggcaaattgcaatgcacctcccaaattttggttaagacaaaaagctttggtcctagatctatatatgagcaaatgactatgtactttttgtatgtatgttttgtggtagtgcggcattgatttctttagacaaatcattgaacatgaaaaacaaaaacatttgtttgtttgttttacttccttatgagaataatcatatctaggagatgaaagattggctgataaaaagcatcaaatagctttacaaaaattattttgtttttatccaaaagcaaaaatcccagaatttagtttcatggtcaagctttcaaactttttttagccatttaaaatctctgcaaaagttttccatataaggcaaacatctttccctaaacacaaagcctgaaaccaaaaagccctatgagtaaacatttataccggctgaagcaataaatgcatcacaaagatacaagaaaaaacattatattaacatg

SEQ ID NO: 33715 - DNA, 611 bp, Arabidopsis thaliana columbia
  unsure (1)..(611): unsure at all n locations
acagagatttaagcagatctgtaggagcctaaatctaaaacaaaagaacccataaagtcaaagaagaacaacaaaacccagaaaaagataaagtcgtcttcttcttttttttttctcttgttctctgcttttttgtttccagtagtactcaggagctttttcttgattttactttagtagtagttcacgagacagcaagaaaatataaataaatctagggactctcacaaaaatgcttattttcttctcttacttgttggctttttgatataataatttttgtgttttggaagaaagagagagagagaaagaatgaaaattgtaataagtggacattgtgaagcattattgtccacgaggccgcatgacctacgcctcgcatcaagcgaagactcaaccataattttgactttttttatatgttaaagttaaaaccttttttaaccaaatttttgttactgatagaaagatttaacaccgttgaacttggagtcttatcagttagcactgaataataatactacaaatcatttcatttttgattatatgctgtataacacatcaagtttttttttttgtnttctacaaaaggatataagtcacattttgtt

SEQ ID NO: 33716 - DNA, 514 bp, Arabidopsis thaliana columbia
gttgaataaaccacggtttcttgacctatttgcttccataatttcttctccaacacttctttcttctccggccgcaaccatggttttttttaacattttttacactttcgagatcgggaacaacgtttaggtttcttgcacctttttctaactgaaatttatttaaaacttttggctttctctatggtcagactaaaaattcatgtctctatatataacaagttttttatcaccacaaaaaatgattaaaagttatatatagtaacaccataggctaaacaaagttcatattcgatgactccgttgtgtgtgttctatttcagttttcttgtgaggaagaaatattgtattaagggtttttattttgtcacactagtacttaaggcaaatgatccgggaacagcttaattgaaaaccatgataaagtcgcagagaaaacaataagataattaaaaaggctcaaatggccatcaaagtttaaacgcataagataagagcaaccataaagaagaga

SEQ ID NO: 33717 - DNA, 352 bp, Arabidopsis thaliana columbia
tggtatttatatatttcttatctttgtgtaacaaagtttattgcttttttagaaattcatattcactaggaggatatatgcaggttgtgggatcatctggctgaaagtgtagatgagtactttagttctaatgtggagggaactaccataaaaagctcattgataagcagtcatgaggataaagcacttgttcctctggattctgaatatgataagggacgatctgataaatcaaatggtgcacgtcgtggtagacaatggagaagccagccgactaatgtctctgagatccctcctcttctgagctctgaggttcacaaaattcataactacgagaagaaagatcataaac

SEQ ID NO: 33718 - DNA, 590 bp, Arabidopsis thaliana columbia
tctttggtcctcttgttgagagagcatgtacctgttttggttcatgactggaggcacttacctgatgagactagggacacactctgggaagagattcaggtatatcagtctcatttgctgagtttaatcattgcatgattgtgtttaactatgtgttttcaatgtgtaggggaggttcaatttgaaagaaaattggcaaaaggatgttgtttttaagccgatgggttatgtgtggaggtcttctaagtcgaagctcacaacgaaagtgcgtgcagtgaagagcaagacggatttgctttcgctgaaaccaagtaacatacaatctgtgacggcttggaatgcttgggtgaagaacaagaagaccactgccttcaaggttgtgtattattgttattaaattgacatttgaatatctttagaagatgatttgttttaatggaagttgcttttgcaagaaataagtgacaagtacaggatgttgaggaaggcacagattccacacaccacctgccgcaaaggaatgattcgcctagcccatgagatggtatagtatatgtctactctgtaatcaattaagcttgtgtaaattg

SEQ ID NO: 33719 - DNA, 585 bp, Arabidopsis thaliana columbia
  unsure (1)..(585): unsure at all n locations
gctccctatccacttttgactttattttcattactcagactcgagagtaagttctcacttctcactcacttgtctgtgacaccgcacaagccaaaaggggggatgcaggtaccgtgaaccgctagggccttcaaaaggcagtagcaaacgagtttttcttatctcacttctcataaatcttgagctgattcctaactttgagaacggcctcttttatgtgcaatactacgacttacaacgttggaccaaaagtctccaaaacccaagtgatgttgataatgttacttccccatttcgattgagatcaaaagaatcccattgaaggacaaaatccagtggaatggctcatatatttagcctgaaaggtcacaacaatcataaaactgtgttgacaaatttcaagtaagagagggtagtagtgcgactgaagcttaccatatgttaagagaatatatcaagtaccggatgatggtttttggatcacatttgcttctgaacacagtaaaaatgaatcttctatacatggttanaagaggacagaggaaaagtagtaagaaaagactttggtttggcttgcatcatgtg

SEQ ID NO: 33720 - DNA, 576 bp, Arabidopsis thaliana columbia
ctgtcttttcttttgcagactcttgatttgtctgtggacttgagtgctgcaagtgctgctgcagagaattgataacttgcgtttttccttccgctgagtggttttaaattgcaagtcattgtctatctttctattggataaagacataaagttcaaagtaacacaagtatgcatttatattcatcttacttaaaacactggttgattttgctttcatttgtatttaaaaattttgagaaatacttacctttctaagtttatttacatttatactttgattaacaatttaacattcccaaaatttcaaaaagattagtttgatacttcaattgcaatattggaacaaataggagaaatgtaattacatatacaatattttgtttcactcaaataatttctcgtgtctctgattgtttctgccaatttaaaagtttcaataccatgttttgatcatcataatttaataaatgactttattcggtttttcattactcgttcttagcgaaccagtaaccgatttccttctaaaccgtcttggttcctcgaatttgattacgttccaggtgaaagccgtgt

SEQ ID NO: 33721 - DNA, 560 bp, Arabidopsis thaliana columbia
tgaatgtgtgtttcttcgatttggtagaccttcaacaaacccaccgaattgatggtatccatagatttcttatcagttatcagtcatgggagagatttacgatctcatatatatggacaaaatatatcgtatcagcattattattgatttattgtttagttaagttcttttttttttggtttttcctttttttctttgaaaggtttgattagcagttttgtccggacagaccaagtatatatatacaataattgtgattgtgttaggacattcaaaatcttccatacagttttcgaattaagttggtatacaagtttttcaaatgttaaatcaaatccaactaaactagatttgttaaggatacataggatcatctctctttaatatcataatactcctctatctcctttatggaacattctatatttgtacaaccctagtgtagcctcctctgtacttgtatatatacttgtgtaaagctattcgtataatataagtcattacattcttaacatggtatcaagagcctaataagaacattgttggttgtaaatgggtat

SEQ ID NO: 33722 - DNA, 374 bp, Arabidopsis thaliana columbia
ttttcagggattttttggaacatatcaaggcgcacaatcatgacgagttgcacaatttgatgaaggcaacagtcatgattagaagacttaaaaaggatgtcttaactgaacttccgtcaaagcgcaggcagcaggttattagtcgtaactctttctctaagtccacacatctaatgtggtatctttagtacttgtttatgatttcgttttacattgttaattttatctttgtttgattaggtcttcctagattctagctgcaaaagacatgaagcaaatcaacgctttgtttcatgaggtaactctgatttagtttttaatacctatactaattaccttcctcgacgaatgtttttgagaaaagaaatgaggtt

SEQ ID NO: 33723 - DNA, 765 bp, Arabidopsis thaliana columbia
taaaccatctttatgaagtgagacgatgtttccgtcgaaagtgaaggagtgtatccatatttacgtatccttccatctttatgggagcatcacttcatcataaatataaatttagtgaataatttatccacatgctacttttgttatagcatattttgttgtccatgttttgtaagaaaaagaaactcatttcataacttagaaaattttgataattcaagatatactgctttctgtttttttttgctgttttttttttgaattatatataaattaactgttttatggtttgtatcaactttctttctatctctaatctttccatatacttttgtcaaactatgtctcagctaagagatacgctgacatggatataccagctttgatgctctgacagctatctagtttattttgacatacattttacaaaattttgcttttgttgtcaaaatatattacaagtttctcattgtatcactaaattttgtaaagcaaacaaaaagaaaattaatataaattcacattttaataaattcaggaaaaataaaattacatgtatatcattcattacatgtttcctttctcgatgatattattgttattgaaaaaacaaccctgttacacattttattaagttatatataatattatagttttaccaaattatataatggtatattgtagttattaataaaatgaggagtgtcttatctcttgcaaaccactcccttgccacctaagccactggcacaactcatctcaggg

SEQ ID NO: 33724 - DNA, 155 bp, Arabidopsis thaliana columbia
tttacgaggcacaaccgagctctatctgcgcgaccgtgtggcactgggcgccgacaccaccgcctggctgggctgcgtcacaccgcctgcaccggagactgcagacggacggcagcgcgcccaccgactattcgcaaggcctcacgacgccgtgg

SEQ ID NO: 33725 - DNA, 630 bp, Arabidopsis thaliana columbia
ccgtttctcaaacaccagacaacacttacgaaggaaaacgctcggcgccattttcttcgatagattccaatcgtttaatgggaagcctgtcgagagagatttccatgtcgctatccatatcgtacagaaaaaaatcttcccggtcaaaaattcagattttctaggtcgacggtaacacagtccggccaaatcgcttcaacgctccaaatcggatatttagatctaataatccgggtcaaaaaaattccggatcatttttacgggtaaagcccattaaaagcccaaaatatgttgtactctgactgtgcaaaactcctccgtaaaaccctttcatttgcatttgggaatcgattgctcttcttcgtagtcgcctttgaattcgcaggtatttttttgttcttcgcttgatgggttctcgttgattatcactcgatttcgtatctggatctattatagggttttctcttgtgtgattccgtgtagttagagatggatgcttcagattcgttttacttttgcttccatcatcggatcaactaaggattgcagtttttctggtagattaagtagaaatgatatgtttagaggatcaatccttagttttgaacttaaagttgaaactttgaagag

SEQ ID NO: 33726 - DNA, 572 bp, Arabidopsis thaliana columbia
atttaatgatgtttttgttacatataagcaagtcgtatcagtgtattgacggagtcaaacttccatacctcagccagaaaacataatgtacaaccatttctgttatattctctgtgtcattgagtaaactgaattcaaccaataagaaaatatactctaaaaataattgataagaaacatgacatttaatttttgcatagaaaattgaaaacaagggagtattactatcttcacatgaaacggataatgatgtaatcaatgactcgaggagagaaaacgtgtttcttacaacacaaatgcacatttgggacacgggccatattatggagatacaacaggtcgggttgggttgcggctaagaccaagtcccaaacccaaaggaacattgtcactctttgacttactattatggctatggctgcagttggcagaatgaacatgtgctgactgtgaattatgtgtcgggttaacatcgatagcaacatggccattgccattttgaagatttggattccgctgcatctgcatcatgctaatccctctggtctctgtgttgcgtcttcttcatgaca

SEQ ID NO: 33727 - DNA, 532 bp, Arabidopsis thaliana columbia
acgggaggtctcctaaagagacaaggtggtggttccatgacgacaaggtttaatgatgacgaccgtaagatgtctctcctttcagttacaaaagaggtttatataatttcccaagactgataatactaattgaaattcctcatggcctcccacttttttttctgtaacggatcattatgtataaatgacatctgaaatgtttcagtgtctgaattaacaccttgtgcttttgtcctttctgaagtgaaaaaccatggagagtttaggcaaaacgaaattgtatttggcaatgtaattggattgataactagttggtgtaatgtaattgaaaattgaaaaactaacataacaatagaatccccaaagagtaaacataaccatgaacgaacaattagcatagctgcgagtaatcaagtttgcaacaacatttattcaccaccacacataagagcacatttaaggtgaaaagactcgggcgaacaaaggatttattaaaacaccacacatattttagcataataggtaagagaga

SEQ ID NO: 33728 - DNA, 242 bp, Arabidopsis thaliana columbia
cgcagtattcaagcccatcttaacttgagaaaattgcaaatgttgtagctcatcttaaccttattgaagctagaacaactttttggtgcctaattagtttacaattttctttaaaaatttaacatataaaaaaacttatagctttataggaaaaaatagtacaaaaacaagtgttaaacatttacatcacgtgtaacctatattgcccctagaacacttttccggggtttggatgatgtatt

SEQ ID NO: 33729 - DNA, 536 bp, Arabidopsis thaliana columbia
ggtatgtatacgttgaaaaaaaaaaaaaaaaggaggtatacatattcaatttcattgtaaagtcccttttaaatgatgaatgtgtcttcaaacatttaaggcagctacttggcggcttggctacaattagacattctcactttgttcgaaatagtacacagtacacacacttatagcatacaatcttcaccaagatttcgtagttttaaagagatctaccaatcgttaggctaaagcttaatcagagaccactctcccgccaacatgtaggatttgatttctaattaaataagttccattatcactttaccaatgtagattattttcaattgtcatttacctaataaactcctaaagatataggacatacacccataaaaaagttatatatattataaaattgaaatcgtgagaaataagagaacccaaaaacaactaaaccggtttctaagcaatttgcatagtttagaaaattggagaatgcatttttttttgttaaatgaaaattagagaatgcatgctaatcaataagaaag

SEQ ID NO: 33730 - DNA, 567 bp, Arabidopsis thaliana columbia
  unsure (1)..(567): unsure at all n locations
tgtgatattttggcgtaatctacacttgaacattttctgtttatccgctgttacttctctctctctctctatcccaaaagacgacacaagtacaaacacaaatctgcaaatcttcttcttcttctgtcttcatgaatttcaagtctaacaattcctagccgtttacaatttgacggcacaattcttcattccttgtcgtgcccggaagtaaaaagatgatctttttggtttctgatgagataaaacagagatcttgttaacacttataagcagacccaactcgggaagctatagccgctattcgttttgcggcggcgattctgatttgctgtttattaccggcggcggtattatcttacggtttcccggcggcgttgaaacttgaaagagttattccagcgaatcacgaaatggaacttagtcagctcaaggctcgtgatgaagctagacacggcagattgttacagtctttaggtggagtcatagatttcancgtggacggaacttttgatcctttcgttgttgggtaatttaaagttttcatctttatgttcttttttggtgatt

SEQ ID NO: 33731 - DNA, 525 bp, Arabidopsis thaliana columbia
  unsure (1)..(525): unsure at all n locations
ggaaagttatataaatattttggaaccatgggttaagttttaaccgcagttagtgctttcgttagtaaagttaacagacgttaacttgaatgtatgattttaccaattttcttaaaacgaaggttttaaaaaacaccaaaattaaatgaggtattttagttacaaatttaatattacgcttattaaacggccaaaaataaattagatggcggttttttccccaattttttgttgttagtgtttttggcaatgaatttgatcgtaggaagccttggttaattgattcaatctccaataaatctttggttatttctggtttagattggttattgtacttggtttaatatgggtgtatttaagctcatctttgtacacatgttacattcaatgaaaacgttactatgacatgttatagatagattcattgttaatttttttggttgagtaccaatttgtaggaagcttgttcanattcaagatganagagatccagggagtgaatatctctgtgtatgaagaaatgat

SEQ ID NO: 33732 - DNA, 847 bp, Arabidopsis thaliana columbia
taggctttctacctgccattcgtttatccacacctataatcatgcaataccggcacaaagaaaccagatttactgaacaaagtgatgttgtcctgtggaaatgaactatataaacgctaaaagagctatgttagacattcggacatgtcataagggtgacagataggtacttatgtggtagtaaaacataattaaattttaaatccatcaacctcagaataccatctccctaatggtctttttcttatcttgcttattgaggtgtgaggattaatccccatctttgcaaaacctaaaatatatcgtgatatataaaggagaggtctataaactatgattaataatataaagtctaagtacctcatatgaaaatcttttacggctttcatctgcatcaccaataggtgggtttaaatttagggcttatcacatattcctcatatttctacattttcccaactctttgcagtgttgttaagaaaacttgtcaatctaaaacataatattaagtaattttttgtttttgaaacaatgtatgaagtagtgtacaatagatatactacgtgtttgtagataattaacatcatgaattagtggatgtgtttgcttctttatcattgtcatcgtcttcatattcctgacctctttttttattagacctatttcaaaaacgtgggaattaagaggcaaaggttaatggtctaatctttggacgattgaatttctaaaattattggattcattctttgttcagtcgagggatctaacacctatttgataaacctaaaaaaggtacttagcttgtataataagaagacaggtggagctacactaaaagcagtacgac

SEQ ID NO: 33733 - DNA, 581 bp, Arabidopsis thaliana columbia
aataccccttttggttcggtcctcttaacgctctaataagacatcttgtgtaatgagcaatgacaaggaacgatgatctttgtaattagctatttcgtattgtgagtttccgaaatcaaaatcgtttgctgcagagtctccttgtctccagaaactcccaaacacaaactctcctttcatggaaagttcctgcaacatctcctctacgtcttccatgcaactaacttcagacccatgctcctctctgcaatcatcgtcctttgtcggtaggacgatttccgtgtctcttctcttctttcgtccaagccttctagtcacaaacttcttcatcttctgagaaagtttacaaggaatcttaaagaaaataaagataaagacttgtaagataaaacactcgcagcagcaacagaagataacacaatctgctgcaaaagcacacaatcttcttccattattactcaaagatgcattaaaaaacaaaaactgttaaggtacaacaaagatatacaggaaagagatagagaaacagaagttaagaggtgcatcagattgtgcaaaggaatatgtccttgccaatattg

SEQ ID NO: 33734 - DNA, 507 bp, Arabidopsis thaliana columbia
ttttagtgtttaagcttttaggacagctttctaagaaaaaagtaccaaatgagtttttttttacaagaacgaagaagtggtccagagagagactcgtccccagaagtcaaacagaaattagtgacggttcggtactttggttgacttatatcatctctgtaaatttagtttgggctttggccaatgtctttgatccagaaggtcaaaactttttgggggtcttaatcttaaaattgaagtaatttttaggaatactatggtggaataattcatttttctaaacaatttaccatttggaaaaaatccataaattttgttaagggaaaaattaagaaaaatgttcataaagatacacgaaacaattttttcaacgatatgttattcaacaaaatagttatagaacaaaaattcacttatctatgcttttgctacttacgttacatgttgcaactacgtaacatagagtaattttccagatggtaaattatccagatggtaacgtagtgt

SEQ ID NO: 33735 - DNA, 565 bp, Arabidopsis thaliana columbia
caacttcttctgtgtctcgttgaggttagctcttgttatgttcagctttgtatcaagatcttccttcatcgatttctccgtttccatctctgcctctaccttttccttattctctctcaatgttttcatctctgcttctaagtttctgatcttctccactgattcctcaagcttctttctcagttcttgcttttcatcagattcaatcttctccaccttatctgatttcgtcaaacccaaatgtctcttgatctcatccttagtcattggacccgattcgttattagatttccatgtgatgcagagaggatcttcttcacctttctttctttctacattatcattttcatccatacatcctaaagcaatcttaatgtcttgtaagagttctttaacaccgcgtttcgatatcctctcttgcttcgttatagcgctcaaaacaacttgaatccaatcaaaagatccttccttctcatcatccactcttggatctttctcagtacacacaatggctaacttctccatctcattaaaatcatccatcagtaacttcatctccttggaa

SEQ ID NO: 33736 - DNA, 670 bp, Arabidopsis thaliana columbia
cagtcctttctaacttcataattgaatcagttagagagcctcttcatcgatcggtttctctaaatttttattctgaaattttcctaacttcccaactcatatgctcatttctatctttaatcttaaagtaaaaacaaaaatcgtaatttaaactttacatagttaactcaatcatatgtacgagatcatgtcacatacgctagttaaatcagttattggttcgcataaagggacgaatatagtggaagcaaaattgtggtctaattcttttccatttttttttctcacttttttttttttttgggtcttaatgttaaatttttttgttatccttgcagaataccaaaaaatatttcaaaatctatcacccattctgaaatcaatactgctcaaacatgcctatatatttacattttggtgcactaatgtttttcaaaatatcaaggtatcacattattagtcgttggtgttacatgctctatgattatgcgtaataaaactctgttatgtcatgatatgatccaatttactcttcaatcttgaacttgaatcgttatgctttccttagcttcttgatttcttgccttgatgattagtagttgtttaattgattcgtggtggattctgataacatttcaaagagacatgtggaccaagtaaatggtatggt

SEQ ID NO: 33737 - DNA, 1347 bp, Arabidopsis thaliana columbia
gagtgatttgaggtaaattgagtttttctatgtttttatgattttgggtggatttaaggaaaccattcaaaaccacaatgccacctaaagccataagatttaaaaatctcttacaatcattaaaaatctaatccttaagttttcaaggacatgaaaattttgagtagaatttcaagctttcaataacactagaatttaataagatttaattagaccttttaaaatttataattaaataatattagatttgctattttaacacccccataattctctagatccctcatttaattctcgtttatatttttccatcagtaagaatttacattttctatagccatttgagcaattatggcaagtagtgatcatcctatatgcaaaaaaattagatggcccaatttcaaaaagacatcagtgaaaggagtttccgaagagagcaagcaatgaagcagagatagaacctggattcaaaaatttcataaatagatcggagagtgcgaaaacgtaatggcataaatagatcagagattccacaatttgatgatgatgaagaagcatagctcttgtggtatgacacgttggcatgacatgccaaagctacccgcgcaagatggaggtgaagcagggactcactctgtttgctaggaagcaggacatgaaggttcttgacgctgaaagcggacacgactttttgtggatctacttttcattttccttgctatccctttggagtctgtatgggaaatcactggaagcaatatcgacctagtatgcattggcaacttttgtagaagcttgaaggacttgagctctaggggaggcacagatgcatctactaacacatgtatgcttccttggcaatatagtttgcagaaaccgttgcttggggtcagttatttaaacagtgacggtagttctcagtcgacacctcatggtagcaatgggttagttaagagaggggcaacatacattgtctcagatgatcttactatttgcgtaaagaagaagtttgatgtgaacttggacgatatttttgagcatgaaatcaacattggcaaaacacatgtatatctatattactattctttcctgatatttttttttgaatctgacactaatccaggccataggtttactaagagcctcattcgtgacatccactgccttgactacggctttcgggagctttctttcagagaaacgactctaaagcatcaatcacatgccctctgtggagcagattgatttgaagtttaggttttgttgtctacagtgctagttgaacaagttacctctcttttacactactgttaagtcaaccttttgtcttgaatttaatgcttttga

SEQ ID NO: 33738 - DNA, 459 bp, Arabidopsis thaliana columbia
tgcccgccgaatcagtttttgtggtgaagaattgtatatgacacgttagagaaatttgtacgaacgaaaaatgcatctgaatacggagcacatccacaaagagtcatacttgatctttcactatgaccagattctgaacagaggaattcttcagttgattggtgttgatgttggaaaagggcttgatcttcctctctaattctgatcttcttcttcgtcttccaatctggtcatacaaatgtcacaaactcttttggctttatttctatacaaagtgcttacagctataattctgcatagaaacaaatacatattgacaactgtgtctgaatctgataacaaaatatgaaagccttaaattatcgtacaatgatgtcttttcgcctgttaagtggtatgtataataagcataatcagcttctgagttctgtatccacaacctaacttcctttttgagga

SEQ ID NO: 33739 - DNA, 485 bp, Arabidopsis thaliana columbia
aacatctgttcggttaaagctgtgacacctgctgggagaacaaggagaagaatattgtttctcttctctatcctcgtgattgatgttatttccacaatctggtgatgaaacctgtgaggagtgtgtaccaactagcaagcagcgacctgaatctgtgatttgggccaccataggacgaagaatcctttgaaggggagtgattcttgccagacatttgactgataattccagaatcttcaccatctggtgccatatcaccactctgattaggattcaaactttctccattattgtattgaacatcatgcttctgcagagggttttctgcagcatactgttgttgtttatcctggtacccaagaaagtcattaataacatgggtacaccgaaacaataaataatacatgttaatagagaagacaaacctccatccacagattgcatttttccgtcagttcccttcccatagagctgattatatctcg

SEQ ID NO: 33740 - DNA, 457 bp, Arabidopsis thaliana columbia
gggattaaatcacccaatcctaaatttgattttgacctaactaatgaaaatttaatagtaaaaaactattactttgattttacattttaactttgatagttttttctaatttttattaactagaaacctaattttttttcgtcaactagaaaactattctatcttgatattattttataattttacagacaacagaattatatataaataattcccctctctccctgtagcttttaaaattgcattaatcaaatttgtttaatagaggatataaacatggtattaataaccccccactctaacaattcctctagttccacttttcagccaattcctcaactgatgtatcttacaacacaaaaaaaaaatccacagattcagctaaaaatcactacgaaacatgaacgattaacattcacatgggccacatcaattggggctaagaagataaagatgg

SEQ ID NO: 33741 - DNA, 474 bp, Arabidopsis thaliana columbia
aaccaagctattctaatcaactcgaacctatctcaggtggccatatccgttcctcgagctagacaagccatgggtccgatatggtaaccatcctcattaattctatctaatcaactttataatcgttttaaagatttgacggattgtgattatacactaacaaaacaacatattcacaggtacctatgcatggcaattgttcatatcccttgctatggagcttatgccgcaatagtaaaagccaagaactcctgtttcccatatctattcccaaatgctcttgtaacttagattagattgtgtgaactataaatcaatcatgcaataagatttgacagtaattcacataaagagcataaaaatatccataagaaaaacctagatatgaaattcaaacaagttcaacataagatccacaacatccaaaaacaacttccaaattccaaaaaaaaagcagtattcaattcaaaatga

SEQ ID NO: 33742 - DNA, 589 bp, Arabidopsis thaliana columbia
attacattttttacgaaaaagcgaaaaactaacatattcagtatggatgagttgtatgatttgagagataaccagagatatgaaagacagacctcttttgcagatgcctgctgctctctgaattttctatttgtatcatataatctccgtttctccttttttacagcatctagcttatatgatttctgaattccaagggcagtgcgccattgccgaggcagtaatgatgggtctcggtaaggcacgacgaatttccacacagacgtccaatcatatttgaagtacttaagtccctgaggattcaaacttatattgagcacccaagaacaatttccaatcagaattgcaaaagggtgcgcttgtcaaattacctcttgtattcgtagtatctcttgtggtgtcaggggagagcttttcatcctcagaacctgctgtgtggcaaaatatacacatacacacgagttaggggaaatatcctgcataaccttaaaattatggttgaggcatcttactggggacagtcggtgtcaccttaaacatgtaatgttcatttgcataatgcatgttcggtataaagcatcaagatggc

SEQ ID NO: 33743 - DNA, 579 bp, Arabidopsis thaliana columbia
tcgactctagactaattagtaccatatatttaaaaaaattagctattttgtcaacaacttgattaattttaaaaggttcaagaaatcaagttggagaaatattatttacatacatacaaaatatagtgtggctattatacgcgagtattccgtactaatttatctccattaaaaagtgtcattgtgggaaactagagataaagaaactgatgaaaaatccatgcttattcttctctacttcttctaagtaggtttcaaaaccgtggctggccaaacgacgaagcaccaactgtccaaattaggagttgctggccaaatgtccaagagatttaaaaagactctcaatcaacattggttcatgtgggttttggaagttcttgggacggtactgggaataaacttgacaatgtcggatatggttatacctccaagaatatatggcatatactcttgtgtaacaacatcatgctctcgggctccacgaactggcttctactgtcaaatctttaattgaagatgaagatgatgaacaaggattctgagaagaagaaaaagggaaatccagtgtcttcatcgact

SEQ ID NO: 33744 - DNA, 498 bp, Arabidopsis thaliana columbia
tttattttgagatacgtttctccggaccaccatgtgtgatgagtaatgtatatgcattgcatggcttaaatgaatgagagtgtatgctcattagctgacaaaagtaaaacttaaaagttttgggagtaatgaaaatgagaaatgagtatgtgtgtgggacactccataactatacaataatgaaagcattacagaaaaagctcatgcttggaccctttgtgactttcacttcacaatggtggacttctctttttcgctttatggaaaagaacaatcaaaaagcctctgagtaatgattattttgaaacataaattaaaatttgtgacagtgcgagactctgagtaatgcttagtgcgcttgactgactttatgccatttcaaatttttgtacagaatcatattgttttctattttgcatcatgcttactaaacagagattcaaataacacgtccaaaatagcaaaccgagacaccttaacacaaaggctgcattgtag

SEQ ID NO: 33745 - DNA, 461 bp, Arabidopsis thaliana columbia
gaacaaaactctttttcagtgaaacaagatccaagaagagaaaaacataaaacccttttaaatatacctatagcatggctatccacttttaattaagctgacttttaaccatagcactctttaagaaaatccttttaaatctcttgttacctgactttagccataccaagtggccaatatttctggcttttgaactttaccaaaagtaacctctcaggtgaaaccaacaaaccttaactaaggtatgatttaacagtgagtgtacaaggtattttcaaagagctggtaagcagtttttacaaaatctagaatctttaaaggtagttcagagaaaggaagatttaagaacggaagctggaacctaagggaggcaaagagaatcagcaaattgtaaaagcaacacagatatcagccagaaagtactcattccctaagccaggatttgacctgagccacaattg

SEQ ID NO: 33746 - DNA, 574 bp, Arabidopsis thaliana columbia
gagagcattattgctggtttggaacaagaaaggtcgagactatctctaagaaaaccaaaagctagctatgatgaagaaagatgacatctcttctctcaaacagatttggttgctcaaatagtctcgttttccggtagctgatagtctagtacagcttgtggtccggctctttcattactttttattcaatctttcattatatgctgtaaggaaatccaaatttttcactgtaaagtctaagcccagggttgttttacttgtctgtgtcagttgtttccatttttatcggttataagttggatcagtgactgtaatacaactatcaaacaacaaccttacaacctcatcaagaagccgatacatataggttcttccaaccggtttttggccggttacagcggaataacacaagagttacaaatcttagaatacacccaaacaaaaatgccccacgatacagtaggagcctataataataatgaaaagtagatagcatctatgagtgtagttatattatatatattctttcatctaaacagcctctcgctctctggatatacaatgacccgttgat

SEQ ID NO: 33747 - DNA, 358 bp, Arabidopsis thaliana columbia
tctcgtcatgaattggttactagggctcatctgaaggtgtgtcacttaatataaacgcatcaatatcatgaagctctgtgatttgagataagcatttatcaatctgttatcttgttttgagtaactattttggctgtatttgcaatgaggtatcgttatatcactagggtgtgtatgtatagtggataatatggcttcttcttttatccgcttccttgctttgcagttttgtgttcattagcactcattttcgattcattgtcacttagagttgagtgattcagccatatgactatagtagagatctcctttatttctgtaagaacagttgcataaacttagaaccaatggactagag

SEQ ID NO: 33748 - DNA, 589 bp, Arabidopsis thaliana columbia
taggcaaagagagagagaaagatgtcttcatcatagctaagcttttggttgccttagagatagtctcgacctttctctcgttccaagacagcgatgacgctctctgctgctctcggcggaagatacagccagtcccaacgtacatggactttgaagtaggtactaacatgaacgtagacagtgttgtggttagtatacttttgaggatcggatcatcaaccttatcagttgattcttcaacttaattaaactcattatataaaaaacaaaatatttatgtgaccgttaagaacttaattgtgaaagaagaggaaataacagagaaaaaagggaattgtaatgtgaccgttaattgtgattagcaatatccctttttctctcaaataataattggggcatttgcaaatcttacacttgacttccttgaaaagaaagcctctgttgcgtaattacaatttgcattttggttgtatgtttgtgattgtttcataggtctatccacaactttttaccttttttatttttttccccccacaactttgtcctataacttataatataaagcacaattttgtacggatatctgatg

SEQ ID NO: 33749 - DNA, 479 bp, Arabidopsis thaliana columbia
aaacgaagaacaacaagaagacgacgtgataatcaccagacggaggagaaaacctaatactgaagtcagttttgcggggtttaagagaagcagtagtttaaactgtggaagtacttatggacggagtttatgtccgttaccattactaaaccggagtaattcaaccggttcaacgtcgagtaaacagaaacagagcagctcaaggaaacataacgagcatgttaagttacaacaatcttcatcgttgtcttcttcttcttctgcttcgtcttctttgagtaataatggtttttcgaaaccaccattgaagaacagctatggaggttatagttatggtagccatggtggtggtgggattagagtgagtccggttataaacgttgttccttctgggaatttgtttggttttggttcaatgttttctggtaatggaagacgccagaacaagacaagatatcccacatgtaagaatagatatg

SEQ ID NO: 33750 - DNA, 851 bp, Arabidopsis thaliana columbia
attaaagctatgtttagataagtacatagtccacacaaaaaaaggaagaaaaatctttggttgttcaacgattaaacacgtcccttcaaagtctacaatccacattctttcacaaattgcataaaacctctctttgtcgttgtgtttcgtttcggagacatacatcattatgtctttctttcgatagtaacaagtgaagggtatttttgtcattttcttccactgctcctgatgtccaagtccagttgttgttcaagtttatcatctttgcttgtctttatttgacctcaatcaaagttgctgatgcaaaaatttaatctatattgttgtaaatataatgtagacacttccaaatattaaatattctttttatttttcttaaaactgagatttgatgactattgttttggacgttcaaggctttccagctgtggctgatttgaaaatttgaagagattatatgtatttttccttgttttttactaacattgatatatatttctttgtttcatacaaaaaaataataagtttgaatgtttgatactacatttacgtgacaacatgatttatattttctataaactgccttataggcttatattcgaacttattatacactaatcgtattatagtttttaactagctaagccgaaataacattcctcattactattctctaaagtgtgattgatgaggaggcttcgcttctacaactttcaaaacactttaagaatcaatcatattgtcaaaattattgtgggatcttactaaaacttatgtcaaaaatatggttggatagactgacactaattcattgtggtccgacttttgtctgctcggtaaaattttga

SEQ ID NO: 33751 - DNA, 960 bp, Arabidopsis thaliana columbia
tagaggatcaccttgaacaacttagttttttcaccttccactaagtcacaacctacgtcaccagcctcaccactgtggtgttgggtgatttcgaggattgttatttcaaagtaagcctcttgtgggaaagcagaacttatgagttgtggtccgggaagtggtaaacctgctcggagaatcatcaagtgtttttttgcgttgaccgtctcgttgaacgcttgattaaatttgatcgtttgtgtgaattccacggagccgtttgacacttcccatgagattacaacaccaggatcttcgcttcctgccgtggtgcaaagccctagaagaactgaccccggggaggccccgctcaccaatggagccggttcatggacagcgaatccgaaccttgtccacccattttcgaccgcttcggtcaccaaagccggatggtctgtccagatgaataggccaggtttcgatgggaatcctccggcagtggcggttctggagattgaatagtttttgatatttcctctacgcttgatgtcggaagtatctagctggtggatgaggctcgtctggtggagctttgagattctagcctggaagctatcgcttcgaatgggactggccgctttaagggttgtggtgatctctcggcggagacagcaccagcgacggaggaagactacaaggagagaagagagcacaacaacggagacgatccctgcggtgaaatgggcccaacgaagcatctctgtgatagaataacttctaagatagaatgagcgatggagggagaagaaggtgatggtcggacccgttcaaaacggttggaagatagaaagtacaagagacagaaaactataatgataataattattttgggaaaaccatatacatatatatatattttttaatatctagaaattcaagtttgaaagcgttattttttatagaggcgagaatcgtgtatgc

SEQ ID NO: 33752 - DNA, 603 bp, Arabidopsis thaliana columbia
  unsure (1)..(603): unsure at all n locations
tacattattacaaattaccatatttcgcaacaaaaataattctgattatgtaatggtcaaaaaaatacttaaaacaataaaagaatcggtgagatacaatgactaaaaatataagtctgaaacaactaaataatatctatcggggtaaattaaaaatattagtgaaagaaacaggactaaagtgtaaattttaaggtttctcaccattaaaagcctctctccagtcaccaccatttttctctgaagactttttttttttggtcattaagattctcaaagagatagagaaaattacaagtaagcccacacgtttctacagagacaaaagagaaaagcaaaaagtaaacgaaacgaagaagaagcaaggaagcaaggaagcaagtggtgtagaagaagaagaccagacgcggcaggagatttttttcaaattttcattttcttgatcggtctccggcgaagacggtgtcggaaagttaatattgacggcggatatnccggacatttgaagttatcgtctagttcaagttattggttggtgaaatcgtttgattaggttttaatctgaggagaggaagaggtttttagattgttaggacatagatg

SEQ ID NO: 33753 - DNA, 487 bp, Arabidopsis thaliana columbia
cgactctcccgttatgccggtgtcggagaagaatgaagctgttgtgaaatatgaagaggaagacagtgaagacgcactaaccagtagatgtagacgaagaagcatgaagagattgaaagagacgtagtgaaaactgaaatgttgaagaagatgatgcaagtggtggataatgtgagaaatctctcaagggagagttacaatgagatgatgaatctgataaatttttgggcttctcttcttttggctagtgtgaaaaggaaagtggttttacttgagcaatggatggtacaaaagaaaacatttttttttaaagctttgattgaactttgtcgttttcctttacgagttgtcttttaaaagaatgcaaacaagagaatgtatttatttaaggattaataagtctttaaaatccatagaacataaagaccgagattttaaaaaaccttcaagtatatacatgacaataatttatgggcagattaggggt

SEQ ID NO: 33754 - DNA, 524 bp, Arabidopsis thaliana columbia
catgaatcaagctgatctcattactgctccacaaaacatttgtctaagaaaatgaagtccatgtagttgtaatagattttgacgtctaaagcaccaattggctcggctaggactgtaggacaagtcaatcaacaacattgctgaaacccatgcatgggccatgacagtgcaaaaaaaattgtggtgatgttattataagtttttcatttgcgggattggtagtcgcgatcgtatcaagagaaaatgcataagagaaatgaatagagacatattgaagggtgtagtgatcacgttaagacttacctgtccaccaatctgtcactctttattttacacaacttctttattattattctctctcactttttatatataattcaattcgctctccttctctctctatctctgccctttctttctctctcacacacaaacacgatccaatgacgacgagcaacaacgtgaacggatgtttcggagacacgaagctgaccacagtgttcgtaggaggattggcttgggat

SEQ ID NO: 33755 - DNA, 461 bp, Arabidopsis thaliana columbia
aaactcccatataaagagtcggacacaaataaccgacctaaattcgaaggaaccgaattgaaccagaaccgacatgaatactcgaatgggtcctaaactgttacattcgaagatccaatatcaaatctcagccatccgaatcaagaaccgaatgcgtatcccaaaaaaactgaaatacaagtatatacccaaaaatatagttatatttacacttgtagtcattcaaatacccaaaattacaatgataaacttgaatatactcccttgtcaatacgagaggtcaaagaagatgatgttaccaaaaaaaaagggatgataacttatcgtaatgacgtttcctttccttataataaagcaaagttgacaaatacaaatcataatacaaaaataatttatattagaatctcataatgagataagtagacaatgttatatttacagatttcacacaaaagtattat

SEQ ID NO: 33756 - DNA, 598 bp, Arabidopsis thaliana columbia
taacgaccgccagtgtgctctaaagcgaagaccccatggctatgtgcgctcgcctaatccaggacgacctcgctctcatgattgaaaagcctgacggcgaatactacctcctagccggtgcgatcctcctcgccggcttctggcgcctctccgacaaatatggcatgcgactgtctgaaatccacacattccggcgacgtcccaggctacaaagagaaattagaaagggggatgatgaacttcttccgacgcctgaaggttgaggaccctgtcgtgcgcaataactacttcatccaggtcgacgacaatctagcctggagtcacagtattgggtcggaagatgcggacgtggtatcttggaacacggcgcagaaagataaggccattgaacaccactacttccggtccgagagacagtctctgcggcggttaccgaggacaggcgcagtggtgttcacatcaggacgtatttcgagccgatcacaaagattgtcgaggagccatatgttgcgggaaggctcgcaagtgcgattcggagttggggcgatgatgtggcgaagtataaggggagagaaaagtatggggatgttctgctgga

SEQ ID NO: 33757 - DNA, 563 bp, Arabidopsis thaliana columbia
tcatctatgtggccttcaaaaccagcatatacgagaacagctaacactatcaacaattgaagtcgaactttaaagtgaagaaacaggaaaaaaatccggacaatatcaaactttttcctctaaaaaatattagtttggattgcgcgacatgaaaactttctgattatagaatatgaaagtataacgatgacgttttgtttttgacaaaatacgatgacatctaatttatttatcttttatcaacacacacaacataaagcatagtccacaagcaatctttttttacaatgtgatggaatctgcttgaatattgaagtaacgaaccagtgtccggtttaaccacaccaaaatttgaaatggcataaaccggtgacattgttagtccactttataaggttttgtcttggccagctctatcagatttcattagtcagaaagtaaatcgaaaaatcttatcacctacttgatataccctacggacactattttcaaaccaagttgttggggtgagatcttatgtatatatatattacatacatacacatatatagaccacgataaga

SEQ ID NO: 33758 - DNA, 725 bp, Arabidopsis thaliana columbia
aacttctctaagtttttttaccatctgtattattttgtttgtttataatcattttctaatgttttgtcatgattttgatttcgaaactatttcaatcaaaatttgagcctgacaaactaaacatataatcatcagcttcaaatttttttaatatatatttgtttttataactctttttttatactttttgttaacaaaataaaaatttgaatctattaaaagttttaaactagcctttggaccagacagaactgatgtatcatcagacccgggacggtcaagctggtttgagataagaaggagggccatttctaaaaaagtaggctggcttcgtctgcatgaaatttattgtgggaacgtgaggcttttatgatgtttgtcttttgagtctcataattcttacaaataacctcattcgataaccaggaattatttaaactttaattaacgaaattaccaacctttgatttaggatcaacaataccctaaattttaattgtgaaatgaattttatagccagccagccctttggagtaggttttctttcataaacgtcaaacataacaaatactagtcaaaatataacaaatctaattttcacgagcactaatgctttcgtttgcccttgtctatgggcttatgaactcagttgctcgtatattcttcaatatttttggtttacaaaaaataatgagtagttgagttatcgatatgttcaatagata

SEQ ID NO: 33759 - DNA, 858 bp, Arabidopsis thaliana columbia
agctagtatgcaatatttttatcctcaagaaacagttacctataataacccaatttggcaaaacattattcagattcgctggtacgttttcaaggaccggtttgaaccaaattttactacctatgttatgactaggagtcatagcctatgaccgaatctaagacttcgatacgaataaaatatttatgatacgatcgagtatacgaccatgaagataaaacggatataatttcaaccgttcgttttcttatcctatgattggctgtactaagaacttgttgaatttaaagatcgaagcaaatatttttttgaaaaaaatcattagtcttgcaactaaagacaaaataagttgtatacatttactgatatttaatttaacgatttaacaaaacaaaaaattaataaatagtattggtattttagatgttggtaaaatgtaaatttttgttaaaaacaaatacagtaatagaaaaaaaatggtgatgtgtaaaaacagagagtttggttgtctgtcagtcacatgtaagcgaaaaacagaagtacagagtttgggattttgttttgggctcaaattctcacgcgtgcatcgaagcgcgtgtaatttcaagatcgaatctctcggttcttgcgcgtgggttcccacctccctgacgcaccgttacttttgtcgcctagtggtccgtgacggtcacgagcctcttgctctctcccaaggcgcgtcgtttatcttgctcattgtcccgacattgattcggtcgtcgtttactacgttagatttcagtctcttttacttcagtttttatctgaaattctttcaagaaatatcatattttatgttcgtcgtctattattatttgt

SEQ ID NO: 33760 - DNA, 532 bp, Arabidopsis thaliana columbia
  unsure (1)..(532): unsure at all n locations
gctgatcaagtgaaagagtcaagcttttggttcaggtcaataaaaattgatatctatcaattaacagttataatattagagatgttttctaatggaataattaagttctagttgcctcaaaggtttgagtcatcatctcgtgtgaataaatacattatacatacaaaacaaaaagctctttgtgatagtagtagtaatacatgtcgcaaacctatatgatgaaatgaaatacgtggtaagccgtatagaaacccctatggtaccaaatattgaaagcttttttgtagtattttcaatcttgataaataaaaaggtaaaagaaatttgttattcacgaaaaaaagttgttcttttatagcttgccaagtggccagatagacgctatatgctaattgttactaaactactaatccaagtggacgaatgaaataataacacaataggtacacataatttatagacaaaactattanaagaaaaacaaaattatcaaaaaaagaaaaagatctggtcacgtaatcgtttggaatag

SEQ ID NO: 33761 - DNA, 747 bp, Arabidopsis thaliana columbia
aaaacagttttagtacgacgggacagtagacggtctacagagcagttatcggcagttcacgggttactacggacatttcccgcgaatgaacgagtagataaagacgtttaagcctctccttaatggattagctccttcaagcatatccatttggtgaagataagatcgtctgagtttatccgtagatggataagatcgtctgatcctatccgcatgaggataagaccgatcttgtctatccgtgcgtttggataacgttccggataataatgatcatgcctatcccgccacctctagcttatccaaaccaaccttccaacactataaataccccccttccgcctcatttgttttctcacaccgaaaatgacttaaaacccgaaactttagcttagtacgtccgagagagttcccgggagtgcttttgagcgggtagtcgagagtctaggggtccgatagtccttagttgcttagccaaggtaagtttcagtcatatgaagtagcatatcgttaggaactagatttagttaatcaattactagaattctgaggttaagtaggattagtaattgtcaagtatgattagtactggttaagtaggaataataattattaattcagtaattccccagcatgatcagggtctagctaaaccatgattagcgggactcatcatgattagagtaatgattaattatgcctagtgtaattcatcggtaagtaggtccgcccatagaattagagtag

SEQ ID NO: 33762 - DNA, 496 bp, Arabidopsis thaliana columbia
cattatcacttgaggatcgataaggacgtagctgtcaacatagtagggggcacagtagagataacaggagaaattgattgcttaaggacttgagcaacttgttgaatggtgtggcttgagggtatattccagcatacccactatagctagttcctccagccacggctgcgaggggccaccatttgatattcctagagattgcattactggaaactgaggataaagacttgttgctggagtaactggaaacgaactaacagcgtatggtggtgctgtgatgggtatcgatgtcatcaaaccatacgttgagatcgaattttggttctcctggtcagaacccggagctccagaaatcagttgctgtggtggtggtactgcaccatacaccttgcttgaggaaaccctgcacattttgtagcatcaccaaatcgattacagatcagcaaatgaaatgcagcgatgtaggaacatgcttctgagtataatatagaagaca

SEQ ID NO: 33763 - DNA, 565 bp, Arabidopsis thaliana columbia
tgaccatatttttgttttgatattcatttatacaattttgttttaatatatatcgtcagagtgaaaaggcatatgggctatatatattctttttttctaaacactgcatagaattctaaacaaaatgaaaatatttaatctggtaaaatatacatataaaagtcatatcgcacggaacatgttgcatgatggatatttcggaggagttcaagggagaaccaactaagcaacgtttctactatgagaatgccgtttaagagcaggccatattgtacaaggtcctaaatttctgaaactttaacattaactctctttaaaaaaaatatatcttaaacacttctaaaaataaaataattttgtttggccacctgatttctcaggaccggctctatttgtgaggccacattgcaagttaagaaaattccaaatgttactacactaataccttaaagtctcaaccttggacccaaaaattccgtgctccatttatcgatggacttaaaagagaaactaaacaagagttgtaatactatggggtttagtcggtagcaaagccattgatgtg

SEQ ID NO: 33764 - DNA, 552 bp, Arabidopsis thaliana columbia
gaataaaaacttaatcaaaaacagtcctaggttcggatttaattttatgtacttggtcaaatttaagttccatggtttgtttgatggtctggtataatgcatacaatacaacttaaatatcttctagacattatagcatatccaatccattattaagaagaagaaaaaaataaactgagaatattatttttgaacgatcaacaccttattccattgataacatgtaaacaaactacaacaatggataatgatagaatagattcacacgaggaatgttaacacaagacacacatgaagttataacataatacagcccctctatctcccacgtgtaatctctaggcacatttcaaacaaagttgataagagaataagcaaaacactttttgacttacttcattgatgaagcataaaacaaattacaacactatacagatatcatcacacgaggaattttaacacaggaatgaaatgtgagactatagcatctcaatttacaatgtgtaatctgtaggcacatttgacaccagatggaacgttcttacacaatgg

SEQ ID NO: 33765 - DNA, 525 bp, Arabidopsis thaliana columbia
tgaaaaagaagaaccacaaagaattaaagaagctgtaacacaacccaacctttttctattaaaactggaaatcatttcgtttcttttctttcttcctataggaacagacatatatgaatgaagttataatcatcatcagattcagacccatgagtttccattattatcctatttattgccaggtaacttcagttggtgcacatgtcgtcgtggcatgaacctctgccatagacacagccatagccatcatcatctgttcctcaaaactctctggaacaatgaccagaggtggaggaggaggaaagttgtggaagccctcgcctgtcatgtaagaacttacatagctgttgctgcttcctgtttctcccatctcgtaatgatgacgatgatgatgatggttgtctatgccatctacctcttgttctatgtcgtagtaactgtcacaatttccgggaagcatactgtatgaagaaacgttgacattgtgattatgattgtgactggaggattcgccaacatttggcg

SEQ ID NO: 33766 - DNA, 328 bp, Arabidopsis thaliana columbia
tgattcagaagagaaatgtatagtttcttcttaaattttctgatgagaattgtaggaaatcaaattactactatttccccattttagaattatgatccatttgaatatatttctcaacatatcataaactttataacagacttttggaagaggtatttatggttggcccagttatatctgtttcacacaaagcccataaacacataattttcgaacatgcatatttatgtttggcccatttctctgtttcacacaaagcccataaacagatattctggaacagatatttattgtttaatgctttaattctaaaatttcctctttgaaa

SEQ ID NO: 33767 - DNA, 565 bp, Arabidopsis thaliana columbia
cactaaattcatattttccttttcttaaattcgaccaaattagttatttccctttttcgtcaacaaattttttatgttttccttttttttactgagtcggccaaacgtaaaacctatctctatatatatattgatctcttctctttgatttcacaatcttatctcttcatatcaaaagttagggtttgaatcttcttcttcctcttccaccatggatacatatagtaattgggagtctgtagagattactacaacagcaatgatcctaccacaagatcaagggtttagaaacaccgtgttcgtcaatctacacgatgtggtcaacgagttagctgaagatcaaaacggtgtcgtcatgtgtttgggaacgttcgcggctccacttatgactaaaatcgaattgaaaccatcatgtctcacttcacatcacatctatcaagaccttgacgagttcatcacagatattgagttttgtcgattgttgagcgaaaggatcgctttggattgtgctcatattcccaaccttttagcgctccttttacgtgagagtccaagagatgttatg

SEQ ID NO: 33768 - DNA, 589 bp, Arabidopsis thaliana columbia
gaaacccatgattatcatattaacatattgttccaagatattttcaaattagaacatatctaaataaaacaaaagtggggataaaaaatggaaaagaggttgacgaataagacgtgcgtaaaaaaaacaatggtcccggtttcggacaacaagacatgtccaggttcaactgatttctcaactaattgacgcataacatgtcaaatgtttgtttattacgcgataagtgtttacaagttatcagaagccacacaaaaatttatattttttattctttagctaaatcattattcattcaaaaagaaagaaaaaaaactctagcacgtcatttataaccttaatagtttctttttcaagttgtattgttttaggctttaaagtttaattagtgtagacgtgtagttaaaggaaaacgcaaaaatttattcaatgtcgtgtccgacccgattactattagtttgtgtagttatatgcattttatatatcatttatcacaatatgaaaagctctataaaatgcttagttttgaattttactctaaagaaatgtaacatatttatcgactaaaaagtgtacaaattacaaaatg

SEQ ID NO: 33769 - DNA, 907 bp, Arabidopsis thaliana columbia
tgtaaatctaatattaacaccaaaatttggtaccatagaaataagaaggaaacaaaaatacagttaaagctagttgtctctattacctgccgattcaagctgtaatgcgcggatctcagcctcaagatctgcacggcgtaaaaatgtataggaaataagaattatcacctccaacaaaaaacgtacagacatttagcaaagaattccacaaaatacccaatccctcgctaactgagagttaaattcactcgaattccaaagagaaatagctaggtcagttctacgcaagccaattaaaaccaaccaatcagctaaaccctaatccgatttctaatcgcaaaagccgataaccctccttccgatttaagattaactaccagagcaacaaatcaatcagcttcataatcgaagttaacacagtaaaacgcaaaaattcaacaaaaattgaagaaaagatccgatcgaccaacaaaagtagtaagcgcataatcgagaaatcgagagagaaagaagacacatagaccaatgactagaaagagagagctcgagaacccgtacccatggcggattgaagaagcgaacgaaaggaaaagggtttctaggttatctcgcgaaagaagaagaagaagcgcgttaagggatccgccaaacgaactagtgccgcttctatgaggctctcatttttgcccaggtggatcttttatattccctttttttgcgtaatcaaatttttcttatttcacatcccaaaactcacgtgtcaggtttaacgtaaatacgacgtcggttagctaatataaggccataatgaaagcccaactaatgggtcttagttacccttgtgtatgattgttggaaggcccatattcactattgtgagcaatatttattttgtcaacaattggaa

SEQ ID NO: 33770 - DNA, 498 bp, Arabidopsis thaliana columbia
tgttgttttgtgaagtccattgttccgttagggtttatcagattctgcgttgttttttttagagggacggacgaaggaagctcgagaaggaagcgagcatcaagtgatactgttgctaatgagataaagaaagttctatcttctattgatcccaaggtacttaaatcaatgttgctactgtgtgaatgggattgatttgttgattgatcgtaattgtaactatgtgttgcagggatgcgtcttacatgacattttggaaaagatgcttggtcgtagcacttcccagataagtaagctcaagacttcattctcgaatcttattctcaggcatttccgtattcagatacatggtattaatgtacaagtttgtttaccgggttcaagtgacttgagttgtcttatggaaatcaatgagctgaggagtgattctgagaattttggaaatcttagtttagttaggagttcggctgctgcagttttattccctttgaggcgtag

SEQ ID NO: 33771 - DNA, 493 bp, Arabidopsis thaliana columbia
gatataacaattattagtgtgtggcaccaaattaacggtctatatattttaaagtaatacccaaatcttttagctaaaccaatataaaatcttttcatctaaatcaaatctggtgcaaaatcaataggatttgcaaagattcggtaatggcaccacgccatttactcatttactcatatttagtgccgctactctttcttgatccttaagaaaaaagaaaaaaaaacttgcaactctggatcgagacactattgatgtgaaaacaaggcttcatgcatatatatatatatatatggaaatattgagaagtcggtttgtggtctaaacgggccttctaaaaacaaatttgtgtgtggcctaataattgagtcggtaatgttgtgcactttaatgatgatactcacttcttgtttttcaactttctcctcttttacctaactcactaaaaagttggaaattaacttgtgcttgaactgctttgaatgttaagtga

SEQ ID NO: 33772 - DNA, 491 bp, Arabidopsis thaliana columbia
ttcctctctccttcttcatttgttttttttgggggtttttgaattttgatagcagaactaagaagctttgcgttgaatatgcttctctctctgctaatatttgcttgtggttgggttttgttttaccgggtctgggagattttgttgtaccagcccttgcttgtaggtcaagcaattgtccagatattgtattaaattaaatcaaaggtgaattaatttgataattatccaactaaaccagttggttaacaataaacccggttcaatcgacccgcattcgcctatataaaccccactccagtgatcgtcttcttcatcaacttctcatttctctctttcgcatttgaacttttaacagtactgagatcaagatggcgacgctaaacatggcggaaaccctagaaaccctaatcgctaattcccaagaagttgattactcctaccgatccgaagaagatgacattgatctctccctcctccgtctcaacagc

SEQ ID NO: 33773 - DNA, 511 bp, Arabidopsis thaliana columbia
tgtggatgataaatactaaagtagagccgtctccattcatttagcatggtgaatttgataggtgtgactctggtccatgaaaactagttttctagattgtaagagctgaaacactctcttgatataatctgtaaatgaccacggatacacaaacatttctctaccccaagatcaagcatccagatccaagaagataaaagtaactttagaagaagagaagagggaggaaggaataccttgaaacagccaccacaacccccacagccacaaggagacaaccagcaatttggttaagcaaaaacctcctgcctaaaataagaagagcaaaaagcagctgccacaccaaatatgtctgccaaacattgggaggcatgagttcacacccccatgagaacaaatgagcaagaagataatcataaaaccaaaagacctgattcaaaatggggtataactggtccaggagcattggtgcaacagagagtggaatcctccatatgtaccttataaatat

SEQ ID NO: 33774 - DNA, 609 bp, Arabidopsis thaliana columbia
gtaccgatcttagtggtcaacgtcttggtcgagtttttcaagatcgggaactgatgctttttgctttttgtagtggtcaacacatgacaactacaaactactacgaaaatgtttgatggattggataacgaggttaagctaataatgggctgaatggactttattaaagcccatacattccgtttcaaatagaatgggcttagaggagtggttgaatcacgtggatttgttttttcttttttttaactctgatcgacgttttgtacataccagtcagattcgctcttttaaccttttaaaggaaataaagttaacctacgcgtgtaaggcgcacgttagacatcgcctttggaaattggcaaaccctacaccgaccgaacaaacgattaacaaaaatatacatactcctcatatcgagagcagcttccttttcattttcttctccctctcctgggtttcgtgtgtgaatgtttctcttccacaaaagcgatagaatccaccagaaatcttcgattgtctctctccgcatctcaattagggtttacgggacgatttcgtcctgcttgcgtgcgacatcgtcgattgggttgggaatttcaatgctgcgag

SEQ ID NO: 33775 - DNA, 377 bp, Arabidopsis thaliana columbia
aaattatagaggtggctatggcggaggatggaaggaaggcggtggcaaggtggaggatggaaaggaggcggtggccaaggtggaggatggaaaggaggcggtggccaaggtggaggatggaagggaggcggtggccaaggcggaggatggaagggaggcggtggcaaggcggaggatggaaaggaggacgtggccaatgcggaggattgagaggaggcggtggcgaggaggtggcggtggatctggtgcagagttagaaaacggagatataaatggtgcctcagaagaggtgcaatggcaaggaggcggaggtggacatgtctgaggatggcaaggaggcggatgtggacatggcggaggatggcagggaggtggag

SEQ ID NO: 33776 - DNA, 584 bp, Arabidopsis thaliana columbia
aattaacaaaaataaaaggagatatttttttaaataacaaagtgattttgaaaaataaagagaggataataccattttggcaaaattgtatattgtgatattcatgaagaccataaacaaaattatcctcgaacgagatgccatatcatcaaagtcgagaaacgatgggttagagatttgtagttttgttgatcgtgtgatgttgccaaactacgggttcgaaagtcttaaagacctttataaaggaaatgcgtcgagtattttgctcgagagcctcggttgggtcagtgtcaacatgttgagtgataagctcgaggacattagtatctatgaaagtggaaatggttatgaagtacatgtatgagggtattggttacagggatatgaaagacccatgtgcgttatatggttatagtattcatatatcaatagtaaagcgacatcacgtgatattttttcttaatgtatcaaaattccaccaatttctattttcatttttgattaataaatacatttcactttgatagtatttagtaaatattgatgaataatcaacagaaacaaggccgtacgagaaaagttgt

SEQ ID NO: 33777 - DNA, 481 bp, Arabidopsis thaliana columbia
ccctctcagccgaaagtctcagaagtgctcggaagtactttggtggcattctacttatctctacccaagagacctttgtgtgatcaagctcccatattctcatgctttggagagtactgtagaggccaatccttcccacgagaaacaatctcttctgagttccagcaactaagtaaccatccaacaaagatctcgggaatttagctggaatgtgttcccattgccctgaatcaagccgatacatcatcaaaccaagaggcgaaagagtttctagatataaccgggaatcacaataagccattttcgaggagcataagttcaccgcaggcattatctgatgtaaggaccatttgtcagttttggaatcataaacttcagtaggaagtgacttatccccgtatatatcacttgtggctatgactttgaacgatttgtctgagcgatcacgaccataatcaattgcctttgttggttatagtgc

SEQ ID NO: 33778 - DNA, 514 bp, Arabidopsis thaliana columbia
gaccaagtaaattcctccacttatccttcaaatccacctcgctcctatcagcgaaaacaacagggtatgaattcttgatatctttccatgattttccatattctttaactccttccctcaaagctgccacttcttcagaagtccagaatttcattggccttctgggacgcggtctttctaatcttcctttcttcaacggtgatacattcagaggttccggggttggtagatgaggcctgactcttctagacgatgatgttccctcactatcttctgcatcagtcctatttgccccatcaggctgaggagtgacatcaactgaatgctccattgcattgttaggttcttgatcttgccttgttatagggtcgatgagtctttgaatctccaacaaaaaatccttaagctctcgagctaccaacatttcccccttattaagacttggctcgtgttcctgttcatgttcattcaccttaccaaccccatcaggattctccacaccacccacttcttc

SEQ ID NO: 33779 - DNA, 624 bp, Arabidopsis thaliana columbia
catgctttcatgttaaaattataatttcgttttatctaaatctcaccagttacgtgcctattctctcaatataaaccctatgaagcaggtagtatagcctatcctaagctaagagaagagcaaacccaacaaattgttgaaaagacatttaggtaaatactctctcaaagtatataaagccatggagccaaacactaagcttatcgttcttaccttggttcttgcctttacactcacggcagcaaccggacagatcttctgcggtatgacttctacttgtctgaactcttgcaagccctatgtgtaggctaggaacccaatgaccaccggaattgatcccttgggcccttgctgcaatgccctgtccaaggccgatttccagtgcctctgtaagcataaagacagtatcaatgtccgtgatatcgagctttgacctcgctgagaaactcccggagaagtgtggattagctgctgcaacttgctagtaggttttctccttcggaaggtttcgctttgtggtttggtgttcatggttcttcttatactgatttatatcgatgttgttgtctgttggtctctgcctgatgttgtgtctgttgttgctttctcaccttgtgctggtgc

SEQ ID NO: 33780 - DNA, 484 bp, Arabidopsis thaliana columbia
gttacaaaatggattttgtcactaaactattaagaccgaaatttattttatcttacgactctttttacccttgtttcacgttatggctctttattttatcctcgatttagactacatgtactgtagtaactgtactgctgaaaatagccttcaaaaatgaccagacaagcccccgaatatatattgtggtccataaaatcaaggaatataaatagaatggcccatcaaaagaggagttatgggatgagagttgtaacaaatatggttaagcattgtcaaatcaaactaatcccaatacataattgataacaactcatcagtcatcatttcaaatcattttataaactagaagcctaagaagtggactacattgatttcttgagacttatccatccacttggaccacattttaatatctcatgtttgactttgccctcaattccattgctcattcacataatacttgctagtaagatcaggtgtg

SEQ ID NO: 33781 - DNA, 436 bp, Arabidopsis thaliana columbia
gtatcaattcttgtacatgattccaaattaataaatgaaatagatgttaaaaatataaaaaaaaaaaataacttcatcataaatataatccactttgatttgacatgttagaacgtactaccaatattatcacttgattcttaaaacgtcattactttatagagacgccagtttttgctcgagacgttttggaaacgtccctctatctaaatctttgtcgtccatcaacggcaagtagtccctgccttgcccggaacatcttggagacgttagccatccggtgttggagacgttaaactgatgccaattacatttaggtctatagaaagtagcactatcattataaaaactgcagaaaataaatgtcgaccatgtttcaaaaccctttcaaacccctcctcatacgtctccacttttcaagaagtatgaagatgat

SEQ ID NO: 33782 - DNA, 385 bp, Arabidopsis thaliana columbia
tttatgtaataaagtatctttgatgacaaaacattgtttttggtcatagtattgacgaatgccataattgtattatacggttatattcagaatgaagacgggaccttacacactgcagcgattggggttctgatggagttgatgggagccatcgcgatctactcggctggaggatcccatacctcagttgatctcaactattcgttatactcgacagccaagattcaagttcgacctcttaattatgctaatatatgatcagatagttttaaaattatacgagcattttcataacgtaattggagactacaaaatattaatttgataaagtatacctgattttcttttggataggtttgatacagtctgtcagtccggcttgagt

SEQ ID NO: 33783 - DNA, 583 bp, Arabidopsis thaliana columbia
ttggtgtatctctcattctcagctctatgagaggcttgattcgtgtgtatagcaattgaatttgggcaggacatcacaatttcattgaagtttgatttttagtcaaaattcatttcttagttttgatgatattttagatagaatctttatcattgatctatctttgggattgttattatgaactcattgaaatttagttttttgttcttttaggataattctttggactgatgaattaaagggaaacgctgagtgtaaatcatacaacagttctaagtcgtgaaaacaaaaaaaagatggcttgtagaggttgtttggagtgtttgttgaagttactcaactttctcctggctgttgctggacttggcatgattggttatggtatctatttattcgttgagtacaagagagttaccgataattctgttacattcgatttgactaatggagatcaaagttacgtttcgtttgggaggcctattcttatggctgtgtcactgtcttctaatatctttgacaatcttcccaaagcgtggtatgtgattatcgtcttttactttatatattgggttcaaaaacagag

SEQ ID NO: 33784 - DNA, 581 bp, Arabidopsis thaliana columbia
ccatacacgaagaaacttcgaattggatctcttagaatgttagggaaagtgttgtttcatattaagttgtggtttggtttgattccacagacttcaaaaagcagtaccttgactctttgcgtgaaaaggatgagcgtaaagctctgaacctgttgcgcgggtttatcttttatataacggtaaatgatctggtttatctggtcttttcaattgttctaaagagtagagatactttgttatatatgatgcaactgatgttgttgtttctcagaatgtggttcgtgatgatgcattcaaaccgtggctcgatcaagaatgtttgaagatcagatgtgtctgacaaaagagtatcagcacttggagttctgacagaagactactaattaggagatgtaagacctttgtttcatgaaataagtttggacaagatttgcatttgtgtaaaattagcctcaccattgtgtagtagttcatgactcaagactggcccagtggcttcaggttctatgatgtgattactcttccatgtccttaagtgcattgtagagagctccaagcggacttattagaaggacaacaaa

SEQ ID NO: 33785 - DNA, 544 bp, Arabidopsis thaliana columbia
caatatctgaaaaaatgtctatcttacgaaataaaataaaaaccccatcgttctgatatggatcacgttctcaaaggttcaggttctttggacaaccaacgacgatacacaaatatcacaatgcaaacaaatataaagaaaccaagcaatgataaaagcaaaattaatacgttagtggcagtgctattatgatgatgatgatgatgatgatgatgatgatgatgaagatgatgattagagtgtctgccgaacgcataaacaccaccaccccgaccgcgaccaccacctctgctgccaccaccaccaccttttgccgcaacgccgcaacagaagttatcgaaagggttaagattagaccggcagtcaggaattttagcatcaccatcatctttggtgaggaataagacttcatcatcttatcgaaagagaaatataaacctataacacacaccaaaacaaacaagtgacgcttgtggttttgatttgtaacagagaaaaacttcgacaaaataacaagttggggttttgcataaggcaaagtact

SEQ ID NO: 33786 - DNA, 247 bp, Arabidopsis thaliana columbia
gagagagcgtgagagagtgtgcgagtgagagtgcgagcgagtgcgagcgagcgagtgtcgagtgcgagtgagtgcgagtgcgtgagtgagtgtgtgacactgagagagtgtgcaggcgagagcgtgtgtgagagagcgagagtgtgagagtgtgcgcgtgagagcgcgagagagtgcgcgagagtgagcgcgtgcgcgagtgcgtgagagcgagtgtgcgagtgcgagtgcgtgtgagagagtgtga

SEQ ID NO: 33787 - DNA, 616 bp, Arabidopsis thaliana columbia
gaaagagcaatggctagctaactattgtgaaggagatcctatcacatttcttaaataccttgacgttgaaacctacgaatctgtggcagaatcggcgttggaagttctgttgagtgaagggttgataatgccctccgatgataaaagcatccagcagtacatattgtcagcagatggtgaaactagaggtttgttgaagtctggacaataaatgcaatgcataagtttgcagattctgcatgtgcttatattttcttatacctgtgttagatgaaagcacatgttctgcacccagcattcaacttatggagccagagattgctctttactggaggattatatgcaggaaggtgcaccaaagtgctcaagtaagttttcagtttaccaactattcattgctgatgttagttactttatgcttcaaacaaggtttttgtgaatccataagttctgaaaatttccctatttagcttagttagataatagtgtgcttaaaattggtttatcgatgctcttgatgaattcctaacttagtgcttgatcacaaaccagagaatgcttatatctactagctttatattggtcgttgacactctcaatataattttttgtgatg

SEQ ID NO: 33788 - DNA, 617 bp, Arabidopsis thaliana columbia
aagattgtgaattcggatttgttttttcaataaattgactaattgagtactcgtttaaaggaagtgaagagcggttttttggtagtggtggtcgagaaaagagagagtttgtctctgtgactcagaggtagaaaatctttactctttgtttctttgatttgattagtcactaatttagtttcagttgaatccatatatgtcgatttgttttagagtttgcagtttgtttttaattgttttgctgattggaaaatgagttaacaatatgattagttttcgatgttgcaaaagtggttaattatggatctgttggtgtttatttttggtttggtttgttttaaagttggaaactttgtatcccaaactaacaaactcttccttctctccttagcttaatcgtttctgcagtttttatttctgttttgtatgattttgttctatgtatattaccattttaatcagaagaaaaaagattcatccttttcaatttgttctgcaattttttttgcagtgaaatcaatagagcgggaaaagattgttgcttttttttgccatgggagttgatgagctgtctcacctcaaattctctcttctgctagaatcatcagcctgcaatg

SEQ ID NO: 33789 - DNA, 333 bp, Arabidopsis thaliana columbia
tctagaggatccccgttatggcatgccattaaaatgtcgccaaaataagatcacattagctagaatatctttaaaatttagcatgagaatcaaagcaaaatctaaatacagcaacttattaatttaaaatcacttatgatcctcaagaatattcctctttctgaaccattccgaatcattctgtttctaaagaagttacgcttagaatctttgaagatctcggtttactagcttgagtcgcctattataaataaggttgtgataacattccatttcatcgtcacctgcacagcgagctgtctgcgcgtttcgcgtcttcgtcgtctctgtttt

SEQ ID NO: 33790 - DNA, 561 bp, Arabidopsis thaliana columbia
tttaaattattttccaataatattcatggaatcagtgtgttccttctctgagtaagaccttggtcccactgtgaaagtggaagcttttgctgtaatactcactgcacagacatctggacacttgaggctaactggaaaccgtgagggtgaaaacagttgttttaaagggaagtagttaccgaagaagtcaacctataatgcatttatcttccaggtaaaggcttccacttttatgtgaatgagttcagtttgtcatcctatgatatgattactgcaagaaggttaccggccgtggtcaggccattactgtcactcatatttggaattaaacttgtacataataagattcatgttatatctcagtgtatttgagtgttagtgattgttatgtgttcatttgacctacaccaaggtgtatcatgtgtatagaccaaacacttgaatgataaattaagagtgatacaaatagtttgcttcttttttagtctcgtttttgtccttgatttgctacatataattaaagtcttataaatttcgtatagaggaactattagatgaaat

SEQ ID NO: 33791 - DNA, 618 bp, Arabidopsis thaliana columbia
atgtcaatctttacgcataacccatgctaattttctctctattcatattgattcttagatcatacacttctggttgttatgatcgtttaatcatgtatcacgttatatatcattaacacatgcaatttgcatatatataggccgatgcttaggaaatcaattcacaagaagagtgcctcgcatgatatagtgagggatacggtgaagactgagggctctagctccggagaggaggtgaagacgatgagaggcttctacggcgccggagaaacgtcgtcgccggcgagtagttgggtgccacatgaaggtacgggaatatactatccaaagggacaagagaaagtgatgcaagatgtgcctcctcctccagctggcagccacgcggacgagctcgttaattggttctcttgatccattagtctcgagtgactctcttctcatctcgatctcgtcgaagactcgaagtctctatattattgtctattgttctaatgggaaaccataaaatatatgtgtaattaagtggaaatatattgtcatataaccaatgataatgaataattaatgatgattacaaaatgagttacgtaccaaactaccaatgcatgtagattaact

SEQ ID NO: 33792 - DNA, 559 bp, Arabidopsis thaliana columbia
agcatctctgcatatataatattactaatcgccatttagtgtcttcgtaacaccatgtgcacccttagcagacaaaaaaatacaactcacacgcaaaccaaacaagcggttaaactgtataatcgcaattggtatcacttattctagaatgtttccacaccacttctttaacttaattagttttttaaaaaaactaatcaagttttaactacttatttagaaaattacaaaactttaaactaaatatatataattcaatgaagattcagatatgttattgcttttgtctcaatacttaaatttgcctaaaatacaaggtaagaatattagattacatatacagtataattactttatttcattgtttgtctttcaaataatatacaactattaaactacaatttatagtctatatcaatatttttatttataaatgttatacaactgcctataaataagtaagtaacccatatacaacgaccatagaaacacatcattaacaaaacaaagcctctctaaataaaaacaaaaagctaactgaataagaagaagtagtgat

SEQ ID NO: 33793 - DNA, 355 bp, Arabidopsis thaliana columbia
cgctgaattttttctgtggctgccgtgtttgaataatttggtgatttatttacattagataagaggtaatcttgtggcaccgggttacacttggtatgcgggaagatacacaacatgggttagttttgacagtatcaatggtcttgttgtcaacggagtggtaaccatcgacggtcgtggttctttgtggtggggcaacgttaataatcgtccctgcgtaagtccgtttgcaagatcctcacaaccatgaatatgaacttcgatcagatatttgttctcagttagtaatgatgtttctttttcttccttgcttttcttaggcaatgcacttcagcaactgtagtggtcttaggat

SEQ ID NO: 33794 - DNA, 532 bp, Arabidopsis thaliana columbia
cctctcggaaatatatgtgctaaatccttaccattaaaataatacactcagcagcttgctgtttcctccactctgtcttatttctgtcaaagttaatgcttggctcaaataaaacagcttaacttacggagagaagtaaaaaagcattcatggcttgagtgtggggattttgggatgggttatcatttttaaccaaatcttatgtaccctagatatgctatgagttttgctgtaaatgacttgaagatgatttacgtgaagaggacacctgagaccaacaaagccatccatgtcgtttcaagtggattcaaagctgttctcacttggcacaatatgcgaacgcttcaggtgagaagcagtactttttaagcatttatgtgtgagaaaacttctatgagccatactgatgttgtcttttttcttggttctttctaaggaatgtcgtgaagctgttggagccaaggtttgaaacagaaaccgagtaggcatttaaaggagatatgatgtgcagctcatttgagggtgacatatg

SEQ ID NO: 33795 - DNA, 538 bp, Arabidopsis thaliana columbia
cggtaacaaaggcaaaagaagagagagaaagagaaacggggaagacgaaacccaaaggcgcttcgtggagcggccacgtgaagtcgaagcaaagtttccgtacgattttcctccggcgtcgtctccgggaactgcggggaagaagaaagagcgaaagagagagaagagagggaaaaatgtgacacgtgtgaaaacagttgtgcattgtaagagacgaaaaaacaaaggttaaaagcgacaggctggaaaaaagaggatgatgacgtggcagatattgattggtgtttgattttatatagtggctaaaaaggctataatgagctttcagggtggtaggccatttttcgtctctcacgattgatgatattttaaatttatttctccgtgtccattaatgattgattgttagcaagtaattaattatcggacataaaagtcatcatacagaggaaagagacaagaaaaatactcaatcattcgtttctttttccggctttactggaaaattcattacatgaatgaattcatgatttacatg

SEQ ID NO: 33796 - DNA, 458 bp, Arabidopsis thaliana columbia
gcttcgagtttccaatcatctctctctgaaatctgttcatacccagccttcaaaagccgtctctttgactcgtctacacataataaatagtagatcaatcaatcaatactagaactgaatcaacaacggaaaatcaatagttctcaaaaggaaaagagatgggtgatgattgacgataccgacggcatgaaaagcggtgggagaagcattgagaaaggagaggaaatcagagacgagggagctcttatccatggctggatctcttaacttgagttcttcgggtttttgtgaggcagcactccaatggatgttcggtttccgatcgtccctgtgtaagtcttgccggaggttccgtttccattttagtacccgagaagttttattggcccattacaaagcccaattggttttttaaataaatagttatttattcatgagtacataaaaaaaatgttatt

SEQ ID NO: 33797 - DNA, 557 bp, Arabidopsis thaliana columbia
ggtcaatgccgactatgaaaatgactgaaaattcaaaacatgtaagtgggttaccaccacttatcattatgttccaaatcgtttgcattaaacaactttatttcgacacatgcggtctgaaaaggcggccaattaatttacgttaatcatcgtttactattattatcttcggaatatttccaacacaatcaatctagttggttccaattctcatcacatattttattttatagtttaaagtctttcaattcagtagtctaactgtataacatatgacttcgaacagattgatatagaccactcaatctaataatatcgttttagctacgaagagtatacaaaaaaagctagttggatagtttaaaaattaaatgctagaagaatgttggatatatcaaacaataaaattaatatttagagagaaaatatcgtaatagagttttttctataaataaatttttgagttaaaaaatattattagcctgaccaaactctttttatttctttaaactatgacagtaagatctaaattttaataaaccaatgtgtatttaata

SEQ ID NO: 33798 - DNA, 593 bp, Arabidopsis thaliana columbia
ctagaatcaaaccagacacagttgacagattctacaactcaagtcttagggagtggaggagagaggagccagctgttggagacagaatataggaataagatccttgatgatttgtatgaggtactcttatcactaactatctaattctcagtttaatcctggatatgcttcttgagttgatgtcgtttctcttgtgtcaggtcaaggcatttttgaaccagcgtttgatagaactgagaaatgaagatacgctgtccttgcaacaccacgtgcaagcagtctcccccatggttcttcagcagtattctcctgaaaccatagagccaatggtggttgacatctccatggccatttcattgctaacaaacaagaaatctcgggatctgatcatgatcctcaactccaaaaggtgcgttaggataaagaatctctgccaggggatcacagtgagtaccacagcttctgatatatgtatttgtttgtcgaacagattcctagataggcttgtttcagagctggaggagaagaagcaccgtgaagtgaagttaagagagagcttgaaagatgtgggtagaagcgcatggagctgcaga

SEQ ID NO: 33799 - DNA, 495 bp, Arabidopsis thaliana columbia
taaaaaacaaaacgaaaaaaataacagttaatgtaaacagaaagttacgatgaaaaaatatgatcgaaaataataactgtcaatattttaatggaaagttgcgataaaataaaataatcaaaaaaaataaccgtcaatattttaacggaatgttgcaataaacagacacaaccaaggaaaaataactttcaatatttttatgaaaatttgctataaaaaatactaaaggaaaaataacagtcaatattaatgaaaagttatgatgaaaagtcactaacaaaaagttgcgattaagaaaacactaacgaaaaattgaatcgtcaatattaatggaaagctacgatgaaaagatacgaataaaaaaataaccgtcaatatttaacggaaagttgcgataaaagagacacaaccaaaaaataaccgtcactattataacagaaagttacaataaagagacacaaccaagaaaaaataaccgtcaatatttttcaaagt

SEQ ID NO: 33800 - DNA, 336 bp, Arabidopsis thaliana columbia
taatcgcaccatacacagcaatagtccaaatccggacctgagacgagagcaaaaaagagaaataaatgaattagatattttttcaaactttttcttttggttaattgtcaatgatttggttaatgggctactgttgtttgaaatcagttctcatagtgaccacaataactatccagaagagtgtaagtgcacttacctctaattcggtcgcatccacttgctccactaatgatactactgatacactaatttaacatatctttcacattttctatatatatgaacttccactattaaagctttctttcgtccatcgtcgtaattgcacacaactat

SEQ ID NO: 33801 - DNA, 363 bp, Arabidopsis thaliana columbia
  unsure (1)..(363): unsure at all n locations
atgaaggagttgtaataaaaaccattataaaaaaagtattggctcatttacagcaaaacaaaacaaatattgaatcacactacttaattataataaatggttataaattgttatcgttgtaataattaaaactaataaacaatatgtaaaaactatatcnatttaaatcggcttcttnagaaacaaatactttacgtcatgtaatttccctaaatttggaaggtctgtcgcgaatatattgctgtagtaatgtcaaaatacttcgtcattaacgatccccagttgtgtatcgttatgcctctgagnacttggctttcngntntctggcactctgagccgattttattctgttctttttttttg

SEQ ID NO: 33802 - DNA, 280 bp, Arabidopsis thaliana columbia
gtggaggcacattatatatgcttggtggtagcatatttgctagaaactccggaggctacgtaaagatatgtgcaaagtgttgtttgtaacatcgtggttccgaatgagtagcggctgtcagtacccggactacatatgggcgtgaaaagccgaaccactctcgagcaaagttccaaattactgcagttggagtccaacttgtaacactttaagtaaatgcaagctaagattaaagcatgtagcattcatcttagatcgcctaacgagatatgtgaatatg

SEQ ID NO: 33803 - DNA, 630 bp, Arabidopsis thaliana columbia
ccaaatcttctctagcactggaagcatgttgaggttctgtatctgatatggttagtgaagaaagatcttcagctgtcgagagattcccggaatcatcaggttttctgttttctattccaaactgacaatctgaggccatattctcgcatggtaatacttggtcagagctggaggtggcttcgtgaccagcaagaattgtatcaccacatggaagctcagatgtcttctcggagggggccgttccaacatctatgttggagttattctccatatgagcatttgtgatcaaatttggtggttgaacttgaccttgtggagatttgttggcggactgatacctggaaaattgaggaggcctatcaaccatgctgacaattgcaaaagcagagtagaacccgatattctagggtagacatggaggtgttaagttgcataaccatatacttaatgatgtcgaagaacttggtgagtttgctctacctcgttgtataattttctggccttggtggacgaaactcagcagaaacttgccccgaaactttgtctctggccaaaccagacaaatccaactgcagagagcagcacaagacacaatgtgaaccatatatataatgttgcgaataggtgaag

SEQ ID NO: 33804 - DNA, 462 bp, Arabidopsis thaliana columbia
tacaaaaagatgctcggaaacaaactgaaacctcaagttatggtccataaataatgaagtacacaaaaatgctcaaaccgatgtattgtgtttcgaataactcagacaattaccttgtacatggaagacaaagtgaaatagtagaagctccatgagagaacacaacacaaataataaaacaaatgatagggtaatggcatgatgaaaaaatattttaggtactgcaacgtctgagaaatgtaattttttttctttgtcgagagaacaagacgagctacttaaatggagtcatattttttgttcagacgacttcacccttaccataatatattccactaaagcctttgtggtatacattaagagcaaattggtcatttacaggaacgacaaatggaatatccgttgaattaagcatctgacttttgccctctgttcaaatcaaatgcagttatgatgggttga

SEQ ID NO: 33805 - DNA, 517 bp, Arabidopsis thaliana columbia
ggaaagaagacaaaagcgaaactttttcacaaaagggtctctgattatctcattacaccacaggttgagacacaacgccaacaaaaaccctaacatgcagaagaacagattcgacctcgttactcttcagacaacaagagaagacactaacaaacagagaaatataacccagaacctaaggaaaataaaaaatgcagctaaaatccccaactacagaaaatggtacggcaaagacaaagagagatatcgacatttcggcacgaagaaaaaaacgaaattcgaaaaatgtaggtctacgaaaaaaaacaagaacctgatttcactgtcgagagagtatgagaatgaagagcaaaggaaaaaccaaagaagaagacctaaattcctctctataactctacgccacagagagaagaggaaacgcagaatagagagagactggagtggagactagtaaggagtgaaatccgtgccggttcgtttccagctacatttcttttcttttaatataatatcgagg

SEQ ID NO: 33806 - DNA, 571 bp, Arabidopsis thaliana columbia
ctttagatatgctgagtaacttaagtttatcttctgataaattctctgattcatccttcacaagagttaaatagctcttcacaaattccccaacaagagcctgaatattttctgaagggcgcacactgtgaagtatcatttcctctgtcttcgggtttgggtgcataccaccagatctacatgaagccttcgagtcaatagacatacatttatggttggtagtcttagcagcttcgactctagactcgagattatcttcaatcacagccttcttcggatccatgaaaaaggttaagtcatcaaaagcagacattgatttgaacaacagcgtagcgttcttagcattatcatccactgcacaatcccttgctcctgttttttggaaagggtttccaataacccatgcgaagtattaacaggagcatgctcatcaaggttagatataccatagaaaggttcagtgcatttctctacaagtggctcgcagaaagcatcttcagagaaaatgaaatcataaacccatttgtctccttctgaagcttcccagttataatcaatgttgaatgtacta

SEQ ID NO: 33807 - DNA, 557 bp, Arabidopsis thaliana columbia
ttggatatgataataatatctccatttagaattaaagatgttcatgagaaagagaaagtgttcaaaggaacagaggtcgaaaccaaccgattcgtagccttgcaaattccctgttgcctcggaaatggttcattacactttttaacctacgaagaacacaagaacaataactaccatatatactaatgtcaatgataccccaaacaagtataaacctaagatgattcgcatataatgatggtagatactacggtctgacacatgtgacaaatattgtgttaggagaaccacggaaagcttaagagcttaattgatatgaacactgttttacaaatgaccacatcccagtgagaaaaatgtgattctcatacccgttgtgacatccatggcctcctttttcttgaagacgaagaacaccacatggcaattgcatgtcatcatgaacctacatcaccaaaccccagagtaacaatggaattatacgtcttctggcaaaacactatcgtaaggatggttaggccttgagctagaaacagtaataggattacacaagcaca

SEQ ID NO: 33808 - DNA, 340 bp, Arabidopsis thaliana columbia
gtggtgagcactagatcgattgcaccagggccgattataacagttatcagtattggaccacgtcatggaaccaaacctcattcgtctagtctactataaccggtgttccaagactagggaaccgggagcaatcacgtgcatattatgggggtcattagcatgcacactcaattgttatccgattgtacccgggagcctggttacagcagttgatggtatggaagggcataaggatttaagcctgcgatggatggtggtgagcatcgacgccggcgtgaggatggtggcggccagagcccccgggtcggttttggactggcttaggagtgtagttagaggg

SEQ ID NO: 33809 - DNA, 474 bp, Arabidopsis thaliana columbia
gtgtttgaaagatagtcttgaggattgcttcgattgagagctattagtgctatagctttgtttggtttattaatgttaattcacgtcaaggaaattagaacttgcttctttatccgaaacaataatattggaaaaagagttataccttagattgccttcatcaatttcttaccttgatgacgtctaacagagaaactgccggaagtgaaactatcgctgaggccatggggagcaatagaagactcacagctctcagaattccaggtggagctgatccaactggcctctcaactcgttggagaccatctcctaaactcatatccagacattgggaataacatgacagtaagtgaaggcatcacatacgcagaagacgctgttcagaagtttctggaagcagggatggctgcactggaagctaggatcagacgagtacactatagtcactatgaggccgtctctgacaaccaggac

SEQ ID NO: 33810 - DNA, 195 bp, Arabidopsis thaliana columbia
caataagaaataaagaagcttatttgcatacgcataataatcaacagctagatgattcacgatccgatgacggaactgatacagacaagcatatgacaataatgcttaacatcttggggagaaccaatcgcctgaacatgagaattcggtgactacaggaggtcatttgcacagacagtagagaaattggttgct

SEQ ID NO: 33811 - DNA, 587 bp, Arabidopsis thaliana columbia
actcttctccagtttcctttcattctacttttttttttggtgatttctaggtcttttgatctgattctttctgttggagcaatgtatctgatttataggtctttgatttgtagaatccggagaatatagaggagatactgtgcgatgataacttgaagacgattttcgatggccaagacaaagtcgtcggagtcagagagatgacggagcttttgttgcgacattttcctaacgttagaactatgtcggcgaaggtgaaggctaccggtggaggtactatagaaaaatgggggttcaatgatattgtgaaagtctcagagccgctggctagattcgtcggccaaagcgaaatctcttttgacgccgccttgagaaaattgctagattatgcctttgatcacaagctcgtagatgagggtgttactctgctcgagttccttgggttagcttttttactttccttatgatctcctctttacatgtttatgcatttagggattggagtctctagagactggagaatggtagtgatttgattcttgtgttggtcattattggagtaatgacatctacgctgaaaatgttgt

SEQ ID NO: 33812 - DNA, 337 bp, Arabidopsis thaliana columbia
  unsure (1)..(337): unsure at all n locations
ccgttacttcacaatccatacggaccataccgtcacatacatgtatatctcgccccactttctcatcctatctatataaccccccccaaaacgcgtgatacgagcatctatctagaaaaattttatgagtgatttgcttagcatttagagctataatacaataccactccaacgcctatatcccactagtaagacnagtaanatactatttttgggnagagatactatactcttaacacatatgaagagtgtttgctaaaacgacgagtgatgtcagtgagttaagtggaaaggtcanatcaatggtcaaggtttagtcgtcggtgggtggttgaga

SEQ ID NO: 33813 - DNA, 598 bp, Arabidopsis thaliana columbia
taactgagatatgtgtatcataaactggagtttgcaaactagttgttcgtattgtaacgttatagttaaaatcttccatattcaggtgcactaatttacatgtttatgactaagtagaagataaaaatgaaaattaagaaccataatacgaccatttataaatctggagattagacaatatgttggtaattaaagagttgttggaagttattagtactattatttggatttcatagtacatatagatcagttataacctttagttgaaataaaaacgttaccgaacatggtctgattaatttccaacaaatgaaaacctagctgataaagacgtgaaataaatatagtagatcatcagaagaagagtgttgccacgacagccgatgcaaagctaagtccaccgaagttgatggccggggctgagcttgttggcttggcgtcgaaggagctgcatttccggttgatccgcttcctgttcctgcgttttaataagaataaaattacattaataatccaaaattttaaaaacttagttttatccacgaaaaatataattctcgtataaagacctcgcaattcgatttaaatttcaaatatt

SEQ ID NO: 33814 - DNA, 520 bp, Arabidopsis thaliana columbia
ctagaggctagaggatcccctgtgttggatacaaactctgcaaaatacaatgatgattgattgattgaaagataacagaggcaatggagattgattgacaaacggagcacgaaattagggttttctacgttcagagcgagtatctcagaactcaaagcaacaattagaatgccgataactctaggtcaagtttctacgataacggagaggttaaccaactacctaagatatctagagaatcgatcggaagaggaaaatcgccaatgctaaccggagagctcgagagggagcgagccagagccccggaagaagaaacggagtttttggttttggtactaatgcatataatgtataaactattgaaggtaaatagaacaaattccaaatttggggttattgggccgaatattgatgggcctaacaccgttctcaatttcgtctcccttcaatcgacagagaaacttctatttcctctatcgtcgataaagcaaaaaatcaaatcaagcttcttcttcgatct

SEQ ID NO: 33815 - DNA, 546 bp, Arabidopsis thaliana columbia
taacatttctatacctataaagtaaacaaaactttttttattctttaaatctacttattctttccgactaatactataaattagatataaaagatgctactagggagtagggtgtatgaaggaagaaaatatctactatgattatattaagatgttatttcaattaaaattcgatacttaaaaaagaaaagaaaaaagagaggttaatggacgagacctgtggcgccgcccggtccagccggaaagcagcaaagtgattgaaaggggactgcacatgaatcaccgtgagcattccactttccgcctcagctgccgctgtggtcaataaaagattagagaaatggtcaatgacccattggagagcgtagaagctcgagtcgctctcatcaatcgcaaccaccatcctcttcgtcgtcaaacttggtgcttcagcctctgtcgtcgtctctggctgcttctccaccgccgatgtttccattgccgtcgctgcttgctcttccgccattttatcttgatttgtgtttttagttataagtgatggatgtg

SEQ ID NO: 33816 - DNA, 585 bp, Arabidopsis thaliana columbia
tatcctggacgttcaagaacaacgtagactgaggaaactcattaacatgcaagaatggagttctcatatgccactttagacaaggtgtcattgatacacagtaaaaaacagattcacaaccaagctcagaaaccaaatagaaatactatattgtggcaacataacaagtatcacataccgggttgtgagctttaatgctctaagcaaagcaacagccagtgctgcaagctgcaaaaatgtttccataagtttcgtaaacagaggtttcaacaatacaagtaaccatataatgaaaaggttcaatggcataaatctgatcccaagcttacctcttccgctgtgcctttacgagattcaagagcaaatgctagggatgtacgaaaagatttctcagaactgggagaacaactaacagaaaagttttcacgaacctacaatttaaaccagggaacatttgtttacctttccattagaacaaaacaaaagctacatgccagtaaatccatacccaacgaagaagaggggctatatccttgcagtaacttctcgagatttgatacttttgcaagtatgatggtagaagtg

SEQ ID NO: 33817 - DNA, 640 bp, Arabidopsis thaliana columbia
  unsure (1)..(640): unsure at all n locations
tggcatggtggttcccagattgaaccttccaagaaggtaaaaagctcatgcttcaactattaaagctttaaccatattgttatctacttttcccctgtaacgttttattttctcatctcatgttgcagcttgacatgtcaaaccgtgtgattggagctgaaattctctcattagcagaaggagatgtggctcctgaagatctagtcttccacaagttctatgtgaacaagatgaccagtacgaagcagtcaaagaaaaagaagaagaagaagctacctgaagaagaagctgctgaagaactttacgatgtgaatgatggagatggtggagaaaactacgatagtgatgttgaattcgaggctggtgatgagagtgacaatgaggagattgagaatatgctggatgatgttgatgataatgctgtggaagaagagggcggtgaatatgactatgatgatctagatggagtagccggcgaggatgatgaagagctcgtggctgatgtgagcgatgcagagatggacacagacatggacatggacctgattgatgatgaagatgnatacacgttgatgatgatgnactggtgatggtggtgatgatatagtgatggtgatgatggtcgtagtagagaaaagaa

SEQ ID NO: 33818 - DNA, 327 bp, Arabidopsis thaliana columbia
ggttgatagaaaccgactaagagtttggctctgtgtcttctcttgacctagagctatcttatcgctacctaggtgatacaagatcagtcacgcatctgtgagcttgcatcccgtaagccacatacatttcgtgttatacacacgaccggagacacttaacgttcatgagtctgtacatagcttcggtagatggtgtcttgaattctgaggtgttgtagctctgtagagtttcttgactttcatagttcagacagtggttcctatacaaatgaaattagacggcaagacgaaaagatggtcagctgacttgcataagtcaatgcaatt

SEQ ID NO: 33819 - DNA, 530 bp, Arabidopsis thaliana columbia
tctaaatgttccttttcttatccttggaaaataatcttcatcttaaacaaccaaagatactgactatagatgtggtatcatctgattgttttctaggtccttgaagctgatctcctccaagtagctgaagttatgggtctagacgacgaaatagaagtgacagatgatgttggagaagcagatgtcattctagcctcaagttctgaattgaaacagaattcatcaatccgtcgtgttgccaaattacacaagctaccgatatttgtcattaaggtatccttctttttgcatggctgattatgattcagcgcattcctttgttttattaatttgaatcacttctttcgtcctgttattacttgcagtcactactatggctcagatggtgaagcagtccgaatgatccttggaagggatcatttggctcagccgctaaagccatagaaaaatcttctgttgatgatatcgagatcaaagatgatgctcctgagagcgaaacccagtttagaagaactcgatgcccttgaggt

SEQ ID NO: 33820 - DNA, 491 bp, Arabidopsis thaliana columbia
tcatcaccttcactagctacatttcctaacgttacacaagttaagttatctcgcgtaggacaaaaaaaatctccatttccaaagatggggatgattaatttcgcaataggaactgtgaaatggcaaaaaaaagaaccttttaatacagaggaagacgaagatgcttgactccgccattggaaggatcttgagatttgagaagcagaggagaagaatctcagattagtctcggtggtaacaatgggttttaagaccgtagcgattctacgagagttctggaggaattgcatgactcgtgattctactggttgtgattcaaagttgggtttttgattggttttgagtagagtagagtagagtagagtcgcgcgattgagaggagaaggacgatggctagacgccggaatcaaagatttagggtttatgtttttagaatttagacctttaacaatgcactatttgcaaatagaagccctatatatattattaat

SEQ ID NO: 33821 - DNA, 506 bp, Arabidopsis thaliana columbia
tacaaagcatctaacaaaagttgttacatgagatataccaataagttatcataaggcttcaggcaatgcaaatactatgatccatatcttatttcaatttgaaaaagaaaccaaaaccatgagaaagataccttcctcccttgaagctcgacctgcaagtctgcaaattttcctttgaacaacagataactctctcaatacccttatcaaatcatcacctctttccccattcgaagacgcaaagctttgtaattcttcctacatcggaaaatgattgagccaattgaagagataactaaccataaatattctctacttgatgaaaaattcagattcagtatataaaagccaagagatcaaagatctaatcaaaacatatggtccagagattcgcaaaactaacaagcagctaaaattcctcattcctcagaaacataatctccttcaaattatagatctctcatacgcattgttctgcaaagtcaatctaatagcatacaacccaa

SEQ ID NO: 33822 - DNA, 312 bp, Arabidopsis thaliana columbia
ggacaacccatgtcagaattgagcccttccctgaagctccccactgggcccccagtgctcccagcctactgtgcctgctgcctgctgctcagcctcccagacgctgcatcccaccaactcctgagcatcctgcctgtgctgcctggggtctttcaattgctcacatttgagccttagcccccagccactcagttcaatcctttgatacaaaactggccctgaaagccaattctcctatttaccatcttaggctttgcttgtcctttgggttattcattttacaaaccgttacagagatcttctggggaccag

SEQ ID NO: 33823 - DNA, 507 bp, Arabidopsis thaliana columbia
ataccaaaaaaaatctgaccatgtccaaaatttgatatcgcaaaaagaaagtccaatcctgttagctagaatatttgatatcgagcgtgtggcaatataaattccaaacaatatgtaatttgtagttatctcagcgtttattttctcttcacataatccagttattgaaatatatgccctattatatgtggtaatagttagctggcagtgtaaatagatttggaccatttcgaaatctgctctaatctcttaagaaaagggttttagacttttaggttaaatcaaattagttcctctcacattggtacgccaaaagctgtctgatcatctcgagtgtgttttaaatttaatatagcttttgacccgaatttcttttcgccaaaacaaattaaacgacagctaaccttttctcgtgctgcatgaattaactaattatcttagcctttatttgatcccattttattatatttgagttataaattacaagataaacatgcatgcacaaac

SEQ ID NO: 33824 - DNA, 262 bp, Arabidopsis thaliana columbia
tttcttcaatgactctctagaggtctgctgccgcagtgaatactaactgcagaacgttgagtgcaggttctctctcatgctttacagagaacatcaagtgacggagcttaaggtatatttggatggctcttctcatctccacttcaatgagtgtctgatcagttcttgtcactatctttccgctgctgcttactcaacaacttgctgggaaagcagatcgggaatgtatttatgtaggcttccctctgcagtgcatatgtgc

SEQ ID NO: 33825 - DNA, 625 bp, Arabidopsis thaliana columbia
cgctagcttttttccaccactctttgttttttaggtgaaaaacaattaataatctttgtctaataataagaaaatatacaccaaatagacaaaataaaacttgatgaattcagaataaatactagaaataactaatattaccaaaaaatattaacgaataaatagaatttgcaacatttttctctacgtcaaattaaaccgtgtacaattggacgaaggatctaccgcgtctgatttctcatttctcacaattcccatttttcgatttcactaagaaaattgttttcccagtacttagaatggaaacgtaaaattcgaagacccttatatgtgaaacgtctaaaaaaaaataggggctcagggcacaagcacaatcatgggtttggcaaaaacgtcgttgcgtttctattttctattcgttctttatttgcatctcaactttatttccgtcgtagactaacgatccttacgtctagcttccgttgacaccaaccatgtttccaccatatccaagccagaaggtgttattggctatggtggaaagacgccaaaattagcagtctttatccaaaagggcagtggcggtaggggaggaggcggacgtggtggcggtaagggaagagga

SEQ ID NO: 33826 - DNA, 420 bp, Arabidopsis thaliana columbia
tcaatggggttgcgctgtcgccagtgctaagttttatgctgtaaggagatattgaaaataaaagtggaagtccatgaaaaagtttcttatggtgctagactgtggattggtgcttagagtttattgtggtatgttgatgtcagaaccagtatgctggatatagttgggagaaatgcaaaggtatcatgctgccaactgcactagtgcagtcaacaatagtgctataggtggtgcatccgcgagggactcaggacgagctgattcctcttcgattggaaactattcactaaactccaggcatgttgatagaaagaagtacttacatagttattttatatgttgatacatttgaagacgtctgaatactttctttactgcaggagaccaccaccagttgacaccctacaagttgaagtgtga

SEQ ID NO: 33827 - DNA, 555 bp, Arabidopsis thaliana columbia
tatatgatttatcttggatcggatcttctttcctgtattcgtctcatttgtcttctttacctgaaacaatcctgcagcttttcttgggtattgtcatatgcatcatgtcactccatatgtactttgctcctccacacacgctcgtggacttgcccgtgacaaacgaagcacatgccaagaccttaaagcaagttgtcgtagaagaaaagacagattcttgaattaaattggacgaaaaggttagttgaacacatagaaaacaatttgctaagtaaatgaacacaatgatcttcttctagcttcatttctattagagaatgagaaacttggatgtgagttcttttgaagaaatgatctgatagtttgtttattcacgtaccgattcttttctttgtaaatgtacatcgaggtgcctagaaatagtaaattcgattgttgaagcctgttgtttactttttcttacgctgatgatatgtaagaagtgtctaccagataaactattgtgttcctttttttgaccggctggtctgatatgtttgggtcatctggagttgg

SEQ ID NO: 33828 - DNA, 622 bp, Arabidopsis thaliana columbia
cctggacctatgttttatgctttgctttctcagcatatcaatcatccataccaccaaggcaccaacactatataatattaagtgaagaatgaatgttctcagtctttgtaaattagactggacaaaagaatactacgagaacgtaaaaagattaaaatatcattttgtttactattttttatcagtaaaagcactttacatatatatagtgtgccccagtaaaagagatggtggatacatggagcagcaaaatatgagtatagaccagaaaagataatcaaagctaggctctaactttggcacgttgaaaataggagcgtgtgttcgagaagttagccgttgctgtggagcactggagcgcatagactatctaacatcattaccaaactacgcaatccacatgtattacgcaataacatgatctcacttggtctttgtgttttttttcttttttctttctctattgcagttttctttaatattttcgaaacatcatgtttattaatcttggtttccatggatgcatatttacctaaatagtgcaacgttgtcaaaccaattgtttggatcgatgatatacactcatgtttagaactatttactttttaatatatacactttg

SEQ ID NO: 33829 - DNA, 551 bp, Arabidopsis thaliana columbia
gtaagatggcttataagcccaatgcgtagaagagaccactcaccctcaagatccagcttataagcaatcttaccattccttctcttcaatgtaaaagattcattaaaccaactgcaaacatctccttcctaagcatcatgaactcactcatcaacactctactactccactttattgcttgcacataacaatcaccatagcttaaactaactttccacattaaacctctagaactaaaaatgctcaatttcaatactcaataaccagaaaagttacaaacttaacaaaccaaatcagatgtagtttcacctatcatcaaatgaaaaacagagacagagaatttgggtttctactctaacaactagaattctcgataacaagacaagttacaaactttacaaaccataccagatatagtatcacctatcatcgaattcaacacatttttagatagttatctcacactcgtaatcattgtacataatcgagcaagagattagcaacaaaaatactcgagttcaaacttaagcagtcacagtaacttcgtgcag

SEQ ID NO: 33830 - DNA, 371 bp, Arabidopsis thaliana columbia
ctcttacctaaaggttctcgcttcatgatttttaattgtttttttacttgatttctttatttcgtaccatcagtttgtggttttatttggttttcttatgagattgttgtctttagtgtaatgatgtagtaaaaagcttgtaatagtgagacgaattcttttcgtgttcttttgttttgtttagtataagttttaagtataaccaatattaaattctccacattgttttttagttaatgagtggttatatcctcgatagattaagggtcttgtgatttagatgttttacgttacacatacgaatttattgtctttggtattaatatattttcaaaaactaataatattgaactcctcttatttctaagaaa

SEQ ID NO: 33831 - DNA, 524 bp, Arabidopsis thaliana columbia
attttgagaaggctcacaatgcaaaaatggaactcaccatccttgactgattcggtttcagctccagcaaaccaaagtgtttctaataaacttggccgtgcattgaaccacggagttccaaaatcaatgtctgtttaaatcattggccccagaatttgaactacacacagagtcacagacattcattacgatggttgaatgaaatggtcttgactaagaagtaagaacaactatgcacaattgagaaactattagctcgatttccagaaactatcactatcgtaatataaaagtcccaggatcgaccaaatcggacgagaaagactcaatgaagaaaccccataaaaacatggtcgaagtcagtataaacaaaatcaagagtttggtcgtcgttgtggatttggaggagaggagagtgagcttacagagtatgagaagcgagaagctcaggggaagtgtgactcgtcgtcgtcgtcttcgaagtcactcacgaccatcgagagatctgatgattttggtaaata

SEQ ID NO: 33832 - DNA, 581 bp, Arabidopsis thaliana columbia
gatcgaagaacgataattcgaaacacacaaatttgcttgaatcaaagactcttcttcttcgttcgttcgtttcagtgattccaaagattccaaatttgtcggtgtaatcttcgttgtattcagaggtgtatgtatatgtattgaaatcgagaatggatctgttccgagtttggtcagggatggatttcttagcttggagaggaatggcttacacacttcttcttctcaacttcgtctttgcttgccaacttcttcttctccaacctctcgtttccgctctaggtatattttattctctttgattttcctatcttcgcttcgttttcccatggtgagattgatgtttgttgtttagctgatttgggaatcttagggcttagaaatttgctctaaatggcgaattgcttctgtacttttcgaaagttttctacttgtcgtgttgggcttgtcgcaaattgaggttccctgtgatggtattgaaatcgaatttaggactctgtttttgctgctccacattatgaattgatctaatttggatactaggttatgagagtaatgcatccttgtatactcgttgagtg

SEQ ID NO: 33833 - DNA, 148 bp, Arabidopsis thaliana columbia
ttgctctatgccctaaatcatcttttttggcgttttcaggctgttttacgatttgactaggtttttcgatatgtgggctagaatcgctgttttttggcgtttccgctctattttcttcttctgcttaaacttgaatgaaaatcctaca

SEQ ID NO: 33834 - DNA, 841 bp, Arabidopsis thaliana columbia
ataaaaaaacaaaatcatcgttaatttttaggcctttactcatcaatccagctagccttctaacctctgccaccagaaaaagaaacaatttgacagattcattcattagaagaagaagacaacaatccatcttcttctccccattcctcgtttcaattttgcagatctcgtctccttctcgatttattattaatatagaggtaaaagacttttaaaacagatttgtgatttcctattttcattgttgatgaaaatgttgtaattagggtagatttatttatctaatttctattgattcatagtcaaaattctggcatttggtttgatttggacttgagtttatgtaaaagaactacctttacaatttcaagcaatgttttgatgttatactctttagcttaaggaactcatgttacctttttgttcacattgttaggttctctgttaggcacaacttttatttatccctacctgaatgatttagtgtctatacttgttttctatgagtttgttgtgtttatgttggcagatggcaagttcaaaggggtctcagaatcatagaaatctgggatgcaatgggaaacaagctttactgcctccgaaaagtccgtttacgggtggtccaacgtttagtgcagattttgttccaagtagtgtgattggatccaaggctgttcagaagcttggagaaggaaatgccaatcatcatcgaacttcatctgagagttttcttattgaggaacagccttcttggcttgacgatcttctcaacgaacctgaaacacctgtacggaaaggagggcatcgacggtcatcgagtgattcatttgcatatgtagat

SEQ ID NO: 33835 - DNA, 496 bp, Arabidopsis thaliana columbia
tatgaaagacacgaaactttggagtgatattacgaatctaatccaaaaaaactttccctaattctctgacattactctctttttgtaaggcatgaaccctctcatgttgttcatctcagtcagcaacgatttcaactgagagaaagctgatctaccactcctggtttcaccgttttcagaagtagaagaagaacattgaagagactgtgtttctgagtctagctttttcttgccatcttcagaatcatcagaactcattcaacacttgttctgccagtaacgggaagctccactgcagttcttactttgctttcatgctccatctgaaaaaacagagaatatatgatcaccatttgggttattttcatggggtggatctgtccaagcctcattcaattgttgttcctcctcactttggttactagatttttccacagattttgcatctttcatcgctttggaagcgggttcctgtgccacaatgtccctccctgaa

SEQ ID NO: 33836 - DNA, 337 bp, Arabidopsis thaliana columbia
gaagaagatccttgaagctcacgccggaaaaggaaatgagagacgaatccaccgaggctaatgaagactgggacgagagaaatccaggcgaggaaatgtccgagctgatctccgggacggtaccggacgtgtgtaagagttacagccgtagaactgctgaggttttaggtccattgacgatagatccaaaggaatttctgttaatcgagagaatttggctttggtttcaggtttcgtcttcgtctactttatgtactcgagaaaatgaaccgagaaagtgacggaaaagtgcgtgagaaaaagccagccggtgtgaaggcatcatgttcagggaaga

SEQ ID NO: 33837 - DNA, 767 bp, Arabidopsis thaliana columbia
ttacaagaaagccattttttcacatggcatttgttgaatttgccattttttaaacagtttgtgagttagccatttttatttcatcggaaaagacaattttacccttgttttgttgcaaaaaaaaattcagaattgttcttccacaaagttaatttctcgatctggtttttcatgacgagatctcatgacaactccagtttaagcaacaccaaaggacgaaagctttgaaactaatctctttatctttgagtttcgatttgtcaggagaaattaaaaaactcaaagatttcatgaatatatgattataattttcaaatttggtttcgatttgaagataatttagaaggtttgattaattcagtgtttataattaaagctcttgggtttattaattcaatgtttatagttgaagcccttgggtttactagacattatccccttagggtttaatgttttttcattcaaaatcattgaatgaaatggtgtttatggtgatgacgtttcatgaatcggagacaaaagtgatgatgttaatagaactaaaactgaaggtggtgatagagttgaagtagatgcgtggatgaagcccgacggtggtggtcggcaaataattgtggtccggcaacaagcaaaaacgaaatggaagacaaaggttgaagacaaggacaaaaacgtaattgcattaggcctaaaatggcaaatccaaaagcccatatcaaaaatggcataaacaaaagatttggccaaaaaatggcaatctgaacaat

SEQ ID NO: 33838 - DNA, 543 bp, Arabidopsis thaliana columbia
tggatgtcgggctgaagcctgtcaagcggactggaccggcccgctagactcacacatcacagtgggtttaataatgttttactgttaatgaatgggcctctcaagacaatgtgctaatccattccttgctagtttttgctcaacttttagcatgtagtgtttaacgttttccttgtgtatgcgtatctaaattggaacttatgtgaccatcaagacagtttggaatttcatcaaagcttgtcttgtgatgcctcttagtggtatggagcggatatcaattgtccaaattgtcctttggcagactcgagaaatgttgaaagcaaatgaaaccggtgaaaaggaaaaggttccttttttctcaagcttttaaaatcaattaaaattgtaatggcaacaaaaattaagtagattatcttctaaagttaagaaagtcatctaaaaaaacaattttggaattaaatccctagttaaacattttgcctttaactgtagtgtttcatttctgtgcatcaaaggttttgagatcacaaaactgttttgtga

SEQ ID NO: 33839 - DNA, 254 bp, Arabidopsis thaliana columbia
  unsure (1)..(254): unsure at all n locations
gacgaaaacaagagaataagatgagtatacgtatcaagattcaagtctcagcgtgctaatgtgcgagattgagtcgattaaagatttaacaaattatgagcatgaaagggaaagatatctataggagtgctnaaacattgcacagatccnantccacaanatggtacaagtgtcagcagatggtttggtagaaaatcccatcagaaaagngagattctaaaaaataaacgacggtacagagggcacgttctgaa

SEQ ID NO: 33840 - DNA, 128 bp, Arabidopsis thaliana columbia
  unsure (1)..(128): unsure at all n locations
nnnnnnnnnnnnnnnnnnnnnnctaaaggatgctgtagctgaggtacaaagacgagaactagttcaagttgttgggttcttaaaagatcccagacgattctgcaaactttgaaaccgtaatccagcaa

SEQ ID NO: 33841 - DNA, 430 bp, Arabidopsis thaliana columbia
tcataacatctctgcgtatttgttccatttcctccacagacttagctgcgaatttctcttcgtaatatctctcctctccatcctactttatgtagcttaacctgataatacaacagccatgtgtgcttgccagcgtgattaaatgattgattaagcagaaatcctgcgaacttatgaagattacacactcatgaaatcattgatgaacacacagctgcaaaaatagaaatatgaccttagcttgttctccattacctgacctgcaaccatcacctttatcccgcagtagtttcttaagcttaaactttaagtcttcttcgtcatctagttcctgaaaaccgctgtgtacttcagtgcagttacaatcagaaagaaaagttcgagaccaaaactttaaaatggagtagttaacacttaaatcagcacatga

SEQ ID NO: 33842 - DNA, 520 bp, Arabidopsis thaliana columbia
ttttgttctatcttttcttatgtgtagatcatttatttgatggttattcgacgcacttgctgttgtttgtgtggctaaaatgacacataatggaattttttggttttcccttttaagtatgacatgatgaatgttaaatttataatattttaccttgacattgtagactctagctttagaccatagtttccaaaatccctatcctgcacgctacaaggaaaaaaaaaaggttcagcaaataatatttgactttcatatattcttcacgaaaatggaacttgagaagataatttaaatcatggtaagaacataatggtaggttaggttatatagacattcaagcattcttggaattatgattaactaatatttcgtgaaacatataacaaaaactaataaatcaaggtcagctgataagcgttttgctgatattctgaggtgttttaacacactcatatagtcatatttatagattaccatgcagtttgaataagttggttattaagagaagtaacaacac

SEQ ID NO: 33843 - DNA, 454 bp, Arabidopsis thaliana columbia
tgtaagcaactatatatcgttttaaaaaaaattaatcagctactatttattaaaaagttaatcaactataatttcttttaacaactcaatattcaaacgtgatttggttacgaaggtttatatatcttttcttattcgaaggtattgcaataaattggaaaacgttacaactttttttttcttttaagtttttatataagcgaacgtatttataaatacattatgaataagtgtatatatattatgaaatatgacttttatatcgatccaaggtactagatatatgtggctgagcaactatgctgaattggattagcaatgtggtttatatgaatgagaaattagacttatgtgaacaagctacaaagattattacatgaacgagtgattaggtttacgaggatgaggaatgtagagttgacagaaaaattgtaggttttgtaatttaccaggg

SEQ ID NO: 33844 - DNA, 600 bp, Arabidopsis thaliana columbia
  unsure (1)..(600): unsure at all n locations
tggaatcaacctcttatgctttatgttctgtttagctcctaccttatactataactttaattattcatcaataattctaattctccttcgttttttaatatactagtgtttcatataaatactcgctctctctactcattccctccataacatatatttcttcttcgtttcattcataatcgtcttataaccacagattctaaaacatgggagaagaagtaaaaccagtaagatctaaagttccttcaatacttttaaaccacaacaaattaagtacctattttgtaactaattggtgattgatgttttcaacttttcattattaggaggcaaaggaggcagcctctgctccacaggccgtccccgctgaggaggaggagaagaagaaagatgtagcggaggagaagaaagtggcggctgaggaggagaaaccaaaggaggaagaggagccgcaaccaccaccaccgcctccacccttcatactctacgtcgacttgcattgtgttggatgcgctaagaagattgaaagatctattctaaaaattagaggtanaagaatatatgaatggatggaggattagattctgctaagaataattg

SEQ ID NO: 33845 - DNA, 513 bp, Arabidopsis thaliana columbia
ttctttattctttataatttcaatagctagatatatgttgcacaattattatatatacttcaaaaattgtaatgtatacccaaatttgatgaaaattttactgttttgtaacggttattgctaagtttgaagttaatttttgtaggcaaatgcaatgttttcatatgaatcaaccaagtaactctaccatatcaccaagcaaaatagtatagtttgaagagagagagtaaattaaaaaaaaaaaaaaaccatacataacatattagaaacattaatttcgaataaacagactttaacgatgaaataaaaatttaaattattatccaccggtagatgtagaatgtttattggtatagaaagttgttctatttggtcaaagtttttgttgaccttgcaattacaaattacaaggctgtcaatcgaatgaaaaacatggcaatggaaaagatttgctaataatgccaagacaaacaaacgtttattttggaaggttaaaagccttttagagaagaa

SEQ ID NO: 33846 - DNA, 495 bp, Arabidopsis thaliana columbia
cccccacaattcaaatcaagcaaagacttaagaccaaactcataagcttatcatttaaacaaggcctttacactaaagacacttaagaaacaagcttatcattttagacctatctcataagcttattattttaacaagacctaactctaaaacaagcaaagaggttacacaattcagacaaacggtacaaaacacatcaaaaatcatatcattataagaagacgtttatacttaagaagagaggctaaggcgtttgattttaatgtaaaaaaaaactcataacaacaaggcaacacttaatacaagattcagtctaaaacaagcaaagacttaagaccaatctcataaagcttatcattttaaacacatcaatacacaattcagaacaatcatacaaaacacatcaaaatcttatcattttaataaagcgttcacacataagaagagttaggtctaggcgtttacacttaagaatcaaagaggttactaataaga

SEQ ID NO: 33847 - DNA, 549 bp, Arabidopsis thaliana columbia
tagaggatccctggacgttacattgaatttataaggttgaatatgaacaaagacacagttcatctgtatcaaacattgcgaccgctgcattttcactatctactcatagccaaaatcttgtatttacttcattatttactagcatctcgaaactcgtttcccatatttgttgtttgaaaccaacaaaatattgtgtaaaataaattatacatgtatacgtataggttaggagaatttttttgattaatatattattgatttgatgtttgtttgctaaagtatgaggtattaaataagggtgagaatcctttcagtatgagataatacatggaattattaggaaacaaggaagtatatagagaaaaaaaaaatgcattattgataatcaaagaataaatctcaaatctcacatattatgacacaaaaacttagaaatttgaaaggaatgttacgaaagaaagaactagaaattttttctaattcttcttacaaaccaccagaggtaatattctttgcaaagattcttaaaggatccaaatctgatgtaca

SEQ ID NO: 33848 - DNA, 343 bp, Arabidopsis thaliana columbia
cgactctatcccccatcgtcctgccaagcttgcggatcttaaggagaggctacgggctatgttagatatgattgttgaccagaacccaattatagcctcagcgttgagggctagagaggcaactaactcagagcgagaaaaggcgtcgagtggtcaggagatgaccgagaaggagcgggactatgatgctctgttcgatatcattgtcgagcagaacccaatgctagcatcggcagttagagctctgcgtgcaaccgactcagagcgtgctgagacatccagtaatcaggagatgaccgagctcggccaagctacggcaacatatttcccccacgagaagggg

SEQ ID NO: 33849 - DNA, 518 bp, Arabidopsis thaliana columbia
ctgtgaatctcaggtcggagaaggtaaaatttctttcctttccgttttatagtatacaatatactcaacttttgtatcttatatgatgatatcatgattcgcgtaccacagttcataagttgatcatatgtatagaaacttagtttgagataaacattaatagattatgagagatggttacttaatggcgtgttaacgttgtgttgctgtgtgagataaagtaaacaccaatctttaccctactttccatgccaattttcaacactttatgatagtgattagaaagttttaacatcggtttattaactttgtgaataaaaaagagggtattgtttttaaggaggatgtcaaaataaaggagagagagcttgtggagtttcatctagactatgcaagaacgagagccaatcaagatcatgaaccagggaaaggaagaccataagagttaacttaaaccaattcaagaaataatccataaacgtatatatactattttggcaatatgctttttgtacgtg

SEQ ID NO: 33850 - DNA, 511 bp, Arabidopsis thaliana columbia
tgagactatgtgatgatatgtttagctaagctgagagaaaatgattgtttagccaatttttgtttacagataccatgagataagtggccacattaggtgacactaagatttcatagcattgtaatatacacaagtctctagtgaactgctgttgtgataaccaactcatcagttattttgttccttgcaagtttggaagaacctctagtgtcaagagatggagcacatataggtggaatcgaacaagaatctcgagatagcctgattcagctcaaagaaagagtgtacgagaacattgccacagtgcctctagttgtagagagaatgcgagagagtaaagagagaatcgacaagtccatttctttcaatggaactactatgcacccggctttcacaaggcggaaagctagctaactgatcagtttctacttctccctattggctttaccactcaaagaaagctaatgcataggaggagatatgggctggtattctttctactatattagta

SEQ ID NO: 33851 - DNA, 629 bp, Arabidopsis thaliana columbia
  unsure (1)..(629): unsure at all n locations
tgctatgaacgaggtttggtcacttcgattagatacgcgaatatgacgcagggtgcagagatgagtagtgcatgatgcagaaggacgaaaattcggcatgggcagattcaggtcagccatttcttttttgagataccttattgcataaggagggattgtttctacttactattattctgtagatattttgtatcagctgtgtgaaagagctgggaatactaatcaaagagtaaatatttgtattgttaaagaaagataggttagattttgatagtgtataatagcatttatttggcaccatctcggttgcaactaggtgttgttacatttagatttttttcgaactctttattttcgagtcctgagacccattccatctttttgcatataacatttttattggcagggaagagataattatagagtggtcaagaagagaagaataagctggaaagggaagaaatggtggaatccggccggcgcttctggtgatttggcatatgagcagtgctcgagtgagctgggatgattcgagcttaccagtagagtgatggagactctatgtcaaaatgtaaattaaggaccactttggaatgnntatttttggtcaaatagttgcctgatttgta

SEQ ID NO: 33852 - DNA, 444 bp, Arabidopsis thaliana columbia
gtttctagctttatattgccctcgcttttgcccgttcatgactcttatgatgcttggtcgtaaaacgtgattccatgcattatcttatagagttatagtatatagatattatcaaaatgatcaagtttttaatatcccaattctacatttgaaattttttaacatttgatttacaaagttgacgatagatttcagatttgaagacgatataaagcaaatctttaaataagtttttgtggaaatatcatatgatatcagaattctaacaaatcctaacaaatcggtaagttctaacatatatgatgaaatagtacttggtaggtacaaacattaaacgttttgattcacacataccaggagaagatgatgagagtaactttttacttgtcgtccaacaatgaatcgctattcaatcaagctttagtgaaggtgttaggtgtgtgt

SEQ ID NO: 33853 - DNA, 441 bp, Arabidopsis thaliana columbia
tggtaaaatatctcaagtaaagtgcaaagatcgcgggttcgagtggtaattaagaggaaaccatattaaaagtattggtatttggtctgagggttttaggtccaaacccttttagtaattaacatatataccaatttaaatattatttttgaatgactaatatgtacagattgtatttaactattataaaaagtaatgtgaataagttccattacgatgtggtatatacgacggtcacataagatgttttattagttgataatcgaagggcgccaggaaatatgaatcgtggaagctgaagtccagttgatttcttgtcggagttagagacgagccgcgatgagaagttatggcgagtggtgttatcgactcggtagccaggctgggtaagtttctgaagctgagccccagtatcgtctgggtactttctagaagcttctt

SEQ ID NO: 33854 - DNA, 448 bp, Arabidopsis thaliana columbia
  unsure (1)..(448): unsure at all n locations
caaccaaattaagtaaaaagttgacaaaaaagttttaagtaagaagagttctcaaagaaattatctaattaaagacgttctataaataatccaacaatcatttaatatataaatacaaataatcgtaatataatcacttttagttaataagttagttattagttccagtcactgtgacgccgatctccgtctcgacgcgctactactctcgactactgccattttcgccgcgggttatgatcgcgtggatatgccctgcatgacttgcgcgtggtgttgatgactttaagcgcctgagccgcgtgagccgccgagcaatgtttagttactgggcccagccgttttttattttgggccgcttgatccattccgtatctattgtctttggcctatcgtttatcgcgttgtctntttttgcctgttgtttggttgctagggccgcttttgc

SEQ ID NO: 33855 - DNA, 657 bp, Arabidopsis thaliana columbia
gctgtgtagacttgtttgagtatatgatctttacagatcttaaagcaggaatcatcttgtagattaggatcaatcaacgcttaacgcttaaatctttatcttcttctcatgtgttttcttttgatcaatccaagttttaaattacatttctttggtcacgcatttggagttgcagctattaattgtagttttagtcatttaattggttgtggaatttggaacaagacttgttgttataccaatgtgaaacactctcctgaaagaaagctctacaaacaacctaacaccaaggtcacgcaaatgaaatggataacgcaatatcacctaaaatccttctgcagccctctttgtgccttcctcgactttgaatatataaagagacacacctaagatatctcttcacacacacactctctccatggatacactttttattgcagtaactctggctctcgctctctcctctttcacaagaggccagagagtgatacagattccaccaccacgtccactatgcgcgtctcaatacgccctagctaactacgcctgctcacgtctcccaatgcacactgtcccaccacctgcccccattaccccacctcctgctcccatcgctcccccgcctcctgaacatgaccaccacgaccacgaccatga

SEQ ID NO: 33856 - DNA, 684 bp, Arabidopsis thaliana columbia
atcacatcaaagagttccaagccctttggagctacaatgttataagttcaatgtagattccattggttttaaacccatatgtaactacaaaaacgatcagttggtacttggtatagtcattacagttatttcgatgggtcgatctccaagaaccagctgcgcaccaacttcctcagatgctttccgagcagcacgaaactgcaacaaatagcaatcaagaagagactgaatgtccaaaaacaaacactaactcttgaggttttctcaaaagtacctcatccccgaaaagggcggtcagcaacagaagataacttagaagagaaaaccgccaatagaagtcgcaatgccaacgcagtttgccctcctatgatcatcccaaacacacacattcatcaacgttgaagtacaaaagcgagcaatggtaaataaaaagctttgattagtttatatacccaagtctaaactccggccaacagcaccgagaaagccagtcccggtcaacgacaactctccggattttaagttttggtcaacctctcctccaacacttgaagtgtacataatcccagctctgcaacatcaacaccaagctctgcaatttgttcacaacacaatggctaatcaattcatcagttggcaataaagtcacagattcacgaacccgaatttcgttggataagaatg

SEQ ID NO: 33857 - DNA, 604 bp, Arabidopsis thaliana columbia
gctagttcttccactatgtggtatgtcagtatatgaccacttgtaggatttggaccaaagttcttttataaattactagagaatacccatggatattgaattttgggatttcaaaccaaattagacactccatcacatgttgagacaccaaatgataccattaggcgttggccaaagtagataatgaattcagatattgaactctcgttcaccacaagcataaatatttcaggaaacaaaacatagagaataacaagaagaagaagggggacccaatccctttggcatcacaagcgactttagataggaacttatctaaagtacatttcttaattattacgcaggaaaatataatccaaacacatgcatatatgtattttaaggcagagtcttgaaggaaaaaacgttgacaatggcacctccaacacgacccatcggtggcctactctccaccttttcttttgcatctttatcattgagaaactgaaacatttcatacaaatcaaaattgggaagttatgatatagatatattttcataataataaggagactttttacttttcgccgtacattattagttaaaggagttttaatggaccaag

SEQ ID NO: 33858 - DNA, 382 bp, Arabidopsis thaliana columbia
  unsure (1)..(382): unsure at all n locations
actccttcaagataactaaatgcagcatctttcatcaggatactgtcgggagctacaacagcgaaatgcgcaacatcagaagattgatcctcgtctcaaagtcagtgatgaaattgttgtaaagctgtattaaagcatctccagcctgcaaagattatgaacataaacagggggaaacacgtcattagcaaatctgtaaaccttgaaaagctgagtttttgggtatctctgagctaaaatattcgaaagctttggtcacagaagtgcgataattcaccaatacaaagaatttcaatgaatctgaaaaatcacctatgagtcggaacgaatcattcagatctctctatagacccaagtctancatgacgactcctattaactt

SEQ ID NO: 33859 - DNA, 628 bp, Arabidopsis thaliana columbia
agctgcatactgtatatttaccaagtagcttatctgaaaacataaaccctcaggcgtctcacacacaaaaaaaaggagagaaattaacatgacatcatgtattgttgttcttgtataaatgcagtaaaagtggacagatagagaaaagcctttgcatggccccgcttgagaaaatgaccaaacggttctcaaagcagtaacaagtcttgtgtatattcatatgatggttacagtcatctaatatcaccaaactgctgctacaaacaatccaaaaaaataaccgctatatatcttaatcagtttactcccaacacgataaaactgttaccattaaaacgagcagtattaacacaatatcatcactaagaggtagaagaattatgtacacccatcaccttgcatataaaataaaggaatggcaagagaaacaatacatacccaacaccctgcatatcaaacatctgtccacgccttttgccaagaagttcaacaacaggccccatgtgagcctctggtacttcaacagttgctatctgaattggtggatttgaagttagatagggcgtctttacttaaattcacgaaagcataagttcttttcaatgagttgacaattataccaaggata

SEQ ID NO: 33860 - DNA, 579 bp, Arabidopsis thaliana columbia
gtgaaaccttatccggatttcccaacacggacgtaaaatcttgggattgaaactcaacagtctccttagtgtagccagtgtaatacatccagtaaacagagctattagctctgactttagaactcgacattatcacaacctcaccgggtctaacacttgcagtatcaaatcccccacaagtcttcaccacagctcataaccaaacccacatcttcgcttgactcaactttaccatttcctctttcccaatgaatcccattgttggaaaccgctaatccgatagaatcagaaacagggttctgctttgagcttccatggtaccacatgtaccatctctcttcgttatcgcttagaaatctcttcacaaccggagagccaatctcctcactgtgccacgaatctttagagacgccaagatcaaaaactagccctctcttcaaagagatcgatgaatcttgacctgcttctctactttttgtggtggaacatcttgtgattgtgagcgtgaaaggagaaacacgtttgttccggtatgtagggaatcgaagtgagagagttgataatcgcctgtaaggttga

SEQ ID NO: 33861 - DNA, 581 bp, Arabidopsis thaliana columbia
taataaaatttattattaatccatccaaaattcacctcaacatttttaaacagcacaacgacttatttgattaaaaaccattattaatcaatatacaattttatctaatcactctagattacctacttttccacgattattattcatccttgttaccaatgtagctaatgataagagtgtagataatctgtcaagagtaaagatcccttacattggacgaacgcaaaatcgacagcaggaggttcgtcgggctcatcagcggctggaggctggctcgctggtgcggtgcttatggctcggacggttttggttcttgcggcattgtgttttgagcgaaagaagtacgaatttggcttattaagtttggtcttgtggctaaagctatgatttggaggtagagaagctactaggccggaaccactcaactgtacacttcccatagtcttgttcttcttttttaaacaataagatattaaacagaaccaaaaaaaaaggttgggtccttaattgggataatgttttatatgccatgaggtttctgtggaggcgagtggtgctctttttactcttaccaatgtgtg

SEQ ID NO: 33862 - DNA, 506 bp, Arabidopsis thaliana columbia
cggaatcgcttctaaacatcggactaatcggtcgactaggcgtcgaaaaaagcgctatttctgcgtggaccgccgcgattttggctcaatcggtgaacaaatcggcgttcatgagaatctacttaattatcttctttttgatcatgaatatgtattttagtggtagatctgtgttattttggtttgattacgtgagaaaacgatcaaacaagcggataaaaacgaaaaaaattgagtataagcgaaaaaacgatcaaacaagcgaatagggttttgaggaagaagatgaccccaacatttttaaattacaattttgcccctatcatttaagtgggggaaattcgatttttttagcgtgaaaagtatcgaaccaagggctgtagcaataaaatttgagcagaaagccacaggaccaacataacttcacatcacaacttcacttataatataataaatttcataaaatttcttataaaacaatataaattcattatagtttactttaa

SEQ ID NO: 33863 - DNA, 615 bp, Arabidopsis thaliana columbia
  unsure (1)..(615): unsure at all n locations
ataatattatattgtggacctttttttcacacctaagcttctagatttcgaatctagtctcagcagaggaggaccccatgacttatcagtgaagcttatactttgaacctgaggtacaaaataattgagattcaatatcattgctcaagagttgcataatccagttttttgtaatcttctacttgttaatactatacctttcaatactaaattcactacaagtctttatctgaatttatcaacacttataagaaaacctaaagatttaaactttgaggaccatgtaatcatctcaacgacatagatcgttaatctagtgatctagatcgtttttgctcaccttaatcatagatcggctctattcatcaattctagttggaattgcacggacatctaatatcaataaccaaactttcattaaatccgaaacttaatctcagtgtcctaataggtttagaatggtaaatatgaaatcctgagatggagtagttgagagagcatagcattggagaaaagtgacgataattctccagatgaatattaataattgacncacaatcgagaggaaaattatgatttgaggacaatagtacagaggatgatctgggttatagt

SEQ ID NO: 33864 - DNA, 573 bp, Arabidopsis thaliana columbia
gttaaatattacactagtccgactagagaaaaaatattaatttatagtgattattaacttatcgagtactaatttatagaggtttttttgtacaaactgataagaagttaaactttaatttacaattatgctaatttcttttcttcacctaatctatttgaatgttatataattacctaaatcatattcacaatcattctgtaaagtaaatttcatttaaactcactcaacataagtactccacaagtgccaattgttatacgccgtgtagtggaagtgttctataggtttagtcgtgatacacttggttacaaaagcaaacctctttcatagtaatagggtccacctagttcttgtgcaattcgacatagtctgacaacgaccctttggttggaccaagatccgtatacgcaattctcatctaccaaaacacgaacaaggatttttggttttctctctgaacatcttgtaacttctggataaaatcttgagaggtaagtttttctccacctaggtcttctgcaattggacaaagtctaactttgaccactctctagtgtcggtaggcaaaga

SEQ ID NO: 33865 - DNA, 520 bp, Arabidopsis thaliana columbia
ttcattaatattcggatccaaaaaaatattgttattatgggcttttaagtaaaagcaagttaataattttaatttgatacacaagacggtccaatgaaaaaggtcagatattatcattatctattatgatgctattttttccctacattatcatcaaatttggtagataaggtgcattaatgttcatcaatatatattaaatgaaagatatattatgccatcaaacatttaagaaccaacaaaaacatattaaaaaccaagcatatgcgtaatgcgtagattctttcaactggtggggaattaatttaaatctgtctcaaacgtaactgctattaatctttttcaaactttaaatctaatactactaaaaaaacaattaatagtagtcattagcatacgaaaacaaaagttaagtagtgtcttgagaacgtgaagtttgaccgttgaacacgagaagtaatgatggtcgcagaagaagagcgtgacgagaggttataaataagagcaaaaaacaaaaaag

SEQ ID NO: 33866 - DNA, 527 bp, Arabidopsis thaliana columbia
ggggaaagttggggtattgaattcagcggaacaaaaagaacctagaaggtctgttctagcaagtctaagagtattagatgtttgatctatatgaaaaacgttgtactcatggtttgagatgtttagagaggtgatgttattgaggcagcgaacgtccagcaacggatgaccgcaaggtttggcacgattcccaccccagaagggaaaaccagcagtgttgttaccacactgaaacagagcctcacaccaccctaggtcttctttacttagggcccaaggaagagggtggaataagaataagaggaagaacaagaccagacaagaagtaggcatataggacatgatttgtgaacagtgtgtctcctgcgtttggtttgtgttgagcggagaggagcaattgactttagatagagagcgtgagagagagaagcatagagacaggtgccatatacaaaaatacgaagatcttactttgatcacattactttaccagtaacaatgaaataaacaattttattgggaaggaa

SEQ ID NO: 33867 - DNA, 646 bp, Arabidopsis thaliana columbia
  unsure (1)..(646): unsure at all n locations
cgactctagactagaggatccccctgcctagtaactttctgtaatgaagtcagatattttggctttaatgttaaacatgtgtaatacttttagttgaatggtattagctcttcgaaacctccaaattctattgtttctctctctagttctactcccttaatctgtctccttttaaatcttaaatctttctaactctactcggcatacccactatacaacctcctttcaattgagaatatctactccttcaatttaaaaaaaaaaaagggtttccccctagatttgaaccttaactattaggctacaatagtgtaccgtacaacaacttgtagaaattataatcgtcatgtttatcattcttcttactaattcagtgatcactgattgatggaggggaatgaatatgcaagtttggaaggataacttactgtcagcaggctcattcgacaacagatttgcaacatgtgcagcagccacatccaatccttccatatcatcaggtccatcttcattgatgtcacaacatcaaaccctacataaattcagtagcaactcatcaaatcttttctcaaaaaaaatacttccctactcatagtaatagacatttgtgcacaagtctgatgatagtgctatatanagaaagggg

SEQ ID NO: 33868 - DNA, 474 bp, Arabidopsis thaliana columbia
ttccttctcaatttaaaagagaaaattaattttgcaattattcggttcggttcgattcgattaagtcagacaaatccgagaagagaaagttattttagaaactaaaccgtatttaaaccgatatgattgtgccgttatctacaagtgctgacgtggcgggaagcatgatctcgtggtttgaaagaagccacgcgcttcctcgtcttcccttcgtcctccgacgtttccaattgggagaagaagaagacgacgatgaagcatttatctgattctgggtctgttgaaaatcaaaattttcttgagaactttttttgaagagttatgattgcattagctgcttcttcgttggggaatacaccgattgcttcgtttaccgtcattttagatccggttacatcccgaaaccctctgatcaagcagcggtttcacttcgtcttctcttcttctctactgcttcactggctttgatttgag

SEQ ID NO: 33869 - DNA, 531 bp, Arabidopsis thaliana columbia
cttgtgtccgttgggataacggtgcagattcccgcgactgctttggcgtgcggtgtgaaaaggtagttcgttcgtttgactggtttagccgttgcggttgcggcaacgaatatgaagagaaagaagagtttgattggagtgttcatgattgtgttttcgtatgaacggagaaagggatcggaaaggaacggatctcggaggaagaagagaggttttttgatatagctagaaagataatgcatgttttgtatatatttatagttcgtctatatttggcagctagcttttagtgtttgtttttgttaataattacatatggtagggagtgaattgcgcgttaattttcgggttaaacggttgtgtaatattttagttgatgatgacaaaatgatattacattttttagattaaaaagaaaatgatatttagagtttagaagaaagttctcaaatcatttacgacattttatgaactgtttatttctaaaataagattttgtggtatatttgaaattcgaacattttgataaga

SEQ ID NO: 33870 - DNA, 576 bp, Arabidopsis thaliana columbia
taacgaattctcctttttgtgtagtgttgtaatttaatgtcttgtacacaaaactaaggacgactaaaaagaacttgcatttcttaacttattcacatttctaattaaatgattaaacaatttgtttgaccggattttcttagcttagtaatatgatcatattacaaaatacggaaaagtgttgtaaaaaattctcaaaagttaactctagctttttatagctggagagacaaaattctacactaactacaaaatacagttatatcttagtacaaaattacggttataaactgtggttaaattgagaactgtcttagtacaaaataaattaagaaacaaggagattacaaaattatgattcaatgaataatttatatcttccgccgataaagcataaataaattgatcgatccattcatagtgcccgaaaattttgtagtcactacagacaaattaaaataaacgagtaaagcataaaaagcacatggtcggctctataattgcaattctcaaactttttcttttacatatgcatatcgaagagaaacacaactttttctttccaaaagtgtattt

SEQ ID NO: 33871 - DNA, 573 bp, Arabidopsis thaliana columbia
gggtttaaatcaatattaatacaagatggtaattataggtgaaactctaaaattaacaattaaatacaagtgtataatcttaaatactgaacaatataaataatatcaacaaaaatatacaactagcagtttactatacatttaaaatccataaaataatattatatatttataactcacttttacaataaaaaattttagtttaactaaaatataagagtatctacggtataccgcacgtttatatctaattacgtatatataaaaaagaaacaactcaactaacccacttacgtttccgtcaattcaaaaataaaactatatattttaccaaaaaaaagtaaagaaaaaaaaaagtaaaactagatatatacaatttattctagttgcaaattaagcattcaaaattggcaagatatgtaattgtttaatttcgttaagactcttagcattaaaaccatagaaaataatatgaaatttctcttacgtaacaagtttttatttaatgaaaaaaacaaggtttatttaattccacaataatttattcttataaacgatgttgactctatacgt

SEQ ID NO: 33872 - DNA, 706 bp, Arabidopsis thaliana columbia
gactcaatatcgtagaactggtcgatccaccggtaaccaacaacaacaacaacaacaccgatcttcttccgccgccggttacggtaagggcgccggcgctcctggttctgcgcctgccccttccacttatcctgataattcttccttgtcttccaatcgcaggttttcatttcaaattcgacttttttttttttggatgattctctgagccattattggacatgattaattatgcaaagtttgatcctttattgttatttatgacagttttaagaagcccggcaatgctcaaggaggagggcagcctcgggtgaatctgccacctgtgaatcatcctaataatcacaacaatggtcccaatgctcactctcgctctcaaggtatgatcgttattcacggagtgccgcaaagtctttaaatttgtataatttcagattaatttggtcagtgtgtgagtgatcgtttggtttagttcaatctatcttacactgttagttacaggagaaccgggtgttggtggaccaaccaatccaactgaatcgttcaacagaaacaccggacctattccaaaggctccaacttctcagtctaccgtcatgagttccaagatcaatgagacgcccaacacagctaaaggtaggtttttgttgcatcgtctatttttttgtatgcatactgagctttgaagttgaactaaattcctctg

SEQ ID NO: 33873 - DNA, 325 bp, Arabidopsis thaliana columbia
acaaaacaatacaagttttacccattgtttccattttcaaaatttgaaattgtgaatgagaagaaaaaaaatccgaatttcaacagttattgcacattatgtaaattgttttatgaaattttcgaacagtttcaaaattcaacattttgaatcattcttgaattaatcagctaaaacgtttgagaaattagtaaactaaccagataaccacgaaaagcggattgaatcttcatcgccgcgatattctcctgagcccaccgacggttacttcttcctatttgaaacaccgacgagtttccaccgccaccgacgtttctcccgccgt

SEQ ID NO: 33874 - DNA, 475 bp, Arabidopsis thaliana columbia
gggttaaattaaaataaattagtcgtcgtcattagtcaacgtgactcactcactccactctcaaattttgaaatcaaacagctaaaagctattctcttctccgaggaagaagaagctatagagaattggaaatgctctaatgtttcaaatagaacctggttgcaaattcatatggtcaaagccacgcattgacttttttcgtcccaacccaaatcctcatttacaaataaatccaaactctaagaaaacacaacaatgttcacaaaaacacaaacacatcttcaatatagcaaacgcataacatttaaacctactatttgtacacagctttatgtcggacctactatttggtccaagaaaataattcgggacttatagacataccaatcaaaaccgaagcctgaagcaaactaatccacataaactttgcaattgcaactaactgattctatacatgagtagaatacatgattat

SEQ ID NO: 33875 - DNA, 401 bp, Arabidopsis thaliana columbia
ggtagatatatgtatgtgtgtgtagaaaatggttaccaattgtatcttctttttgataattattttttcatgccttttgtaatatgtaagtttctttacctcgttctctgattggttattttctggttatctgtttaaccaaaagctatgtaacacagtagcaaattgttacttaactcggaagtgagatacataactctgttgtattgcacttgtatcaagcgttaacgtccatgattcgtctctgttattgtcaataacaattgttcgaaagccaggttaatggtaattaggaaattgaaccgtatcggtatggttttagcgggtctttagacttttctaattgatactgagggtttgcgaattttgtataaacagttgaacactaaacagagaagaga

SEQ ID NO: 33876 - DNA, 500 bp, Arabidopsis thaliana columbia
atttatacaagcaatttatgaatacggtatacacaaatttatatacaaacagttagaccaataccaaaatttggtgatatacttgcaaacctagcatgctaacgaatttgataacttacatgccttatcccatctagcgaaacaaattagagagattaaactgttggagataaatttagaactcggttgatcacaactcaacatttcgcactcaaacattacaaaaatactagtctcctacatcaggattacaaagtggtcttccgcatttgttcatttggaaaaatatacaaccaaacaagcgcattcgatgatacaaattcttgtaccacattgaaattcacttacaatattttaattcgaacaaatttagctgagaatgtctttattgatagcaaaaagttgtgttaatttatattttacgcatccacatttgtgtgttttatgcttcacatttgtaaagaatttctttgaacagttgtgaaattttcacatttatg

SEQ ID NO: 33877 - DNA, 313 bp, Arabidopsis thaliana columbia
  unsure (1)..(313): unsure at all n locations
taaaggaattaaagtatgcaaggaatacatgtaatcatctttaaataatcgagaattcgtttgtaaaaatataacattaaatggaattaacctcatctctacaattaaattaaaaattacaaactttcaaagttttattaagtgtctattctaacatgtccaattcttggctcattgcgatggttcaagttctaactgttcaatagtattagtcctatccagttgatttgcgatcataatcaattgtaattgntagtctgttgccagtccacctgggccctggctcacgtgtctggtntttggttgttttcct

SEQ ID NO: 33878 - DNA, 631 bp, Arabidopsis thaliana columbia
cttagacataaaaaaaaattagtcaactactaaacaagttgtatcagcgctgccataatcggtctaaaacggactattccaaaccggtaaaaagtgcctatataatgatgtaaatcatacgtaatatatttgcgaaagagaagttgttagacgtaataataactaaataaatagagaaaatttgaaaattgaaaagaaaaaaaaaagcgaaggaagagagggggcatgagtaatgaatggttcaccttaaagagaggacctaatgagagttcctttgtctatggaacttaaggagacgtcacatttctcatatttgcaagcacgagaaaaaggaaacacacacactcacgacacaacgaccaacgactatatttcttgtcattacccacgtggcatttttgtttccacgtggactccctcaaccacaacatgtacattgtacaatggatgcgtgccttatggtaaaattatataatttcattgaaaatataatataagaatcaaattttaatggatgtgtgcttcgtgacgaaactaatttcatttcaattcatcaaacttcgttattataatttcaccttcacaaaataacacaacgtgcaagcatagtgtagcttggtttggattgacc

SEQ ID NO: 33879 - DNA, 553 bp, Arabidopsis thaliana columbia
gaagaattctcgtaccgtgtatgtaaggcgggagatttccaatgtctacgtcacagcagattaattcgcctatgtagctgggaattctcatgttggacattatccgctgtttaaacacaacaatagttagataataaatgaacgcaaccaatatcctcattcagtgaaagctttcatattcatggaacagacctggattcgttcgcgcactaaattcttcagtactgtgttctgtttaacatcaaaaaacagccgagataatactacgttcaatgccaatgttccttcatcaaaagacttgtcttctgaatctacatctgatgcatgactgctatggctccaagaacgtgagataacttggacatcagtttcctccgggatgttatcttgcatcctccttgctgaggtactctttccagagctaccagtagattgtgaatcttggtaagaacgggatgaagtcttcttgtcgtcacgaatcgacgggggaaaattcctttagttgagcactttttcgaaaatttcttccagatcaaacgaacctttgatgaag

SEQ ID NO: 33880 - DNA, 547 bp, Arabidopsis thaliana columbia
gttttttggtctaattataaataattgaaaggagaaaaaaacgaggggtttcttcatttgctttagcctttaagagttgtttctcaaataaacttctaagaagcattttctcatgttttctacattagcctctttgtatacgaaagtataaatttcaattgtaattttcaaagattgttcatcttctttttttttggtaaggaaaaattgttcatcttagttgggtttttattttatttgttttactatttctaggtatacgcttatctttttaacgttttatctcaaaacattttagtctcgtttaattttggacaattgttatgaatatttctacgaatgtctcagtacatctacgtatataaatgagatatgtatcgtggtcaaaaagagaaaacttgaaactatgtaaattatgaactcatctttatacatttaaacaatctactctccctaaaccagagtgattctcagttctcatcaataattaatgattacatatccctaacattatcaaccatagctaaaatttcgggatgggaatgac

SEQ ID NO: 33881 - DNA, 483 bp, Arabidopsis thaliana columbia
cgcttgtgtgctgctcccttctccacatgttgagtttggtaaaagaaacccatgtaacttacctctaactttcattttcagatgtatgatgatcactcacgttcataacttcattcaagttctttccttttacttcctcaaccaaattcttctgtactctatacaaacggtgaagctcatgcacctacatatcaatacaaaacaaatcaaaaccatatagacacgtaaatgaaaccatatagagagcaatgtaagcatcaagatacctgattcttgaaaacagcttcgtgctcaagcattgtatgtatcatgaaatctttctcgtatccagagtatgatgacgaatccgctgcatctctcattgcgaaacacgtctaatatcgccgcccatacgttgcatctccacgattcactgaccaaaaaaacacttcactgagatccctcattgaataaacactccactaactgatacatatgcaaact

SEQ ID NO: 33882 - DNA, 571 bp, Arabidopsis thaliana columbia
acaatgaacaacctcaaaacaaagaagtgagccaagagcaccttctccagacattttgctcgagcttctgtgatcacccatcatatagtatgaattagcaagattcacccacgcatgggcagactttggatctgatcttagagcagccaagagacattcctttgcgacattcataggtgccttctgatcttcagaagcatcagcaccaccattagccccggcacctgacatcaattgaaaatacattcacatgttacaagtgaaaatacagtttacataagatagatttccctctacttttttcatgtgtactttgcttaggcagattgagaggagcaaacaatttagaggttctttgataagaaacaaaccagcaacagttgaactgtgtttgcagagaagctcggcagcataatttatcaaagcggcaggatggttatggtctttcagtaccaaatcttgaaaacattttgctgaaactccatatcgccactggaagacttgttcattagagtgaagtatcacgataatagttagaaatagaggggaagaaactcctcacctttgaaga

SEQ ID NO: 33883 - DNA, 364 bp, Arabidopsis thaliana columbia
tcagtttctcctcttctttaccatccgtctcaaacccgatcttccaccaatcaataaagaattattttaggacattgattgtcttgtacgctagcaataagaaactaaaacatctactctttcaaacaaattctcattagtataagttatactgtataacgcaaaatacagagttcctctgttccacaagaatttgatgcttatgtctatggataactaaacatactttctttctaaaaatatatgaaagttgatatgttcttacctcgcaaatgccatctttggctgagcaatggtaagtgataacggagttagctttgaagtacttggactggaaaaagtcaacgaccttctcgagctcagt

SEQ ID NO: 33884 - DNA, 422 bp, Arabidopsis thaliana columbia
atgtgaaaataaatactacaagaaaactaattgtatgcatttattcctttttattggctaatttgatgtttcaacaacgtaatatatgatcaatcagacaagtagacgtttgtgaattcttgaagaatatctgcatgtaaaacacggatccatatatcaataatcaatatatagaacaagataaataattctgattgaaaaagaaataatgataaatctttttttactttttgtctttctataaagcccgataaagctatttttgtgtgtcaagtacataactttaatctggatctcaactttaaaaaccaaaattcaaaacacaaccctttcttcatatctcaggattataagactcatatggttcctttaacaaaaaaaaaaaactcatgattaaggattaggagtgtaataccaagttt

SEQ ID NO: 33885 - DNA, 558 bp, Arabidopsis thaliana columbia
agaaaatagataaaaatccaaaagaatagttataagttaaaaaaataattgaaccatagttgatgattttttttccccggatttttggaaatcaaaaatgaattgaagtgaatcaaagttgatgataacaagtgaagaccagtttaagacaaaacaatcggattctttggttaactccgattcatgatccagtttgctgctaagctaagagaaagatcaaaaatgaaattttcgggagtaactggtaggagaatgggagatggaaagccaaaggttggataagtgtataaaaagagagagtcggatgttcataaattttgtaataaagaactgcggttaaaatcttggatccctccactccacggctccactgtgtagagtaaattcttgacgcatgttcatagacatagtaatacgtgaaatgttgtgattcgcgttttttcctttggagggaaaatccccttgtatttgggatctctgatgttccattaaccttatccagattccaatattgaaatatcgaatatatatagtcgtgtatattagtgattaacatat

SEQ ID NO: 33886 - DNA, 533 bp, Arabidopsis thaliana columbia
taatcttcgtatccatatatgataaagcaactacatggaaactggcagagttatatcaaacatataaatggtcatggatatgagtgtacaaaaagtaaaacagatttggtcatacacaatttgaatttcttcccgtaataaacatattcttaggctctatatatatatattgtatcaatgttattgagatcaataacacataataaagagttttcccccaaacccttctctagttagtagtttctataattttggcaaatagtattcaagtgctcttgcattctcaagtgattaattcaattcctaggtttcggtttcggtttcggtttggttcggttcgtctcggttattttaggaaaagaaaacaaaattagagagcaaacacgattggtcaaagtcaactcttctctaccttcctcacttcccagcttcactgatcatcgccaatcacaaaaccaactacacacattcatcatcatttcgattatattttacccgaccatgaccggagctagccgtcggagcgcgcgtgg

SEQ ID NO: 33887 - DNA, 479 bp, Arabidopsis thaliana columbia
gtacatgtgttgaatgttttttgacagggtgtgtttacgtatgtaaacaaacaatcacatccgtacacaagataacaaaatataaacgagactctgagtggtatacactaataatactcatatgactcatgaaacgttttcaaatcaatttactttgcttgtaattatgattacttaaaaagcgtaagtattagtttagtagtttagtagaaagtaatgtactaaagcgtgtagaaaataattcaatggtcttaattagtgacattttcatagtatgaataggaaaataaacagaatttgggaaaaaaagatgaaccattctactaattaacataaaagcatcccaagtaaaaaagaaacaatcaagaccttaaattcagaaagttatataactactacagaactgaaaaaaatagattattaccgattcatttcatcatccaatagtttatgttgtcaaaaaaagaaactgatctagt

SEQ ID NO: 33888 - DNA, 559 bp, Arabidopsis thaliana columbia
ggggacatcgatttcaaaagaccgatccggttattaagagcttgtggaattactatcttcatggaaaaacttccaaaatgcaagactaaacttataaacgctgctactgccaaagaccctcctggttaccctcttggttacacgttcgaattccaagacattttgaggatctgattgagtttttttgcattggtttagagctttctccacaaatctcttatttatcagtgttcgtttgttagattaaggttaaggattactactatgcttagtatttgaataaagaactacgaatttagtatagtcgaccttccaagagaaaaatgaaatttgtgtaaggcagcttaagttttagttttttttttttttttttgagaaacctcttaatctttagtacctataacatattacatgtcaaatcttctgtctcttaaaaaatgaagtattaaaggatccatatctcagtatgcagaaatataaaaaggaaaaaaaagaaagactaacataaggagattatatatatatcatttgattggttaacacacaatcaaacatatta

SEQ ID NO: 33889 - DNA, 509 bp, Arabidopsis thaliana columbia
caagcaattgttttgctttttaactcatgtttttggtaatatgcagatactagcaaggaaagctgcagagaagacacttgttgagctggcttcaaaatcatgtgccgagtaaacaaaaacaagaatatgtcaaatacctcatcttctttgtaccattccagtggctatgtgtatatagagaggcaagttaaatcgtttgtttgtaagcaagcattagatacctttgtcaaaggtaaattttgttccatttttcagattgctgcctgtaacaataaatttcttagaggagtgaaggcaaatgaaatacacaaatgttatctcttggagaatttgagaatgttggaagtttttggaagtaaaaatgtttgtagcaatcattactatttatcttttctggctttctcaaaaaaaaaaaaaaaatacatcaagtaaagaagtaaaaggtttacaacattttgtaagcacctaaaacaaaactaaaaacaccttttggttcaaattcccctttt

SEQ ID NO: 33890 - DNA, 1268 bp, Arabidopsis thaliana
tatctctatcttgtaaataacattatacagtaataagcattgatgcaaatacggtttcgggttcgagggactttgtgtgtacatgatgactacagagagacaagaccaaaagtgtggtctatagaaaagaagaaccatccacgggttcagccaactaaataggatcgaaccggagagtcagtgtattgatcttcaagttccaattccatacagtttcttgaatggacttgtcaaagacctgcaagcttataagatagtttcaatatccggtgaatgtggctgcgacagacactcgcattattagcaaaattcagtgttctaaatatcaccttaattagtgttgtttgggttttctgtcctggtgcaattagccaaaacactaaaagcagagacgaggccagccatgccaacaacctgtgtccagtttcttgtgctaatggcaacagctgctcccgccacagctcctcctaccaaagcattcacccaatcattcttgcctcgatatcgttgaagcccacaatgtgtcatagtaaacacaccacttacaagacctgaaacaaaaatgaattcttgatgcatataccaaaatctaaagaagcaatcactacttgaagaatttagatctaagttaaagaagagcagagcaactaatccaaaaaaaattacaactaaaagaaatctgcattatatattattacatggcaagcaaaacagagaattatgatctttcaaaacaaaaaaaaagtatatgcagcattcttcttctagtgacaaagaagagaattatcttaagtccaaaattacagatttatacccaaattccatagtcattgaagattaatttgggtggaaaaacaatagaggaagcaaattaccgcattgaaatccgaatctgccaatggatttcgccacaaaggaagcctgagaaacgccgcttaaacctggcgaagaaatcagcaacaaagcacagattaatgaattgaaaagtgtaaaaactctctaaatcaaagctaatttcaatacctattttacgagcgtcacgaggtccggcgcataacccatataatccaccggcctgagcttcaacaaaaatctcagacatctatctatacacacactaacacaaacatgaatttcaattggatactagtgattaccgtcgcgacacggagaactgactcgacggttagggaagagcacggcacggcggagagcaattcttcctccatctctgcaaaattgaattaggacaaaacccttttgttttg

SEQ ID NO: 33891 - DNA, 369 bp, Arabidopsis thaliana columbia
gaccatcaaatttgtttgtaaacactctagtgcttccgtagattaactggagccagatccaaggtgcttctcgcagctacaactggaggaggaactttcctactcgtgcacagtaacctacgaagactcatgattctcacgatgtggtttcgttttctttagattcttttgtgatgaagatgatacagaatgatagagttaggaacctctactatatatagtgccacatttcttttgtaattttatagtatgattcattctatttttttcttagttacattgtttaaaacttatttacaattatttacctgtaagaagaagattgttattttttaaatcaacgatgaagtagtattgatttgatatatt

SEQ ID NO: 33892 - DNA, 601 bp, Arabidopsis thaliana columbia
tccctaataagcattgagccactgcaaggtttctgacctctggctcgatgtgttactaatgaaattactaaagtactgaaattagaattctaactactttttctttcaactgcgcctttccggttgtcaccccgaaatagcaaagggctgctccatctttagacaaaatgtgttagactggtcatatgcacaaaaccacaaaagctctgtctatgccatgagcctcagacacaccggtgtggagagtcaagcagtacggcgttagtagtacctgtgaacttctggttcacccgtgatgttctccacgatctttgaatcagtcggggcgatgctcgcaatgtgggagtcacttctctctttagcgctaaggttctgttgccaagctcttcccctgtaccaccattaccaagtggctgagagttatctactttgttactatccggttgttgatttgactccttggtaccctcagctttaccttcacagccatcatcagataacggtgtcttatcttctttatcatcaatttcctgctcttttgtacactttgatcgcatgggaatcacaacttcacaggaagaaattgatgctatactgcaat

SEQ ID NO: 33893 - DNA, 549 bp, Arabidopsis thaliana columbia
tgctttcttctttctactgcaccctctacttattctcattgcatacacaaacccccactcactcgtttgtcttggtctaggttaactaacttcaattcttccttgtagctatactccctgtggattcgatccttaaatactactccgatatattgtgcactttcagtagtcgtgtggcctttcaggtaaaagcctaaggcgtaataaaacacgaatcacatacctaatatagagttgatcttgttttgtcggtttgaccacgagttagatcaacgtcgtggtgaaggatggtgagaatggatggcagggcagttgcggtgccagaccaaaagggtggtgtggacttatgttgttccttgatgggccggctttggtcgattacatgttggtatggtcgaccatggcaggtggggcgggacacgattgctagtctttgctttgtacatatcgggaccaatatgttggtgtcggatccgaaccgaatgtttggatccaccaaatattgcccataggcgaaaggtcacattaaggagtgttaacaaggattta

SEQ ID NO: 33894 - DNA, 293 bp, Arabidopsis thaliana columbia
atcatagaacttagagacatctgtcagatgtaacattacctcatattcggtaagcaccaactcctaaattcagcttaactgaggctaggatctttggttgtatgcaactgtcacctagtcattttgtagtgaaaaacaaatatcagaatcactgacatatccacactaatcatcataattcatctcagagcagaaaatatgatgaaaggttaatgaattacttaatcatacgaaccagattcagaagcataaacatcagatcttatcccaattcagaaaacatcatgtcatta

SEQ ID NO: 33895 - DNA, 540 bp, Arabidopsis thaliana columbia
gtgaacagggtacttaacactctaactgaagcacttaagtcatcgggtgttaacatgtcagagaccatgatatctgtgcagttaagccttcggaaaagagaagatcgcgagtattctgttgctgcgtttgcttctgaggtatgcctgtaacatttttacagtggaaaagaaaaagaagtctactactctgcaagtaaatccttataaaaacatttctatgtattttaatttgtattttgatgctatgtatctttttcattaggataatggtaatagcatcgctgatgaagaaggggactctcctactgaaactagaagcttctgcaatgatattgatcattcccagaagagaataagacgataagatctggttttctattttctatgttatgacaactgtttgataattttgttactttcggtgagtcaggatcagtaggtgtagatactacttttatcgtgctgcaactattttaaatgatatagtaaaaactaagtagaatgatgtaacaagtttcgcaaatctataacaagagtttg

SEQ ID NO: 33896 - DNA, 872 bp, Arabidopsis thaliana columbia
tcaccgctacggaaagccacgtggacgacgcggattcgtagagaaaatctggcatcgattcgcatctctcccacgctccgtctccggattcgatgtcgaacagctccacggcgaatctatcctcctcgaaatcgcacacacctccggctataatcaggctccgtccgactacagccacgattggatcgatcctccaaactctcggcggtgccacgtgttgccaagtcagatgaaacgcgtcggttgagaaagagaatctcgccggagataaagcgtagagcaacgtggagtgagaggatcgagcaacggagacgtgttcgacgggagatgatgcggtgttgagctcgatccaggcctcggacttgggatcataagccatcgccatcgtcgccatggtgtacggcggagaatttctctggttgtagacgaacaaccacggcatggttttaaggcggcggagggagtaaaagacggcgcggttccatgatttggagacttggcaagcggaatcgaggtctaggagtggtaaataggagaggattgactcgagtatgtctccgtcaatggaactttcttcttctccgaaatctcctccattgttgttgttcttcttcttctccattttttggataatgcacaaagtctaaaggagggaaagtctttatatatagagagagtgacacagcgaagttggtgatcgactcttattattgcacatggaattaatattattttattttcttgtaggttaatatgtgacattcatatacagtaattattattgttagtaacttgagattgggactaaattagatttggatgggtatcttaagcattcaagttaacagagttaactcaatatgtatggagta

SEQ ID NO: 33897 - DNA, 507 bp, Arabidopsis thaliana columbia
tcccatttaaaaaatgctaaaataatattatcactatgttttagtgcatcttattattgctatataaaagtcatggctcatctattaagaatatcatgtaaatataaaatttatgaaaaagaaaagttctattaagttaagtaaaccattgatcttattaccattaatttgtttcaaaaagaaaaaaaaaagagttaattggttgtacatgtacctttattgatttggtaaatcaaaaatcaattttattatataaagtatggttttgaaagttagtaaaaagagttatgtctatattacatgtattatttacattctttttggtttacacatatttaaatctaacacttaaattaaaactttatgtatatttaaaaaataatacatactgaaaacccaaaaaatacttttttaaaaatgttaaaattttgtatgtataaaatatttaatgaacctagaacaccgcttaaggacctcatattatggacgggatgttgtgccaattat

SEQ ID NO: 33898 - DNA, 628 bp, Arabidopsis thaliana
ggacaaagatgatgagccagttataagttttacaggtaagaagaatgcgtctaacaagggtaaaaaaggctttgcggtttcagcttttgatgcccttggtggtgataaggatgacgaggaagtggatggagatgaggaacaagtttcacctatcactttctctggtaagaaaacgaggtcctccaaatcttctaagaagaccactaataaagttgctttgcctgacgaggaagaagggacaatgggagacgaagagagcctcgaaatcacgttttccggtaaaaagaagggcagcattgttttggcctcactaggtgatgactcagttgccgacgaaactagtcaagctaaaactcctgatactaagagtgtggaggttatagaaactggaaagatcaagaaaaagaagaagaataagaataaggttgcaaggacattagaggaagaggatgatttggacaaacttcttgcagaacttggagaaacccctgctgctgaaagacctgcttcatcgacacccgaagtagagaaagttcaagctcagcctgggccagttgcacctgtagagaatgctggtgagaaggagggtgaaaaagagactgttgagactgctgcagcgaagaaaaag

SEQ ID NO: 33899 - DNA, 575 bp, Arabidopsis thaliana columbia
ggacaccgctgaaggacctcatattatggacgggatgttgtgtccgattagtttacacacatctaaaatttaacacttaaaaataaaaaataaaaatattatgtatacttaataagaaaataatattttattttaaaaatcaaaaaaagtatttttagtaaaaaaaaaaaaaaaaaaaaagtgttaaattcaaatgatgtgtaaacatgttgaacctatgacaccgctgaaggacctcatattatggacgggatgttgtgtccgattagtttacacatataacaaatttaacacttcaaaaaataaaaaataaaattattatttatacctaaaaaactgtttatctaatattttatttaaaataataagaaaaagactttaaagtttttctatctaaaatttccaaaaaaaagaagacctgaataaaaagttgtattatttatatataaaacatccgtgtataaaaccctatttgtaatgtgaatttgttattgggatgaggaaaattaaagatgaatgggctgagaattgcctgttttgatgggctagaattgatgttgttgggctttgaaaaa

SEQ ID NO: 33900 - DNA, 566 bp, Arabidopsis thaliana
gtgttcttcttcgaagacttagatgacttctttttcttaccagagaaggtgataggagactcttcttcctcatcttcgtgcacttcctctgtatcatcatcatcactaccaagtgcatcaaaagctgaagcggcaaatgaattaccgccttttttacccttcttagacgcatgcttcttacccgtaaaacttataactggctcatcatctttgtcaccatcagattcattatcctccttctcatcttcatcatcaagcaaggcaaagctaacagaaccaccgcccttcttacctttcgacttcttcttcccaacaaaagctatctcaggaacatcgtctttcacccccgcagccgaaaccttatcagaaaaatcatcatcatcatcctgctgcgtacccttcttattacctttcttacccttcttcttcccagtgataacaacaaccttctcttcctcaactttagactcctcagacaactcagtacctattgagtactcatcgtcatcaatttgagcacctttcttcttagatttagtagcaccaacgagagatgacgcaggagg

SEQ ID NO: 33901 - DNA, 549 bp, Arabidopsis thaliana columbia
tgaaaaatacaacttaatatattttaaaatataaaaaatgttaaaatttaaagatgtgtataacatattgaacctagaacaccgcttaaggaccttatattatggacgggatgttgtattcatttagtttacacatatttaaaatttaacacttaaaaaccaaaaaacatactatgtatatataaaaattattttatctaacatattaacccccccccccaaaaatattaaagtttaaatagtggtagaaaaaatacaaatttaaaatttttttaaaataaaaaattgttaaacatttatatatatgtaaacatattaaacctagaacaccgcttaaggatctcatattatggacgggatgttgtgtccaattagtttacacatactaaaatttaacatttaaaacacaaatattatgtatattttacaaataaaacacttgatctaaaatattacttcaaaaataaaaaacaaacttaaagtttaaacaaaaacttgaataaaaattgcaaaagattttttaaaaattaatgagaaaaaacccttttt

SEQ ID NO: 33902 - DNA, 586 bp, Arabidopsis thaliana columbia
tgaccaatttttgactgtgaaccaataaagcaaaaaaaaatagaaaatgttaacattttttgggtggacttgaaccggtttggaacgtcatgattcatatcctctataacgttttactgaggtcatgttttttgagtttgatgaccagtttttgactgaaccaattagcaaaaataggagaaggtacagttttttagaccttttttgaatccagtaaattcgaaatttaataaatggatttctcttattttgaatttaacttttaaaatttggaaagcataaaaaattactccctccatttcacaatataagttgttttggactaacttttttgtttcacaatataaattgttttcaagtttctatgcaaattatatattattttaatattttatgattatttctattatgcagtctcttttataattggttgaagtttttaaaagtaaatattcttaatttgtgtgcttttagctaaaacaacttatattgtgaaaacggagggagtatgtaactggaaccaagagaatccatggaagtgagagctttctttgctgaactgtcttacccaaataccccattattg

SEQ ID NO: 33903 - DNA, 498 bp, Arabidopsis thaliana columbia
gtcgacgaggttgagagcttcgctgcaatcaacgccgttagcttgcatccatctcttgaatgctcttaatctcctactaacaatgcgagagacgagaaattaaacaaggtaaaattaaaggttctattcattgactatagagcgagagagaaccttgtggccatgagtgaaggtctccgatgaaatcgccggagggaaacaaaacaacgtccggtgagagagacaacgacggcgataaatgaataaagggtttatgatgttcagtaacatacgaagagtattgacgaaaatacccttccatctgaaaattaaataaacctgaagtaatttggataacagcttctaattgccacactttaattacggggaaattatttatatgttttgtatcttcccttttaaacattatcaaactagtaatctatgcatcacatacaaatactccatttcatttttgtaatgagtttagcgataatatgcatacaaatttaagagtgt

SEQ ID NO: 33904 - DNA, 627 bp, Arabidopsis thaliana columbia
aaatagtgtgttaatgtaataatatgatatataaaaaagaaaaaggaaaagagagtgtgtgagtaaaagattggtcgtcagctggatttatgatatttcggcggcatatcccgtccccaccgcaccaccaaccggaaggaccatggcatggatacacatttgtctcactttatatcataaataaaaaaatattatatgttatccagatttcgtatccaaaattttctaacaaaatctccattttataattctactgacctttttaaaaggcactgttgtgacttcatttcaagagatacgtaccaaatctttattatcaaatatatcgtgacgatagacatgtacacacatataattgtagtacgcattactacggaaagaatattccaagagcttaccaattccatgccgcatacattggcgtttacctaagttagacttaggattcctaacgttccgaatttgcgttggagagcaagttcctgatctgcttacggaaaaatatattcaaactcaaattgcgaatcgcgagaccatttcaatttttgggtttttgtcgaagggatgatgagcaaattaaagctagtccacctttttaataaaattgcttgtgaagaagaacaatta

SEQ ID NO: 33905 - DNA, 552 bp, Arabidopsis thaliana columbia
ttaaatggacaggaagccatttaggaggagacactagaaccacattcacgtatgactcatcggattttgaggcttctctactttaattagcattcaacgggaatgacattcacgtattatttaacgggaatgacatttgctttattttcattttttgtttgcgttggagtatgcaattgccggaagacactcttcgtcgccgtgaagacacttctgtctgattaaatatgtactgttataggcaacattttatctatcccaaaaaccccatcctagtttttctaaattcatataaaaattcgtttttagactcttataattagccactattataagaagtactccataaaaagggggaacaagtttgtttaaaatcctcaaattttatttttaaaatggatgagagaatataatatacttcttccgtttcataatataagttattttggaccaaattttttgtttcacaatataagttgttttcaaatttctattatatattattttaatgttttataattatcgctattatgcagtgtcttttatgattgg

SEQ ID NO: 33906 - DNA, 507 bp, Arabidopsis thaliana columbia
acttattttacaaaattataagtaatacattcatattgaaataaatgagcatttcaaaaattaataatcatttgtatataatttaattttaaattttctattattttgtaaaattcatatttcaaaaaataagaaatgtattttgattttaataatctaaattactttaacttcaaatgttctttttgcattttaaactcattttataaaaaccacaagaaatacatttatatttgtgttactctaaatttcaaaagaataattatatgttattagccataagtttttataaagttatatcacttttcagctattttcaaatcagtattgtacattagaggaaatttgtaaaatctcaccaaaattttaaatatttttaaaactctacttttttatatttgtgtacgcccgtgaaccggaaaatcggttagggtttgtttttaaatcatccggtttaattggttgggttaattggaaaccgtagagtgtgcctataaaagaagaaaa

SEQ ID NO: 33907 - DNA, 610 bp, Arabidopsis thaliana columbia
aaatattcttaatcttcgtacttttaggtaaaacaacttatattgtgaaacggagggagtatatcatttacaatttctctttatttagttttgtggtgattccgaatattaattacaacttgtaccatttaattcaaccatattcgaagaaaacattaaaggcaaaacaaattaaggggaaaaagaaatcaaaagttaaaaaagaaaattaagaccaatgagaatagataaggggtaaaagacaaaaagagaatataaaaaaaacaaatagcatttggcgccaaaagtaaaactaaaatggtcatgtcacgtgatgttaatttttgctctacgaccaaagcaaaacaaacctaaagttttccaaatctctgggtcccactctcagatgtgctgacttttattttttttagttttgtcttaaatctttggaaattttcagttttaatttaatttaattcatctctctttctcactctataaaccccacagatccgcacacttcacctagagaccccccacagctttctcgataactgacaatccaacggttgagattcagtcttctagataaatcacataccaaaggacacgggcgcgagagatgaagaag

SEQ ID NO: 33908 - DNA, 585 bp, Arabidopsis thaliana columbia
tcactcattcttctatctgttaacctattatcgattattgagaatgttaataatcatctaatttttttttatcataagcatagtaattatgtagagttttcatgaaggaaaggagtggaatcgctcaaactcattttttgtcttattatttcggagaatcctttcattaaaactgacttcgatcgaagatcaaatcatttggtttgagtataagtttagatgttcctggaaaatcatattactctgaataatccaaaatattagtatgttatctcagtggcattaccgttaaaatatgaaactataagggtattctgggaagttggtgattacatttttttcttttcctggcaacttcgagagcttttaagcgcagaagaaactcgttaaaaatcttggcgagaaaagttgagaactggaatcgaagaagcgatagggttttggttacttggagtgtgagtattttagttacaccgcttgcaatttcaaattggtttcttttttccggtgacatttagtaagacaatggaagaaataagatcggcgatggagaagcaagtggatctcgtagcggatctggttgag

SEQ ID NO: 33909 - DNA, 465 bp, Arabidopsis thaliana columbia
ctgttttatcactaattattgtgttgttttatttgatataatcaatcaataggttaaaagaacaagaataaattaaaaaattcgtcaaaaacatcaaaacgagaactaatttgaaacacaatttaacttctaaacgacaactaatttgaaacggaaggagtatacgttacatttagacaaaaaacatgtaattcatgacatgcctacacacattgacgtagacaattaaaggttaggtgtgtccttgtatatgtgtatacatgtacatacatatgtatgggcacattggagttggccgcaatggagaataaggaccagatgcgactatcatacacctaactcttaagacaaaaagcattatttgtgtacataaatggtagacccatgacacctgtagagctcaaaagtcacaagtaaaagagagaaaagaaagacgagaagaggtaattacatgtgggtttagag

SEQ ID NO: 33910 - DNA, 554 bp, Arabidopsis thaliana columbia
tgtcaccacagttttagagcaaagttacattgagtatgatgagcaaagcattgcaaacacttacattttcactagcctcgtgcaatttccaatctcaggtggtagagaaccggagaaattattcatatcaatcgctctgagctcaaaaataagggaaaagacattagaatctatctgcgaaaaataaccagacagttgaaaatgtctcgaagtccttacaatgatcttaaatcagtaagcagtccaatttctttgggaactggtccggacaatgcattgggccccaaaagtcctaagaaataaaaatttgctcacaaagtcacataagatataagcttgtctggggataagaagattaaaggggttcaatgccatacatccactgcattcgagtgagatttcaatgccaggagacagaggaccagtcaagaaattctgatttaggttctgcaaaaaaaaagaaggaaaatcgagtgagtgagtgagtgtgtccaagtgcaaatccttggttaagtgaagaatcatacagattagagatgtaacaagagccagag

SEQ ID NO: 33911 - DNA, 1296 bp, Arabidopsis thaliana columbia
caaactcatccttaaagacggagctaatgagaagatttctcatgatgattggatatgagtttctacttgtggacctaataagagtcaagtttcgtaagtctactacatcttctccactattgagcaaagttttatctctggatatcaaattaggtgtgggaaatcatctcttgtgcatctcattgtcaaaggctcctctattgttcgcccatctcaaactattggatgtacagttggtgtcaaggtaacttaagctgttctataaaaaaaattctcgatatggttaaagagagcatgggataagtttccctacttagtttctggaactctctttggtgcagcacttaacttacgcaagtcctgctagttcttcaagtatcattaaaggtgactcagagagagatttcttcgtcgaactttgggatgtttcaggtcatgaacgatacaaagattgccgctcactgttctattcacaaatcaatggtctgtctcaacaaatgtcatctctgtccctgttttgtcactgatgcgactgtttgattatgcaggagttatttttgttcatgatctttcgcaaaggactacaaaaactaatttgcagaaatgggcgggtgaagtttcagtaactggggagttttcagctcccctttcttctggtgggcctggtggtcttccgtcccatacatcgttattggaaacaaagctgatattgctgccaaaggaggaacaaaaggaagcagtggaaatcttgttgatgcagctcgtcattgggttgagaagcaaggtttgcttccttcttcaagtgaggatctccctctctttgaaagctttcctggtaatggcggtctcatagcggtaagtaaaccatattagtaagtattagcttctgtattagtatttagtgggtgcttttgattatatgatctaatgtgggtttttacataggctgccaaagaaaccagatacgataaggaagctttgaacaaatttttccggatggttagtgtcattaccacacctttcttttcttgtcagatttctaagacacccttccctaaccgagaagaacattttcggaacttttacagttgataagaagaagatatttctcagatgaactgccagcagcttcaccatggtctatttcgccggttccaacgtcatcatcgcaacggttagacgagattacaagtgatgatgatcaattttacaagcgaacaaggtaacaacaatgctaaaaagccaagtctttttccttctttgttgggtttggtctttacggttgattgttgcagt

SEQ ID NO: 33912 - DNA, 982 bp, Arabidopsis thaliana columbia
tttcaaccagtgtcaaaatgaaaaagatcttggtggagatttagagcatccagcccgagcaaaagatacctcttgtactacaggacaatcatcagctccgtctggagatgctaccggtgatgccaaagaaaccaataaggctactccagaggtagctacagctacaccacttggattggggcttggcggtttagaccgtaaggtaatgaatcagttgaaaaataagcgtcaagttgctgctgcttgtttttcattgcatagcatatccacaagtgtcatagttccaaatgcttacagtcatagtatgttttttttggttaaagaaacgaagcaagcagccgaaggtatcaggtaagactgaagatagcgggacttcagctacacttgaaggtgtgcaacaaagcagtgggaccagtggtcagcagcttttgcaatctctcttttctggtagttctcgttcagatgagactggtcttagacgcgggcaaggttcagatgatcgtgtagatgtctcaagtgcaatgtctcaggtcctggagagccctgtattggatggattgctagcaggggtatctcgacaagctggtgttgattcaccaaatatgctgagaaatatgctccagcagtttacccagaatccacagatcatgaacacagtccaacagattgcgcaacaggtggatgggcaagagatagaaaatatgatgtcaggtggagctcaaggcgagggcggcggctttgatttctctagaatggtccaacaaatgatgcctctagtctcacgtgcttttagccaaggagggccattgcctcatcccgcaacaatacagcctgatgatcgtcaaccttctcaggtacatctacgagtgttaggtttggatttcttgcgtttttgatttaggaaaaaaatgtggctgaagaaaaactgatactattatcgactgagtaggattttgttgttgtctttttttagttgtagaaa

SEQ ID NO: 33913 - DNA, 565 bp, Arabidopsis thaliana columbia
cgcattctgtgtttgagcccctgcaaaagctattaactgtgacgtttaaccaagcttaagtagaagcatttaggaaagaagaggagagattaacggccaatactgatttgtgaatgattgagaaaaatacattacatctgtgaatcacaatggagatagatggacttacaaaaatattttcaccagaacaattgcatagcttatgtttcttgaataggcctccatattccaataaaactaagacctgtttgttctcgattctatatgtatgtgatgaactcgtttatccatcatggtacttctgaaaccttgctttcgtgttacaggttatgtgtttcgtctgcaaagaagagtgctcaaagacagaacaagagaacatttccgaggtatgagcgttggtagttaaccaagattctgtgtatccaaataaacgaaaagatgattaaaaaaacttgagatttatttgaatattaatgatttatttgatcaaaactgaacgcgaatctgtacaaactgaaaacccaaaccgaatttaaattgaaacactcctagatatctgtagaat

SEQ ID NO: 33914 - DNA, 606 bp, Arabidopsis thaliana columbia
ttttcacattcttcccacttaaaatacaatcctagctacattacaatgaacactcacaatccaaacatacaactaaactggagttgttgttagaagtttgatgtgcaagtcatgttgacagatgaagcaaaaagcagagtaacagaacaaaaccaacgacacttttttgaggtttaaggggtcaagatttcgattccgtacggctaaaagattaattgacaaaccaaaccgaagttgggccgtggaataatagaaaaaaagttaggcccaaatgacatatataaatatatatatatagctagggtttaggaggcaaaggacaaaagaatcatggggaagaatcatcatcccttgggccggaggggcgggtggggcgggtggggcgggtgtttcgggcctatgacaacatcgaaacgtaatgtttacgctggaagaaaattcagtacgtgtgcgagactttataatttgaagggatcggatcactctgatcaatttcatattcaggttattcacttaatctttgcaattgagaaatatttctgtcatctaggcttttatttattgaattcattgatttgattattcttaattacaacttgtgttatt

SEQ ID NO: 33915 - DNA, 1082 bp, Arabidopsis thaliana columbia
ttcaattatatatggctatcaatgttgtgatatatgcacatgtaattttgaaatctcaataattaatctgaggttttgaacccaggcataccaaggaactcgttcctgtgagggttcttgagaccttgccagcagatgtattgagaagaacaggtggactacctagtgaggtaagtttttttttctaggctaaacttttttttctggggcaaccctttactttctcgagttactctattcattttttcaagaatgtaaaaactgggattattggaagagttgcatacaagtctctgaccaatgaaaatttgcagaattggggaagcgaccatctcgctatcgcatgtgaactcggctttgtcaatgactggcaatgagccaaaatgttagcaccaaccactaaaccgagccacctgacttggccatcccttgaggtttttgaatgctcatcgaggcttctgaattggagttcggaaacagattcagtaaattgtaaaacataaacaagttttgggctcattcccatacatagatttgcttacttgaaacatttttttttaccttacctacccaagacttgcacctactctttctgcttttaaaaagttaataccaaaatagcatgttactggacgtgtacctatgaggagcgaagacccattttgctactagaagcaaaacaatgtaagagacgttgcgtaaaaagtatctcaatctgttcactccaaaataagctcttctcaagtgtcatctgacgctgcattaatcaaaataccacacggtattatcaaaagtgtcgtaagcattctttccaagtgttgggaatacattgggtacacaaatcggccatttacagttaacacacatctatttaaatcactcttttctctttgctccaccaaaacattccggcataaacaaaaaaaagtcccactagaaaagctcattatgaaagtgaacgaggaaaacaacaagccgacaaagacccatgtcttaatcttcccatttccggcgcaaggtcacatgattccctcctcgacttcaccaccgccttgctctccgcggcgggcgatctaaaaata

SEQ ID NO: 33916 - DNA, 908 bp, Arabidopsis thaliana columbia
tttgatgatatactcatttcttaccttcattatgttggatctttgtatgcaggcctacccagcatttgtagagttcatcgtggaagatatacagtatagtctagggataatgaacggctaaaaatttaagaatatagcagttacttcactgcatccgctcggatgcctcccacgtgtcaccgttgcatcatcatttcggagttgcaacgagtcatatagcgatttggtgagactccacaacgagtcgttgaagaaagccgtggccaagcttaacaaagaggacaagtttaggactaagggggaccgttttgtcatcgttgatcttcacaaagccttcatgaccatcttagagaaaaaaggtaattaacataagttacacgtttgatctttatgtaaaaaaactttagtctaaaagttttattttggtgttatcggtctgtggaaatacagggaacaaaaggtttaaaagcccgttgaagccgtgctgcgaaggcgattgtgcacgtatggatatgaagggtgcaaagaagtatacattatgtaatgatccaaagtctgctttcttctgggatgaaattaatccaactcaagaaggatggagatcgatttactcgctattaggcaaatctctaaccgagtctttgaccaaagggtaaaaatactttttggcatctaaaaactcgaactgtgttggatatttttttacgatgaaatcgaagggaatagagttaaaagaagcataaatttaaagatctgtttactgtttatgttcatttgctttatatttctctaaccgttgggatttgataacattatagaggaaatctaaccgttggggatttgatattatagaggaaatctaaattaaattcgattttcatttaccaataataataagatcaatctaa

SEQ ID NO: 33917 - DNA, 551 bp, Arabidopsis thaliana columbia
ttatttttgcaaacatattaaaatactaaaatagtataaaactcatcttttctaccatctatcttccaccgtcccctttatctctctcaaaaggcaaaaaacacacaaaaagatcgaattcaccatcctcggtaagtttcctctctccatttcttaaagtatttcgtatttgtactcttacttctctttttctccattgatgacgtatatcttctactgttacatttattcctctgtttcttcattgcctagaaaaatgtcagatttcgaaaaccctaataaacgaatctgaccaattttgttatgttttaactcttacattggttcctagacttcgattttgttaaaaagacataaacccatttacaaagttgtgttctttcgaggattgattcagaatttggaatgttactagaacagagatggttgattagattgtacatatatataaaggaatgatctttatgaccacaaatgtgtgtttttgtttgttctttacagtgtagtttgattatgatggaagaagatggattgaataatcgaaattgggg

SEQ ID NO: 33918 - DNA, 598 bp, Arabidopsis thaliana columbia
  unsure (1)..(598): unsure at all n locations
tcccgaaccaattcacaatgtcgaacacaaaacacaccaaggcttaaaaataagcagagatctcaagtgcttacaccaaggaacacctagggcaccaaaatccgattcgaggccatcaagaccgaaaaacccgatccgagcagcgggatcgaagcgggagatgcaaacaaagctgtgagaatggaaagcaacggagatgaggaagagaaggacgaggaagaggagagcgagaatgagacaaggccaccactgatgaccgatccgagaaaggaaattggaagcaaggaggtagatgtgtgggcgtttggttttagattcgtcggttccggattcgccggaagcagagagatcggcgtcggagtgaggacggcgagaggaaagagcccgatctagcatcgtcgttggagttttcggtgactgagagtgccagagtgattgcccattgttcattcctctctccattaatatcctttcttaatctctttttcgagtttaatcaattctttgtaatctataaagtgtttcccctcacttgaatgcaaaatagaaaacaaaaccggctagccaaaccggttagatgaaattggttnacttattg

SEQ ID NO: 33919 - DNA, 527 bp, Arabidopsis thaliana columbia
ataaaattttatctcgtgaaatgtttattgtataaggatgtgattagttgcaaaccaaaaattaatgtttaatagtatttgatagggaacttatttcaactgtgtaaaattttcccggtaaaattttcgttcaatcagtcgattctaagaacatgaatcttattgaatctctaataatttattgtataatatggtggcacctatacgtcaatacgataatgacgtcgttaatagtaacgttgagagttgagacttttgtataattttgattcgacgtgccaaatactacgttcgaccaagtatcaattttgattttccaaaaagagaaaacaagaaacttaggatctccgttagtttgactggatacactgatactgtttcgatatttagacaaacaaatggaatctttgcttcttaaacattcgatgcgtgtgtgtacctggtcaacttcttcagacgtcatgatcaaacatggccgcacgatcagttttattttgctactggagaattaacttatccacctcaga

SEQ ID NO: 33920 - DNA, 547 bp, Arabidopsis thaliana columbia
cccactgttttccctgtgtttaatccacttttctctgactgtttgaagacccgagaaggaggaggaggaggtggaggagatgggggacgtaaccgccgtggtggtggttggtttctatgggattctctgttattagaatgcggaggagaagcttgagcacgcggaggaggagggggttttgaaatcggtggcggaggtggagaaggagtaggtggaggaggaggcggcggaggtgatggtaatggtggtggcggaggactcataacgttaatagtggattttgacggaggaggaggcgtgttgaactgaggcggagtcagaggaggaggttgcgtattaccagattcagggggaaatgggggagattgcataaactgctgctgcggcggcggtgataaattctgaagcggagacggcggaggaggtggtgattgtaattgaggttggggtagaacttgttgttgtgattggacaagaaggaagccatgaaaggtgagaatcatgccgagacataataaaacaaaacccattaatcaccagagattga

SEQ ID NO: 33921 - DNA, 580 bp, Arabidopsis thaliana columbia
cggaggttccaacaaccctctctgacaaaggaggaagttcaaaaaatacgatacatcgtgttgttacacaagaaatgccagaagaacttaagaaggcgttaccaaaggctttgaaaaaggtgtttcaaactcacaaagtttgccggtgagattcttgggaactatacttgcaattatctgaacttccgagttttcagatttatttttttgataacatgtgagtttgtttacgaaaaaggaaggagagttaattcataaaccattttgtgtgcagctatgagacgatctgccaaggacttagggatcttgcagtttcgacatcgaataatccaaaagctgattcaggaatggcggtgaatgtggcgctacggtaggatgcttaccagggcgagctcgaagacgttataaatggagtggctactaacattcacgggtcttatgtctccatatcgtctccagaccatcctgaatatgattctttgaggttattttttgttggaacatgatcacattggttctttatttcggttgaactctaatttctctgatttttttctttgtttttatcatcagggaagtg

SEQ ID NO: 33922 - DNA, 580 bp, Arabidopsis thaliana columbia
gattggagatgttcattgatttcaacacgagaaaggtcctccctcacatctccattgttgtgactctttactcggttaaacaacatcccaatgacgttgttgatacactgatagcccgtcaccattggaatgggagatgttgcggtatgactggttggcttcataatgagaaaggcttccctagtagaacaattcaagtcagtaaggtatgtgtaggttagagtaaaatcttttcgagagtgtgattgttggaaatgagatttgcggtaacatctgatagacttttggttcagttttgattcggctgtgtcatcatcagaagatgggtttagcattaagttgtatattagagaggatatagagagaataggggagagatcttataaattacccactaatacattacaattgtatctactttgtttccccttttctgggtcaaagttattcttggaatccatacaaaatcttgatcgtctcttgtgtacagataactttgtcttcatcctttttctcttagtaccatttttggaaagagagatgtttcactccaagctctggaaacatacaggattgagta

SEQ ID NO: 33923 - DNA, 548 bp, Arabidopsis thaliana columbia
ggaatggtgaaaccttctaattcatgcatagtaactctaataacaagttcatacaaataagataaatcaagaatcagaaaacttatatgacagggtcccaagatcacattgtccacggggtatcgcaaaaagaaaaagaaataccatggtattaccaactaaattaggaaaagaacaatcagtacagactaaaatttctgaatctcaattaatgcaatcataccttttcgaactcttcaagttttggcacaattttcttgatagcttcctcagaaacctcgagacaagcttcctcactgtcactcccatctgctttcgcttcagaatcctcttcgctctgagcactagaatcttcctcagcatcagactctgtcgtggattcatctgcttccgcttctgcgttctcaccatcagattcagattcttcattgtagtcatcagcaaaatcctgatccagaattaaaaaatattacataaacaccaaaaagaacgaaagaaaaatggtggcatgttataggcaaattactcataagaatctcacatatggg

SEQ ID NO: 33924 - DNA, 529 bp, Arabidopsis thaliana columbia
ctacctcaggacgttcttccttgtcgagatcagaagctctcgagtcaagcatcatagcttcaacagtcagatcagcggaatgctctatccagtaattcttctgaatatcacgctcttcttctactcaccccaaaaataacaaaaaacaaatcaaatcaatttcacagtctcttctctttccataaatctccaatttctattaatataagcaatcaacgataatcgaagcatatgatcggtgatctcaccgtacgatgcagccatttcggaaatgtcgtttgtcgggaaaaaacgaagaagaagatctgccaagagaggggagagagtaattcagtggccttcgacggcgagtctggatctagagaagcttcgtgatctgcggttgacggatcgtcctctctgctgcatcaattcgcacaacgtcgaatcggggaaatgtaattcagataaggtttcagatctgagagcgaaaagagtgtgagagtgtgatgttgctgcgcgcccttttttataggtggaaacggtggcg

SEQ ID NO: 33925 - DNA, 464 bp, Arabidopsis thaliana columbia
cagtctcaaaaatattctcgatacgaaaccgatatgtctatgcgaagggttgaagaaggcacctttaggaatcaaactcaacgttactaaatctgctactcttcccgttgcttgtaaacttaatgctcctccggtgtcagcttgtgattcatgttagatttctcctttatctctctgtttctcgtttttcttcttgatttttttatggattatttatgatccttaagataaatcagattatggattcataatagagtttttgttttgttttggttgcagtgcctcctgctagtcctcctactgctaatgggcaaggtatttgtctttctttttgttgatttcattctttaatctgctttttatcatgccatctaaattgttattttttgttaagggaaatggaatttgtttggactctttgcttgaatcgagttttggttggcgttataacgagttggggaatt

SEQ ID NO: 33926 - DNA, 588 bp, Arabidopsis thaliana columbia
tggtaaattcagaatattattgggatgttgtgactgaaattgaggatgcgggctcctagtgcttcccgtctcttatgctttttgggttatcctacaaaaactttgatgtaagctataagtgttaacaggttcatactaatgctattaggtccattggtattgccttctgtacaacttgatggggcacgttccgtttaagattatcattgtaatagaaggtaacatgtttttggttagccttcaggttggtcccgtgctaaattttaaatgaaaaaagatctaaagttttaattattagtttattgttcatcccttgttgactttgcatagttccctgcagggacttctcgtgcttcatgtgtgtacgcctattggagaaagtttatctgttttgaattgttatattattaacatattgcttataccagaagatggccactgatatgttgtctctggcctattcgaaagatgttgcgacatcttgtaaaatatggatgagaaagtttctagtatcaaattaaacaagcttacttatttgttattatgcagacgccataaagataagaaggaggataaggtagagcctga

SEQ ID NO: 33927 - DNA, 685 bp, Arabidopsis thaliana columbia
cgaaatcaatgttattatgacttactagatttattgaggagtcttggaaatagtgtgtgaaggaaggtggagcagtctccaaaacgtcattagaaaacgaagagtcgtttactcatgagtctaatgtccaagtgttcatagttagttcacaccatatatttattatgacattttatttatatttccaagatatcgaggagtcttggaaatatgtatgtgtgtatgtagtgtctgaaatttacgagagttctaattagggtttccaattagtaaagttaggatgttctacggattaagccaattaatgaatggtgtgaaacaattttttttttggggtcaaaaattatattgcagcatttatgtttgaaaacacataatggcttggcaaatatctttggcatgtggaacccaactcgccaacaccaaatttatctagttttgtggagaaaaaagtgatagagattgcttggtaaagaaataaacagacaaagaaaattgataaccgagttcacagcctcaacccctacatctcgggggagatctcttgctcccaagtttcactacatcaaagggattacaaacacaccactaacttgtgatgttgtcttttggtttttacagatttgcactcaagaaaaacaaagattcaaaaacaacaaagaggaagaagaaagcttgctttgga

SEQ ID NO: 33928 - DNA, 886 bp, Arabidopsis thaliana columbia
tccacccagaaaaaccctaattctcctgacaaaatgagctctttctcagttaaaaagtccccaaattcttccttcctcttcccaaaaatcacacctttacttatacgacatcgtctcactctcccattactagttcctcctcacaaaccaccaagattccgcatcgttgcttctctctccggtacttcatgggtctctcaagcttctcaagacaaatatggtggttgggctcttgctgaagatgaaactccttctcctcattcgataactaaaaaaagttagtaccttcgaagaatgttagtgggaaattgaagaaatttcataactttgtgttgcaattgatttgattatttgttttttgtgagtttagagtggaggaatgttgtaatcactggtgttggatcgtcacttgctgttgtattagctactattgcttacttctcaatctccagaaaaggtccaacaacaattcttaactcgtttggtctgtttctgaattttgtaggatggtttaatctgagattctgtggtttgttgtttctttgacaggttttaggtttagctttagtaatctattgcaatatcaaaatgtggaattggatcagaatgataatgaagagagtgaaactctgttcaatgatgagaacaattctccttctgaggctaactctgaaagcgttgactatgtttcagataatgttgactcaagtaagttctcatcttggttaatttgtgagtttgaaagaatctgtaaactgttgttaccatttgctctaacaagtctttactttagcatcaaccggaaaaactcaccgtgtcgctattccggttgctgtggatgctgctcaacaggaagcaatagcagttttaaagaactaaaggtttg

SEQ ID NO: 33929 - DNA, 670 bp, Arabidopsis thaliana columbia
cctagaatgtctccaaagtttcttaaaagaagaaaagatctgaactttttcaaacaacaacaaacgggtagttctgtaataacttgtctataaaagggctaaactaaacatgaaaggattatcacatcttactgttctagcaacaacatccaaagctataaacttgtaacaaagcaaattcaatagaaagagtctaagaacagtgagtaaatatcaaaggaggagtgagtcataattgaagttacatggatttagatttccaagtttgtcctggagagagagacttccagaagcaaggcttgctcacatttgcttggatcttctcaatagcattcttaggcaacatttttcttttcaaagctggatcagttctgcaaaattagggtttgtatgatgacctacttgcatttgttcataaaattagagccaaaaaattggaaaagtaaaaaaagaacaaacactttgtacgtacaaggaggaacaaaatatctctggtcggaaaaaatgaagaaaagtggcgaagaagcaagtaataacgtaaaagtaacgtccctaacgacaaaccttaggtagtacgccggagcgtgaacttcacgcgtcgtcgcagttgaagaaacgtcctctcgctgcggctgctcacataatttaaagtgactgagagagagagaga

SEQ ID NO: 33930 - DNA, 562 bp, Arabidopsis thaliana columbia
ctgttatatataaataaagagacagataagtgatttagataagtcaagtcaactggattaccaattaacagataaaatttagtatttaatttatacaagcagactctatgatttatgtttgattcaacggttacgatgatgattaaatagcgtttacaataagttattgatgtaaccatcacagtgcatctatttataattaataagattcatattttcttttatttgcgatttaagccacctgttataaattcatttgttatcagtgaaacttctttacattaaaggctacatatgcactattaatattacaattattcgttacattctagagtccatgtaaatcatttagacgattacattcaaagtggtcttgcttttttttttaaacacctttagtttgatgtttatttatcaaacagatcggtgaacaagaaagactctgcaatcatatttatcctgtggctgaacggtcttgctttttaatttcctttaaaaaaacaggaatcaaatctataagcactatcaattatttcaattataagatattcatccaaaagag

SEQ ID NO: 33931 - DNA, 984 bp, Arabidopsis thaliana columbia
aaaccaatagaataaaaaacaaagaacaattttaagaattgtagaaatcgagagagagacaaatgagagagattaacaacagtccaatcgaattgggctttttgtttctttctttaatgttcgtttgattgattttttagtgggctggcccctaagttattttaaattagggtcatttcatttcattgaattgaatggttgcacacgccacacacaatgtttggcacttacagacttacagtcacatctgtacctaggaaaacggcaaattcatacactaattatgctacatggttagtccggacaccagctatattgttgtgtacaatttacagtttataaacatatatccaataatcctaaattcacgcacaactaataattttggctaagactttgattgtagtggaatggtgttagtcaaactgttgtttgttactttttttttttaatgtaaaatgttaccttacctaccactaaaatatttgattacacaatcgaattagattgaaccatgcatgacccaaacgcatatatggttccgctgtcgagacgatcttaaatcattggatttcgcttgtttaaaaatttaaaagaatttttttaatatacttgtaattaatattatgtatttctatattacactctaccaataaattattttaataactgtacttagtaaaaaggtaagctgtaattaagtaattcttatgatgtaagggagataatactaatctaaactcacaaatgagctagaacaatttcattttttttttttggtcagtttttccctaaagatgtaaatatttactcaaactggtaaaaaaaaacatagctagtgaaaatcgcaaactgaaagtaagaaatgtacaattaaatcaaacaaaacaaaaacaatgttcaaaagaaaaagtccttccagcctaaaaagtcttcaaagttcaacaacccaagaaccactaaagttagcaatgaccactttga

SEQ ID NO: 33932 - DNA, 640 bp, Arabidopsis thaliana columbia
tcaggtcatgtattcactatcacaaaggaagcagacatacataatcactaataaaacacttgtgaattacaatgcaatgaaatctttagaaaaatacaataaaacaacaaatgtaaattgcagttaatgataatagttgtgctgattttatgttaaccttcaaatggttatggattgagaagctagcacactcgcatgatacatcaaacattgtattcactttcatagagaaaacacaaggagatttcagcttagtatgtgagattcttatgatgaaacaaagaagtacgacgccctaacgatttaaacagtgctctacattaaaactaacactagctatagaaagtaaaggaacaaacctcatctctctgaggtttgataagcccaaaactctgtgaattatgtattaaactcattactcatcatcctcatcttctacaacttcaatctccaaattagagccataaacttagaaaaaaacaaacgaacaaaaattagaaaagaagacacatatcataaagaaggcttaaatcacacatctcaaatctaagcaaaatatgtaagtacacacacatgaaattagtacttgcgacatttcacagggctaagaactagtcgcaagcaataaaaacagcataat

SEQ ID NO: 33933 - DNA, 557 bp, Arabidopsis thaliana columbia
tagatagataccttaccaatggagtttatgattttgcttctttcttgtaactttccggttttaggcaaattgtgtgttatgaatcggccaaggtggttggtgaagtagttgactatgatgacacgtggggctcagacacagctttaggtttcacagctgggaaatgggcccgattgattatttattgtttgtttcgtaagaaaaccaaaaaaagggtttttaaagttggacgaggttcccaactttttcaccactggctcctctgtgattgattccattcccgtctaaaatatctcagatctcagatttcagatctctcagttcaactttctcattcatcacagatcatagtgtacgaagatggcggctatggcggcgaagcttcatatatcgacgaaatcggatcagagcaatgtgcgattgcctagactgatcaacctgtcgcgtgatccaaccgctagagtcttgtttccacgaaacggatcagtttcttcgctccacaccaacttctcttctccaaatataatggttccatgcgccggaggtggtggtggtgg

SEQ ID NO: 33934 - DNA, 553 bp, Arabidopsis thaliana
ggtaaaccggagtacgagagtagtgcttaaccggagacggaggagatttgtacacgtagtgtttctttgggggtggtggggaatggtaaaccggagaggtgagtagtgcttcaccggtggtggtggagatttgtagacgtaatgctttttaggtgggggtggggaatggtaaaccggagggggagagtagtgcttaaccggaggaggaggagacttgtaaacgtaatgtttttttggtggtggtggtgagtggtaaaccggagggggagagtagtgcttaaccggaggaggaggagacttgtatacgtaatgtttctttggtggtggtggtgagtggtaaaccggtgggggagagtagtgcttgactggaggagggggagatttgtacacgtagtgcttcttgggtggtggtggagagtggtaaaccggaggaggagagtagtgcttaaccggagacgggggagatttgtaaacgtagtgcttctctggtggtggtggggagtgatagaccggtgggggatagtagtcttgaccggagcaggacgagatttgt

SEQ ID NO: 33935 - DNA, 1031 bp, Arabidopsis thaliana columbia
atattttgcttccaattgtagaatacaaaaataactaagaaacgttcatactatcaaataaaacaatgaacacatacgatcatacttagaaaggagtttcgagtttcacttcttaatgaatttacttaccattgcaatatgcaaaaatgaaaatatacatgcatgtacatgttcccaactttttaattaaatatagggtaacaaaaaggttcttgttctccataaaagagagtgtgtgttcctttaacttatataactcaattccattttatataaataagtttcgtatcttatacaattaacatacattaagcagacgaggttgatcgatcttgatggggaaaaccgacggaagctcatggttcacggccgttaagaatgttttccgatcgccggagaagttaatccctagaagaataaatcgtcgacaagacaacgacctcgtcgaagaagtagaggacgaactacaccaacgaccggtatacttcacactcaattaccttttttttttaatcttcattaattcatactatataaaatacatcagcatttacatgtaagattccttcaatatatccccaagaaaacacattttttttttcttactttagaaaaaatatttatcagcatgaaaacctgatttttgataaagtcttaaaacttggaaattttgggatttacattttttattaatgaaatctataaattttgttaaagaataataataattttgttggtgcagaagagaagaaaaagaagatggctatttaagaaagtttcttctgatccttgtgcaataaacgtaggaataaacacaacttccacggctattaacgcgattgccgcggaggaaacagagaaaactgtttcgccggcgcgcaaagaaaccgtatttttctgtcgaacgtctgtctacctaaagagacacgtggctgctattctcattcagacagctttccgaggatgcctggtaaaatcaatactcacaaagttgcatgttaactaatatagtcacacacaaagttgaatgt

SEQ ID NO: 33936 - DNA, 943 bp, Arabidopsis thaliana columbia
cctcatcgctctgccatcccttctcggtattttaccttcttctcttaggttattcaacattgtgttggtgtgttagttagcctgctgattgcattctgttttcatgtagaccctctgtttcaccggctgtggaagctgaatgctttgatgacagcaaaactcctgccattcgtctcactcctattgaagacgagagtgaatcttcttcagaggagtcatccaacagtaaggttgaatcaggtgttaccgcaaacaagcagggtcagttggagaccaaacctctatgttcaacccaagaacaggtttctggtcttactggtcttgcaccagacttgagtctggctgcttctgcagctctgactgcactgatgaaaaccaaggaacaagggagtttggtcgatactgagctacttatcaagttcctcagcgacccaaaattaatcaagaatcttatcactgacacatcaggtaaatcctctgaaactaagaatcagcccattgtcactaacatcaactctgctactagacctgttccgcagcctgtcagtgctgtcaccgcctcacccatggctagaaagccgcagccagtgataatacctcaagaacacagtgttgcagtttctcggtcttttactaaccctgagaggcgagtatcacctcccaagcctgtaaatggaagcatatccccacctaagcctataactggaaaaccatctagtataccaatgcccgttcatttccatgtcggtatagctaaagaacaacctcagcctgctcggttcccatcgagttctctgccaatgaaccttaacttccaccgacctccaaatgttttctcagaaccaaaggtaatagtaaatcctcaaccccaacaccaaccctattccgcattccgtacatctgaaatgaactatgttcaatcatcaattggacttggaagggg

SEQ ID NO: 33937 - DNA, 742 bp, Arabidopsis thaliana columbia
cgtcgtgctcttaacttgaagattcacgctagaatgaacaaaacaaagccaaaactgaaactaaaaccgaaacgcaggagcaagacaaagaagaagaatctgcaacattgattgatttcttctacccattgttaagaacatctgatatagcaggcaatgtatcacaagaaactcaagtaagatgttctgctttttatgtattagtagtaatgcagaagcaaaggacatgagattcttttgttgttctctttgtcccattgattcttattacgaaaaatatgggttctgaagaatacaaaacaagagacaagaatattgtgatcaattggaatgtgttatttttacaagtaactcgttcatctgagtaatctgatgcaagagttgagctattctctgcagaaacacacaaataagaaacttgttagtaacaataggtgtttcattgacatttcgtcgaacacttggtaggaattataaaaaaaacagagcaagaatgagaatacaaacctcgtctctctctttgattgtatctctgagatgagcagcgatgatttcacctttttcaagtcgtcggcgagttcggttacgcttccaccaccaaaggaatatgaccataaccgaataaaatgaccggagagtctttgagaaggaacagagactatttctggagaagcaggtaaccaaattctggaaatttgacattactcgagcgagaagaatcttccaccaaccttggataata

SEQ ID NO: 33938 - DNA, 738 bp, Arabidopsis thaliana columbia
catccatggcttgttacggctgatgattcagatcacgtctccgtctggaattgggagcatcgtcaggtctgtatcgagattctgatttgattttggttccggttctgatttcgaatcgtggatctgtcaacgtttatgtctattgtgttaggtaatttatgaattgaaagccggcggagttgacgagcgccgtttagttggtgccaagttagagaagctcgccgaagagaatccggtgagccattgttctattctggtgaaatgagtatgagtttctgatgctttatgttcttactgacattcgtattttcctcagactataaagctaagcctactgaagccattcgaggaggaaggtagtagatagatctttctcgctgctaattcagttgctcctttcgataatgagaaaaatgacttatctgctcaatgtttgcacctactagcgttaagcaggtgaagttttatgacgatgatgtgcgttattggcaactgtggcgcaaccgctccgcagctgctgaatctccatcagctgtcaatcatctgacatctgctttcacttcccctgctccatcgactaaaggccgtcattttctggtcatttgttgtgagaataaagctattttcttggatttggtgacaatgcgtggtcgtgatgtgccaaagcaagagcttgataacaagtcacttctctggtaagttcattgctttttctctaattttaggatatgggtttgc

SEQ ID NO: 33939 - DNA, 439 bp, Arabidopsis thaliana columbia
aggtcaacgcaagcagcaactgtacacattcaatgattcaagtccaaaacacatgcttgattgcaattattagatgcaagtcaattgcaatcaaatgaatacctcattctccaaactaagagacaatcttttatcacttcctgcatgtttgcctatcaaaaacaacaacaaaaagctttagcttgttttccttgtagcccagaacaataattgatagagagaacacaaacaggtgcttcttacaagaataagcttccaagcaacctttgatagtcctttccccgagattaagatgacccagaaaaacattcaatctggaagcaaaggttttcaatatcatataaatattccaacataggaaaaatctgattctcataattcacgaaaaaactagaaataactcataacggaagtaggtttaacctgtctaggttagtgt

SEQ ID NO: 33940 - DNA, 377 bp, Arabidopsis thaliana columbia
caactgaggtcaacgcaagcagcaactgtacacattcactgattcaggtccgtcagacgagactgcgtggccttattagatgcaagacatgtgctttgaaatggctacctcgcatgcctcactaggatactatctcctatcacctgctacatgtacacctatcactgacaccaccagctagctttacttacctgaccctgtagcggagaaccatagagttcgatagagagactcacaaacaggtgcttcatacaagcataagcttccaagcaccctatggttgtcctttcccgagattaagatgacccagatgcaccttcacctctggaagcacgggtgttcaatagcatctaaatattcccacataggaccaatct

SEQ ID NO: 33941 - DNA, 2296 bp, Arabidopsis thaliana columbia
cgctcgtgttcttgaagcagagattgttgtttcttactgagtctggtgctggttccttggacttaagaagcatgaagataagagaaactgagtgtgaaggactgaaccattcgcttgcgagaacttatgtttttgatgctgcggaacggtctaaagcttatggattcacatccgagggcgagatcattcacgtattgcttcatggagatataatgaacttcaaatgtagggttagatccaagaagaagtttcaaatggaggagccagtagctttacaatcaatcaaaggctatcttctagttatcaacgaagaaaaggttttcgctttcaatgtatcgactcagcattatgttcgtactgcgggtcctcggcttttgttctcagcgggattagaagagatcagatccgcgttcttgagccatcgcgaatcatcttcacgaaccaccacagtagtaaagactaggccgttaatagctagcgacagggaaaaccttcttgtgatcggtttagaaaacggatatttcgctgtttacaaatcgaagctgccaactctcaaaggagacttcaacacaatgctttggagcagtcctgtgttcttcttcatactatttctattcggggcttggcatttctttgccaagaagaaagaatcgctcactgcatggggaccagatgatccttttaccccgaccggcgcacaaaatagttcggcgaaagagccaacatttactgaaccttcaagaagaaacgatgacctcatggatctacggagaaggtacgctggtggctcataccggtcagttggagctaacgacccgagttcaagagctccggttgatggaaactatagaacaaccgcacaggatcataacaattatcgcggtggtggctcgggtcttgattcaaacgggtttggtaatagaagagatcatttgtttggtaacaacaaagttttggataacgaaagttagaatctttggattacttgcaaattctggcacgttaatcaccacttacttcaaaaattgtaatctttgtaactttatataaacgctaaagggttttattattcctcgttcggtttttaactttatataaacgcaagtctcttgaaattttcgaatacaaaaactctggtcaaagaataattgtttgacagctaaaacaacttaatcgcaatcatagtcaagatgtgttttggtctatcatgtctcatgtgatcgtgctagcaagtgggtaaataattgagtttaatttttctccttaatctcgatttataatgtgttatgttgaccgtcagatgagtcagcgaaatagtcatgtcatctaacggttaagacttcatcttcaactaaagaatttcagaaaggaatctacatcgtgtgaagtagaggaacattactttcgagctttgattcatcgtcgtcgtcttcggagacgaagccaaacacacaagctctctctttctctcaacaacttcaaaagccggcaggtatgaccgagacctccgaagaaaaacagaacatttctagggtttaactctgatccaccacattaccaaaactttcttcaactaggtgatcaaaaaggagtcctttttcattttgagcttctgggtctttggcttctgatttcgctataaggaagagaaaagtcaacggccatggcgggtcgtagagatagaagccaacaactccgtggatctcgaattgcgatcgccatcctcatcggtatctttatcggttgcgtgtgcgccgttctgttccttacgggttcttcaactcaagctcatctctcaaagcaagcgaacatctttcgaagtcaagcaaccaggtactacataaacctctaaagctctaatttttgtggttctgtggtcgagttttacatagattgatgtttgactctgccattataggtgttattaagtggttagtgtctaaacatagaaattcttcttggtgatgtgttagttggagattagggtgaagtttatcatgatactggtttggttgattactggattttgtatcttaatttggaatttagttgagtggtttataaattccacacttgctttgtctaggttggatcatcagcttgtgaatcgccagaacgagtgaaaatgctaaaatcagactttgtaactctctcagagaagaatgcagagttaaagaagcaggtcagagagttaacagagaagctacggttagcggacgaaggatcagacaatgcaagaaaagaggttctagcattggggacacagatcaaggctggtctttttggactgtcaaga

SEQ ID NO: 33942 - DNA, 356 bp, Arabidopsis thaliana columbia
ctagaggatgcagatcaacttactcgaccacaccctcagcatcgccatggttaccgacttcctcagggtcgacgcacatagtttttggtccctatagccaaaagacacaagaagttgtggtccccagacagtcaggagttttgtctagaggcagccactcatttactgacgcgtaaaagctcactgatcgagcgctcttgccgcgaagatgaacggtgctaagcgatctgtcgaagctgtgggatgtcaaaatgcatcggtatgggagcgttccgcttacggggcagcatccgcgcgagcagcgtggacgatgcggaacgcttaatgtcggcttgagtaacgcttgcattggtgag

SEQ ID NO: 33943 - DNA, 158 bp, Arabidopsis thaliana columbia
ttgaccagatatatttgaattcaagaatggaaacgacttatcaaacacctgagcatcagttgtcattttgttagttaagtctttgtcatttgaatggtgatcattgtgcaggtgcatctggaccacaaacacatgggtcttgggggagatgatagctg

SEQ ID NO: 33944 - DNA, 937 bp, Arabidopsis thaliana columbia
tcaattctttaaatgaaaacccaaaataaattttaaaaagtaaaagaaaaattaatgtaattgtcctaaccactaacacaactggggtcaattattgcagtggaaaaatgggaatggtattaaattgagtctgaatttaacggtcatataggtggaagaaaagtagaagctgcgtatcggtggggatgccgatttgcgccaattagaatttgccagctcattacacaaatttgacttttgcgtcaacgtcagaggattctttcgagaaagataaaaagaaaaaggaagtataacgtcgtatagaatcgttcccacctggaaactatttttagataaatagggttcaatttcatcaatttatgtacattgttttggttttaatgtattttgaatgtatacaagacacaactttgtgtttgagtcttccacaatcatttaaacagctgttttctagttcaataatttgaaagaatattgacagattatttggatttttaacactaaatgcattagttttagttagttcaacattccagtttgctcctaaataatctttcgcaattatatttagctggagacaaccatcttttttcatacacaaacttatgtttattagtttttttttttgtttataaacttttttttacatttgacttgcggaatagtagtggagtgtattcattttcatatgggataatatatggttcaaatctctcgacattcaggaaacagatttttctacgcatagcaggtaaataaagataaatcacacacacaattgaaaaacatacataattaataaccaataaaatccttgttgaaatcatcaaaatacaaaaaggattccagaaatgtattaatctccgatcgtctatgtttatggatcgtacattattgaaaatcagattatgatttaagaaaactatatttgaaataa

SEQ ID NO: 33945 - DNA, 647 bp, Arabidopsis thaliana columbia
tcaatgtctaatttattacaaaaatcctcacgtttattactaaaaaacataaaaatcaaatgaataaaaaatagcactcacacatcattatcgaccgacgtatcatcgccgttatcaacgacggtaaacacagcgcaacccgttaactcatccgtctcgttccgataaacaaaacagttactataataaacttgacgacgtcaggtattataacgcttgtcggttttgtaaattgacgtaaatacccctacggccaaagtggcgcgtcaatcacagattgattaaaaacaatactccgtcatcttaatctctcatcatcactgactgtgattgaatttttttttttttttacaatctgagatctgaaagatatttctaaattctcattaaattcccccataaattttcaatctttgctgatttcccccaaatttctggagatagataaccttcgtttttcaggagtttctttctatatttcttcatcgatttcgttcagtctttgagagaggttcgtcgacgtattatcgtcggaaaaaagctatgagaatctatttctcatagctccagtaatgtgaaatcgagacaacgctttatcttcagaatctgctaatccatgggagattcaacacattccggtagatttt

SEQ ID NO: 33946 - DNA, 757 bp, Arabidopsis thaliana columbia
cgttcttaccaaaatactaaataaaaaaatcttgcacttcaaaccttaaaacacgtgtaaactcaaataaattttgtatcaaattatttactagtatatcataaatctactagtataatataatactgtatatgataatcatggctattaaaaacttgtgataatcattaaaatggcattttagagatctatgtatagttattattaaaaatatatttccttttaacattataacagctttgctaccacaaaacattatctaattctaaatttctaatcttcatttttcaactaactcaactaccaaacagtggaataaagtcaaaagcatgtgtaaataaataataactcgtaatttattttcttgggtgcttttcttttttgaccaaaacatatataaataaaactaacaaatgcaaaatatcctcgtatgacccactttatgaattctttataaccttttcaaattttattttaaatcactcgccgcgaatgacgaatgtcccctcctcaatcttcgcatgtttgctcgccatttaactacttctttacttatcataccaaaaaaaaaactacttcttaattctatttatacataaactcactcacacaccaaaatcacatctcaaatcctaaaatctttcactctctcacattattctctcttcattgatggcttcttttgctctgaaacccattttttgtttcattgctgttttttgcttcatcgtccacaatgttgaagctagagagggta

SEQ ID NO: 33947 - DNA, 565 bp, Arabidopsis thaliana columbia
atgcttagtgaatgctttgtgtactcctccatgcgcctaggggtcccttttatagccccaaggcagctaggagccgttgagagcattctaggaaggcaaatcttgccttctgtcgcctggcgcaccggacagtccggtgaccaccggacactgtctagtgcggatttctttccttatttggtgaagccgaccgttgcagatgtagagtcgttggtgcaccggacactgtccgtcgacatcggacagtccggtgccccattgtgaccgttggctcggccacgtgtcacgcgcggaatcctcgaccgaccgttggcccggctgaccgttggctcaccggacagtccggtgatttttagccgtacgccgttgatcacttcccgagagcggcgacttcgcctgtgaacggctcaccggacagtccggtgcaccaccagacagtccggtgatttatagccgtacaccgccgtcgaagtcctgagagcagccagtccgtccaagccagcctgcaccaccggacactgtctgtgcaccaccggacagtccggtgcacccagactgagcagac

SEQ ID NO: 33948 - DNA, 506 bp, Arabidopsis thaliana columbia
cgcaacggtcggtcgcgcaatccgcgggcgcgtgttttggaaagcaatcgcgcatcggacagctacagtgactgtccggtgcaccacacgacagaaggcaattagccttccaagattgtcttcaacggctcctacctgccttggggctataaaagggacccctaggcgcatggatgatatacacaagcattcactaagcatcctaaggcatctagactctgttcccgcgcattcgtttcgttgtgttagagatttgagctctattcgagtcgaggactccctgtgttgtcatttgagctcaagtcttctcttgtgtgcgtgggtgtgctgcgatttgtgtcttgtgtgtgttgctcatcccaaccttactctgtgctttcattgtgatctttgttgtacgggcgagagactccaatcttgtggagattctcgcaaacgggaataatcatctaaaggaaaaaccgtggtattcaagttgatcatcggatcacttgaaaggggttgag

SEQ ID NO: 33949 - DNA, 809 bp, Arabidopsis thaliana columbia
ggtgtaactacagaaaaagtttgatcattaaaggctattggatttgccccaaaaaaaaaaagatgtaagatcattaagcctattggattgggccggagatcagaagatgttaaaatcagattaattttgttttgttttgttgcatttaacaaaattccagatcgtttcgaacttggttttgggtaaacatttaattaaaattataataattaattagttactgatcttatcttaataaagtagatattaaccaatttgtaaaggaaaattggtaattcagatttttaattgaattgggttcacacgcagcatcatctccaccgtacacgtggatgaatcaaggaccatcgtcgattttcgatgggttttttccgcttggagtcggttagtgacgtctttaagaagagaagaagcttataaaaaaaaaattaagaacagtgtgaaatcaaaattcgaaacggtacaacaatgggagattctaagaggcaaaagacggagacggagacgaagatggagatggagaaggtagagaagaaggaagcatcaggatctgttaatttcgcagaactacgcgacgatctcttccgcgaacgagcgaaacttgtctccgaagatccctccaccaaaatcgccatcttcgttactcctcctccttcttcctccgaatcggacgtctctatgttctcttcggctttcctctgtcaatggcgttgttacacttcctcgagaataatcagcccagtggatgatcggaggaggaagatgaagacgaggaggatcggaggttgaccccaaggttttggtgggag

SEQ ID NO: 33950 - DNA, 896 bp, Arabidopsis thaliana columbia
ggtgccttacacttaccaattgtctccgtctgatttaaacctataggctaacgtttatcacaactatatcacaagttaacaaaaataaaatttctaatatgttttttctggtacattttctaaactggccaaaatggttgtcatttgcaataatatgccttacgtaatagacccttgtcatgcataatgtttttaaaagttgtgttatattatacgttggaatgataagatttttatttgtactttgaaatggatctttttacttttaaatacgaaacaaaagtcgatggctgccagaaaaaaattgtggttaagaaggtagttgccgtcaattgggtgatctaaaaaaagaaatagaaaatcaacgaaaatggaaataatttgcggagaggggaagaaataatctggtggagtcggcgcattgtgttcacgtgatgacgtgacactttgtgggactcatttttatgcaatacagctcattttccgattaccataagatggcgggaacctctctccacccgtcgtttccggtggaacaaatgggtccgaaaccgtacggaggaaaactgacacgtggaaaccttgccaaagagcgtgggacgcacgctcggttgtgacatcaggtgattcgtctcgtgttactgttttggtttgggggatctaattcttaagggtttgagatcgtatggacacaacaaaggacaaaattagtggaaaacaacacatttcagtttttttcctctagttggtcggatctggagacttccataacgcaacggcaaccatttttcttaaatatacgcgattatgataatacgacgaccgtaattctacataaggttttttcgtttgttatcacctacatcgaatagctttaattgaaaatgtataataga

SEQ ID NO: 33951 - DNA, 1092 bp, Arabidopsis thaliana columbia
caccaaacaaatcagtcatgtctatttatatatttttgtcactactctttaaataccactatgtccctctatataatcatctataataaaaccgtaattgacgctagaaaaatctcttttattttaattctttttccatggctttaagaaagcaacgttaaagaaaagtagggttgtataatacaaagtagaaagtagtagtcatgtgcattgtgataaaacaatcaaatcgtggatccacttttattaattagattcgagcctgagtgaccaatagttactatctcttgccccaccaaagttagtaataacaaaaatataaacctaatttgtcattagaaagctctaggtggttgttcgttacatcatacaaaccagcgcaaaaaccgttaacattatcatatctatgtattttttagaacgaaatgattgatgcgttgtgcacacgagattggtcactaagatttcgtttgcgtaacatatccactcctctctattcatagactatactctatacatactgataacatacaaacagttatattgaaatgcatttaaagtatttgttctcttatctataagaaaacaaactaacttgatatcaataaatgaaaaaacatatatcgtgaagaaatctgtatcggaaaaaaaaaacagaaattaaaggattgagtcaggtatctcttaacggattcctcttctctaccacagaatctgcgggaaatttcaacggtcgaatctcataaattactaaagtacccttttaggtccctctgacaatgacacgctggatcgtgcgaaatcgacgccttaactgtcggtgggtcctaatttctagtggcatttcaccgtaaataagaccaatggcaaagggactaaaccggcaaatagaactttagaaaacaaaaagagaaaccacagaaagcagtttgcttctaccttttatttttgtctatataacaacaacaacattgacatatcaattcacacataaactcactctcactctctcactgtcggcaaactaacttattcacttttccggcactgattctgctcgggaaaaacaactccggcacaaaatgcagcttt

SEQ ID NO: 33952 - DNA, 872 bp, Arabidopsis thaliana columbia
aaagattgtattgtatctctgagattgattgtttttggttctgcagttatcaaatttgcaagagctactggtgatttgcaatctctgtctgatgttgatctgaagttgattgctttgtcatacacgcttgaggctcaggtttatggcaccaaaaatcttagagatgttcctccaccgattcaaactgttagagttaagagattacctgagaaggatttacctggttggggctccaatgtggctaacttggaggagtgggaggcacttgaaaacgagactgaggaaaaatccaacgctaactccaaaatccttccattgaaagaccttaacatgaatattattgcttcagacaatgtttctgaggttggttctgttgtctctcatactgagaatcatgaagaggatgtgcaggaaggtgggaagaagcataggcgatacccgcccaagaaaacagagattaagcttgagggtaagatggtagtggagggagttgatgcatcccaggggcaatatgatgatgatgatgatgctagtgattggagacccgcagtcagtagaagtactcactcaaagtatcttagaagaaaggcaaggtgggaacattacaatgctttggctgaacaagaaattcagaaagatcaagaagctgacaaagctcgacacactaaagaggccaatgaaacccacgcaaaagatagtggaaagaatggtgaggatatatcttccatccttaaagatatgaggttggaggaagagtcattaagggctctccaagaagagactgaagagacgaatgctgaagcaactttgatcaatggtgaggatgatattgatcatgatattgaagtcgaagctgaggggatcgatgttgc

SEQ ID NO: 33953 - DNA, 553 bp, Arabidopsis thaliana columbia
tgactatttcatcgctcgatattttcgcgggtcaatcaaacggcatcgtttttatccgaggcgtacatgagaagacaagtagtgaggtctttacgtgacgtgtcaatatctagaccgcctatctcacgtgagtaaaataaataacctgttttagcgtagggtgagttgtaggagattacaccaatggcctgagagagtgaccaccacctaccccacgccgtctccgaaggcttcaccaaacaacaccacgaaatcaatcctctaatgtatttcttcaattcagtcttcttcttcttcaccaacccaatttcttttcttcaactctctcttctccccaaacccgacttctgatccgcatcgatttccatggcagccaacaccatttctctttccaacgtcgccgcctccaagaatctcaactcctttcaaagccgtgcctttattgctccaccaactatttttttccctgtggcttctgcaaagtctaaacctggggaactttctttatcttccacgactctttccaggtctcgtgtgcgcgccggtgctagcc

SEQ ID NO: 33954 - DNA, 1060 bp, Arabidopsis thaliana columbia
caactgggacacactagcaaggcaaaaggtgcatttatttagcttattcttttaaaaacgtaagctttgctacttgtgccttcttaaagcttaacactagttttctttaggctgcatttgttccggcttcagagagtgcaattgacacaagttacttcagaagtcgctactcgtggaacacatcagatgagcaatttttcccaagcggtgaggttccagattatagtgatgctgatagcatgactaacagcagtggttgctcgagcaatcatcatgaagaaggggaggtaacatctattaatccactctttggatttcacctcctttagaattagtcggaaaactcttatcattagtgttcgttggatatgcaatttccttgaactggatcaatgttgctacacaggctgaagaatgcgaaggtcatgcagagtttgagtctggcatacctgtagattactctttcagtaatttctcgtttaaggtaataactcatgactgatctgttaagatcaaatgttgtccaagtaatgcaattggttggtagtttatatagttgttgatattccgataaataacatttcattttggattgaaatctatctaaagttctgtggcaacagatataatttagcataagttatgttagcttggaagagttggaagcatgtagaggtgtattaggctgtaggtagatgtcagattcacatgtaggaactgtagggactgattgataatgttttgaacttgtgggctctgctccagacaactcgaaaacttgcctgtttttgttgtgccaactgattttaagtgagcttgtatcattgtgagtggttgagtattaagagcacaatgcttagcattctgagtttctatcctttttggttttgcagaacctctctcagttggcgtctatcaactatgatcttttatccaaaggctggaaagatgagccacaacaaattccgcatcacaagtaacatccatttcctggatgtttttctcgattcttttggtgtcagtcagtgtaatgagtcactgccattaccggcgtttgttt

SEQ ID NO: 33955 - DNA, 1022 bp, Arabidopsis thaliana columbia
cagcaatttgaagatctatgttcatgttgtacccaagttagttaaagattattagttctaaaagttttttggatttggagacaaaaaagagaagaggggaaataaagtgagtttgaggagtgtgagattggtgatgtgtgttaatgacatggataatcaaaattttgatttattatttttaactaaaaatgaattaaaaattattaattaaaaaaactaatcaaggattttaaattgtaattacacaaatgctcaaaacatttgagtaattaaaaaaagatgtatgatattttaggaataaatatacttttctatgctatatgagtaattaattcttaatataataaataaatctttgtttgtaaatattctattatcatgaaacgacaaatataatgaagcttatttcgagaaaagatgaactagttgaattagttgcacttcatatgctagattcaacatttcggtttagttgcaatttaatcagattatctaaagttgtgtcaaaccgatttgccttttttgctagttgtaatcagccgggcaaaaaaactgtgttgtgtactaatgggccagatattgggctataattaaggtcatgcccataattgtgcaactctcacttcacaatgcaagtggaagatttattaatttttgggaaacatccagaaaaaaccctccattaatttataatatgcctgtttaatacatgcattatgtaactttgcccgtttaatacttaagttaatttttatgtcttttaaaaaccttcatatttttaaattttggcaaaatcagacatccgagttaacggccgttagcactgctaaccacagttaaaatttaaccctatgatgtttactatgtatatacaattgtttttctaattaatatgagcatattatcttagtttggtggttatgtgagagattaccatcctcatcaaccccgagatcgaatctcatatccaacaaatattttggattttgtattgtattttttactttcaaaaattccttttt

SEQ ID NO: 33956 - DNA, 559 bp, Arabidopsis thaliana columbia
taaaatctgctaaacaaaataagaagaggaaatacattctctcaaattgcaaatgtatagtaatatcaccgaggtacatgttattcaaaaaaataactaaatattatgtgttcataagaaggacgagatgaaagtaacttggtcctaactaggcattcatggatcaaatgtttactttctgagatgcttggaccaggttcttgtttccaggaaacgacttgcatgagacgtccacaagtgctttgaattagaagaggtcgatatatgtgggatgttgtgctttgaattagaagaggtccacatggctcctaactgtagaagatggaaaagcacccacaggtgaagctaaataagtcaacaaagacgatggtcagattgtggtcgttgatcctaaatttacaatgcaataaattagacattattttcaggttatatttcacaccataaatacggaacacaatttgtcaaaatttacatatgcaaggattatagagcgagcaatcctaactccacaaattgacactatttacgagattaatgtaacatgttagcatactac

SEQ ID NO: 33957 - DNA, 579 bp, Arabidopsis thaliana
actccctgttcctcaaatgcccacctcagcttccacatccaccattggaaaccgctacgccgactccattaccgcctccagttcctgttccggttaagcaggttacttcggttcctttcgattgggaagaaactccaggacaaccatacccatgctttgttgataccagtccacctgagctgttggatcaaccgctgccaccgcctcccatgtacggtgatgttgaaaccagcagcgatatttttgatgatgcaagcagtgactccttcagctctgtgccgtctctattagcaacaaaccgctcggtttcgatatccggtgctgttgcggtggatgaatttgatgacaacctgaatacagtgactagctcgatgccaacatcgccagcttatgaatctgatgacagtactagcagttacatgacgggagcttccagtcttgtgggagcttcgttcttggaaaagctctttccacgtcttcttccatcagaaaaggtcaaagctgctgtttctgaggacgttcaggtttctactcatccgttgcatgaagaagtgaagcttactacagaaactgacaaca

SEQ ID NO: 33958 - DNA, 1138 bp, Arabidopsis thaliana columbia
tcttatccagaaaattgacactgctggagttttcgatatccgatggagtcgtggtggcgatggaggagacgtggcgcttgctcaggctgatgctgatggatgcttgatagtttacaagatagatgagactgaaagtaaaggtactaactttttttatcttgtaatggaaacttctgaatcaatggactcagtaattaagtgaaataaaaattggaactttggtgtaatccaaagggagatctgtaaaggatcaattgctgggttgttcttaatatgcagctaagctttgttttgttagcttgttggtgatctgagtaaagttttatgcttgaaacaggtactctgagagaagtctccgggaaaagaatcagctcatcaatgtgtctttgtttggattgggatccatcatcaacatcaatcgttgttggtttatcagatggctctgcttcagttgtttcattcacggattctaatctagaaacagttcaagaatggaaagggcatgactttgagctttggacggcgtcattcgatctcaacaatcctaatttggtctatactggatcagatgattgcaagttcagctgttgggatatcagagatagtccggctgacaatcgggtttttcagaattccaaagttcatacaatgggtgtttgctgtatttcatcaaacccaagtgatccttactctatattcaccggaagttatgatgaaaccttaagagtttgggacacgaggtctgtttcgagacctctgaacgaaacatcagtgtctttaggtggtggagtgtggagaatcaagcaccatccttctctgagcggtgttgtattggcggcttgtatgcataacggttttgctttagcgaaggttagtgatgggaaaggtgaagtgttggagagttataacaagcatcattctcttgcttatggagcagattggtacagagggaaagatcagaagcaaagcgtatgtggcaacttgttcgttttatgatcggcttcttcgggtatggatgccgataactgattttccacacgatgttcctaaacttaagacacagctgttaaggtagattcactgtgcccgacttgaattaggaaattctttgagctctgatttcgagggtcatgttgtt

SEQ ID NO: 33959 - DNA, 583 bp, Arabidopsis thaliana columbia
tatatatcccacatatcaatcaatcattcaactgcttcccaaagtctaataaataaaacgattaaatatgtcagaatctaccatatgaaacttatgtgggttgccttgtcccactcactattactcacaatcccatcgtccacgatgccgttcaatacgcggcgaaacctaagcgctaaaacaataaagtctcaaacattaaaggacaactactcaattgctttcatttagttgtcgaattaccatagagtgaaaagaactcgtatcaattaagaactacacaattattttttatttttttgtgtgtgaaaaactacacaatttatcaatttgaattaaaataaaatctcataaattatagtaggatcaagtgatcaaatatctcaaaagtaaaggaaattggtgatatagctagcatgttgatagaatgtttttgcctttttatcgcaagatcctagttatctttctttttcttcattattccattcttttcacaactatttgcttgaattatctcatcatctatacacataaaagttacacttaaccatagtcatatatatttttataaagataaatgata

SEQ ID NO: 33960 - DNA, 567 bp, Arabidopsis thaliana columbia
acctgttactttgtagtaatatacgttttttagttaatatcacatgaattttattttattttgaaaattcttattttgtaatattacacggtttctgttaaaatcacatgtgaattctttagaaaaagacttcatacagatttgtttttcataacaatgttttttcttaaaaaaccactatgtaacaatgatttttcttaaaataacacgatatatttttttaaatatcatgtcttttagttaaatataacatgtgaaatttaaatgttacatgctattttgtaaaacctcacacaagtgtctcgcctactgttgaacttgcaacaaacgaaggattgttttgtcatttcacctcgtttgataatgtgagttcatgactaatttgcaacaaaaacctttctctctgctattttacgttgtgtttttttggctatttagtaatattatccttcttttatttatgatagaaccctgtaaaatactttgtaaactaaaaacacttattactagctagttgctaattgctatagtgaaaacttataaaaacatttttaaagtaaaacttgt

SEQ ID NO: 33961 - DNA, 880 bp, Arabidopsis thaliana columbia
gtacgagaaaccgcaaacttaaataaatgacagttgcagaactaatatgggccaggccaatttaagtggataagattgattatgacgagtttgtatattactttattttcataggtttattacctaattagactctagatggtcactgtgtggtgaacacgtgatatgagtacgtcgtcgtgtgccacgcgctcgcctctgccgtgtcactgcgtatttgtaatttgtattggatgatgaaacttcaaatttttatttttattttgaaactacagttttaacattttattccccaaagagttcatcgtatataagtttttaacattttaatatacttttttcaaatttatatgttctagaagttgttttgttcaaagtttgaaatcaactttagacttcgttgaatgtcttgatttgcttcacatgtcgattcatttcttaaaatatcatattttggtatttcaaaagttatcctaataatgttttctcttctgcatttggtcttaattctacaacctatactatataaagtttggttattagctatacagtatgagttatacatgaatggtataagttcctaacatagttgtaattaggagtcatagctactttttaagttcgattatcacctttgacgaaccattctgaaacggaagttaattagtgggtctggcaatgaagtcaatacatggtcaacaattgggccgtaaaaaggcccatcaattattttattttttaaaaagtcaaaaccggccggcagacgctcacggcgtagatacgtggtcgacgcgcgcataatcacaaatcagaatatattgtttttggatcggaagagagatctagaagaagaagaagaagaagaagaagggggaataat

SEQ ID NO: 33962 - DNA, 1119 bp, Arabidopsis thaliana columbia
gtgcttcaaatctgacagagattgtgttgaactacctgaagagctcatcaagcaacgaatctgatgcaggttgtcgcgtaaaaatcttgtatgtcatatctgttttactatatttccttagaattgagatgcatgagaatggaattagaggatcttcaaggttcccaccaaagctggaacatctgaaagcgatttcatcccaaagtatcccttttcatagagaaaacatgatcacacattagttacgagtcagaatcatgatcaggataacgttaaaactacagacagtgattgatacttactgggtttaaaagccccctcacaaatgtcgtgtgcgtgtgttgtagttctctcttaggaattgagatcgtgggtgagaactgaatatccacttcgtctaatggtgtggcaactactgtgacatcacacttgtagctgtttcctttagtggatttaagctcgtaatggttttcgagatatgaaatggattcaattttctcgttcaggtgtaacgtaacatctgaatgattaatgagctttgcagccatctgccagtttccaccttcaacagaccataatcctccacctgaacccgccaaagagacagcacctgccaacccactgatgagtacactctgtccatagtttatccttgtaataacctggagaaacacaataaacacactcaaaattgtaataggatgataattggcaaaagttgttaaggagaagagttatatgttgaaccatataagcaaagaagagattaaaatggcctttgaaggacagtattgtaagaaagattaccgtaaccagctcgttgactaacaaaggagaaagctgagcttcagataatttctcctgtagagtgagctttgtgagattgtacaagcctgaccatttaagcatcccttcaacattgtcgaagataggtcttgactctaagctttcatagtacttcaagaaattatcaactgtattctacgaacataaaaaatcaacatcagtcaacatacaaaaggatccacacacacacacaaacacaaacctagatgcaaaatcaagttacgaaaacatcctcattgctagctaacaaattaaaatcactttacaacaaca

SEQ ID NO: 33963 - DNA, 526 bp, Arabidopsis thaliana columbia
tgtcgatttgaaatacatcttatccctgcgtttcttatatgtgcagaatacttggatatgtttgaagcaagtccatctcccaatagttcaaagattaaatttcaaaagctattctctgagcctgtcagactggttgagaaatatcctgctggtcgagatggtgaccttaaaaagaagcatatgttgtgcgttaactggctattgtctgagaagcccttggacttgcaaactcaacttgcacttggcttcttggatcatcttatgctggggactcctgcttcaccactaagaaagatcttattggaaagcggtttaggagaagctcttgtcagtagtgggttgtcagacgaactcttgcagccccagttcggtattggtttgaaaggtgtgtccgaagagaatgttcaaaaggttgaagagttgatcatggatactctgaaaaagttggcagaagaagggtttgacaatgatgctgtggaggcatccatgaatacaattgagttttgtttgagggaaacaacacagg

SEQ ID NO: 33964 - DNA, 593 bp, Arabidopsis thaliana columbia
acagagcttctctaaatttctctacctatatatctcattacaaagttacattttaagtaataattcgaataaagagaacacagatgtatacatatatatgaactagttagaccagccttgtaactaactaactaacagaacctcttagttaactaattaattgttccttgtaattcaacgagactaaattgattaacattatataaaaggttaatgaaagaataagattaatcaccttgtaaacacactcggagagtaccatgcaacagagtatgtcttgtaaatcttcgacagactctgatttaagtgcgagacagagatcctcaatttgctttttgcgcttctcgtattcccgacggatcttaatcctttgatccgcatctcctccgttccatggtggccaccggaacctccattgaatcggtccccacgaaacccgtaagaaccttgccctctggtctctgatccacgattccactcggctctgtatcgactccattactacaacctttggtcaatacccacctctaaatcgaaagtaaagaccggaattagtttggagcgcttgagttttgagtattgaaaccgcgtcg

SEQ ID NO: 33965 - DNA, 1456 bp, Arabidopsis thaliana columbia
  unsure (1)..(1456): unsure at all n locations
aggggaagaaagttggaaataacaaaagtggtttgtaattgtattgtacctcagcatttttaatgtcgggaagaaggtggcgattaacaagtatctcccacagagaatctcctgctcggggaagaacgtatagagcaagctcagagcgtctcggtttcttctccagcatagctgagagggctgctgcaccacccgcaaaccaataaacgagcttgtggtctttggttgcgacttttctatgggcacatatgaaagcctaatgcaaatgggatgaaggcacgtgcatttgggaatggttttaggaaactatgtgaattgtatgaaatgaggggacacaaatcaaatgtaaaaaccagctacctgaaaaatcccaacaaaagcagacaagaaggacgtcgatctagctgaatctctgattgcaagccaagatgtccggtaaggagaagccatgagctgaaatgaaagtgtaggatggcatcagaagctacatatcatgtctgactaatgcataaaccataggaatctaaaagactgaaacggcaaatattgagggacagtcttactttttgtaggtgtagaacaacatatgggacaaaagtcagggagaaatataatggaaatgttttcttgaatgtagctgacattgcattagcattttgggccagacacgagttagtgtttggatgaatagctgcacagggaatgatggaagcaaactcttccaccttcacgtcgcttgcttcgtttttactagaaatataggctgacaaggaggctacatcaattggaccacctctgcagcactctcttacagcttggtagacaggccttgcaactggaccagtcttctgaataaattctctatatgattttggcaaggtttcaggacgcattataaaggaatacataacctgcaccgacctcattgcaacaaaattagcttgctgaccataatcactaccaaatcacattggagagaatacgtatggtacacaaaaatgtctttcaacgtctatactatctccattactaactagaacaggaagaaaagagaagaatctcaaatacctgagcacatgcaagagaaaaaagtaacgaatctccatgtctccaatggctaccccaaagatggaacttgttctttgacttagcggaattataagccgcctattaataagagaaaaaatcagactccgaaaaaaacatctgtgtggtgatattactctgtacgacagacaatactatgaccattagatgtacctggcctaatctagccaagaggtatagagcaagtgtgcgacgctggttggaatcatctaaagccaagatagacaaacccgcaactgaacctgctaagactctgctccacccttaatcaaagtcataataaggaatatacttttcaagcactatgcacaaagtanaaagtagaagcattataagaanagagatcaac

SEQ ID NO: 33966 - DNA, 352 bp, Arabidopsis thaliana columbia
ataaaactggttgcttgccttacactttgcttgtactacaagttacctcgcagtgaatccttggctgtttccctcatcttaagctacaaaagttttgttgaattcgttctctatgaagctgtattagaagaaaaggtaacctcctaacccacaaacgagtctattattgttattattgattttgccgtacatctaaacatgtttttatggtttgattttgcagttcatatcacaggccacttacgcgttcttaatcctatattcgctactaagtgcagggattgtccctatggtcgtaaggagcatgtacgatccgaaacgatagtacgttaattatcagacaagggacata

SEQ ID NO: 33967 - DNA, 817 bp, Arabidopsis thaliana columbia
tgagacacgttcacgccttgcgtaacgacattcactccctatcatacatctattatggatatatgcatgagacagtcacaccctatcattcatctattatgcatatgagacacattcatgccgcacattcatacatctattatggatttatgcatgagacattcacaccctatacatctatacatccttcataaacaaaaatacacatattgcatatacacagccgtgttaacaacttcaaaaggctggccagtggcaagcgcttcaatggggaaactctcggacacacacagtcacttgtccaccctctgcaaaatcaatagaaatcttcaatacaatttttttctctactagtcaacaatttcggtacatgcataagtacgtttcttacaaaaaaaaaaaagaggaaaattctctcttggttttcacaacaattataaacccattctacgttttcttagacataacatataaacaactcataaaaccatcacacataaaattaatctcacatcaatgaagtcatcaagtcaatatactggatgtacaattaactgaacaaacatatataactaaaactcagttttattaaagacgtacatatatatatatatatatatctaaaaccagtttacgatcagagacacatcattagagtcaagatataatagggatttaaaacgtttgttgaactccataatttttttttgaaaattgacgaacaaggttattaacagagactgacaacaatcttttaatagtaaacaaactatagattatttacctgtaagatgttgcctttatgtttgcttgagag

SEQ ID NO: 33968 - DNA, 951 bp, Arabidopsis thaliana columbia
tctgttcttccttgcaaagaaaacgatacagaagagagggaagcacctgagcatatattgagacctacgcaaccttgtctggtcgccttatcttctatatcttctattgagttaatcggaagatctgatgcatctgaaaactcccaccccgtaaaccgggcattgtatcctttaaatgtgtcttatcttttactctcggtcttgatttcccatttgtaaaaccttgacatgagaaaacagaataactacattgggatcaactggccgtgggtcgatttttatcttaaatgttgctgaggaagtgaacatacttactccgcgaagcctccaagggaatgtttcctctgagtgtaccatttggacatctgattgcaatataagtgggagtcatgcagctattggtaccttctctttcttacgatgttatatttttgtcacccaagattttactttattacagttacagttatacctagagagcaaatgcatttttctgtaaatggactcggttcaagaatcatatggaaattattaaaagattttttgataaattacaggtaccgacttaggagctggtttggttgatttggaaacaggagtaggttcatactttcttcgaagcaaaagcgatgtttttgctctacaatttcatcaatcggtaaagttctcttaattccaagctccgagatgcatcgttttctagcggctcgatactgtttcttagttgagtatataactccagctaacttgctgtctgaacctcccttctgacaagtcaaagtcatgtcttcatttttaactgaaggacacatgtatttatgttttgcttctacttctttttctcagggaaacattgttcattgcggactcagaaatggagccattgtgtcagttgatctacgtgagagaccaggtagaccttttcaaggctcactagacaccagatacgat

SEQ ID NO: 33969 - DNA, 777 bp, Arabidopsis thaliana columbia
ttctttgatatcttcaacagcgtcacaacacttcttagacggaattgttgccttcccggtcgcaaagtccaaacacaaagtcaccttttgaaaatcctggttgcattcatcagccagagctcctccgggagcagccggtgcagcggcggcgatggaggcaacgattgtcatggtgactaggacgaggtggagatgaagacccttcattatcagtttttctttcttttgttcaattactcttttgcttgttgaagatcttgtttgtatttaaaagcaaaatgactttgaggtgtgtgtgttgtgcgtattaaatgcaatgtggtgtgtagttgggagcttagacacctatacatattaacattaacgatgctgatataagtgttgaccttacttttgtttgcgtgtgattttattgacgggatagtgaatgaaatcaaacatcaaattatcagtagatttcgtgtgtagcaaaatcataataaatagggttttgtgatttgcttaaattaaaattcagtgtgaatgtgtgataacgaacgtcattactgtcgacggatggtaacatcatgtacaaaaatatacatatttaaagaatatgtcaatttgaatttaaaattttagtcatatagacaaatgaaactaaatttaaagtattgtttacaagagaataataaattcaaacttgcaaggaagagtattaaatgcatccataccatacgagagtaattgctaattctataacgcggttagaattttagtgatttttaggtatgaaca

SEQ ID NO: 33970 - DNA, 490 bp, Arabidopsis thaliana columbia
cccccgtggctttcattcattggttactctcaccatggcctgagaaacagaggatcactgctctcattccaaattccgccttcaataattttgttccactctgtttcaagctgtcataaaaatgtcgtcttcttcttcttcctcgcttaaacccattaattcaatttcttcatagccagcaataagatctggcaaattaaaccattccactatgcttcgtatagttcaaatcacgcttctttgtttcgttctcgccgccgggatctcgatctccgccgtgatcgccgagaatgaatctatagacgagatccttctagcgaatggattacctttggggctatttcctaaaggcgtgaaaggatttaccgttaatggcgaaacgggacggttctcggtttatttgaatcagtcatgccaggctaagtatgagacacgactgcattacgatgagattgtttcgggaacgataggttatgctcaaatcagggat

SEQ ID NO: 33971 - DNA, 985 bp, Arabidopsis thaliana columbia
  unsure (1)..(985): unsure at all n locations
agaagacaaaattgaatattgtgatttgtgaaatggcaatgtataagtgatgtgggatgttaaaattgatggatgatcaagatcgtcgtttgatggaagtggcccaactatttcttaacgggcttcttaatgggttttaaggttgcccacaaattgttgtgccacaatgtttgtcgttgtcgctaattaatggcttcgttaattaaacacttctaataattctccaatggagtttacgtgactctacagtctctcttctccattctccaatttctacaaagataatgtggattcaccaaaaattcagaggaaggacacgacaatggtgaattcgtacgttcctcttcgtttcaccattttcatctccttctccatcgcagcagcttcatccttcaaactccactccgcttctcattctccgtcgtcatttccgaaagccaccggcgacgatctactctccgttctcggacctccctccgccgcgtcgtgcctcaacccaatcgtctctcgagagatcaaatcgtgtcttaaattcctcgtcccattcaaatcggataaacctaaacccgaatttggacgatgctcgcctcgtactggactctgttccggaaaaattgacgccgttgagagacggagcaagtttgaagaggagaattctctaatctggtggccaccggaatcggttctagagcttgctcgtctcgctgttgactccggtggtgatcccggttcaattcagcgaactctcaatccgaaaatgatcccggttcgtcttcaatttaatggtttgatttggtttattgttcgttagattgaattggttaaaatttggttttataggttcctgatgttgaacgatcaagaaaagataaatgtcaacttactagaactccttatggtcgtcattttatagcagaggtaaaaaagaactattttgtgactgtntgacctatggtgagtgactgatgatgatgtatgacaggag

SEQ ID NO: 33972 - DNA, 497 bp, Arabidopsis thaliana columbia
agaccaatcgagagatttactttgtaatatgctgcaaaaggattgggttgactctcctagaccataataaactcaagtgttcatgctcatacaagcttgttttgctatttctgaccaaaaaaaaattaaacttgaagtgtaataaagctggaatcagtatgagttttgaccaaagaaaagaaagattctttagctaagtttagagctttacttggcaagctccatgctgattctttggctctatagaaaacagaacaaatctcttgtgttaaaagtttggtcaaagttgatttcagaaaaagtctctgcgacaatctccgagctttgtcaaattataagtttcttagcaaatgttgaggcaactgagataatatttgggaattttcccttctttaattaaagtttacaaagagtcaaggagttcaatacatacatgtatagaatataagtagataagtataagcacacaaatggttagtcatttgtataagtttaat

SEQ ID NO: 33973 - DNA, 667 bp, Arabidopsis thaliana columbia
caaactgcaggtttcgcatgggaatactctataatctcacactcatgcaaattcattttagtatgaacaattttacggtctgcatgaaatgaaatcgtcgagtttatcgagagattgcactttcttgagtacccagggttttgcaatcctctactgtgagtataaaggaaaaaaaaagcatggttgtctgtttaattacttatgaaatcttttaatataatctattatgcaattatataaaaatgatacggtcgtgacaagtcccattgcaaagttacgaagttttgttttgctggttttcgggaattggtcgggtacaattttctgtgttgatacgtatatacaccattatattttttccactaaaaaccgttttctttcttgtgaaaactgaagataaatcattttgtttcttcgcaatttttgttaaccgtgtaataaggggatgatcttatatgatgcgtgtcattttatttttttactatttatgttaatagtttacataatttgtggcctaacaaccttagcaaatcgaacatgcattaattccattcctgaatgctatagttaaaggtgaataacaggtaattgcttaaactgttagaaatgtgataattacatgaaatcataaattttaaaataacacgtactaactagctatttatag

SEQ ID NO: 33974 - DNA, 574 bp, Arabidopsis thaliana columbia
cctctgacgccagtgtgctctaaagttaatatactcaatatttaatattgtaagactggaggagcttttagctcttgtaagcagaataagcatgtctggttccttttatttagttagcaagcagtttaaaactaacttgtaagcagtggcgcaataactatacctgtatttctaaggcaacatcagcagctggctcaataagattattatccaaataggttgaaatgttctcaattgaaatgttcccggagtctggacactccattgttctaactgcttagcaaccaattgctaaatgctttgatatttgtgtaggtcaagtatcaacgaattggaaaacagaaattgaattacaagtgtagacaccagtatttaaagacctcgtgcgggacaaacttgcttaataatgatcttggcactcacgtgcagggggtgtaggccgcatgagctcaccgcttggctcatgcggcctgtgtacacggggacacaatggtgacattagattgctcgcttaactaatcatacatccaggcatgaggctacgggtttaggggctggcagaaggcgcgatggg

SEQ ID NO: 33975 - DNA, 793 bp, Arabidopsis thaliana columbia
tgtctccatccaaacgcaacgtgtcagtaatgaaatacaaatcagacacgtggggatgagtaacctaaaggattccgattcagcctccgccgtacgagctcgattctggtgaaagagtcaccgtcgatacaaaaatcgaaacatgaatctttgagttttcaccagaaataggacaatcgaaactccaaactgaaatatagcagctaaaggaattgtgtaatatgcttcgaaatcttcttcttctcttcaattataaactgcaaatattaataataattcctgtaaaaccaagcttcaaacaacatgagtcggataatcaacagtttaagcaacatagcacctaaatcgttatcaccaacacataattgctgaaattattgaagggaaaacaaagaccaaaaggtgagagtaactcatctatggccaaagtaaaactaaaatccgaccaacaccgctgatggagccgtatgctgtcgggaaaagagtcggtcatcttcactgaaaaagctggaggtgccgaacgagagcccgattaacacgggacgtaagagccgaacatcgctgctgtgacagtcagacgatttcggagtagagccgaccaatcaacgctaaacccgccattgatgtcggaccacatctgtgacatcactgaagagagacaagcgatttgtccaacacagtcacatgatatctttcagaggttttatcattaattcacgtcggcttacgcctaatcacatcagtcgtgtcggacatcttattgctgaaagacgttaacgatacagaatagctg

SEQ ID NO: 33976 - DNA, 648 bp, Arabidopsis thaliana columbia
tttcattttgtttttggtccattcatttttgaaaaataatcgtttcaagcatatatacctttctaatcccaacaaatatagacatcaattcatgaccatatggtccatgagtttcttactttcttgttgtcatgtcgtcattcttagacatctcttttattttattataagtggcagaaaagaaagaagaacatctctggttactactcttttttttttttttttacaatttataagaattatatgtgccattggttttcacgtggtcggtcttgtatgcaccagggtgcatgaatgggaaacgtggtcccgtgcggcacgggccgtgcgtccattatggcattatgtaaaactaaggatgatgatctataaacctcaaaaatcaagttctcttgtgcatgcaacaagtgtcaaatactttatgtgattttcacacgaactttcctgtccatataaagtagtacgaaatacaagagcaaaactaattatagagcaaaacatacatgtatggcattaatttcacaaccctgaagacatatatgcatatgtgtgtttgagttgatttacattttctcaagaattcacacgtataatattggatttgaattcgaaaaatgatgtgataaacgcgtctgacagaataaatgt

SEQ ID NO: 33977 - DNA, 594 bp, Arabidopsis thaliana columbia
tgcttcttcaaagacataaaaagtgaaactttatcactgtgtagttcatctggatatcttaaccgtgcaagtttctctatgcctctctttttctcttcttgattgattcacgcaccgtgtatcagaacttcacagccgtaaggttttggcgtgcggattaaacatggtgctaaacaaaattctaaaggcacatttggctgtatccatctgatcatgaaaagattaaattggtagtctttgcgccacagtttttttgttgtaatcaatccgtctttcgagttttcttcattacagttgcttctgctattgacctgcacactcttaagattgatgtttagatgttctgtttatacaatcaggattctgatcaattcatctgtatactaaccaaacttgttgtctctatgggtatgtcacatctaccggatgaggattatggcaaacactgaagaaaacaactcagtgacatctacctggatcttgtggatgcctcttccatttcccatcttgcaaaagctggaaatctttcagtgaagcgcaagaaatgcagatgattaaggaaatgcgacttgatgacagcaaaatcttgataca

SEQ ID NO: 33978 - DNA, 449 bp, Arabidopsis thaliana columbia
tgagaaaaagaaaaaatttcgatgagtagctttagccgcaaccattggggttagatgttttgtgattctcaaacatattgagggtaatgttgttattttccacttaaatcgcaatttaacgctgaattaaaacggcgtcaacaatttttagcagcagctacttgcgtttgccataatgtttggccgcatcgtcttgcgtccacctaacgaacatgcacatgcacatcgcggctgcgattgtcgcaagtagctgcggcgaccaaacgaacaacctaaacttaataaaacatagattagatacatttagttggtgaaacttaatagagaagcatgaaattttatggattaatatgtaattgcctaattaaataaagcaacttataaataggaagccattgatctcaagtatacctattttcactacactttctcgatacctaacttatata

SEQ ID NO: 33979 - DNA, 942 bp, Arabidopsis thaliana columbia
aaaattggcttctgagaaacctggaaattcaaaaggactgttgattatttccaaaaacccacaaatcctaaattacttcacacccttaaaaatcataacttttgagcacgatactaatcctcgacaaaatttaggaaactaatcagaatctaagcattgcccagtacggctaattgaacagaaaccaagatgcaagaaccattgtactcgaaattgagaaaattgtacctgagaggacgtaattgctgaagcaagggatcggaataagttgacgggatctgagaccttcgaagctgggcgtttcttactcttccgcttggccgtcatcgccgtaaggaaagaggagaaaatgcttgtttcggtgaggttctcgatttgagtgacttttggtgtgtggcgggaaagcacaaagcacgcgtcgtttttgtgtattcaaaacgacacgcagttattaagaaagaaggctatgtttgtttgtttggtccaaagactaagtcgctcctgaccaggttacagttaagttgactcttgagttcccgactttggattgaacaggagtgatagtgaactcaatcttgttttgggctcttcaaattgggcttgagcatcaaaattttgacaagcttacaaatatggactggacaatcgcgtaatatgacttttgatctttgtgcgtcatgatttcttatttttttgttttgcctggttgaaaatattttgagaggaacttggtgcttggtgggtcttgatagagacactatgtattgtcagttgtcactgtttctgtgtccaatttcaacacttggacgattcgtagcatacgccacgtttcaccgtcgaggggcctatactagctagcgatgattcaatggctacttgtcacgtgtacctctccatagccttgcaacatagctatcgtctttaatatctttggtctcattc

SEQ ID NO: 33980 - DNA, 853 bp, Arabidopsis thaliana columbia
ttcactggttagaaaattttaaaagtttattttttttccttcagttcttttctttgtaatttgttagtattaagtaatattactttactaataaaaccagaatattacattagatatatttttcaaaattttattttaaagtttgcaagtttgattccttatatagaggaataatgtttgaacatattatctcttatctacaaataattttaatagaaattttatgaatagaaaaatgttgaatttaatattttaaaatttagcatagcctgttttattttactttcgcatttttaggatgtatatgtcttttttattcataatttctttaattttcttagtcattaaattaaattctttgtatcttgtatatatgtgtggattaaaccaatcccaaaaacgcgtttacatattacttttaagtagcttaaaatctctcacaatcagtaaaatctctcaccttccttaaacaaaaatcaattttcaaaaaaccttcctccttttaacaaaaagtgcaacgtactagttttaaaagtcttttactcttttttacaacttttatgatttttcccaaagtgcaatgtactaaaaattaaacatttgtagatctctcgaagcgatccaccatcaaccatatatatacccacccaccctccattcttaaagcatctaacaacaaaaatctatcttcaaaaccctaattaattgatttacgatctcgcttatcaaaagatcgatcaacacaaaactggttaaaacctgacgcaagatttggttgaagctactttacaatggaaaagcaatggacttctggtcttttcagctgcatggaagacagtgaaactggtagaaa

SEQ ID NO: 33981 - DNA, 565 bp, Arabidopsis thaliana columbia
ggaactttatgtaaaaaaggagtttggtccagccgtgaaacctacttcaaaaagctttttaagattagctccaaaacaaaatgtgttgagagcagtgagtttagatgatgtttgagagcagcaccttgcgcaagaagccggtttcgagtttttgccttttgttatcttgggtttgaggcattgaatataagtgagatgagaacttgtcatcacactttcctaatgaccgctgacatctataaaacatcaaattagtttgagtctaagaaagcaaaaaggctgttgaagaggactgatgttaccttgtgagaagccgaacagagtaaatatcgagaggtttattctgtcttgccaacaaagaagcagtgggtctcgttaaagttgagttctttcgtaaataagttttggttttagacttatgcgtcgccttgggaacatctttaggagcttggttattatatataaaccctaaatgaccataacaaaccttgagttgcaagaaatcaaatcaaagacaagaatttgcaagataataccattgtattgatctgagacgggtttaggg

SEQ ID NO: 33982 - DNA, 307 bp, Arabidopsis thaliana columbia
ttccttttcttcgtgtctaattactacatgaacaaaacataaatcgtaaaacctactcgacctaacttataaataactgcttaaacgacataaatcgtagcggtttaagcgtctcgttaaaagtcaaaccgtccgactgctgaataaaattcaaccactgaggactagattcgtcatcgtttaagtttggtaaagtcaattcaaccacggaatttataatccggtgtggcatagatgtaagttggtgtcaagtttgagtatcttaaatgttgagttgcgtagtagtacccttgtgcgccgcgaattt

SEQ ID NO: 33983 - DNA, 529 bp, Arabidopsis thaliana columbia
aaaaaacaaaatcgtattgaggttaacaaacaacattattatttgcccttacgttgagtgtcgccaccatggatgtcaccgtagaacgtggctcgtgcgtcataccaattagtgtcgagtgccttgcttgggtcattaatccctggtgcttccgctacatcaggtgcttcgactgcattaccaatcatcgctccatgaccgtaactcatgggcacgacccatatcaccattattatcatcaaaaactctacatatatcattttttctaagagtttcatgattatcatccctcttaaatgatattttattactaagctttgattaatgatgaattttgatgggagccatatgggtgggcatatatatcacgtagaaacatactatattagtaattgtattcaagtttatttagtcaatatgcatcctgatcattaacattatcattatgtaatccagcagaaaaagacaaaattaccatatgtgtatttgaataacataggtttgacaaacgttgagtgttgaatattga

SEQ ID NO: 33984 - DNA, 585 bp, Arabidopsis thaliana columbia
ttccgaaagcccacaagtactgaacgaagaaacctagaccatcccacttctcaccttcaaaaggatctggttcaagtccaggaagatccttaatggcaaatttcggcgcatctttcggatcacctctgaatcgagtattcaccaccgttctatctccatcttcgtcgttgataacgatctgagacggcgggttctcgccgtcaaaaccttcgtttccctcttcctgctgttccttagtcgttgtaggaacgagagtccgacgcttcttgctgtcgaaacgaccggtctgtgtggaaggttttttggcggcagagacaacgtgaagaccggttcttgatggattagggaagtttacgagtcggaaggtggagaaagggttacgagaagaatcggtgaggtcgttgcagcggattctagctcctccgccaccgctgctcacggtgagagccatttcctttgttgtgtggatatgtgagagagggaagcgacaccagattcgaagaagataaggaaaacaaaacattcgggtattattaaacttgacgcgatatgacccgacccgacaaattgacccgatttgtttac

SEQ ID NO: 33985 - DNA, 477 bp, Arabidopsis thaliana columbia
agtaactggccgccagtgtgctctaaaggttgggtctgtggggcgctacgacaattaaactacgacgaaaaataccgggctgtaatttattcttttcattattttgtacttgttttgcacttgcttaactttattttgtacgtgtttttaaacttgactttgtacttgttttgtacttcttttgtacttggttcattagttttacatcaggggtcgagtttcgtaaatggaatctatagtaggtggactatgtgaagatagttgactgtacactatgctgttggctggtgaacccttctctccgagtcgatcaaccacgacccttgccctcctccagacaggctcactgtcgtgccccgcagatctggtaatacgagcaccgtctcgccgtggttgcggtagttgacctcgcttccgatcggccttcgctgcacctgcacgttttgcccgtggcgtggtcctggcgttcccggcccg

SEQ ID NO: 33986 - DNA, 556 bp, Arabidopsis thaliana columbia
tcactcatgagattacagcactggaatcaacgagtcaagagtcgaaacaagaatgacaaacctcactatcgtattggcaaatctgggtttgattaggctagcatataccttcactgtgaacaacaagaacaacacacacacacacacagaagaagaagttttagataaagaacctttgatagactaaaaaaccaaacttagagattgaatcataccagtgggctgatggtcaggtgacaatgaaggcttttcaggtatatggataatttcccatgcatctgaatccataattttattttatctattcttgagcctgattaacaccattagctcaaactataagaattagggagaaaacagagacgaaaaactccacctttcgcagtgaagtttgaataagagaactcgcaaaaattcacactttcaatttctagattcaataagaagagtggtgagtaaaacccagttaaggcttttctaagcattcttattgaacagcattatcgaattcactagttaaatcatatttcaaaccaagtgctcacacacagatgca

SEQ ID NO: 33987 - DNA, 627 bp, Arabidopsis thaliana columbia
cacactttttcaagtggacaaagtcaacacttcttccaaccacccagttttcgtctcaacttcgtctccctacaaaagagataatagtgtacataggttctcgtatctgcatattctggaacatattcaaacaaagcgttcaaaatatgcagttatggaataaacgtgaataccactgatgtgacaacacaattttaggttaaagtacatactaatgttaaacttgcataattttcagtgttgcaaaaccaatcaagatcatatgctcatgaaagtactatttgtgatacagattgatctactgctctgaatttgaacccttcacacagactcttccatcgtaatatacaatctaccaatataacttgtaagaaaaggttgaatgtttctcacctttatcattttgagactataaggtactgtaacacctgcacagagttgcccgcatgcactgggcatatccagctccacttttatgaaatgaaaggaaggaaaggaatccaactttgaaggaaaagaatatctgggcgaggcatttggacctccatattctacaatgacgctgaaattctccacaggaaaagatggagaaatttgccttagatgaaaaagaaaggactagttagc

SEQ ID NO: 33988 - DNA, 550 bp, Arabidopsis thaliana columbia
actctatagcaactagagtatttggagtttacatgttcaagtgaagcttctagttcaagaagaggctttgaagggaataaagaagaagtcacaagtgtggatgttaacacgtgcgaacgtttgttagattcagctcatcacttaatacaagagcagagaggtgagcttaatgatggataaattcttattctcaattttgggttcttggtgagagttagagagagagaagtgagagagagtgattctctgggttttgctccttgttctttatcttcttcttcatcttcttagagagagatttgtagacgagagttggtgagagatctccattgaagagcaccattgtaatctcttaactttggatggtggattcggcttgtgaggagcaaatcctcaccgagacgtacctcaacgttgtgatttgcaacagagggaactttgtaaatacagtgttcttagtttctgtttcagatatgtgaaaacaggtctgggttgttcataatatagatgatcataggccaccttaaattatgtttcatgttttagatat

SEQ ID NO: 33989 - DNA, 494 bp, Arabidopsis thaliana columbia
tcttgtgtggatatatttagacaaaattaaacaattatgattagtatttgaaataaacaatgtctagctaaaattatcatgtaaggcctgcgtgtttgaatagtaaatagatgtagttagacaaacaataccaattctctaataatgtataattgacaaaagagtatattttgaatgtaatatacatatacagatatacttttctagtgggatattcaagtatccggaaatcgaatgcctctgaggtcatgcttttgctaaatattcttcccgtggacattttcttacataaaatctatcagttgttttgatgtttgtaaaatctataatttcgttctaaaattcattgatagtctcctcaatcatgaaagtttagttccaaacaataaataaaatttgacaaaaaatctatatgataataactcaatcgaagacttgaagtactgaaaatagatgatgtcagtaatatcgcatagatatttttaaaaaaagag

SEQ ID NO: 33990 - DNA, 406 bp, Arabidopsis thaliana columbia
actctagatttatgtgttacaacacaattcattgctattcctaactagttatgagtatacttggttagcatgtctgcactttttttttttccttatatgagcatatgaatgggaaggcttgaactttctttgaataattgattgtctaggttcaactttgattgttgaggcttcgtttctttttcgcgttaaagtcgccagtagagatttttgatttgttgtttgaacatctttctctcatgaaggtgcatactgtgatttttttcctcattgaaattcctgttgctagctatctatttttcctcagttgcatgtgctatttcgttttccttagctagtcttttgtttcctatggtttatgtttggacgaagtgcgctgatattgcaactttaagcaagcaatgat

SEQ ID NO: 33991 - DNA, 472 bp, Arabidopsis thaliana columbia
tggctggctgctttctctttgatagttgttgtatccctagcagaaaaatatgactaatttattcttacttgttctgtaattgcaaaaactgaagagctagagagaatataggaaataatattttacaagtcaatagattttagtcaaagttcaaagcatagttgttttagtctgaatttcatcactttaatataagattttttacattaaaaacaaaaaagtataggattgaaaatatttacccactgtttactcatgtaattgtaacaacgaccgtcatgtttagaagctctacttatatttcacttgaaaaagagagacaaaaatggcaaaaagcgtaacaaccactatagtaattagtgttgacgaaatgttaattaaaccttctatattaagaagtttgggtttttagtactgcatactgtgatttattgacagatttgcagattaatgtagccaaatatgcatgaga

SEQ ID NO: 33992 - DNA, 600 bp, Arabidopsis thaliana columbia
aagtttggctttggcgggatagattgatgagattgttgaggttgttgtacagcttgtggctcaactttcggagtctaatagaaacagatttttgtaaaatttaagatgcttgaaatgaaatctattaacaaaatgacttaagaggacgcaagtacataccacttgaggaggctgaaccattccgagcatgatttgtgcctggcatttcaacaaacatagcatcatcatcaccatatacaaattctgaaatctatttgtaaatagaggcataaacctaaagattgttcatatctggaaactaacacaaaaccctaattgttaacctacctgcttcttcaacaatactaaacccaaactagtccaatcaatttactcaagtaagaagctccaaatcagaattcctcattgcttataagaccacacggattgcagatttagaagatggaaaagattagcgaagtgaagaagaacctggaaaagagccttcgtcaaaagagggtccgaatcagaatctcctcgcttgttgatggttttgatcaacaacgtctgcacaattagattcgactgagtaaaaaaacagagatcgaaaaaaagaagaag

SEQ ID NO: 33993 - DNA, 487 bp, Arabidopsis thaliana columbia
tctcttgaagctctgtaacggcttcgaagagctgagtctggagggaattgaattgagagaggatctccttcgtggatgaaggactagggttttcaagcggcggcggaggtggtaacgagtgtgaggagaggaacgaagggagagagccacggaaagctgagagccagatagctcgattgggagagacgtcgaagagcttagatgtcaaaaccgccatctgctggagaagagcttgagctcgcggtaatggaggaaggagcgatagaaggcggaggatgaaacagccgccgaagctgaggctgaggaagcggcggcgacggtggaggaaggaagtagattaggctgttgttggatctgttggtgctgagattgggaagatgaagaagaggttggatggccatgacgagtaggcgtcggattttgtacggaaggagagccaggacctgttaaccctaatctcgccggagattgtacgatctgatgctgt

SEQ ID NO: 33994 - DNA, 362 bp, Arabidopsis thaliana columbia
ttaaaagcattgattcattaagtatccaaaaattttgattgaatatatacactcactcccgcatccttttccaaataattcagagaaaaggactatttaacgagtagtaaaattcttattaatcgaatatgtaagcgtagatcagacagacatttatctggtatcatatgatatactaatcctcgttggatcctaaaacataggcacgcagtacataagtagaaactacaaatacatccctaaacacagtaagaaatgcctaacatagtgaactttgtaacaagatgaatattcgtagtgccttactattctacgagcgctcagatgagcaaccgaagttagtttctttttcgggtatgatg

SEQ ID NO: 33995 - DNA, 684 bp, Arabidopsis thaliana columbia
tattaatggttaacgctaaattagtttgatatcaaacttataagaaatacaaagaaaacaaacaaattctatcagtttcaaacaaatagagaaatctgagcaaaaagatcgaataattgtaatttatccgtggaagaagatgtgattttaaagtgtaaatttttacgaatatgaaggataaaatgtagggatgtgttcaaatcatcattaaatcagtttttttttttttagtgtggtagtgacgtaccaaacaaaaccaaaaagcggtctatttccttctggtttgaaacgatttgggtcaaaattgggtttcgagtttgaataagatatgagtgaataatatactaactttagccaaagacaaaaaaaaaaaaggaaaattaaaggcagaaaaatgaaaatgacatccaatgagctgagcctaaaccaaacatagccagagataagccttacaaaatgtacaacagatataaaatcccaattcccaactctaaaccaagacgtggttcacgacccaaaccgaatctcacgggaaaaagtgggacatatacacatatatacacggtaagcttcgcgcctccgtcaaatcacgtgttgtttctctcggctttccgttaaagtaacgtccaacccgccgttaatcccgtggtctgtgggaatcacccagagcagagagccctgaga

SEQ ID NO: 33996 - DNA, 510 bp, Arabidopsis thaliana columbia
ttctctgaagaactatacctcccgagaatatgctttatgccacttctgaaatacctactaaagctcttcctttgtgtctgattctcagcgtccatgttgcgaatatcgccttcaaaacctagatgcttccacgatttgtttatgtctacctgatgtggaatattttgtgcagtcatcctccaggttcatgtgattccaatcaccaccaaacttgtgcattttaagaagcatggttctgcgttccaacaacaccgcttcatcatcttttgacgtaggaaataacttttcacttgatagatcaggtacaggtataccaacagtgcttgtcactatgtgaagtaaattccttctataactaaatggtagtttgcgaaatggtaactgaacccccgtctctaccaacaacacagtctcatcaatctcattgcacaacttcttctctcgcctcgtctcaacctcaagtagaagcacattacaactcttctcaatgcccctaacgagaccagggtg

SEQ ID NO: 33997 - DNA, 513 bp, Arabidopsis thaliana columbia
tttgaaatctacacttgaacaagacgatgaaaaaggaagacacttgaacaaaacacaaagcaactcacttcgctttctttggcaagtacgattttggcagtaacaaatccaataagttcctcagaatgaccatcagggcgactccgatcaacagcagcccaagagacaatatcacctccgttgacaacattctgaaaaaactcagactcatacctgaacaaaatcaaatgctttgataagacacttccaaaaaacggaaagtcaaatcccaaaaccagatcacatataaattctttccaaaacaaaggtatttatttacctgattgggaatatgtcacgatggatttgctccaaacgttctaaatcagaagggtttattggtctgaagcaaatagttggacgacgagcgattttgggttccccattgatgaattctcacaaatccacggggaaaacgcgacattgatcgagatgattaagactcaaacaacctcaaattctcaatttttgata

SEQ ID NO: 33998 - DNA, 488 bp, Arabidopsis thaliana columbia
  unsure (1)..(488): unsure at all n locations
ctcagcaagccaatggaaacagctctgaagaatgtcctgctgacttcagctttgggtaaggttttagttctcttaaacaattcagccatcaaagcatgtagtgaaaattccaccaaaggcttgggagtcgatgttgctgcgatggcatcagcaagcgaacgtacaagttcatcgaagtcaaagctgctaagagcttcgctaagagcttcttccattttcttctttctagctttcaagaggaagaaagaaccaagggagagggagtgacgacttaggtttctgagagcagttatatacaacatgaagcaggagccaattagggttacaaagggttaaaaacgtaattagtgttaagtgatagactcataagtcataaacattagtgttattaattaggagaattttggatagacganaaaaattatatatactatctgtaacatactaacataagcttgtgtgtcactgttcttcttcttgttttgttg

SEQ ID NO: 33999 - DNA, 416 bp, Arabidopsis thaliana columbia
cacatggataacagatatagtctcccactagcaacattctcacttcccaaattttgaaattcgatttttcaatgcagcaacaaatttgctatatcaggaaacaagaaactccaatctcagtaaaacacaaaagaaatgtcgattcaaatgcattaccagttgttgtagatgatgatacagtggtctggaggagtaggatggtctcaggagactctgcaagtaacctataatcaccagcaaaaaaactcaactcaaacacacaattcacaaacacgatgaccagataacacatgccctttgaaagacccactaagaaacacactagatttcggaaatgatccaaaagtcaaccttgtgagaaaggggattctaaattccgagtagaagaagagtaatctgctgtagaaatgtgactg

SEQ ID NO: 34000 - DNA, 217 bp, Arabidopsis thaliana columbia
atcggataccggaaagacgaatcaccgaacggccggcccacgtgataagcgccggcaaagtgtgcagccgacaagtccggcggacggtagagttacctcttccagactcatattcacaagactcggactgagactactgaatcatcgaggagacaagtgctgcattgcgtcggctgaccatcgatcgacgcgacgagacggtgacaacagtaataaa

SEQ ID NO: 34001 - DNA, 618 bp, Arabidopsis thaliana columbia
tgaccgccacttctaagaacagaggcaccgatctcggaacatcgagcgtcgtcagcagccacaacaccattctcagattcaaccacgtcactgatggttccaaggctaagactatgatcatcatcaatagcttgtcttgataagaaaactgttgtaatgttgtcactaaagctataataacctaagaaatttcagaacacattaatcagaaatatttatttccaaaacaagtctttttcactagtgaaaaaagatgttgtattgtttcattaactagaagtaaatgtttcctcgattattggagtaaaacaaaaaacagacctgaagttgctaagagaatcagaagcagtaaaagagaaatctttagatttttgctctgtttcttcttctctgcgactgtttcatggtcgatggccagaagaggatcggcgatgattgcgtcacgcatcttcaatctctatctccttttccctttcgatctagagagatagagaaaaagagtcaatgaagtaaaaaaaaaaaaaagattcttttaagaaaagagataagtgtattcttgattggtctctgttttatagatacttttctaagttggtggttggaagtctgattcaaaaa

SEQ ID NO: 34002 - DNA, 593 bp, Arabidopsis thaliana columbia
gggtaccgaaagaaagatatctgaggcaattttccaaagattttctattgaagtattttttatataaggtgagccgaggcttggtatatctcgtctcgtgttacatacatctttacttttttcattttctcacctctaacttcaccgagcttgtcaacgatctcatatccttggtgtggaacaaactagtccccatcatacaatttgagaattttgtgacgacaatcatatttcctagtgataatcccctagctaaaaactcatgtataaagtgtttcataaacaaaagttgtttctcattaatggatttctagactacgactgaagtgtgcaaaaatcattttccatcactgtataaggtcgcttttcgtgatgggattatttatatatgaattggtagtacttatggggctaaggtaggccaagcatattcactaaaacttttggacttcaaatacgagtttcctacgttttatgttatctatcatctttttattctttattgagttcgtgttctacttcagacactttttttttcactcaaggaagaaaagagtgaagaaagattcttaaataagaactctaagatattt

SEQ ID NO: 34003 - DNA, 408 bp, Arabidopsis thaliana columbia
ctgtattgaacaagacgcgcaattcacaatgattctttgtcttcactttaagggttcataatttggaaatctggcccatcttcataattaattaagattagtccacaataacaataatagcgacaacgaatactaacaataatgactctttttccacttttgtttaatcccactcaaatcatatcgtatcgagaaaaaaatcatagctggccagattcttcccctctaccacattcattgaatatcacattcactttttgattggacacaaacaaacgtaaattaaaagtcaaaactcaggttcacacaatctgattctctgtcccacacatgaatagtcttaaaggtgtaatatctcagatctcagaggatgattccatggtcgtgcaagagatgtgcactttgtca

SEQ ID NO: 34004 - DNA, 334 bp, Arabidopsis thaliana columbia
ataagagggtattcacatggagtatctcttgacaattgtctttttttttagctcgtcaatgattgggtcgagacaaaatactacatattaccacggccctatatgattgaactcgaatagaaaatgacgactttcaggccataagccactttaccatgttttcttgacctggttttagcaaaattagagtcagttcttacagaatagccttttcggacgaagatgtccctacaatcgaacgaatgtacagttagttaggagattttaggtgcagaaatcttgtgagctacagagtccgtgttttgttgaatttgagcggtgctacattgttgag

SEQ ID NO: 34005 - DNA, 561 bp, Arabidopsis thaliana columbia
  unsure (1)..(561): unsure at all n locations
caaaaaagagagttgtctattcggttaagacaatagactcatgtgctaacctgaattagctggcaaattagagaaaatttggaaataaatccaaactattgcaatgaacttttttgtataccctcccaagaaccgtcaaaaactcaaaattatattgataaccgacttgatcaataaacggctctatccaatgattaacttgcgtccttatttttctaaaatgcttgtttccaagtttttgatgttgaggcaataacttccaataaactgtgtggcaataactaagtaatctttcatatctctaaattgcttgtttccaagttatgtgcctcagtaagtttgaaatggcgaatgtgatcttcacctaacattttcctcgaccaacacaaattatgatatcaaaagatttgatacgaccgaccatcgatgcttgcttgcttatgtcttagctcttaagtcatgccatgaacactcaagaatcatgatccatgcatgaaaagtccacgtgtcataccacgtccgtagaagatanagctaagtaaattgtacgtggcagctgtt

SEQ ID NO: 34006 - DNA, 596 bp, Arabidopsis thaliana columbia
ccccgttttaacaaaatgaaatggatcccagattgtactatgccacatcatataagatactagatttgtggaatttcctgtcaagctttgtcctgaaagaattaaaataatttcacttctatttcatcaaaatctttacatttccatttattctacaacctgaaacctcgagttgcttctaggacttaatgttatgcaagagtagataccttgtgcgttaaccttgtttccttgcttgcagcatcattcgtgacttctagatgatcagcaaagaacaaaatttgggacattaaaacgacgtacagttctgattgtttaagaaagaacggcaatacttccgtattcattaagatattggaccataattgggtttattaaagcccatttgtgtggaggccatcagataattgagattgtgtcatgatttttcaatcgtcttttctccactttcattgtattctgcaatctttttttcaaaacataatttcataggtaagagttttcaagctttaacacatgatgttgtagtttaaatgcaacaaaagaatataaaattattaatttatttattttatttacgaaacacgtatatattt

SEQ ID NO: 34007 - DNA, 458 bp, Arabidopsis thaliana columbia
ggatcccctgtggctttagtgtctttacagctcttctctccgcgtgggcattgacgttctcgataggaggagaacaactgttcggccctctttacgataagctggttatgtacaatgttgctgatcgtctcggcttgtctggtttggcttagctcccaccgccttgtctctctctctctctatctcgtttatctttgacatagtagaaacaggaagatctcatggccttgacttttgccaattccgttctcatgtgtttctatgcaatcataagttgttttaacaaaaagttgaggagatactgctgtgaatattaaactgcttggatcattcatcaatcaatgaagtaattagttatcaagagttgtttaatttctcttgttatatcagccaaaatggtgctctgtttctaaatgttggattttggcaaagttggaactgtgaagatatggatgtga

SEQ ID NO: 34008 - DNA, 530 bp, Arabidopsis thaliana columbia
gctaaggtttggtgttaatggctttgagaagtcagtgtgtgtattcaaagattactgtaataatattcacatggtcaaaaccagttttactgctcatattttgaataatgtagctctcatcaactcgtttaatatactatgacaaattaatttttaatacttttatcctatctatatgctgatgcttagagacgatcaatcttaattattggttgtcatattgatcaataatatataaagtgcactttactctgtttatataaattcatatttactttatagttgtgagttgtaaaaataacgaaaaaatggagcttagcaacttattatgtttataacgaaacaatagatctataaaccaaaaaacttgaaagcatattaatggataaccgaaaaaaaaggataaccgaattcagtctatatactcgacgtaagcaaattagaattttggtttcattaattaggtctagacaaaaaggagatgacgtaggacgagtctcaagaaagaaaacaataaaggtttgttgaat

SEQ ID NO: 34009 - DNA, 522 bp, Arabidopsis thaliana columbia
gctcttctgttttcttcattaaattaaacgagtccaagtttatttgataaattgttagctcaatcgattgtggaattcactaccgttggagaaaaaaaaatttattttgtagactcgcaaaatcatgagaaatctttgagtggtgctctagttttgtcgtggtcaaaatcatccactttgtgtaaaagaacaaatccaaatttgatttgttttctttgctaactacaaaacaattctagtggcagccctcaagggttatacaaggtcacttgttccaaaccatgaactcataaatttatcattttatcacatccaaatccaaattattgagaagattaggtaagtaggagtcgctagtgaccaaaaccaaagatatattttattgaatcactaaatcacaatacctttgtaaattaagttatctgtcatactactttgttattgaataatgtaagttgcaaaaataaagaaattcatgtatagtttggtcgtataatcaatttgttgagaattttactattt

SEQ ID NO: 34010 - DNA, 537 bp, Arabidopsis thaliana columbia
tacgaactaaacataaagtcaaagcgcgttgaatggaaatgttcgtcggctactaggcccagtactacatttatagtagccatatctactacctatgcttcattatcttatatatgtgtcttgtaatggagttttgagagagtcgagcacttaagtaatggctacaaagacatcaaatttaggtcatcttcttctgtctttgtttattctgctcttgtttatcttatctcaagttggagtcgcccaggccaaacgtctccaacgtaactatttaacactacctctcttacttttgtattgagtttgtgtgtctattaaaaacgagctacattccacatccacatatagtaatactgttataatttggtttggagttttagtttggttttattctcaacatctaaggttgcagaacacataatgtttttccatggtatcacgttatttttatgtggacatctattttatcgaatataattatttatcttttatctaagtttgatttattgtattagtattgatagtgttaaatagtat

SEQ ID NO: 34011 - DNA, 584 bp, Arabidopsis thaliana columbia
tattttctccagagtaaccgtaacctcaatttccgttagaacttttttcattcaattcagatcccgttatttgctcgcttgaattactctatatactccattctaagtaacaaatttattgcccccgcccatagtcatcaatctgcattcattcacagagatttaatcacttcaatatctttaaaaaatctattttcggaaacaaatttatgtctacaaaagaattataatcaggcatataccaaaattctaacaaatccaaagatttttgccatgatttgatgcgggtagaatattgtttgcgtgtagagagctagggattcttaacctaagtaatactctataaatactcttgtgtctaacgtctcataacatcatcatctacaactcgctattgctaatccataatacaccaattcataattcttctgcattcaccatagaaaccctaccactttcttataccactatatatacttctcatacatagagactttcgtcaccaaacttgcaaactacttattctatatcaaagttaaactgctctaatggttgattctttgcctacctagtcgaacagcaag

SEQ ID NO: 34012 - DNA, 418 bp, Arabidopsis thaliana columbia
attatattatcaatctattttttgtagtgcatatttttgttctaaattattttttaagttttgctgtaattatgcttaatttattattagactttaaacattgattttttgtatatgtataatatcttttaaaaatattagagcatatttgacgcctatgacatctaaattagcacggctctagactccagtagctaaataggcatatgcaccggatcatagtatcagctctgctcttatgttacctcatgtttcttcttccgctcagtgaatactactacagatcgcgaggcggattatagcggattcagccgatacgttccctctcttgtaatatgtatgtcggccatcctgtggtttcaagggtctagggagcagcctcagtagtctctacgaatagattagtgtaacctgcgga

SEQ ID NO: 34013 - DNA, 151 bp, Arabidopsis thaliana columbia
atttgaccgcttttacctatatttgtggcctaatgaatgataatgatattgtttgtttttaaccgtaacaagaacaaaaaattgtggttttggatacattagagtacaagttttggttgtggtcactattgggtctaataatatcttgggg

SEQ ID NO: 34014 - DNA, 281 bp, Arabidopsis thaliana columbia
aaaaaaaaggaactccagtaaagaaagccgctgcatgcatgtaaaaaaaacatttgtaagaaaaagtattactgacattcagcagcattggataagatacaaataaaaagggagtcgtgcaagaatcttacccgttgctcgagagcagaatcttcagagtccagtttcaaagattccagcagtctcatgccttccttgaacccatctgtcgctgcaacttcattttgtagagtcctgtctatatccgcaactatggctaaggaaacagccacatccagaat

SEQ ID NO: 34015 - DNA, 503 bp, Arabidopsis thaliana columbia
aaatattatttgaaatttctctgtttgaaagatcttataagacagtttaaggctttacgataaatatttaatttatacaagcaggaatgtgtgtatcttgttattcagagtgtagagaccatacataatttctaaagaagttacaaaggcttttgcggttatcttcacatatttggtgacgacgtccagactccattaccatctgtgggacagaatgcgattttggggcatttatatttctccaacagtgtcatttttggaaacagagtttgcaaatctctccactcaaccttgaattcatgcagatacttcaaacgcaagatctcaacgtcccatttatcttctgtgattcgactctcatcaccgattcggctaagttttcctcctttgatggagagctttttaagatttttcagatctttgggatttaaccaactcggaggttttgtttcagggaaacattctagctccaacttcttcaaattagaaggaagtgtataggt

SEQ ID NO: 34016 - DNA, 930 bp, Arabidopsis thaliana columbia
cgaatctgatttcggtgaaacagagttaatgttgtacttgtacagtagctgcattgcattatcatagaatagagattgcaaaataaaagtagagaaaccaaccccttcgttgtattcttcattttttttctttgttagcttctcaggcttaatatagaattagccttagcccattgatttcttaatattggtcttgttcatgtgaaactgcaaaaccttttagagttgtagacgggtgcttagtagttttacatgctccatttccggtttaccaaaaaggtaaccagatcgaaactaaaacatatttccgttcatcaaaaatcttgacgaaaacatattggttcggttgtggtttgagagatttctttttggttcaaatcggtttctatgtccaatcctttgatatcactcgagatagtttcttacaaatgatatcatatataactttgaattcacctcaagatggtattattttccttaaaaaagaaatccatcaaaattgtgcatctccaaagcaatgagcaatgctgaatctccaagctaagttaaatgaaaaaaaggttcctcttttaacaaactttcccacaccaacatcctcactcaataatctcaacttgttttctcttcctctagtaaaaaaaaaaatgtctttcaagaagatgatgaagtatatactctaaaggatattcaaacccatttttatggcatgcggttgcggctctaccgttccaccttcctctgacagccactacacaccgggaccaccggtttctcccacggtgttaggcagcccatggcgtaagatcgatgagagcgtcgcgatggctagaggatcaatcaatgcgttcgaagattagaagaagtcgatgaatcagatgatcgatgagagatatgtcgagacggaaagtgaacttaaggagcttctaaggt

SEQ ID NO: 34017 - DNA, 589 bp, Arabidopsis thaliana columbia
tgaagcatccctaagatcggagaggtattgagagctgcagttttttaacaccgtgagcttacactgattacttcaagacccaagtaagattgcataatatgtcaataaagttgtcatcgtggaaacttgatatatatggaactttacctagacattctttaacacaaactctgtttctgctagctaagcattcgttcccaaaggtttccaggaggttgacttgttgccagttgccttaaccttgattaggttgaaaatttgggtacgagtaatgttacagaaccacacgtgggaggtcacacgtgcgaaatcaaatggaagaaggaattaataagaggctgacgcgtgtcgactgaggagtggcagactcaaacatgccgttacgccttctatatgagcaatattcagctcatctttctcttttatcaattaatctgtaaaatctagaatctctgagaacttttctaagctagatatctcacatcgagactagcagatccttgggtgttttatgaacatcgattgctcattgtaatcagggatttattcttaatcggaattgatttacagtgaacggaaagttatttgt

SEQ ID NO: 34018 - DNA, 527 bp, Arabidopsis thaliana columbia
ggtatttttagttgtacgatcttctttttttttattttgccggtctctgaaaaaaaacaggaatggaagacgaaactcaagtgatggtggacctctagatgctgagggttaaaaagtcctctgaaaattgcaacactctcttttttctaaaaacaaaataattcttggttttgacaatgacatgtccctttttttattacaaaaaaatctatcacacttactttgaatgtaaattcattttcatcatctcttggaagtttacattagaatcctcactaaataagatttaagacacaagcgatgaaactacaaaactcaaatagaacatcttaatattgttaaatgattacagtacagaagttgcaaggttaaaacacctttaccacacacaaaagtaacaaaaaaaaacaaaattcaataacctttctaagataatcgaagatgctatataaacaacattgaacttttcaaatgctaaattaaaaactgatgactacaactaaaacaacatgaattacacaaccatg

SEQ ID NO: 34019 - DNA, 519 bp, Arabidopsis thaliana columbia
cgtgcagccttcacacttttgatataaataccatgtatcgataatctatggttaactttacattttactttatatatgtttagacctttgatccacaaaaatttgcaaaattcaccaacgattaaacaatatactcttttaactttaatgcttcgagaatccgttggattgtcggctcaccggaactcttaattctttccagtacatggcaaaagtatcatcaacatatggcttttgttgttcctttaaagcaagttgctataaaaaatcgacaaaagaatgtgaagatatcttaaacttattgataatttgcaagagaatctcatatattcacccctcctgaacgatcactacttttcaaacaagcaacttagcacgtcttcaaaattatttgtaagtgcacacacgaacccaaatggagaagataatttaattattacacaaaacgatcttatataaagggttacattgttgaactatatcataattaacaaccagaaaagcaacaccaaaaggaga

SEQ ID NO: 34020 - DNA, 533 bp, Arabidopsis thaliana columbia
  unsure (1)..(533): unsure at all n locations
aactctatttaagaggtgtgattaacgctttaaacgcggtattattatcgagtacatgcagtacataaatacaaaatatatcgaaaaacaaaaaaaaatattgtttaaagatgtcttaatattaaactagtactcactaataaaactcaataaacgtaaatatatagtgttattaataagtcaaacaaatgtattcggaaaaaaagcataaatgttctaaacattctttttaacaaaaagaattaaaatacatagcgaacatgcattaattagtctaaagatggctattatgattaagttgttattcataaggcngnaccattttatacagcgtcgattggttgttggctgctaaattcccttttaatatttttaccgcatgatattttgccgttgcatctcttttctcatcttgtcgtttgatttgccttgtgatcgtgccttctatctgctctgccttttccttnacttcttcttcttttccacacgcctattgatatttgtttccccaatttgggtatccttttgttgtt

SEQ ID NO: 34021 - DNA, 638 bp, Arabidopsis thaliana columbia
ccccacaaataaaagagccctcaaaaatggaattctacaaagcttgtgtacttaatcgcatgtcggagttcctttcgcagcaagaagctctgttggccattttgcatgatctaaatgatctggtcgtcgctgatgtttcgcttcagtgtgcaatatctacaaccccttttgttcttgcagcgaatggattatggcaacaaccttccaggtttgtctatcttattaccattttcctattctgatacgttaaatatgttaaatcaaagactaagctacagctgcaacttgatattagctatttttgtttgcatttacacgcttaatacagcaacctgatattagctatctttgttggcatttacacactttatagagaacctgtatatctctatagttgtcttcatatttttgtcctattttcaggctttatgatcctcgtgttcctgcgctacaggagcttcttcacaaagaagtctactttccttctgagaaattctcagattctaagatcctggatgctttggttggtcttggacttagaacaactctggattgttctacctatctggatgctgctagaagtgtgtcaatgttacatgacttgggagatttagaagcacgagatatggaagaagatt

SEQ ID NO: 34022 - DNA, 789 bp, Arabidopsis thaliana columbia
cttgaaagaagacattacctctctctacgtaactattcaaattgttgaacaagtaatcttccaatccgtatcgaaacgacttagtcgtggtctatctgatgaagtaactatgttttatattttaatgtatatgatttcatttccgtatttccaacttccaagtattaaaataagatcttctcgaactatctttagtctcagctctgaaagtaaagtacctcgtgcttcaatgttcaaatgatattactttttttgacgctcaaatgattaactgtggaaactgttatctgaaattttaatttgatacattgttcttatctacttgattcatatattagtacaaatttttgttttggtccgacaacaatactacttgagaaaaaaaaaacgttgtatttccccaaaaaaaaaacaatcattaattggtaacaaatttgtttgttatatagttcctctctttttttagtcgttcatcgtattcatcgagaaataaacacatgaattcagaactagataatacattccattaccgctataaaataatgttgtagtctctatcttccagttccatgtattctttggtcgacgaacaagactttttttttttttaagaacaagaccaatctccagttcgttctttgtttgacttttgaagagtataaaataaattaagtaaaacaatctcctttttccgttggattgtcgatttaaatatcttacagaaaaagacaaacaaaattaaagaattacgtaaaatctattgcgtgtttatgaacaatgcacaaaaca

SEQ ID NO: 34023 - DNA, 603 bp, Arabidopsis thaliana columbia
cgtctctgcaattgaatcttccggtagcgaagatggcgacgtctgcgaggatttgttgcggaggaggaagtgcatgcgccgttcgttgtgatcgtcgcacgttaaatttgaattctcgatcgtcatgtgttgttccagtgacgaatcgacggaatatgtgtgcgatcgggaagatttcgatgtcgatggaggatttgtcaccaccgtctgcggcggtgaagattgaaaggatcggtggaaggaaacgcggtggatctgttgtgtcgagggagaagctagatgtgtggttgagagattcggtggttgagatcgtgaagaatcttagagagtcgccgttattgatgcatttatacgcggaggctaatggtggtttgacgacgacggcaacgaatccaaaggcggaggattggacagagatggaaggaaagtggggtagaggagaagagaggacgccggaaggagttatattggtggagaagctcgcagacggtgacatagcagatgatgatgatcacgatggtggcgcgtgtggggaagatacaacgcgtgggggattgtggcgcaaggaagaggatcggatactgggccggtttgttactattg

SEQ ID NO: 34024 - DNA, 524 bp, Arabidopsis thaliana columbia
tcattttttctaaacctatattggtgtactccatattcttctcccacgctatattaatctagctactaatatttattgaagcagttttaagtaaacaggttcatggttacactgtctgaactaataaaatcagtttaaaattcactgaataatacaaacatgaaactaaataaacttgtagtcttgtagattgttcggtaccatatgacttttaatgatgcttcaacctttaattagtatatattcacggcttaaatttaaaattacaaattggttaatgaattttataaacccaatgtcaaatttgtaaaacaactttttaatatttctaaatttaataatgtatatgtgtgagctgtatatttccttatatgctatgtgtgtaatcagctaatttcaagatagaaatcagattatccaatttcacctatagtgtggtggactaatggattttgagagttccataaaataaatctcgtcgctctaataatatagggaaaaaatcaagtgatagttaaagatat

SEQ ID NO: 34025 - DNA, 618 bp, Arabidopsis thaliana columbia
tgttttccttttaagatacctccccttgcaatcatcaaaatttctcttttctatcatttttagattcactatagacgaggttattgttctccttaaatttgcaagtgcaattccgaagaaaaatttgagaggtatatgggcgtgagagacctcacagtatcacaagtgaaaagtcatctcttgatctttagaatttatacacattagagcaggtttcttttggggctttaaaggtgatagtcctttccaaaaagcccaaaaataaaagaaaattgcaaaaatgatcagggtcggttctttaaggaagggatttttcaatgttaagggatcctgacgtagcgacttgttattggttgttgaaataaaacaaagaaattgttagttgggcctgctctactaccaaatccaacaaggtgctattcttccattattttttactttttttttcaagattaatttaaaaattaaattagtttttcaagattaactgttaattaaaacagttaaactaatgattgtagaaatgataattatttaacattctaaatgaaaaactcaaactttaagtaatcatttcttaataatttcactatgactttgtcataattagtttatgtg

SEQ ID NO: 34026 - DNA, 519 bp, Arabidopsis thaliana columbia
gctactctccagcgaccgtgtttccagcactccaaattcattattttctgtttaatgggctgataaaacccatgtttggcccataacacttatctctgtcatcatagcaacgttgaaaaatatacataccgttgcgtttaaaacgctactctccagcactccaaatcgccaatcgcgttctcaaacagtgctaatcgccgatgaagaggtctcattgtcatcgccgtccttctcacgacgggagatttcgctgccgtatatggccgatttatctccggagattcctcacattcgtcctcctcctcacaaaagttattgggccggctcaaagagatggaatcaaaattctctcagtttcatggccggaaggtaatttctcagtttatgatgtaactgaaaatcctttaaaaatttgaactttatgattttagatatctgataatggcgtctttgtcttgaaattcgtcttcttatgttgaccacttctctttagataatagtcattgttgataaatgtga

SEQ ID NO: 34027 - DNA, 560 bp, Arabidopsis thaliana columbia
  unsure (1)..(560): unsure at all n locations
nnnnnnnnnnnnnnnnnnncgctcgtgctctaaagagaaggtcggctactgctccggttaagtaacctagtgagcaccaaaaccacgaggtggaaacgtggaaacggaaccgtcaaggctgagacaatggatgcggggagactgagacttggttgtcaccatgtgattgtaaataacagtactcgctaacgctcctgctgctgcggccaaaaactggtggagaatccggcgaaataacaattcattccttattccaatgaatagctgaaccttgggagctagcttcagtggttggtgcgtgatagcgtgatagaactgggctatatagcctggcagccacccatgcttaagacacctgcaacgccactgcgtcgcgctaatgtaagtcgtgctccattaggaggggattcgcggcgggcagtgatcggcagcagggaccgcgaatctgagagcgaagtcaagatggggaagcagatggggttgctctgtaatccaacgatatcaaacctggcggctaggcgacgagaagttattctggggtatggcagtatcaatgcaat

SEQ ID NO: 34028 - DNA, 210 bp, Arabidopsis thaliana columbia
  unsure (1)..(210): unsure at all n locations
actnnnnnnnnnnnnnnnnnnnnnnnctaaacgacaacacattatattgaatatgaccaaaaagctaaatggtagatgcgatagacttctatcctgggctgtaagtcgtactaggacatcggaatccaccacgcagttcggaaattatgtactacagagtcgagacacacattgctggctaaaacgatcgcacaagaagctcgtctgccg

SEQ ID NO: 34029 - DNA, 489 bp, Arabidopsis thaliana columbia
atgcaaaaagaaatgcaaatttgtgtgagagtgtttaattgacgtctggcttgagtgtgagacgactcataccattattacatgtgtcatcactctcatctttataacaagtcacgacaatgttactgttcttgttttggtatatactcccttgaacccactaccactgtcattgttttctagtacaacaaagtgaatggtaagaaaattatttacagtgaaaaacgttagttccttaagtgcaatattcgtttactgaaaaagtgaaaataaatcgagttcattagttcatgggaatacctcaagtagcagagttttaaaatcccatactagtaagaagaagattgtatatagaaggctggttattagagactttagagttgtattgattagtacttaattgagggatttgtaatgcaaatgagaatgcttttggtaccgagtcatataatttcacccaagttacacaagtgtgtctaataataacag

SEQ ID NO: 34030 - DNA, 439 bp, Arabidopsis thaliana columbia
cgttcgtgaacaggacaattattaaaaattcgatttaggttttttagcagtaagccaaaaagtgagacgctttggaaaatggaaagtgattcaatgcaaaagagcaaaaagtagtaagtgattcataaaccctaattctgattgtggacgaaacctaattagaatcatttttgaaatggcgacacagtcagttaacgcagtgatcgttgatcttcccggagatgtaaacgacgacggcgataattccgattgtttcatcttctccactcctcctctctctgcacgtggttccacaaagcgtgatgctatttccgttgagaattacgatcgtgatcggaaacttcaacgtctctgggtctacctcctcacaaaaccagtatcaagtcagaatctccaatttacatagatcttgatctttacgatgatggagacgatgata

SEQ ID NO: 34031 - DNA, 430 bp, Arabidopsis thaliana columbia
gtcgcacgaatttgccctctctcgaatttttgagcttttgaaattttatcttttgggaaatgctgcagcttttgtaattggtgctgcgtctgtacctgtacctgattctaattgctacgctctcgacaattcaagtcgtcttgtcgattttgtatcctctttctattttattaaagcttaggatcaattcttagtaaaaaagtttgctttttgttgcattggtttgatttcgtgtcttgtaaagctgcttcctttaacttggtttgatcagagcagctggatcggtcatccatttgaatatgatggcaaggttgtgtatatgtttctcattttttagtgttgagagttagttttaaggactttggggttgagttggtatgtgttttttgatgcaggaatttgatttggtggttagattttgcaaggatgt

SEQ ID NO: 34032 - DNA, 454 bp, Arabidopsis thaliana columbia
gaagctaaagaagaaggccgtgatgagcatgagatcgttgatctttctaaaggatctactcgtcactcgactcctaagtcttttgttcagaagttattctcgtgtttgatttgtgataattgatcttgagttgaaacagatttgatctctgtgagatttggtgtatttctcggattttatgtgaagagcgtttgaaatttgatatttgtttgttttccaaattttatgttttacattcccgaatgaggttcattaggagaggtacttcgcgaaaaacagagtaatttaacgaaggggtcaacaaaacagagcaaaaacagaacagaacagaggaatttaaattgaacaaaaagccaattctaacaaaaccaaagagtgatcctttgttaattgtagctatgataagtcttcctccttcctgatatggacaactgcaagcatccatggtagaaga

SEQ ID NO: 34033 - DNA, 568 bp, Arabidopsis thaliana columbia
ctagagggtatgagctcgaattcgtaatgtttgatcaatcagtcatctagttttgtgaatcgcttttttttttttttccttttcatataattttgtaaatattctcttatatatatttttttcaactttttctatttaaaattaataattattcaaaaaatatcatgtaagttacaaaaatgtatccagattctttttgtagtgataaatattaaaatcaacagtttgttaattttaaaataacttttgattttagttttaattattgttttttaaacaaactatctacaccagtaaaatacctttttaacacaccaaataatatgagattacattccaaaagtatacaatgttttgagtcttgactaaaaaagtataaaaaaaagaaaaatctctgtttccttactctattcttaaaattagttaatcaatgcaatttttgggccattgggctttagaaatattgaagtattccattatactctttcgctgaccggtcaaaaagctttaacgctcgaaggccgccgcgtcttccaaggcattgaacgtcctcctccacgccttctag

SEQ ID NO: 34034 - DNA, 623 bp, Arabidopsis thaliana columbia
attcatcataatgtgatgaagagaagagacaatgaccctacactattaaattgcatgttctctttatctttaacattaccatacatcatttcatgtatgggccgctttggttatgtcaacaatgacatgtaactatcttctccactcttatcatccacaattgtgtaatagactagattaatatcaccgttacaggcccaatggcgtttaatatattttattcatttaggcccataaacctttattttttctgcaaaccacgcagacgcagattcgaaaatcgtaaccgtagatcgggaaaagtaacctcacgaatccggaagatttctccgatcaatttggcgacgacgattttttggttattaatcttcgaaggtgttgcagtaacttgaggtagattggacacgattgtgaaactcaggtgtgaaacgaaacgacgaagagattagggtcgattagtttctaagtaaaacgaagcggaggtgatttggtgacttaattgaccagaaatgaattcccggcgtcggatgaaacggctccgatgaggaacaggagaaaagtaagtaggaagactacgatgagcatgcgatggatgaattgattgagacgcaattaggtggaaa

SEQ ID NO: 34035 - DNA, 585 bp, Arabidopsis thaliana columbia
aaacgaaaaaaaaaactagcaccatatatcatatatttagtattctatttaaaattatgcaaaatatttctgaaattcattggtctgtagatgtgcatggcctttttggcttcaacaatgatggcgacgcgcgagacggagagaggctgtgtcccaattgttttttcataaaacaacttcagtgttgacccaaaaaggaaaagagaaaaacatttcgagtatgctttattaaagcttttacttttagggtcactagcttctatttgtttattagtgaaattgtgaacagattatttactggtgtcgcaatctcatttattggtaaaacgtgattaggtcaattcttttaacttaccaatgcttattagctagctattcattgaaaggaacgtaaccaataagacgtgaaagagcaagctgagtctgtctatttgctacaattttctcaattgcatgcatgtttttattcactatgatctcgtacgtagcttcacaaaagaactaacgctaacgatctatatactaactttttttaaaaattgcaatagggcaggtaagatatatcagtacgcacgtatttttttg

SEQ ID NO: 34036 - DNA, 531 bp, Arabidopsis thaliana columbia
gactcgatcccctaacccggaggaagatcattgagactccctactagtttaagattgtcaaattcacctagttaaagttggatcacttatttatccataaatagataacttaagagattgtcaaattctatttaaagagtctatctaaaaggcccattctcttttttacataaaaccaaaaccgctcattaactattttgatcagtccagtccaatagtttgtgttttccttgtttttgggctactagcccatacacatttccaaaaaaaaaaaaaaaacttttttttccccctattttactacatttttgttaatttaatgtttgattcaaaatttacctcaccaatttatcccctcttctaatttcctttctatgtatttttttcaattcagaaatttcataccttctttttatcatccaataatcgccccatatttttcatactcacagttattttttttgatttttctgtatttatttcccatatttttgaagataatatcaaaacttgaaccatatggtagcagat

SEQ ID NO: 34037 - DNA, 533 bp, Arabidopsis thaliana columbia
ccaaaaacaaaaaaaaaaacagagagtttgattttagaaataaaaagaagaatctagacgaaaatatttgcaaaatggttgtaacatctctactctattacaagacacttgaacattaaattaccctggcagaatctgtagaatcgagaccttcgtaagaagaaagtgtatgcacaccaaacgggacaggtctctatcacgacatcagacttagtatccgagggtttcaggatatgaaccattgaactcgaagtcatgtctgcaacgacaagactataggcatgcctttcattagtctccttttcatgcactttcacttcgttggcaaactgctctggactcatgttgccctgtaatcaaaagcaatcccgtgatcacagagatcgaaagagtttatatataaatgaccagaagaaatgctaacaaaccaaacctccaagaaacgaacgggatacaactccgagccgctgtttgacttaacacggtccaacaacaacgatgtatcacgagaaaagcgactcggccacctttag

SEQ ID NO: 34038 - DNA, 475 bp, Arabidopsis thaliana columbia
caccaccctgaatcacattctgtaactcttaatatatgttcaactcatgacagtgaagagtgatatcgagtttgtaatcaccatcgcaaataacaacaatgaaagctaagataagggattcctagttctcaagtatcaaaaaaaaaaagatacaagagacctggctgctctatttcctatactttaagagtaagacaggaagataaatgaaggtttacgttttttcgttagatgtggtcaagcccttgaataactgaagctcagtagaatacaattctgcaaggagttcttgtttttgtgctgcacttcccagatggtatgcatgctccacaacttgaggaagattataaaaaaaacaaagagaaagtgagcttcaaaagaaacaaaaaatgctatatatgttgaaacatcactatgttacatcagtagtccacataccaagagatccgaacacatgacggagaagaggagcaac

SEQ ID NO: 34039 - DNA, 531 bp, Arabidopsis thaliana columbia
tgtcttgtgtggaagacgaatcagctttacgagactcgctttccgcggcgaatttctcgagctgctcatcgacagtaacgggtaaaagatgaggatgagttctaagaatctgctccaaaagctgtcctacaggagattcaagctcaacaggagcaagaggagcaaagttctcattagaatcttcatctcctgaagctctcactgttacacttcttcctctgccattctcattggtactactacttccaagcttggggatacagaacgaatggcatctctgtaatttaacaaacgaaagcaacaagaaaactggaattaagattacacatcaaacccaagagattcagagatttggttcatcaacagttacacagacaatttcgataattcaaaactctacacttaaacctaacctagtagagatagtttcacagatttcgcagggaaacgagagagtgttcctgagggagaagggaaggagaagaagaaggagagaggaatttggagaaggaatcggagagatagtggttg

SEQ ID NO: 34040 - DNA, 560 bp, Arabidopsis thaliana columbia
cacttgagagtttctttttgcgcactaacttgattgcgtgaaagctgagatttttcatctgagtggtatgtttagtatttgaaggagcttctcactgtgatgtggaagtaatcatatgagattagaagtgggttgggggaaatatgaaggatttgagtgagtgagagttgaatctgtgagtaccattacataaagaagatctccactttacacctactataatgggcactcaattacttcctccaccattgcctcatgcttagtgagagaaagtgacaggtcaagcatctttcttccctcaaacattctatatctgctcgtaatggtggctaaattcagtgacttgaccttcctctcttttttactttgtgaaacaggaatctcctgaaattgagaagatgaagtggtttctgcttatgctcatcatctgcaatgctgttcctttacaaggactcaccaaaattgtctctgcgagacccaagttgtgaacatcggttcggtttcacatttaattcctcattggtaaagtcacaaagttgctatggatgctggtgttgaag

SEQ ID NO: 34041 - DNA, 502 bp, Arabidopsis thaliana columbia
attaaacatttggtgttagtagcttttgtgtaattcatatacagaacactgaaaagagaaagattggcttctctctgttgttgagtttgctctttagcagaaaggcaaagattgtgcaatttagaagttatgatatgtctggatgaatgtaaataactagatattacactgcaattcttcttgtctaacatgtcatgctttattatgtcatgctttattggtcatcacagataatgcccacttgcctagttccataatatcagaattgaggctgccttcatagcaaaatgatttagaaagacagtgagtcatcaatgatcggcaccatgcggctctgcccgatctagcctttattcacccatgactccagaccccaagtaaaataaacgggtgatgaagaagaagagcagacccatcaccaacactaattcagctaatagtatgagtattgagtgtggtgcttttgtttcacctcactttctcctattgtagaatgtgtttt

SEQ ID NO: 34042 - DNA, 521 bp, Arabidopsis thaliana columbia
cgataatctttctattgggatatggtttggatgctcctcctataaaattgttccttcagaccagaagtgtagaaaatgaggagagttcaacctctactgtttctaaacaagccaagttgaaacagactacgcaccttcctttcttatggaaaacagtcgcacacttcttgttctgggtacttctgtggtcactctatgtgttgattttatgtgccttatcactgaataaatatggtgggcttgaggagatgttcaagaggtagcctctaacttagaaatcttattcataaccgctataggattagtttccgttagccatattatatctataacttatattccaaatcatataattatttattaagaacttgcaacgtagtgtttaggcgatttgatgtttgtttgtctttgcctcctattgtaggacgtatggtttcattcttagtattgaagatctttcaccaaacattggagtcttttggtaagtagataaattaatatggtgatatcattgggtgatg

SEQ ID NO: 34043 - DNA, 452 bp, Arabidopsis thaliana columbia
gctactgctttctctttccgtttcgcaaatgattccacttttttgttgccttctctatcctaatttgaaaattttcactatttaattgtaaagatttgatatttatgcaaacgactaaataaacattaattacgcacatagaagaaagaatcttgacgacttattatgggagaaaaaagctgtagaatatcttcaaaatttcaaaatcaaggagaatcattaagaatgctataatcagaattttatgaatatacgatgatatatatattaaaacaagtgtcgattatgggatatataaaaatagatatagtaactaatataatgttaaattggtaaaaatggttagaaaaggaagttttaaattggtggaagcaaaaaagacggccgttgggagaaaagaaagagagaggacccactgagaaaagaggtgtttcgaatgagctgtcaaaaca

SEQ ID NO: 34044 - DNA, 515 bp, Arabidopsis thaliana columbia
gttgagagtgaacattttagaaaagcgttgtgtttagttttcggatgttactacttttgagtaattttatctcttttgacttttataattttgattgagtttaggtattaacctaacacttactgatagtttgtcacagtgacaagtttatatagacatgtaatgaaaattttccacttaaaaattcatgaaatagagctattaatttctagaaaaagttaacttatcgaagtcgggttctctgaaacgtgttgctgatcaccggtcggtcagggatttggtccggagtaagtcttatgatatggagaggttttgaccataaaatcctcttggtaaaacattagtaagataccaacccaaagacctctccaaaaggcacgtttttttattattatactacttgacatgatcctttttttttcctcggtgcatctttgatatgattatcttaagtttaaggagcataatgaattaccttttcaattgatctatgtagagtaatggagattggagac

SEQ ID NO: 34045 - DNA, 382 bp, Arabidopsis thaliana columbia
cgatactttctttcgctcttttcattggtttagcattgcagaagcggtgagtgtatagttccatccatctcttgttggcttagctcataagtttttctgttcctaacttgatggagaacaatggtttgtctgcagctgcataaaccagtgaaagttgaagacttggttgcagtttcacatggtggaaagaataaaatatgaagtggcaattaccgtttcgggttttgaacagaacatcttgtgaaactagcaagtaagtgatctatgacatgaaattctcaaggcttgttggcttcaggcttgttcgagcctggatcatgtaattcgtctgtaagctgtttattataagaaatgtttgtcacactattctttagagaaatca

SEQ ID NO: 34046 - DNA, 536 bp, Arabidopsis thaliana columbia
cgagtcctttaaaatcttatctatagacaaagtcacggtcctcatgcactacaatatcagaatgcttatcacgccggcgaatttatccggtggcatagccggattattcgttttcggacagaaagatcaaatgactaaaataccctcgctcacaaactcgtataactaccggaaaaaacttttcaccgtccctccagtggcggagagaagaagagctttgaagatgttctggtgcggtgctcggagaagggtgagagacgagggaggtggtgaagatgaagatgaaatgtatggatacaacgaggaaatggcgatgttggagatatatagccagtcgtgtagagaagaagcgcttatagtgacggccattgtcgacgatgaagaagtggaagttgtaatctttaaaggagtgtcgtcgtgcttgagcggagaaacggcggtggatccggcgaggagtgtgttgccggagagagcagtcattacaaagattgatagagtgagaggccttttgatcctcacagatcattatatcaaag

SEQ ID NO: 34047 - DNA, 518 bp, Arabidopsis thaliana columbia
actttcatttcttaaaggtctctcttgtgtaactatgattaaaattgaaatagtgacttttattgttacgacatggaacaaatcaacgagttctattgttaaagagagacattgatgaatgtaacaaaactgtggcttagaagccgaaaggagacttagttcgggtccctccttcaccgtattgctcggtcccattttctcaattcgttcattgtcgtcgcgtcgtatgccactgacggacttacctgcaaattacattacaatgacgcaatttcgataatgcaaacaccaggggaaaaaacatgaatagagatgatgatgatgttttttaagagattgatcaataccttagctttggattgaatgaagtcgtccaaactcagtggtcgtagatcaggggacgcatttgttaccgagtcctgataattcgacgtttcaaaagcatggagtgagtacaaaaattatttttcgtaacaacagaaatcaactgtgtgggtttatgcatgtcctaccttgtt

SEQ ID NO: 34048 - DNA, 522 bp, Arabidopsis thaliana columbia
ccttgtagttaaccaaaaaaaaaaagaagaaatactaaacccttgtataccacagaatctatacggatttataagagtatataccattttgattttttttttcacaaaggtttagttttattaatatcacaacccatgactacaaaactgaaactggaaaacatataaggcccaacacgaacccaaaccatttggcatcgcttaagaagaagattggatcgaactataagatctcaagacaagtgtcaacattgataacgcgtgtaacatgaggagacaaaagatttcagtcatcgtctttcgccgttgaagccatcgattctaccggagattgaaactaacatcgaatgaatcgagtatagattcttctgtaattcaccgataactgcaaaacagaagtaaagatctaatatggaaccattaatctcaatcacttgctttaatcatcaatattattttttttttagattcatcgcaaagcaacggaaatgagattagatctcaaactaatctacttctgtt

SEQ ID NO: 34049 - DNA, 568 bp, Arabidopsis thaliana columbia
cttacatagggagctagtatgcatttatttttgtttttttgttgtttatatgcaacacactgatgtatatatatatcaaggttgatgtgaatgattgatgatcactacatatgtttattagattcatcttgtcacattgttacatttacatgcatgttaatttttctcagaaggaacaaagagagttattacttattttacctctatagtttgttcacactatattcacaagtaaaaggaatgggtacatgtgtgaatacactcatattattatatacatatataggagtagggtagagttgaaattgaggagtaaagctatgaaatggtaaaagctgatttaagggaatagggtttgtaatcgacagactgaaacaaaagaaacttaactgcatcaatgagtccttccacagttgtgtctatgactcagaccaatttaactttttaataatcgtaacttattctctcatacacatatctatattgatccactcaatctctctcccttcgctttctgattatgtatttatttttatatatacatatatatgcctcttgggaagactgt

SEQ ID NO: 34050 - DNA, 623 bp, Arabidopsis thaliana columbia
ttcagtatagataatagtaaacggtgtaaaatttcccttatatttttaggagttttttttcttttttttttctcgcttggactgaggagttttattacttttctgtaataaatattaaagaataccatggtttatgataaacactgtttaattttatatcaaacaacctattgtatgcacacacaaattattctaatatcttttctttttcttattctgtacttctttttccaagggcaaggacgtggacgtgggcatggacttggatcgccttctcgaggactctgtcctttgcctccgcatgaacaagatggacctacagttagctctctaataggtacttctcctaaggatcaataaggaaatttaggttagaaatgatgagaataatatcaactttaatacaatatgggagtgaccaaaataacgtagaaactctggagaaaaatctaattaactaatgattactttttgtgtaaaaaacaattatatatatcattagcatgctttgtagtttgtgttattgtcatcactatccaaatttaaacataaatattataagttaatggcaaaaaagcttggtatttatcatttctagtaaaattaatcctcaatatataatg

SEQ ID NO: 34051 - DNA, 408 bp, Arabidopsis thaliana columbia
gaaccctaactaagttatctaatataaataaagaaaacatcccataaacaacaaaatagaaaagatcaagcatcaacaaaaagtgtacacacacctaatcctaacacaagacgatgatacacacctctcaactaaataacctaaaccccaaaaagggtaaaaaaaaacaggataacttaaacaagtgtattaacaaccgtgaactataaatgtgtaattaagaacaatttagtctaagcggacaattaattgtgtcaatagattctatgccacaagctaaaataagtaaatcaagtgacaataatgtgattcaacatacagattcgagaaaccacacaagcataagagccaaagcaaagagtacacgaaccgagacgggtttttgtagcgactgcatgcagaaagaac

SEQ ID NO: 34052 - DNA, 151 bp, Arabidopsis thaliana columbia
agggttgcaagatgtgcgctacgagtggtggaatggtgcaccgatatgggaaatggctcctgggcattcccggcttggttggtttagtactccgccgttgcctgctgaagtgtcgccggttgatgtcacggttgctaatcgtatttttcat

SEQ ID NO: 34053 - DNA, 497 bp, Arabidopsis thaliana columbia
ccgatacacggtaccacactatggataccagattcacacacgccagtagcttggttaagcaggcatacaagctctcaagatccaaaagtgtcagtacaagaatgcatatgtatactatgatatgtaaatctgtatccaatgctaagagcccatagtcgagtagcccttgtaacccacaattgatgtacccccttatatccagcaggactgtgtgcatggaattcgaaattcgctaaggactgtgtaacaactcacctgccgaatcaactagccccgaaaatggatggcgcttaagccggcgacctatacccggccgtcggggcaagagccaggcctcgatgagcacgaaagcgcggcggtcgctgcaaaacctagggcgcgacgatgaccgacgagccgtcggtgcagatcttgctggtagtagcacatattcaaatgacaactttgaacgccgtagagggcacaggttgcatgtgaacggcacttgcacatgggtt

SEQ ID NO: 34054 - DNA, 382 bp, Arabidopsis thaliana columbia
gagtaaaaggcatcaagatctttacaaacatgtatttgagatcatatctaattggagcccaataaacataaaattatgaaaatttgagtgagagcgttaattcttaatgcagaacaaaaaattaagtcttagttatattattatattgttttcaatgatcgacttagttcatctacatatccatttaaaaaagtcctaatatcaactttgccttaacccccgataagtttagacacgacactagttcttggcgaaacaatggaatcattctctagctcttctcttgtgaggacgtcgtcagttttatgtatgtagtcggctgaagctgtttcgacgagtgtccgcatgtaacgagttattgatctcatttgacttatctcta

SEQ ID NO: 34055 - DNA, 144 bp, Arabidopsis thaliana columbia
ggtacagaaacatatagtaagttcgagcgacgcatagaacgttctcccaccatccattcgagcgagactttcaccatccgtttgaaaagcatgcttactcgagccgagccggaatggcgacgacgacgcgaaattagaatgctc

SEQ ID NO: 34056 - DNA, 481 bp, Arabidopsis thaliana columbia
acaatgatcagagactaaaaactgccataagactaatgtcagccttcatgtaatgagaactctaaaaattactcctaccatataattcatagaccatcagtttatggtaacctcttcaactagtcaatttgagatatctaggtgcattataaagaaactaaatagagcatatctgtttagtcagaaaactaactcttcgaggtcggggatcatgtcgctcatacagatcgctctcatagggatgaagtaggtgtttctgcatcgctgaaatgccaatgaaaacaaagttagagagttacttatcacaagaagtgtaatactaacactgacattggttacacaagtcataaaacagggcaaacatagaaagtaatgtatacctataggtgttcaaacgcaccaggaggcaaaggatcaaactccatgccaagaataggtccacatctctcaatggctccctaactgagctcaatacagcaat

SEQ ID NO: 34057 - DNA, 549 bp, Arabidopsis thaliana columbia
tcttaagccagtcatcttggtacctgtcacaggaaaaagatgaatacataatgagagctctaaatctccagcaatacagtatgtaatcaaattctcagatatattaacaaaaggaaatcatgaatacttcatgaaataacccgatcacaagggcatcttgatcaagaccaaattatgttgaaggaagactgctaatagaacagacagatatacatacccgacaagtatagcaggtgatggaagaacaaaaagtgtcggtcggagtaattctgaactgtatatgtcttggctctgagccgtctcatctcctttcccaccatctattgcatttgagactgcttgtttgccaaaatatttatcaataatagaatcatcagagatattgacaccattcactcttgtgtagcaattaaaaccagtggaaacagtagagttcaaggcaatgaaaagcaagcgtgagactgagaaataatcagaataagcgatctaccttcactcagggctgactcagcagtaaatccctcagaaatagatctccatccccgattg

SEQ ID NO: 34058 - DNA, 552 bp, Arabidopsis thaliana columbia
caaatatctaaaacatagcttacaacaaacaatcataaatagaacattcaaacaataaccgaacaagatggatgcaaccttagaaggcaagctacatggctatgctagaaagacctaatccacaagctagctctacattctccacatggtttacaaatgtcgacatcgttgagcagtgattagcctccggagcttcaattccgaaatcgattcgaagttgtactatagcaagagtcacggtactgtagtagaagatgtagaaaggatgccgtatatggcttgtcgccaacacaatttcacctgcactagtcatcccaacaatggatacgtcgatatccgcaggtagtattattccaataatttggcaattcgtaaataatttgagaccatttcacttcatcaacatcatttagaacacgcagctcaaaactttctatgtgtcgttgattgtcacgatccacatttagccatactacggccaacttacctttgtaatctatgactgctgaacaaccaatgtgtttacatgtgagatccattggtagaaacttg

SEQ ID NO: 34059 - DNA, 592 bp, Arabidopsis thaliana columbia
  unsure (1)..(592): unsure at all n locations
tgtaaaccattatcatataacttatttatctcattgtcataaatctcttttctcattaccattacttacacgacttagactctcatcaaactgaacttctgtaaacaaatagagagacaagggttgaaaaaaggacaaattgaaagactgcacaatatttttactgtatttcaagtttcaaccaataaaatttatggattggaggcaaattcatcgaatctacaagatcacaaaattcacaaatttttattgaatgaaataaaaaatcattaaactattttaagaaattgatcacttaacatacaaaatacataaattgttatttcgaaaacctataggcttcataaaatatcgcaaagtagcatataacccattccgagttccgcatattatcttggtataagtaaatcaaccgatgcgatatcgacccatcaaaaaaggttttaaaatccatatttcgatcattagcaacggcttaaaaaaatatttgtttaggtctctggttcgaaagagattattaggaagaatctaaactttttttcaaaactanaaccaaaacaatttaagtactagtactagaaaaggacataaa

SEQ ID NO: 34060 - DNA, 464 bp, Arabidopsis thaliana columbia
catagatcacataatcaggctaatggccaatacatttaataacgttgggcgatttatttactttaaattctacaaatgtttcaccttctttattccttttgtcatttctctttggtttgactttggcatctaaagtgttgaaactaacgactaactagtaacataagcaaatgcgatcagcctcttgttcttcatgacatgatattttgttataaagtgagagaaaacttgtatgtcaaatttgggaataatcactgtaacatagacatacgttttgcaacaggaataaagtcgctgctacacccaacagtgacccaagattaagaggacaaagttctcagaactaaaacgagaaacaaacagaccagacaccaattagatccaaacagctaagtcttaacagatcgactcaggtcatcctcatcgtcagaactccagcataaactctccttcaagtccttcaa

SEQ ID NO: 34061 - DNA, 823 bp, Arabidopsis thaliana columbia
tcggaggtggaacggtggatctccgctgaaacttggcgagattcttccccaagttttgggagaaactagtcgatccgcgattctgagattgtgcatcggatctgtcaaatggtttccttccttgctcctgctggttctgtaatttcagtttcagagtgttcttgatgtcgaagatcggagaagagtctgacggtgacggagaagatggtgactgagacggtttttcaaccggtgcgttcgtgaattggggaggtgagtccgatgaggaattggagaaaaatcgaatcaaagatgtgtttgatggtaacctttggtggcgtctggcgagatgaagcgccatgattttggttgctcctaaggattttagggctttgggtgtttgcgagagagtgtaagtgatgacgataacagattaaggtagaaccggtttaagtgcattgaactgttgacttttccggttagttatgaatcagaaatggtcaggcaaaatctgattaagaaccggatataattcttacattgcaacatgacggacatgtgaaaaggcccaattcatctttctgttttcgacccatgtacccacaacaaagcccttaggtttttcgaatttagcgaccatttaataattggataatttgtgtcaaatttttggagtattatggacagtaaatactgtatgaatggacatgaaattataattttcaatcctagcctgaaaagaaaaagaaaacgagttcaatgcatacttaatataaatacataagttaacgaatcctaatttcgtaaaactttatcctacataggcaatatggcatctatctac

SEQ ID NO: 34062 - DNA, 557 bp, Arabidopsis thaliana columbia
gaattagaagaatgtggattttgatccggagagaagagggaagacaaggaagtttgctggcgaaaacgagagaagaaacgatttcagatgacaacgacggaggttctccgacagaatcgacgttcttctttgagatagttgaaagaaaaaaatgagttattagggttgagaattggggaatgaaaggaaaaattggagcccgaccctatataagtggatctagatccaaactatggttgggtatgtaattacgcgaaaagcccacattgttttggtcttttaccatttttctgaagtaaatttaaaaagaaaacaaattcttcttataacgggggccaacgagaaattgaatcgagctggggggcgagcgaggttaaaatccttcattagtcgacggaaacacattccctgctcataagacaatttctcgtaattaagagtggcctttggttttttaagcttccaattaaagaaaactaaaaaccctaaaattaccaattgagatagcttaccattttgcaaggagtatgaaggcaaagaagaagaagagtcataga

SEQ ID NO: 34063 - DNA, 565 bp, Arabidopsis thaliana columbia
ggtcagaccggtggacccagttgcaacccaatgatgcaacgagtcgaacacttcttcctcattgatgagccgagactggactttaccgccatgacgaggatgggctaagtaatcttcacggcggacaaaaagaacattataaactgaggctgatgatgatgatgatgatagcggcttttctaatgagcggtgtctattgacaggcaacccgaaagctgctctgatcatttcaccaaactctgatatcctcgcagtccttttatcgtccgggttttgccacagattgtgagctgaatctcccttgcagtctatttctccggacaagcctttaaaaagagcggtttcgtatcccaatggtgaaagaatcgcgtggcggaaacaaaccggtttggtgaagttctttgcgtatctgattccggaaaacaaagctgtccatgtttcttctagctgcgtctgcaaaaagattcacaacatggatatgaaactcatacaagattcaattttattcacaaaggagggaactaaaccataacacgcaagaaaccaaatccttacgaagagtact

SEQ ID NO: 34064 - DNA, 431 bp, Arabidopsis thaliana columbia
caatcaaatcaagaaacccatgatgttgcaatccatcaaacaacagtgagtatccttaacttgacgtaccttgttcaggtactgtagccatatcagcaggaacaatagcgtaattttcaagcccactgataatcggtgcaccggaaacagacgacaatttcactgtcacaatagtactactcagattcttcacagtatagtttaaactataagctgcaaatcctccaacctcatggaacacatcaactctgctcacattgttatcattcaccaccaaatcaaacactctttgaccagccttcttcaccgtagaatcaatctcagaaaaatgaaaccaaagcaagtaatcaagtttcgcatcaacctcaagctcataaaccaacgaaccaccaccagaaactgtaaccgccgtttgataaagcttcatcggg

SEQ ID NO: 34065 - DNA, 427 bp, Arabidopsis thaliana columbia
ataggttagaaaaacgaccagcccgcggtatttaaaatccagttgacgataatgaaccaagacgagaatctgtctaggttccttcttcttcttccacaatataattaaaactatattcacacgccccttgagagtgtaaggaaggtgttaccggctttaggtgtgataaagcgggtttcttcattttgaaactgcgccgcgatgtttgcggtgatggtgatgattctgtgatgcggcggtgtgtgacagcctcgtcggcggcggcgtcctgcgttgtccctgtgttgcctctcggagacagtccttatgtccgagcggcggtgattctggtgtgtttactatgcctttgtgtgactttatccatcggtgtcgagtttatattgattttatctgcgattttggatttgatgtgcggttccgttggtgg

SEQ ID NO: 34066 - DNA, 440 bp, Arabidopsis thaliana columbia
tagaggatcatcacctcataccatgctatattttatttatcttataagaaattattggctcttaaaaaaaaggaggttatgtatatatgctatatggagcatcttgagaactttgattttatgttggattctttgattgtaaccaaagatgggcacttttgtgccacttctcactttcgaaactttttgttgaattattggtgagtttcttgtttttattttacattattttatttatttcctttgatcatgatgaaagttctctcagaaaacgcatatattcttcaaaggtttctatgatagaggaataatcataacattcttttgtccatttgctccaactttcattggactagctttcttcttatcctttatctctgcacttcgattgctttttcccacatcccatgatttgaattaatacaagcttcaatggttta

SEQ ID NO: 34067 - DNA, 214 bp, Arabidopsis thaliana columbia
taggaacaacatcaacatctggttcctcaaggtttgtttcttacaactccttttaaacttatatcattctgtgttgctttcgggattgtttaaacaccgaaataatattttgtggtctgctaagtctttccacataattaaattgaaagtaaagagaaaaaaagacaaaccacgaaccatatgagtatgacggattggagaaaccaaagaatgg

SEQ ID NO: 34068 - DNA, 621 bp, Arabidopsis thaliana columbia
ttgatttaagtttttggtccaacaagaaggctttgctaacgctctatcatactattttaatccttctccttcacaactaccgttggattttcctttatgctaataatagatctttcttctccccacaggaaaattgcacctaccaattcgttgcaattatctcggactatgatctagtacaacagtaagattctatatcatttcatatctctcagctgcatagtggacctatgttacctgtaaatcacattcttatgttgttaaccaatgacacttcttttctatgcaaagcctcatttgctattaagctctcacttcttactcgggcagtgtaaaatatatttttttcttgcactttatgtatttcactccaatcacaagtgactaggatctttaagatctatctggagctctttttgtttatgaaatcttgttccattttaaaattgagatttccaagatctcacagtgacattgaaaaataatctcagcattctgctcatagttacatcagttatcagtagttactcaggattgtggatccaactttattttagcatgactcggatttgcgtcagttctaggatgggagcttgatatcagagaaatgttaagatgggg

SEQ ID NO: 34069 - DNA, 523 bp, Arabidopsis thaliana columbia
tgatctctaatttgaaactgttgttgcagaagagatgatctaacctggaacgacgctcagaacctggctttctttctcggacaacaactacgcaaccttcatctacttccatatccaccggtcacacgtccggagttgttgaatgtgaatgctgttcatgaggagttgaacattccagcagaatggaaagtttttgtcgatgctctgtgccaaaagaagaaggacgtcactagtcgtctggaaaactggtaagtttgaaatttctgaaatatgactttgtttccatttgctttgctcttgataaaagcttactcacggtaattgttttgtttgaacctctcaggggaaatccgatacctcgggctctgatgaccaagatagacgaatacattcccgatgacttttttgtagatttactcacgtcttcaaggttgcttctcttatctttctcttcttcttttttccagaaaccattcgaattaacataatctatttctggtacacaggagacaaatggtggaga

SEQ ID NO: 34070 - DNA, 562 bp, Arabidopsis thaliana columbia
tgatatacagtgttatttagttatgtatttgataaagtgcatttaaattcatcgcaagaagatcctttggttggtttgataaaatgtattgttcttcgacttcccgatatgtattgggctttctctatggcccgatgaagaaagagaaataattaaacccaaaacttgtgtattttggaaaataagactgggcccaagttggcctatattttggcctacccaaacccgtttgaggacattagtttgctggttcggattaaaccggttagattgataatcagtccgatttgggtaaatgatgatggtttaggtattttgatattgctggctctggttcgccgctctggttcgccggtttggtctcttcttcttcaaccgtcttcttgtttggtttgcgatcttcggtgtctgtctgtgctctgctctctttcaggggaatcgatgtaagttggtgccgcttccttcattctctctcacagtttagttttggttccagtcgcttttctagtttagggattttgatgatgcctttggtagtcttcttaagaatctgggaggttta

SEQ ID NO: 34071 - DNA, 554 bp, Arabidopsis thaliana columbia
tttattagttattttatgtttaggtgaatgaaatatttatacctacatgagcaaataatcaaggatctatacatatcattttgttatttaggtggaaattttattgccagttaaatatgacataattgcccctatacaaacagataatcggtagcctccttccacaagataacaagcattaaatattccgtaaatcttcgaagatattgcgccgccaccctagtgaaactaaaaaaaacataaaaagtaatgatcacatatggtacgtatacacacttgcagggcacaccacgtcctacaaacgcgaaagatgaatataaacaataaacgataacatcatagttagaagataatcttccgttagagcgagactgggttgacgggggtggagtggtgatatcctaaaattgaacacgcaatatatcaccggttaaggatttaactaaatgaaagttaaaaacatggaagaaataactaacctcatcagaatccttctctcctcgactgcaatggttgattttgaaagattgttgttgacgtcaaaaaaaaaaaaa

SEQ ID NO: 34072 - DNA, 369 bp, Arabidopsis thaliana columbia
aaggaaatcagaagaagatcccaaaacaccaaaatttaaaagtaaccaactagactagaaaagctgaaagatgtcttggaaactgcatactgcgaggtttaatggattgaggtttatctatcagttccctttaacaaattccataatacgaacgtattcctagaaaattcagtgaataagtttctctgtgatacgaatgtttcgaggtagctttcagagtacttacagttgatctggtaatgcatttgggcgacagtagaaatggtttgtttagcatgacacgagcagcttcaacaacagcatagtagttatttagaggttcacccattcgctgagcacaatcagcaaaccaaggcaagaactggtgaa

SEQ ID NO: 34073 - DNA, 502 bp, Arabidopsis thaliana columbia
ataattgtcaccttgtgatcacattcttcgggcagcgagagctaggctcttcttgtcttttcttaacatcacgagtaggggaatcaccatattcacgatccctatgttcaccacaatcaacaacaaattcggcacatgttgatccagacacttaggggagaatcctgcaagacaatagagtgcaagtacttaagcaacgaaattctatctaatgcatataagtcacatattgtcttgcctttggaaaccgtaaagacaaaaccctccatgagattgttaagcatactactatctaggccaaattcgtcaagtacagaacagtattgactcatggagtttggtctcatgatctggatctttgtcaagtgaaccctctctccgagcttttctacatgatgaagcaaacagttggggttgctctcctggacataacagggataggtcagggcacgacagggaataagtagtacgatgactggtaattataccttggaaatcatga

SEQ ID NO: 34074 - DNA, 412 bp, Arabidopsis thaliana columbia
ctttcttctgtgagatttaacacgacatccataaaaaaggaccgaatctttctgacctacactcaagaaaactcaccaatgactatgactatttcttcaaatccaatttagatttttgctatcattatcgaaatagctaaaaatatgtgaggagattaacatataactttcatctaaccaaattatgatttccaatgggacgcctaatgaacgctaataatgtagtagaaaacacacatttaattcagcaactgtagatacaatctgcaaaaaacagtatattcactgttatagacagatctcgagttatttcgattgtccaagacgtagagttgataactgcaagagaatatttgaacaaactagttagagtttatcggcttttattgttgaagcgaatattgcaataatg

SEQ ID NO: 34075 - DNA, 305 bp, Arabidopsis thaliana columbia
gttgtcgctgctaattttgtttctttctttattaacacaaatcttccgcaaagctatggagagaacctaagggcagcttctaaaggtcggatctgcagctcgattggcttccgtaatcgtttgtgaaatcttcctttcttatcttctgaactacattttttaatgcatttcctacatagtctttgaatccattcaaaaatgtcgttgacacaaatcttcagcaaagctatcgagataacctaagtgcagtttgggcttatctccagaccgattggcttctgtgatcgattggtaagtcttccttt

SEQ ID NO: 34076 - DNA, 423 bp, Arabidopsis thaliana columbia
agtctgatgtaattgaaccaacatctatatgttacattttttattttttttggtgtctttctctaggggttgtaatgtgctcaagattgaggttggatattattctctcattcttttctattttctctgttatgggtttgatgctgaaatgttgaatatcagtattgggatttcttcttgattttgattgttcttgttggaacttttcctgcagcattgaagatacatatgtatcatagtaaaaaacaacacacaattgatttagtgtattattcgttttgattatttggagcaattgataaacatgttttggatgtgatggtgaagttaattaaagatttctggttctggattcgcgttttagtactcgtattacttagatgatccttatacctggtgttactaaaacaagattaatgatga

SEQ ID NO: 34077 - DNA, 488 bp, Arabidopsis thaliana columbia
gatacttgcaagaatgccgtgacaaatgttgtagccaaagttctgaccaaatgaaaggaagacttaccaatcgattacagaagccaatcgagttggagataagaccaagttgcccttaggttatctcgataactttgctgaagatttgtgtcaacaatttttttcaatggatttgaatctcactttaatcatgtaatcactttacctttatattaatgactatgtaggaaatgcattaaatcaattagttcagaagctaagaaaggaagacttaacaaacgattacggaagccaatcgagctgcagatttgaccgttagaagctgccattctctcgatagctttgcggaagatttgtgtcaacgactttttgaatggattcaaattttgattggagagacaatcgtggtcttggatttaattgcagaataagagataggaggattttcttcgacatagatggtacattcgattagcgtaagaagatac

SEQ ID NO: 34078 - DNA, 441 bp, Arabidopsis thaliana columbia
tattgtttgtataaatatctagttatctactattagaccattaatacaagaaaacaaaacttttaaactgtaaatagtggcttgattttgaatgacgagacttgtatgtatacgagtggggtctagaatattagtcgctgtctagtacatggtttaatggttcggttggtgcaagtaattaattatgagaatctttgcttattttttaaaactaataattccacaagtaaatagtttaatacgtcaattatatatgtctttgtctaatgaaaattttaaaacttccacttaattctcagccgtccgatcatcccagatgtgaccttttcatgggcctagaaacgcgaatcgtagcaatgtgggcaacacgtcgagaggaatctcttagacgaagtaaacgccgttagacttcgagattcccgttattaactccgttagtga

SEQ ID NO: 34079 - DNA, 486 bp, Arabidopsis thaliana columbia
tgtaagacatcatatatgattgactttagttaagaagcattgatatacaaaggtgagagagaacttagaaatcaccaagaaaaataaacattactatatacaatggtgaatctgaaagaagataaatccaagttgattatctatattacaacgagaagatagaaaccagagttttcttcccaagaaaattttacagcttcttcatcttctaatcttccctcttagttatatatgaaacagtactaaagatccgcccgacccagaaaaacaccaaacgaatacatagattcgactcttcttttaaatactgcatctttatatacaaacactaacctgaatataacagttaaacggtgaccggcgacggtaactgatcttcatcttcctccttcctcttccctctctctctctcttaggagaagatgaaaaacaaaaacatattcatttactttcaaaaatggtagtagtaatagttgcagcagtagt

SEQ ID NO: 34080 - DNA, 533 bp, Arabidopsis thaliana columbia
ggccactccttgatagttgcttccgctgctgctgcgcatataggatcagttctcataccaaagatgcaggcccctaacatagattccccaagagcttaaaaggtactgaatcattttcttctataatatgtgattttggtttatccattcgtttataatgtgtgaatttgacttttgcaggagcaaggatgttaaattgtcaatgtttgggtgcttggataaattttgatttctgctgatgattggtttcgtcggaattctggcaaattttgagggtccaacgatgatagaggtagaagttgcgctctgattttttggttcttatataaagttgtaaatgaatttagttataaaaaacagtgaagcttttaaaagtattctatgaaaattcaaattgttattgcaaaactttcacaaaatctttatttcgtttttcaaattttataactcttcttcataaaaacccgaaaaacctttcttacaagagttatgtactaccttaaaccaaacaatttatgtattatactagtttg

SEQ ID NO: 34081 - DNA, 549 bp, Arabidopsis thaliana columbia
ctaaatcccagatttttctttcaaaacatatttactatcaatacatttttaaaatgaaaaacaaaatgtgaggcttgagtataacatatgtaaaacaggtgtaaaaaagtaaggaaacagatatagatatatagtgttacaaaaaaatataatacaaatttaatttaatttataacttttggtaaattataacgagcaagaaatttgaaactcggaatatgaagtaaattatttcgttagatcaataaaatatttttctaacgggtgttaacacacaccacaattttacgtggacgtttttgctcttaaatctcaactaaattttagatttttaatttttaggcaaagcgtttccaaatctttcttataagaaaatatacaatagaagaaacatagtacaccgttttcaactaatagttgaggaatattgagtttattcggatcacatatttttagtattgttcaccaaaaccaacaagatagagagtcacaagccttccagttctttatatagtttccctctagatccactattaacaatttgagaac

SEQ ID NO: 34082 - DNA, 507 bp, Arabidopsis thaliana columbia
gttttaaaacatagattattaccgtatattctagcatgttcttatatggcctttcaacttctcgtagaacaaatggtttcccgttgatatatataacaggttcttctctcatattgtgccaaaaaactggccgaccacctctttaactcccaaccctttcaatgacagatcgaataccatctatagttggatttgcaacaccatacacaggaaatcctggaacctccctaaaattcggagctccttccaccctctctggtagatttaaaatttgacagccaggactgtgatcactctttagaacagtttgactcccagaactgccccacttctaagcgcacgaacgacactcatctcgtgagggcgcccgtcggtagattctgcaatctttatcaaagaaggcttcatagctgcatatccaagggcacccataggatctctcctgagcaacctagaagagacaatgaacatacatgagacatctgaagatcatatgctacaatagtg

SEQ ID NO: 34083 - DNA, 449 bp, Arabidopsis thaliana columbia
tttcagctctgatgaagtttatgtttcagaacaaaaacagaagcctaaggaaactatacactatatagtctccacgcatccatagttaaagaatcaaagcatttttaagaaaagatctacatacaggaacgaaaattattgaagattatatcatcaaactgatacatgttttccaaaaataaacccatcaaagacagaacacatgtatgcatgtttacaatcaagaagtagtaagagcaaaagtatctcattcctagttaattcctgatactcaaaaggctttgcaatcccatgaaggtgaccttattgtttacatagaaaccattaccatacccaatttattatttcacaaaatatcatagtaagcctaagaaactaatcatgtgtctaatttctaactttgatgaagcagaatacaaaaattcagaaaatcggccactagtgaacaa

SEQ ID NO: 34084 - DNA, 576 bp, Arabidopsis thaliana columbia
gagaagaatcagtgacaaagatgcagagttcataattgagaaagcgtttttctcctcactgaaacaaaatcataaaaagctagatgctaacaatactatcaagcccattaaatagttaatgtaggcccatattcggcccaataattaagatagtagggagtctcattattggctgaagaatgtagaatgtactcatgtagctcttttctcttgggccgaagacttttggtagctttggagttaaaagtcacatgattaaacacagcctcaacggccaacaacaacatattcaagattagagccattaacgtataagctcgtttagtgaggagattctgtaataatttactctttttcttactttaatattctcttgcgctttaaattttatcagtttggtttcttagagaattttaaaactgcgaaaaagtatcatttttatgtataagctaaattctatcttgagcaacaacaaaaaaaaaaggaattcttgaatcaaagtaagaagattaataaaatagatgaactatttttgtgaataatgtgaatggacactttgattaagctaaagtggta

SEQ ID NO: 34085 - DNA, 535 bp, Arabidopsis thaliana columbia
  unsure (1)..(535): unsure at all n locations
tagtggtatatatacataacattcatatgatttccatataatttaaaaagaggaaatacgagagggcatccggtagcatctgcccaagtgtcagctcgccggacggcagaaaacaaggcgggggaaatgatcaaacggcggagaaaggaggagagaaaggcgggacagtgtggaagagcaaaacataagaatgtttccaaaggataaataatatcatacactgttttgaaaagaaaaagtctctctaataaaataagtttagcaaaacaaaattaagggagaggggttcactaagagcacgtgctgcctgattctccatttgctcttaagagagacctcaaatctttttaatttttcttccgaaacagctgtttcatagctgtccgatctctctcgcccccncatgtgaccccactcagagatataaaccctttgagatcgaatccatttatataattttatttcgctttattctattataaaaattatcttatctcatgcatccctctctctttctatctcttacttctgtttt

SEQ ID NO: 34086 - DNA, 498 bp, Arabidopsis thaliana columbia
cgagttgaactaatctagcgaaaacaaagacttagggtagtataatcatttgtatgaaaaaggtacatttggttataattgtatcatctgtatgaagaaggacacaaaaagctcacataaagaacacccgacatgtgatccctacacctgtgctcaactaaaactcaaaatttcttgtctgttctattttgctaaatagttataccaataatataattttgtgattggtgttaccaaatatataaatgaatatataatatatatacacaacttcgagtttatccaaaactcgttgtgtaatgtggtttaggaataacgataaactgaaacggttatgtcaagttttttcttaacgcgatatgaatgattggatggtggtttaaatagtatatacttttagtcaatatcaattgttaagaacattttatcgttgctacaccaattacgtcaccgctcatacgataccaatattaatatcatgatgatatcatactttgg

SEQ ID NO: 34087 - DNA, 474 bp, Arabidopsis thaliana columbia
tagaggggctatgtgaaaattttggaaggtacgcataagatggatcaggtcctttaaacttcaaatctagcttattcctctttcgtttcttctttacatatgcttaaccagttaagaaaatgtttttacctcaggcacgagaactttgtgctgcactgcccggtatgtttcctgagagtattattcctacattgcttcaagctgccgttttggtgagagaaaacaaggctgccaaagctgaagaacttttgggacagtgtgccgaaaaattcccggaaaagtctaagttggttctcttggccagggcacaaattgctgcttctgccagtcatcctcatgtagcagcagagtccctatccaaaatacctgatattcagcatttgcctgcaactgttgccaccattgtcgccctcaaagagcgtgctggagacaatgatggtgctgctgctgttcttgactcagcaattaaatggt

SEQ ID NO: 34088 - DNA, 984 bp, Arabidopsis thaliana columbia
tctagtacgtaatgggaagataaaatatgttaatcatactattatttttgggcaaggttcggacacgtgtcaattgaaaaaaatgaagaaaaaaaaatgtctgagcccgggttcgaaccggggacctctagtgtgtgagactagcgtgataaccgactacaccacccagactttgatgggtatattgtgtattattttttcctttatatgattattttgtattttttgaacatgaataataaagttgcaaatatgaacgactttcatgtttgttttgcacaaaatagttagagatatgatatgtgattttggtgttttcttaattagttgacatatttataactatcatcgttaacatctactttgtctatgtcttcaccgtcacttccacctccattatctctgttgtcatcaagtatgtcgttgtctccaatattttcttccgattcttctctatttatattgtgccgaaatcgatatgccaaaataaaatcttcatagctgttaacactaattatagacaattaatatgatcaattaagatgaagaaagatggagctattttcatttgaatgacgcatgtaagaaccttagttttaaaccacacaagattttcaaaattgaataatttttcatagcgaatgatatcgcaaaaaaaaaaaaaaaattggataagctaaaatgactactctaatccaaaaaaattccggctattacatacaacaaagttgtttaattttctaataaaacatttggtcaaatccctagttaaaaggaataacaattaattgatatactaacacaacaattagtagagtactttgctttgaaatggtcatatattcaagtcttttctatctctcatatgcattctttgtacaatcgaaatacacaaaattttgtttaacactgtactctggaaatgatcaacatatcttgagctttatcatttgttttcatactttattaaatgaaactttgttc

SEQ ID NO: 34089 - DNA, 1039 bp, Arabidopsis thaliana columbia
gaaaggagaacctgaaaagagagaggagatggtaggtgaggctggtggtgttggtagtgatggtggagccgaagagtgagaggaatcgagagttgacagagaaaggcagagctcaaacggcacgatgtggttcgaggtactatcgaaactgcaaacattctcttgtcactaacattgctacacttcttttgctttttgtttactctttttcggcaatttgttgacgaaagcggcgcatcacaaagacgaaaaaaaaaaaaaaaaaaaacagagcgcatcacaattttgttaagcttccttattaaatacaaacttaattgaattaataaaaagtctgggtggtgtagtcggttatcacgctagtctcacacactagaggtccccggttcgaacccgggctcagacatttttttactcttttttttgggattttttagtttgcacgtggggactcactcgcacacgtgtgtactaatctccatttcttaggcaaaagcaaaccggagaaccaaacaatcacgaatcgtgtaatcaaactcatcggagtctctcgaattcgtctttgaagaggaagagaagagaagaggcgagggagatatggattgggacaacgtagcagctgaggatgtgattgaggcgcttagagaagttgaatggtcgacgcctcctcgttcgtttggcgagttcttctctagattcgcgttccctcgctctttctctaaatggaagagccgtctcaaatgcaatctctactagtactacctctctctctttctcaatctctgtctgcgtcgataggatttatgattttgatcttgtgttgatttttgcttgtggtatatgtgttgcagctataggacgaattactttatcttggtgattctcgttctgggtaagttatagttttgcagaattttattgcttttagctgtatttttgggaatttgggttttgatcaagatcttgtgcagtttgttaatccatgtttgtgttgaaacgaggtcttgcgcttgttacgagacctctggctcttgtgggt

SEQ ID NO: 34090 - DNA, 569 bp, Arabidopsis thaliana columbia
tgtaatgttttaatagtccactgcctctttggtcgggttatgggcttcttctaattttgcatgtttttggtatacacacgtattatgttgttaggcacacttttgtgaaaagtctttttacaatcttttaaaaaacttatcttcatcattattaatgcagattaaattaaaaaaaaaacttcgtgcgtcggtcgtgatatgcacacgcgagtgagataagcaagcttattgttttttttttggttgttgtcatggcactgtgatgtcacagtgagcactctatgtttttttgtcctctttaaaacaacgtaggtcttacgtcacgcgccacttccctctcctaacacggcaacttttagaaataatattccacgcgctcgtgtcggatcaaatctcagccatccgatcaaaaaccaaaacccaaacgaacggtgcatatcaagggtagaaacgtagttgtaatggagatgggccaggtgatcttggaccattggttaagaaaaatgcgggacaacgtcgagtggtactaagaattgcacgtgtatataaaaacaaaccgcaatgcaaaa

SEQ ID NO: 34091 - DNA, 554 bp, Arabidopsis thaliana columbia
aatccaaatttgatctcacttgtaagtttttttctttcttccgaatgttaatttgtaagttgttgccattgtttttgttcttcattaatcttgaaactgttaaaatcaagatatctcacaattccaattctcgatagagcaaacggatcagaccttttccataaatattacatgtaaagtagtgaaaaagatgtatgtactcactactcataaatcatcatacgtataacccttttcatagacatacgagaattatacgtataagaattgagaaaggctgcaaattcttctgtgtattcccactatactggtaccatcacctttttccataaaaaccactatttgttaatttttgtcaataaaaaccctagaattattccacctaacctaataataacaagttaggaacccgtgtttgatatacaaactaattcccattagtttcaggaatcaggactaccacaaaacagttaagaagttataagtacttcgtcttacattacaaatcttatttacacatgtaagttttccatctaagaactaataatccacaa

SEQ ID NO: 34092 - DNA, 542 bp, Arabidopsis thaliana columbia
ctgaaacttttagttattaagtaaaattactttaaaaatatattatctcctattgtaacaggggttagaacctagtataacattaaaacaacagacttaccatatgtgatatgtgtgtaatcagttgcaattacccctccttaaaaaccacacttatggcttaccctaatatctatatacagtgctatatcttttatagaaaaaagttgagaattttgttttgtgatgttaacattttgttttacttacatattttcacgtaaaatatgcgtaatttttgttttgttttatccttctaaatgaagttacttaaaacttatataataaccatatttaactcgaagttggcacctttacccaaaaaaaaaacttggatatgggagaagatgatcttaattatctaaaataccgtaagatattaataacaaaaacatctatgggagttgaattacaatagttaaagtaataacttgaaccaaaaataattttggataattaagtaattcttgtaaacgagcaaaacatacggaacataattaaga

SEQ ID NO: 34093 - DNA, 536 bp, Arabidopsis thaliana columbia
tgtttgtcgttttctaatagtcatttaggtaaaccttctcgttggtaaagcattacagttaccaaagcgtcacccagaaaataattaaaataaaaataaaaaagggtattttccctccttagtaatatttcacttccctctccgttttttctgattacagctctcagactccattttcaaaatttagggttcttaattttcttcttcgatccttcaagttcttcaactccgatttcgtttcgtctcttcctgcacttcgatattgacggattctgggattctctccgtcattctcaggtttagtttctccctcttcgcatcgttttttgtttcccgttgcttgcctcgttttgatcggaacttgtacatgcagtcacatttttaatctgtgattgcgaatttcgaaatatatatttagtatctccggtgatttagtgtctggatcgtaagagtttgatttcctccgtgactccattgaaattgtgtttccggaagacgaatcgtccgtacaatttcgtttctcttagtgaattagt

SEQ ID NO: 34094 - DNA, 518 bp, Arabidopsis thaliana columbia
cattttttatttttagtatgtagttgtgcggacaaataattgcaaatcgtttttcgaaagtttttttttttggtccgcaactaattgctatcccaaaatcagtttaccatttcttagagaatctttcaaaaaatttaagaacccaaaacctcaactttagacatttttctcatatccgattaaccatggaaagtggatcgctgagagggaaattatattgcttcagcttcaccgaatatatggtcctcacatactaaactatcctgctaagtatgtcttctcgtgctttggttatttcttttgatgaggtcaagcctcatttttcagtcgatcactcctttagaaaccctaattaaccctaaaagaatactcgtatttgataaattttcaataaaattatggaaccctaaaaattatttgataacttgaaaatagttagctattttgattttccttaaaaatagtttttcttcttgtaaattatccactgataattaataattaattattattgattg

SEQ ID NO: 34095 - DNA, 565 bp, Arabidopsis thaliana columbia
tactagttcttatagctcaaaaaaattagatagctaagaggatgatataccagctcctgctccctgcgctggcgtttgaagatatgaagccacgcatttagtagtaccttgtcacaaaaatccaacacagaagttattagaaacattgccattaccacagtaattaaacgatatactgatattatctgataaaaacaaaatataaaaaaaaacaattgttttacaactcaatgatgtatacaagtcaagagaaagccatcagtcaacagaagataaaaaggagatgatgacaatagaggaagacgttctatcatataccatggatgaaaggtacctacaaacaagatggcaacaaccaatgctagccacagcaactggaagacagatattaatgatgcttcttgctcctcaccaccagccccaactcctacggcaaaatgtataaatcgtcaaaacatattaggtgatttcctgtagtatcataatatctttaacagctaacaacagtatgcagaagatgacagtaagcaacactcaacgaagcaacaacgattgatgttcctat

SEQ ID NO: 34096 - DNA, 628 bp, Arabidopsis thaliana columbia
gcaggtcgactatccccttctccacaaagtctcaatcgtacacgaccaataacatcactaactcattcattagtgactccaaccaaacgaagtttgaaaacttcttagtcaaaattttactaagattgtatatttctctttctcataaagacgttacgactagtgcagaagaatttctaatttgagaaagaaaaaaacattccaaaggagttgaaataaatgcacacatagcaattgcgttgtagagagagataaagcataaaaaaaaactcacatgtgaataaggttagagacttcatgggcaactttgtctggatcagtaactgcgtgttcattcaactctactacaccatcaagcctgaatgacgcaatcaaccacaaattcattaccaaacacacccccgaaaaaaaaactaattaaacttctttaaaatcaatttcacacgcaaagtaataaaccacatttactaaattccgtaatcttattgtcgttgataaaaatatggatccgatgcatctaaatctcaaccgttggatccttttttgtttactttcttatggatgaattatcattatactttttttgggactaataacttaggaatggttgaaaaacagatgatgaggg

SEQ ID NO: 34097 - DNA, 639 bp, Arabidopsis thaliana columbia
aaaatctgcaaaaacattgaaaagggtttaattcacttcacactatcaaaaggggttttgaaaaacactaaacagtaggtgaatctgagaacctgtgatgaagtaagaaacaaaattgacttgtgtagctgaaggaggagaaatcggaagttctccaatatctgaaagcagaagctttctcaattcgtcttcctcttcatcttcttgtgtagctagctgctgcttctgttggtcgtcgcaatcttctacttcgtcgtttctctttgggttagttaattcgattgtatcctcaatttctggaaacttcgctacatcaagcttcagaatctccattgtttcgactgtttaacctttgacggcgaaaaaacaatcggagttacttcgccgatttgtaattacataactaatgggcctaaaggcgatctactgatcttgggtttgaatcatgttcatgttcttctatattactaacttcacttcttcagtgaatttattaccagaattttgatccaatgtggacttgtgataaagtttgagattttgttttttcataaagtaaaagaactgatgtgcataaatacaagaaaaagtcagataattcaaaataccaaaagtgttacagacaaaacagtagaattt

SEQ ID NO: 34098 - DNA, 447 bp, Arabidopsis thaliana columbia
tgccgaaaagaatttgaaaagagtagtgtttgtggcattaccagatgggattcattcacgctcactgaaggaggagctagttctgagtgtgtccaaactctgtgactgcacatcattcccggaatcagggtgtctaagccggcgtgatcaatacgaagcaacgactcagacatcactgtgaatctgatgttcgcatacccaattggttcggagggaaatcggagaagctttgatgtgggtgaatttaagacagcgtgagtgacagcaagtgaagaaaggtctcaaatgggccccaattataaaggccgcgcgcagtgacaaagattatcgcattacgaacgatctaaagcatcgaaccttctttggttggttggttaaggtacgtatgaaatgtacgatatctcaactcaacattctaaatcaccaatgtctatagtatgaactttt

SEQ ID NO: 34099 - DNA, 314 bp, Arabidopsis thaliana columbia
ccggcctatatttgaaccagaatgccgtgtcgttcagcggcgctaaaagaaggtgactcgcgcagacagctgactccttttcaatagaaaggaatagccaaaccaacccagctggctgatcaatctcagagatcttatcggccggcaaaccggagactgtctacaagggctatgtacaaatcatgacatgtacgttttacatgcttgtaaatcagtttttgccacacaaaacagtccacctcaccaatctttgatgatgagtcatacatcagctttaggaaagccttttagacacggctagacacgtaatggac

SEQ ID NO: 34100 - DNA, 831 bp, Arabidopsis thaliana columbia
cctatatttgaacgagaatgccgtagatgtccttgacgggaccaaactgctcaaatggcctcctgaggtcttcttgcctggagaaaaggtcaagagaaaacagagtcaaccaattgtaaacaactgtgattttctagtaatatggatacacaagtttatgcatgcgctatctaaaaataatgaaatatacgttttacatgcttctaaatcagtttttgccacacaaaaaaatccaccaaaccaatctttgatgatgagtcatacatcagctttaggaaagccttttagacaaggctaaacaagtaatggactcacgaaaacttacaaggaaacaaaatcattgaaaagaaatatataattttgtgtaagagagaaaagagtagtatacacatgcagtagtaaagaatatacctgcaatcatgacgtaagttgcgaaccaagagactggttgggagatcactgtcacgactcccaccaaaccggccccgagggctagggctccggcccctccttccataaccccttggtggtgatggcgtgtagctccttcctctcattgtgtctagactttaatatctatatcaatcaagtaaccaacagaaattgagtcagagaatgtgctagatatgattgaatgattaagaaatagaagaaccaccgcagaagcttacacacatctagagaagacttcaaaaaagtataaaaccaaatttgaattctacaaattccaagccataaaacaattactgaatgtggatatacatctagctaataatgagttcaaactaagaactaagctatcggagaacatctcacagtacaacaagaaag

SEQ ID NO: 34101 - DNA, 559 bp, Arabidopsis thaliana columbia
tgtcctctgcaagactgcacgagaaaagaacagatcatctcaaaaatagtccaatgacaattcaatctctgtcagaagaaaaaaaaagttgtatgtagatatgaacatttgataaaactctttttcgaatgataacactctaatgcagaaacgtgcttaagcatgagaagagtaaaggataaacaacatccatatcacttgaaagtaaaacacatcacagctggcaaacgtgttttagtggccatcaacatcaactttataaaacaaatctagttatttacctcaataaatcaacattgaatagtcccacaaaagatagccaataaacaatagcaaaattgagattattctgttttcattgtaaatgaaaggatacaacaaatacctatggaagatgcacacttcagcaatatattgtaagcgttcatcaaatgccgataaatccgaaaaatctccagacagctgaatcttcctagcctcatcggctatttctgtcatctccttgttgattgacttgtgccagagctttatctcacaactgggtgcagagtatcagatg

SEQ ID NO: 34102 - DNA, 598 bp, Arabidopsis thaliana columbia
tgtgacgttgaaaaaagaatcgatgcattgattttcgccggagcaagatgagctacccaaagtagcacgaaaacaaagattcggaagactatggtgatgtagtcggttgaggattgctttagaaccaagcgcaaggtttagatctctttaagaattcacatactaacctttgaagcgtaagattagatgaatgggatatgtcaagctgaagccatgattcataaattgatatgtgtagaaccataacaaaacaggtggatcctctctcacatgaaaaaactcgatcgtccacatagattaagcattccatacaaagcttgtcttaggtttgacacatgaataagagaaacataccatggtacataggatccaggccttcagggtgttggctgggtgttgattgaagtcgctaaacaaaattgtcgaggagtgattgttggccacaaggctatcgagaccaaaagcaaaccgtttgcaatttgagttcaaggctaaagtatcacgagacttcaaaaaattatgggcaataaaactcaagcagtgcttctgtcgatatatgaaattgtgggagagtggtacttaggtatagaacatcgca

SEQ ID NO: 34103 - DNA, 549 bp, Arabidopsis thaliana columbia
gatccccttcttaagctcaatttgcagagattttgaaggaatccacaaaccataacccaaaaccatcggaagctttacctctatatgtagatctattattcaacagcctttcggaacacaagtgaaaaaacatccgcatcttcagtttcttgtcttacacgctagttttggatcattatctaggtgtcttgaaacacccgtaaactttccaaccaaccaacctgtgttcataaatctcaagcaacctgtatctatattgttctcagtctcaatgttatacactctcttctaacgtaattaggattctgttttttactattctcgttactgttgtggatagagtgtaaacacaagtatttaatttttctcactgtgaaaatttgacaacatataactttctaattgtctccatgactgtttttaaactccagcgtaaaccaagtatttttttcccaaactgcccaagaagggaatgttaattgttagattcataatcaatcacaataccccgaactcgtcgctgtccatgtcctaatacttgtgatgatg

SEQ ID NO: 34104 - DNA, 534 bp, Arabidopsis thaliana columbia
agaaaacaatctctattttacaatctttaaatcttagacctagaaacctaataggaaaagggacaactagaaatcaacactaattaaaagttacaacccattcggccacaaacgataaaattgcgtcaaccctaaaccaaaacttaagccacaaacgttgattatatatttaaaccaattcgatgatgaaattgcatcaatttcgcatcaccgacataagaaaaagagaaaatattggatttttggataatacagagatattagagaggagtaagagagagaaccttagagaaacggaggccagaagaggaaggagtagagccagggcgagaagaagaagaatcgggacggttcgggtcaacggatgatcttgaggcatcgctgggagaaggagatgaaggatcgagcgttttgggaagagtgagacactcgttcaagttgagatgcgatttcgattctcgcaagttgttcgggttctcattgttacctttccgatttcgatttcgcaagtagagagattaagatggagaagaa

SEQ ID NO: 34105 - DNA, 470 bp, Arabidopsis thaliana columbia
taacttttcatttttaaaaagacacattatctatagacttttgagattaggcactttgtggaacatggaatgacgatattatccctctgcgacatgaagattagtttgggcgggatttgctttatttcaaaattttttataccgaaatctgttaccgtcgatcactgttcgccgttcagtggcctcaaatttggcacggttgtatatgaatgtgtgtgcaatgatgggggtaggtaatcttgcaaacacttgggcaacacttgggatatatttaagtgttgttcatgttgtgattttggttaggagaaattttccaaacactgcaaaatttcgttacggaaaagttgtgctagagagggaattatttacttgtgcaagaggaaacgctaaacgactccgttggggagctatgaaccacatgtaagaataattgtctagtagtttgtaataagtagccgaattgcagtttt

SEQ ID NO: 34106 - DNA, 532 bp, Arabidopsis thaliana columbia
actctacactacacgatcaccgatctgatagttggatccttattttttcacctcggactccgattcagttgatacaagacgggagctcacaaaccaaccatgacaagacacgtgtcggtgtcagccaatcagttcccgacctgcaccaagcgaatccgagaccgccggtaactttaacaatcatcgcatctctctctcatcagaaaaaggtgaaagagaataaggaggagacaacagttaccaaatccggcaaatattttttctgtgatttttaggctctttctcaactatcgataatactttagcagcctcctttagtggtatttaatgaaaatgatacaccaattatttgtctacgcgtgtctctttgaaaagtcttctgtttctatatctgcacgttgacctaacgtcggaactcgtcacctgtgactgtcacgtgcatgcgtctaaatcaactatttagatttttgagcattactagtgactatgtgattatatacatattgacatagggaaaaacatcacacaagga

SEQ ID NO: 34107 - DNA, 410 bp, Arabidopsis thaliana columbia
tattatccccataagaaaaaaaaaacattacgatctaaatttactctgttttcttccgcgaaccaaagaaaaacgctgtcgttttttgaaaagcgaaacgcgtcaaccgcctgaaagagtgcaaacgtgtcagacacgtgtgaggagacaaggataaaggtcccactccaatgtcattgttcaattaatcgtgaattagacgatcctatccgttcatttttaaaagcattgatctgatggacggcttacaatttgacttgtttcatataatctcatctccatagaatatctactttaattagataacaatagctatctattctacattttgtattaaaccccctgacctaattccactaaatggtcaacaagtaatttaatattacatgtaattctaatctattgttatg

SEQ ID NO: 34108 - DNA, 520 bp, Arabidopsis thaliana columbia
aacgaagtcaagcatcttcaataagccgaataaaacaaagggcaacacacagaattagaattctagaacccagatcaaacttcaatcattgaagatgagaaatcaaaaacctcgtaccttgtaatccaaaatcgcggcaaaagggaaattacaattcgcgctgagtttaacgaagctctctcccaaaatcagagacttttgagattggatcgttccaatgagtacgtgaaaagcttgaaatcgaaatcgaaaatcaacgacgtctctgcaacgacaacagccatgagaggacgggatcgagacgaaccgcgcgttcgttgcttgctgtttttgatcggcaatggtattggtgattgtgaaattacgatagtacccattggttaaccccagaggagattcgtcccctcatggtgactgttggggtaatctggtaatatgtatgagtcaagccggcttgaaaagtagcttatattggctttttaaggaaataagctgcgacgattgatgaatgaagattatt

SEQ ID NO: 34109 - DNA, 302 bp, Arabidopsis thaliana columbia
gaaattgtatatcctctgaaaatccatctatctataattcagaaaaaaaaaaaacctatatcatcactcttaagaaaaggataaaaatgtaaacagtgagacaataagaatctaacacaacaacaagcttcagaattcatcacaaacagagaaatataatccaagatgaccaaaagacaactaaaagattcatttttgatactctaaaaatataaatgaacataaccaaagttgcagaaagaatcaaatagagagattgtatcacaaatgaactcagacaatgcaaagttttaagaagtatg

SEQ ID NO: 34110 - DNA, 504 bp, Arabidopsis thaliana columbia
atgatcccctgaaatttttcgagtacaattttgttaaagagtgaaatcaacaagaagagtatttttcattttattcacatccaccctggtaatcctaaaaacttgtgtttataagttatgatgttctcgtatattttcaggattatttattcgaactgattcttataaagtggtaccaacatcgtataaaaatccatcgtttatacaaaacaacgtagtcttacatgtgccatagagttgaaagatacgcaaatcatcctctaatccactaacagttcgccacaaaccgtttactttgttataaaaatagagatggagatctcagctaatgtatgttgtacgctgtgaacagcaaattgttccccacaaaaaaaaaaagtccagccgtacaacggtacaagaagatacggccatgttgagaccttttgttctagacccattttaataccctataactataagtctctcgtcgttactacaagatatttgctactttatactata

SEQ ID NO: 34111 - DNA, 350 bp, Arabidopsis thaliana columbia
gcacaaaattgcaagttggtgccccatcttagtaagcacatcgtaccacactttgattgtgtgagagacttcttcatcccatctctcataccaaacctaaatcaaatgactagtggtgcaacctgctgactccatatgaccataactaataaatcggtttatgaatccaactcatgtagctctatagaatagaaacccattcatttcacataatgaactgaatctgacattttatttacatcatttactactcaattttgtaattagcaagatcatctttttcattattcaacaattttgatattccataatttattaactttgtcatacatcataatattctgaaattt

SEQ ID NO: 34112 - DNA, 472 bp, Arabidopsis thaliana columbia
taatatcatacggagttcgagtagtactcaaaactgaagaggatgatcgaaactacgacataaactgcggaaacctatccaaaaaaaggaaaacagatatgttgacaatttgaaggataagaacgacgaccaaatcatagatttctttcaaaataaaaacaaatgaccgatgcttcatctccccatgtatattttcctcatcgatcgcccatgatcaggctgtttctcttccaatttttatgagaataactgtggatttttggtttaccatctgcaggcatgcgatcgctttctcttaacttgaaatctctgcaaatgcgtctggaatcgatgttggtcggtgagcggggaatttcgtcgtctataaatccagggaaaatcatagcaaatctgttttgtgcatccatcctctcaagctcaccgaaaaagtttccaaaattatttttcttttttaaactcaacatcactggga

SEQ ID NO: 34113 - DNA, 488 bp, Arabidopsis thaliana columbia
ccaaatttcatctagtgatcaaaaatgccccaagtaaaccggttccggtttagttacataattcagatcacagagagatcatcaacctagttcgaattttctaaaccagtcattgaaattcagatcacagacgattaccgttgtttgcatcggaccaagggaagaagttgaaagcatcgtcatcggagaagttaccgtaatgtgatgctttaaccgcgaatcgtgatggccgaacgcgggaaagaagagatgagaatcgagcggcggagggatgagattggcgaaaaggagagatcgtgaggtgagaggagaaggtagagaagagaagcgtagaagtctctgccataaccacaaagacagaaacagaatcacagaaacagagagatgcgtgaggcggtggtggaagaagaaggagaaggacaaaacgtgagcgagtctacgccacatgctttttaacgccgatgctgccacgtgccccgacttttgtt

SEQ ID NO: 34114 - DNA, 545 bp, Arabidopsis thaliana columbia
  unsure (1)..(545): unsure at all n locations
gtagaaaaacaaagatggagtgtttaactaaatcatgtctaataagtagcaaggtaggtcaatataacgttttacaaacgaaaaatagcattgcatatttaattatctaccaaatatcttaagtcagtcgaataaactaactcattatgttatcaaatcagccgcaaattgtgccgtttaagtcaatactatttttaacttagatatttagtgagtagacttcatacttgcatagtctagtagttatcattgtttaatgcaattttttggttttaatgtaaacttatactactatttggtcatgtaatctcactttctaaaaaaccaatgtaatcatccataatagaaataaaacatttatttaatataattaactaatttttaaacattaaaaagaatagatttatttttatacataaaataatagaaatataaatatatataacaccgancgtaggttgtttattgtaatccaaaagcagaataaaatttgggataggtattaagagtcataaatcttgaaaatagagtcattaattaataaa

SEQ ID NO: 34115 - DNA, 534 bp, Arabidopsis thaliana columbia
cggttgatacagttgagtatcccatatattacatgaaaatatatcatttttcaacaatatgtaatttgatcttaaataatttccaatttccaataatttgaccccaactatatagataaaagacgttattaattagcaattttgctgtagaacacagtttaatcataaacttttgtatagacccatgtgcgatgctgcgacaagccttgcaaactacaagatgtactttattaaaggtcaatattgttactgttcaaagattacaaaagtttcctatatatacagtgttttctaatgggacattcgatatgacatttgctatttgaatttaacaattactaaaaaaaaattattctaaaatccgtcagaaaaatggcattggatcgaaacaaaggaaaaaatattctacaacaaatacaaaaggaagaatatataactatagactggtgaaatgaaatcctaattagtgagacattagagaaggaagaagacaaaaattaaagacagttgaagcaaatgaaagacacgaagaca

SEQ ID NO: 34116 - DNA, 683 bp, Arabidopsis thaliana columbia
taaacctgatcaaacaatggcatgtaatcatctaatctcaggttaacttaacaatatacataattacatatcattgcaagaagaaagaacacagaaataagtttgcactatgccattatcacctgtaatcccccagaaatcagatgaacatgtgaatcaataagtccaggcactacaatcttcccctccagattcacctccatagttccatctcctataaaaccctgtcttcatcgaaatcacaaattacatgagaccaaaaaagtgtcaaactttcagcttcattcatgccagtgaagtagtatgaaagcagcatcaaccacattgaacattgaaagggtggataaaagaagtgaaggaccttgagagtggcaaagcttccaactttaagaatcctgccattacgaatcgccatggaatcggcaaaaggcaaagagctatcgctggtgaagattgttccattggtcactaacaaatccgccacgataccagccggtggtgtaagagacttgagagttgaccaatctgcgaacatcaatcgtatcgacgactttcagtcaaactatctgatttgagaaaaaagtgtgacaaccctggacagcgaacttacataagtcgttgagcaaaggaagatacgcgacggagataaggaggaacacggcagctgaaacgatgacgaagag

SEQ ID NO: 34117 - DNA, 510 bp, Arabidopsis thaliana columbia
tttttttcacttttttcccgaaaggaacgattttaaaaaataataatatagaaaacaattcgaacatacatatattacgatgcaaacaccgtatttgagagctacccataaaattgcttacacaaacaatagctgtctgttttcacaaatttataactccaaaccccacaattacaataaccaagagacacttaaccagatttcggtttacactagaattatatccccattggtcatctggctcggtccggtagagttccccaggcacaccggttacatacatgtatttcggcggaggtggagatgaagatgacttgctgcagtatgtctttcttggtggtggtggccgcaacggagttgtaattccggtatgtcctccgaggtaagaatcggaattggtttgattagtgagatagtgtaacacgaggaacattgagaaaaagactagaatcagaggtttaagtttcatcatgatcatgattattatgattaatgggaaatgtcttttga

SEQ ID NO: 34118 - DNA, 552 bp, Arabidopsis thaliana columbia
cgccagtgtgatctaaagtcaggtggctcagagcaataaaaagctagcacgaagtgactgagcttagaaaacaacactaggtagaaatcttcggtaaagtctaatcagtatcaagcaaagaaaattctccaatggggtcggaattctcaccagcatttactgtgaatgaagccaactgtagcgtcgtgtcgtctgaatcgcgaaaatgacgccagaagagacagcgaagatagtgagagccctatatcatcatcgacgggaatcgaagctggtataacctcaaaccagacgagttgggaagtcgtgagaatgaatacgtgcgatggattacgggtactccttctgatacttaggatccattcggatggcctattgaagctgagctccatcgaacagggatacgcccggttctcgtccattcggtagagcatggagcatcttctgtcacagacaataagatgattgcattcacagccattcaatagctagcatccgtcatgtcgggcatgtgctcctgtgtgttgatcgtcaataccagcccatggaagagta

SEQ ID NO: 34119 - DNA, 448 bp, Arabidopsis thaliana columbia
cgtgtcactactcactaaacaagctttatatcaggaggtgtaacattgttactcctgtttttaaactcttagttgtttcacacttttcagttttcatacttaataaaaaatattatgcaaccacctgcctgatataaagctcattggttcaatattgattttgtataaatttaatttcttacatagaaaatagaaaacatttatctctgtggaacaatttcttcctaaaacatctaacattaagaaatggaggaataattatcaaattgtattgtgtacggagaccatcaagacgaggattgtatgtattgatctaaatagtttaatagacaaattacgtagacaaaacacaaaacaattttattatgtaaaagaaaaagcatacaacatgatcttattatagaagcagagagaagccgtcattagcttcgtcctactgtttttaaca

SEQ ID NO: 34120 - DNA, 555 bp, Arabidopsis thaliana columbia
tagagtatagcctatccacagaaaaatattctcaaggtattaaatgctgaagtaaatgaagacaaagtgaaaagggtaaagaagattacaagatcctataaagcatctttcaggtcacgtgataaccattctttctcataataaggtggtcactatctagaggaaagcaccgacgggtttttaggttttcaaaggagttatgattactcatattaagcctttatgaccacaattatcaaaataagtacttttcacttttcagacttagcaattatttaagtaacggacatctataaatgcattatttgaattaggtaccacggaatcgagctcgaacacgtaagcaatcaccccccagattccaaccatgatcctagaatcagtacacaacttctcaaaacacactagtaagctacatagaagtaatccaagacaaggactcagagccagatcaatgttttgtttcaaagcaacataacaccccaagcatcaataattaaaagtacctgtccaccagataaaagcaccacacccgaatttgccttcgtagatagc

SEQ ID NO: 34121 - DNA, 130 bp, Arabidopsis thaliana columbia
atcaaagaagacgaagttcactgacgaggagactgcctcagttggcgcatacgttgcttccctcgctcccggaccaaaggtccctccccccagagcctcaatacctcaaacttgaaggctgaggaactag

SEQ ID NO: 34122 - DNA, 300 bp, Arabidopsis thaliana columbia
cgtaggaagagaaagtatgtgctcctttcttcttcttgataatgatgaccattttgtgtgtgtttttaagatgactgcaaatgtgttacgaaaaaaagcaacactctaatatgtgagtcatataatgtcaggaagggtatataagcatttcctgccctgaagcatacaccatggcgtcagtcgtcagatatggtttcctccatgtcctaggagggaagcctacttgactcaggttacaaaaatgttggaaactcggtattactcattccgtgtcataggccgtttatggaagttgtcata

SEQ ID NO: 34123 - DNA, 592 bp, Arabidopsis thaliana columbia
catcccaaaagtggaaacttccaacggttattaaccaaccctaatgagctccgacgagattttgggtgattccgacgtctcctcctccgcttatcccctctgtttcaagctctaatttggttttacatcttactcccactctcctcaagagttctctcaggtagttttctggtttctcactatgtcttgtctgcctgtgtactcttgtctcttaacctgttaaacctgtgcaagcttttaacccttttaaaccttactgcttctccgagagcatttatttgagtcctgaagaactatctccccaacctcttagcccacaatctttactacactcacctgcacccttaaatattcttttgtgaaatttactaacaaagtaaaagtttcttagtctaaatcttttaattgattatttgtaaagaaaaaaaaatatgaccacaaaagattatgtccaaaaatattgtaatatttgacctattccaattttaatttgtttaaaattattcccaaaaattcactacaattttttttctagaaaattcttcatgatgtactaaaaatagatacagctaatttagttttaaggaaattg

SEQ ID NO: 34124 - DNA, 597 bp, Arabidopsis thaliana columbia
cagtgtgctctaaagcactgcttattaaagtaatgatatgcgtaactaggttattttgggttatttgggttgggttagaattatttgctaaacccatgggcggttttctgttcaggcaacccaccccaaaaaccgcgtgggcagatcagctaggcctgaaaacccgccccaacccgtggtttaacaagtctaggccttcctttcttaataaagaaaatagagatacagcacttctctaggaagtggtagtaatatctccctatacttactctacctatgtaatgagacgtatttggatggatcttcctatctagacgtgccgtacgtacaagaaggaatcgctggaaagaagaaagaaaaaaagggattgctgtcatgaggaagtcttaagaggtggctcaccgcctttaagacaacgttggccgccttggccgagtcactaaggtctaaggtccccttgtatgggcaagaacccatatgtagtgcgggtgcggataatcgacacataacccgcatgaagaatctaaccttagttggcttagtggattatataatacggccaaactaagtatagtgttaaggaatgcggattaagtg

SEQ ID NO: 34125 - DNA, 607 bp, Arabidopsis thaliana columbia
attcatatattttgatttcagttagttaatcaactatattccaaatttgttatataaaaaaagagttgtaatggattactacaaaaaaagggaagaataacgaatatagtgggaaaaaaggagtgaaatgtacacgagaggttggcaacgaaaggcttttctctccataacccaaaaaagattcggttgtcacataatttgcagagattctccactctctctatccttctataaattacatagccatcggatcacaaaacagaacaacaacaacaacaacaaacaagaactcaaacacttcataactaaacatcctttaaagccttttcaaaaactcaatcatgtcaagcaactgcggaacgtgcgactgtgctgacaagacccagtgcgtgtaagtgtcctctgtttctttttttgagaaagacctgtttctgattcgttgagttatcgattttgttgagccacagcagagtgaacctctctgtttttggatcttgatgcttgatctgtgtctgaaactataatctttgtcttctgtaaatcttatgttgctctagatcttgattgacctatgctttgttactctgtgactgtagaaagaagggac

SEQ ID NO: 34126 - DNA, 204 bp, Arabidopsis thaliana columbia
aagagataaatcaaattcgatatccaagtagaagataagtgttacctgtagaggtcgcattgaagagttcccgacggaccaggactagcaactccaccggcagtctccaccaaacatagtaaatccgatttctcgcttttaactccacattccatctcttccttcaaacacttttcaatcatctgtaacacgacggagcctcga

SEQ ID NO: 34127 - DNA, 377 bp, Arabidopsis thaliana columbia
cctatcggttattgctcttcttgtcagtattacaaagggcacctgtattcacttccagtttcagctactaagcaaccaattcacatgtttctgcacaaaaacctgacaacacataattatttattggtgctgtaggttgagtagtcagccctgctctgataactttttcactataatctctacataaattaccaggaaaatagtgctgaatagaaaatttgctgtctacataaccttactactttgattatacatccaggttgaccttgaatcactgccagatacggttcctacagacagatttgttagtttacgaggcggttggagtttgttcggaaagggatctattggagaaatactactccggcttacataca

SEQ ID NO: 34128 - DNA, 403 bp, Arabidopsis thaliana columbia
tcgtaatcacgtatttggatctgacagaatcatagaatttttgccactttctgtcttcggaattttttattcagtgagtgatttgtcggaaaagctgacaagcgacattgatgatactcggatttttttttctgttttatgttatctccgtgattaatggatgtagcgacagatttggagctgaatgttgcttttattgccctgtgatctaaaagggacaaacacgtgactctgtttctctctgttttttgtttgaaagaacttttgtctcactgagtaatttcgtcgaacaggttgacgactttatagctcagacaaaaactctggccggacataacttggaaccaacaccgtggcatatcttccacgcaaatcttttcacgcagtacgaaacattctcagg

SEQ ID NO: 34129 - DNA, 536 bp, Arabidopsis thaliana columbia
atacgccgacaccaaacgaacctcatgaatttagtcatttcttcttcttttctccgaatatcgactttcaggtttgatacttgttttctcagttcatcattctccattttttcttgaacgaagctgttttgtaattcactgtactgtaggcttagaccttctacttctgtcttcaaattcctgagccttgtctctttatcatcatttgacgacttagtgagagttaactctttctgcgctgtcttggctacttctttagccaaagaaagttttctctcaaattcatctctttctttcctccactcttgtattatcttctcggtttcagtagctgctgcactcgactcatctctcagctttgtgagcttcaggacctcactttcaagcatctggactttcattgacaaagctttgttcttctcttccacgtgcttcctttgttctttctcttgtgtaatctcggtatgtgttttctcttgcatttcctcaagagttttgttttgcagacgaaggttgttggcttcagcagatgtttt

SEQ ID NO: 34130 - DNA, 409 bp, Arabidopsis thaliana columbia
agctataggaagcaagcaagaccacgagcttaagaaaaaaagaaatcagattaataccttcaataagtcgaacgggtcatgcatcaaactctcctctttcacgtagtccgctaactcagcagccagatcctcatcagcatgcaaacagagggaatgctcaaagctatatcagctactcttaaaaatagcaacagttctcatattaactattggacaagacctaccagcaactcagctggactgaacatgtagcgcagaacaagcgttgcaggtattgagaccttagaagcatgtgtgacacgtacgtcaacacaagagaggaaatgtgataaaatttagaaccactaggaacaatctccaacttcaacaactataatggtcatttcttttgatttgaatatgctcaaaa

SEQ ID NO: 34131 - DNA, 494 bp, Arabidopsis thaliana columbia
atgaacgtccctgaatgtaatgttaaattagattcaaaagaaaagtgtcttttgtacaacaagtgcaacttgagtttgaaaaaggctaaatacattttagaacaaagaaactagtatgaagttttgaatcctgcttttaaccaaactaaaggccagtgcccactggttctcacagcagggacccacatgatcaaataatcacttttgaaactatgaaatctaaagtgacaggatctctgacacattgacaaaataaaacatgaaactgatgctgttccggttttaatagttgaacgcagagatcagaaatgaaatgaaaaaggtaaatcgagaaacattgatcacaaaagaaaacttcaaaacaaacaaatgatctctaccaaattctcttcttgatattttttcaatgtaaatgcaaaaacgatgattcattctgattttaaacccaagtatataaagtcagatacacgcaaaacaatcaaattctgagacat

SEQ ID NO: 34132 - DNA, 450 bp, Arabidopsis thaliana columbia
tgtatttctcaaagttataacttataaagaagagatagcattaactaatagttaccagatcgacagaccgttaatgtgtcagatagataaggtaatttgggtaaaacggttaaaagcctacttggtagatttgagtaaaatactaaacagagtttcttcttatatctatgtatctaatttatgattagtaagatatgttactagaaaacatgtggagcatgatatcgcaaaaggatttgggaattgaatgcagtgagaagtagagtaggagttagtggttgacgtaagttaatgcaaagattaaagtagataattaagtgttgctatataatagaccgtaatgttggttatgtttgatcatcgggcagtgcactctgcaaattaacaaacatacttcaaaaaaatatggggcgtctcgttagtggtgctactctattggctttgttatgt

SEQ ID NO: 34133 - DNA, 517 bp, Arabidopsis thaliana columbia
actagattatgtaagaaaatattgatagtgttcacatatggaaaagaaaatattgaagctgatatataaagtaaaagtatatgcgctaatatgtaaaacttgagtgtcatacctacaataatcatcaaaacttgaccaatctgctcttgtttcgacatccaaaaacccctgtaaatcatcaaaacatatatatcatgaactcaaaagtacacatatagggtaatgatttatctctagatgaataaaaaaaagaaagtgatgtgttttttccattgaagcatttcgtcgaacaccttgtaagcagggataatacattaccaatagaattataagagaatcatacatcaaagaccaaaaaatcacgacctttgaattctcttgacactcttgactgcaataagaaactccacgatcttcaaatttagcagaacccatgagtttctttaggcaaagatagcaaacagagtcgagctttaaaagagaagggcaagctacgacgggctttgccgtgtgtata

SEQ ID NO: 34134 - DNA, 543 bp, Arabidopsis thaliana columbia
cccatgtatctttatatatttcctccatcaaaacttttatctctcatccttcttaattccctcaaaagattcattattagctaactcaacgtttcctcatactaatcaaccactagaccattcatccccgcgttacaaggccgagttatcatgaggatcatgtggaaattcattatagtgatgttgtgttttatagctttggtgggatcaagaggaacatcggcaacgtcaaggctgagaatgaagaaggaagatataggtagaaggtttgctttgcagaataagctccaacgaggtccagttcctccttcacagccttctccatgtcacaacaaactaaaccctctttctcattcacaagtttattcttcccacacttatgttacttgcccttgaagcttgatcaaccacattcttttatttattgtctctcttctcatacatatatgtaccacgattcgactcctccaaactcgaaagagtcgaaattgtaataccttttggacataaattatacaactctttgtgttatttaccatttga

SEQ ID NO: 34135 - DNA, 562 bp, Arabidopsis thaliana columbia
ttacccacacctcttctaactatctcgaacaagcaaagttttgacgccaataacgcctaacactaaaacattaataaataatttgaagctttttactatatttcaaacaaacctcgaatatttgttttaagtacattgcatgtggtttcaaaacaaaaactgaagaaaaagaagagagtggataggtgtaggcacgcatgacgcccagcaacaacacgcgttgcggtgacatcctctgtgattggtgaaccgaaccacatctcttcttgtaaaaacggcacattaactcattttctcacacgtgtccctatccccaaccctcactaacacgtacccatccttctccccccaaatgtccttcttccttaatattcgcctctctcttattggcccttcacacttcttataaccttccctacctcatcactctctttgatctctcaccatccatatcttcttcttcttctttgagttttttttttttatcattcttgacgtcatgataaagatactcaacccccactcacaccattctcaaaccacaactcttaaaacagctgag

SEQ ID NO: 34136 - DNA, 562 bp, Arabidopsis thaliana columbia
aaaaagtgggcctgtggtattgtggatcgatgttgtgtgttttagaatccagtgggactcttaaatctttgggtagcaggcagcaagtggtttttgtctgacttttgtgtcgcatttatatctcgcccccaaaaccagctgttccacctggcttaggattcttcttctctgcgtaattttggtattaacaaacatataccagaacatgtaatattcaaaatattaattttacttgaaatacgatctacaaagacattaaattttatggagatgcatgtattaatttttcgtatgcttattattagaaagcaaaaaccatagtagtaacatattctttcatgcaataaagggtggccaacatagtggttctttgttgaaaatgagatacaatacaaacatcaagaaataccatgggaattaattctaattaggtagtagttgaaatcaaaaccatcaaatcacattacattgaattacattattgaatataaccccttttatggcccatgtgtgggcaatgcataaacatacatgttgactttttggttataaacatacatat

SEQ ID NO: 34137 - DNA, 553 bp, Arabidopsis thaliana columbia
  unsure (1)..(553): unsure at all n locations
nnnnnnnnnnnnnnnnnnnnnnctaaaggtcacatccaccgtgtcagggtagtaggctgtcactacgatttcttcttgctgctccacctctgggaaaatctcgccaaaacgatccacatttcccatatagtccatgctgtcttcaatcgcgactccttgcgctcccagctcaatcaagagattggaaaccaactcctctccctcacgcttcactgtaacttttaactcttgccatgtttccattattaagataccaagcccgtaaaacacaaaaccaaaataggaaattctctgaagacgcttgtgtctaagagaagtttatctttttggcacagtgtttagggcgggttcagtttagaaatttaactgaaccatcctttctaatcacttacttttaaataatcttttaatctctcttgcaactgaggcacaacttgactggaactaagaaattcctcaacattcatcagctgatagccctgtccttcatctccaaatacgatactgtcaaactggttctgtgtcactgaccaactagaaaaacggactgttt

SEQ ID NO: 34138 - DNA, 430 bp, Arabidopsis thaliana columbia
gaagttaaccaaatcgcttaaacacaggtctaagcggtgatagggatctccaaacatggaagaagaactttgttgattacaggaaacgaaaaccaaaacagaagaaagaagacgaagaaagaagaagagaaatggagagaagccttaccagaagttagagatagagagagagagagagagagagacatagagagaaggtgaaaaagtgtgaagatcctttcatgcgctttaccggctgcgagcctgcgactacgacggggaaggagataagagacgtgcatcaacggacctgatcagtttgggtttaagcatcgtacggctgataatgactcgttgatgcaatcgtgaaatgatgctgacgtggactatatacagtagagtgagtgaagccgtgaaagggactacgataccctcgtgcgtcaattcggtt

SEQ ID NO: 34139 - DNA, 553 bp, Arabidopsis thaliana columbia
ctggaaggattgtaatgagttcgagcaagaaatctcaaaaatcgaatcatttccggaaataatatccagaattgatgaatatgttgcacaacttaaggaggaggtggcctatctaaagataggtatttattcagagtatctatttgatcattctttctattttattctccttttttatctttatgtgtttcatattcgtgtagccaaggcgattgtcgaagagagggctaggattcgctccataaaaagagcggaggcgcgtaaggttttagaaaagtaagtttaacaattgacgactttttagagaaatttttaatgatattgacgacttagatgattaattatgatcattatcaaccgtttaatgattacttttactttaatagtttaaggcaaactctactcggggagatgaggaagaggaaggctgacgaggatctatgagaactgatgatcacataaacttcatgctacatgcaataaacgcggttaattgggttttgtttttcttcaacataacccgacctagctagggtattactatatatatggg

SEQ ID NO: 34140 - DNA, 556 bp, Arabidopsis thaliana columbia
caatcaaaagaaactgaacaatgtatttcatcgtaagaaaaaaaagagcaattaacaccaatcaatgtgttaatcaaatatataatcgataccacttatccttttaatttgacttcaagctctgctcttgcacttctccatcgccctcggagctgaaatatttttacaattaataagcaaagacatttgaccacggtatttattctgttaaaagagtatattttttattccctctgttatttaatctctttctttttttgcatttgacaaaagagaatcaaatatcatgtattatatcaatgatttaaaagatcaaagcgataagttttctttcgacaaatttgttctttacggtagaaatataattgtgcgaaaaataatgaacggtttaagcgtttgatgattagacatcatcttaaacgatagcatattaaattatttaggcgaccaagttatgcggttgaggtgtcattatagtaacttttaactcttttgtaagtttttgtttctttttggggcaaactcttttgtaactattttactatattgtatcata

SEQ ID NO: 34141 - DNA, 142 bp, Arabidopsis thaliana columbia
caggatcatcgtcgcggtcggctcggcctctacggtcgacggctccttgcggggcctcaggcgagcgcgatgagttcttgcgaactgatcccgacctgattcctcgcgatggccgcgattcgcgaagtcgccgcgtgaagct

SEQ ID NO: 34142 - DNA, 508 bp, Arabidopsis thaliana columbia
ttttattattaattgtattttatgtaattaatttaaaataaaaccgtaattaattcataaaaagatttgaacgtaagtttaagattataactgaaatatttatattgactatagttttcttcaccatacaaagtttaaatttcaaatacttcctgaattttcggttatttaattatttataataacaccgaaccaaaccaatcaatgtctaaactctaaactctaaagactttgtcatttcgtgaaccgtcgtcataactgatccttccaaagaatctccaaaatccctaaacttcgaaaatggcagaaaccgccgagacaatcaacaccacgatctcatcgccgccaccggaatccgaaagctccaccactatttctgcaatgacagatccaacatctcaagaagcagcctcaaaagacacagatctgacgaaagaagccgaatcagagaagaaaccaggaggaatctctctccgaatctggccaccgactcagaaaactcgcgacg

SEQ ID NO: 34143 - DNA, 423 bp, Arabidopsis thaliana columbia
cattgttacagaatacgtcagtagtccaccgatgtcctcaagaaaaagaataaaacatacacagtatagagactacatttgacattcagctgttcaacagataacaacaggtatattcacattcgagttttgatagttttcaaacaggggataacagcccgtgccaagatattcgaccagtgtctatatgtaacagattactcggaagaacctcacatagctaccgcaaaatgggctatatattcatcaaccctcttaagttaacgtatcgaaattttacatgaaaaacgatgacagacgttattctttgctttttcttcgtcaaatactcctacaacgttataaacacttcctagaggtggtttgatataagccctccaagtcgtctaaccatcctagacccaacacaaaacccgtggtgtg

SEQ ID NO: 34144 - DNA, 541 bp, Arabidopsis thaliana columbia
gttcattgtttttttagtataaaatctttgactgattgattcttattgatgttgcgtagtgaccaccgagaagcgtttcatacatcactttcattgtgaagcagctgcggatgatttctacaaaggtgcattgcctgattggccgtcagttggtgatctgaataatcaaaaacgattttacatggtaagattatttaagacattgatcatcgtttcttttggtttgctctagatcagttaagcagtgatctgtttttattgttgctttttgtaggtgaagaaatgcgagttgcaatccaatgattggatccgtctatatttggaacttgcagttggtgtacgttatcagcagacttcagaggtttttgtgtctcttttgcaaaacaatgacatacaatgatcagtgccattgttgttaacaataattaacaggtttggtttgcttcaaactgttgctgcatgcagagtgatctgtccaagttgcaggttctgaaagtggcaatagaaactaaggaagaagatgtgcagcaccgaataggag

SEQ ID NO: 34145 - DNA, 485 bp, Arabidopsis thaliana columbia
ggtagaagagaaacccggagaacagttaacgtaggaggttaggactgtctgtaattcttttgtttttgggtcatgttttggataatagggtcacacatcaaatcgaagttgtttgttgtactcataatagcatcctaagaagtatatgagaaactaaactattcccttgaaaagaaaagcgttgaatacttaaacttgtttgaaagcagtctcaaggaacataaagaagaaacaacaatccattaagctctaagcaacactactaccattagattaaaaactacatcaacccaacgaatgattcaaaatactgagaattcgaatcaatttctgactttcttcttggattgagatcagttcgaagttagaagaactaccgtttagaaggcctaatgttatcacccgtgctcatctcttgctcactgtggtccttagcaccctcttcctcttggacagaggctcagatttgccagcactcaagctga

SEQ ID NO: 34146 - DNA, 524 bp, Arabidopsis thaliana columbia
  unsure (1)..(524): unsure at all n locations
gagagttagaatagataagattttaccaaaagatttcttggtctttctacctccttgatcaaagagtaattcaattgatccatccaactctggcacgtctgcaaatccatatgtccaaaagtgaatgcatcaaggttccaaagacaaggctcttttggtgaactttgaaatccgtggacagtgaaccgatacatctacatcaaagcagagagactcatcacactgcaattaatctcaataagcaaacacacaagaaacgagagctgaaacaaaacctcttgagtatttaacaagcgttcccggaaacattctttggcatgtctaagtcctaactttggactatgcaccaagccatagctaacaaactccacagcataaatatcagagaatttgatctcagtttcggaattctcgcaaattataattcccaaacaagttgttcctcctgtcaatatagaacaagaaattggattagatcagtaacataacaatctatgatctactaggtagnagtaaagaaagag

SEQ ID NO: 34147 - DNA, 598 bp, Arabidopsis thaliana columbia
taaatcttcataaaattagaaatatttaaaatgttttataaagtctaactttttaaaagtcttaaatttttaatatttaataaaatttaaatatttgtaatcttttgaatttttaatgattttattttttaaaataaagaaccggactaaaccgaataacattttaattttggatttctgataaatcaagcttcctgctaattcgtattcaaaattattttgatctttttaatagtatgaatataatttattgcacaatgttttaagcaatatgagaccttatacactttttcatcgattaagtaatatatgtttgttttaaaaaatttaaattacatatgccgcaataaatttaatattttattaactatatgtattttatataaaaaaaaaaataaattagagatcagaacaaataaaagtgaaagaaaaatcatacatttatatataacgtatatggaaagattttaggaaattagcaattaattgaatatagttaaataaagataaaatttacttacagatataaatctagaacaataattgtcttaaaaagattttgtagaaaataaaagctaaatactattttaagattttt

SEQ ID NO: 34148 - DNA, 523 bp, Arabidopsis thaliana columbia
  unsure (1)..(523): unsure at all n locations
tgttatatgaggaaacaatgggagggtgtaagaaagacattcttgcacaatttaaggatgcgtgttagcctgacaataggcgtaacatatactaaacacagtccaacatcaatttattttaaaattatcaagactgaccaaattcagaattaaccactttcctttttgagataaagttaatagtatattataaggtttttgctttatatatagattctaagttatccgaagaattcagctgatattggatattgatcccatattgtattttggatttctcgtgaatacgccattttagaggtatgtatgtgtacgtattcaatacgcgtacttgtttaccatgtagacatgaacttttacagatgcgcacagcgacnnggacatgtaagtgcacatatgtgccaatcagcccattctgcccatgcatgtgaaacaatgtgacataaagcttgggaacaaagagagaaatatgaattctgcaaaaatgttcctttttaattgaacagtgctggtggatagtgag

SEQ ID NO: 34149 - DNA, 514 bp, Arabidopsis thaliana columbia
cctgcttgaagatcccttttaatgctctccacttttgccactatatcggcatctgatgggttcatatgttgtgcagcagtcgcaaaatctagagcttctttacattttcccaactgcgtgaaagcacatatgtatatgaaatggaagggtgactaaaataaatgcttattgccgaaccatctctatgtcacatagtaaacttaaaattaactgtgatcagagctatgaatttacttgctgcagcgcttcagacatgtagtaatgagctttaaaggatgaagcatcaattctccgagcattatggcaatctcttacggccatatgagcatcattcttccacttcctctgaaaaataaacaaatcagctgattatggttattagagaggagtaatgtagggattcaagctagttatagacaccagttctaaaggaccttgagtaacaatgcggcacgagtacaaaggcattcatgcattagcgcagactcaatatcattagaatgagcaccagaac

SEQ ID NO: 34150 - DNA, 601 bp, Arabidopsis thaliana columbia
gatatagagcttaaccagttatgtgtaaaagcaagtggtgaaaattaggttagcttgctttctaagaaattgcaagaacaaagagatatgtgtgaccaagcgttgtatcagttggtaaagcaccctcaactcaatcatctaacttttttgttactgaaatatatataaaaagcggtttagattcttaaattttcgtgactatatatatttatacatagaaagcaatctttttcgggaccgcgaagaacgatggtccagcataggaggcaggcaatatatgaatgtgtttttgtaagtccatactagggacgacgccaatgtgttattttaaaattgtttatcttatattgaattttgaacctttgcgatattattcgatttcattttctttatggtcacataagcgattaatactttatttacgcatcatggggtaaatcgataaagtttacatattattcatttgggttattaatgtaatttcacatgctgttgattagtaagagaaagaaatattgaaaaatttgtaataacaattgaataaagctaaaaggaaacctaagcccttattgcaaatctggaggtggcaaaaaggggaaga

SEQ ID NO: 34151 - DNA, 553 bp, Arabidopsis thaliana columbia
tatgaaacaagagacaacattatattacgttatataccctaaatacaagaaccacggtaagtctatctttacaaagtaaagagacatatacatacccttcatgaacacctccaatgtcaacaaacgctccctgatacagatgtaaagtggtaactgtgccttcacaaacctgcatggacattacgatattgctcatttaaaccaatcattagttacaatatacaaggcttagaataagaattcttaccatccctggatagtaaaagggaagctcatactgcacaaagaaaaataaagcaattaacttacaaacagttcatcatctagcaaactaatcaaacaatcaaatccagtagcataataatatttaccatcccatcttcgtaatccttccctcttttcctcctacccggataaaaatcctgatcgagctgtataaataaaaacatcatctttattagaatccttctcgtagccaccactaagctaacaatatctcattgttcaaaaaaaaaaacgaaccttgtaagattctcctccaacctatctttat

SEQ ID NO: 34152 - DNA, 537 bp, Arabidopsis thaliana columbia
atgtcggttactagtctatcgttcttgtatggtcgactcgacgccgggtttaacaatgtcaccctcgtcgatagaagagaaaaacaaaaacaaatgcagtcacttttagttgtatattttgatttcagaaccattttggtttgtaggcgtgcagcgtttggtgcggtctagaaataatcacgtttgcctcaaatctctaaagtccgcgggaaagttttccctccttaaacctagaaatagctcttaagcataagcaaaacatacatgtgaaacaaaaaaaaaaaatgcagaggaaaatgaaagggaaaaagaaaaacattggttcgattttcgaagattgcaatgtatctgcgtctcaggagatttatctacagcgatgcggttttgccgtaccaggtcaaccacctccagattccgatccctccgtcggagtctcaccgccaccgttaaacgacggaattccatatcagcgttcatccggtgattcggatacggataaggatagtgtaatcggctcgggtaacgatgcggtggaga

SEQ ID NO: 34153 - DNA, 534 bp, Arabidopsis thaliana columbia
aataaaacaacccaaaattgaacattgctgaaagcagaaagtgagaaaacttttgccccaagttatccatagagataaaaataattccaatatctatgaaaacataaatggtggaaataggtatctagatagatgttctttgcatcaaagttcgataatattaattttgaaatttaagaaccaaagatattgactcccttaagatcaaatcttggaagtcttaggtaaggaatccatcaaaattgttataagaaatatctactcctaaacaaacaactcatgccaaatttaggaaaacggcaataatgaatagacattttgcggccgaaagtttgtaacaaacttaaatccgaattgagtttcccgcgtaaatccgttggaaaacaaagccaaaactcttacgaaaatagacaacatggtaaactttagaaaacagattcaggaatctagaacaggcttgttgctagagatctgtagagaccactggattaagatgatacttaacaaacatttgctacacagagatgctgatat

SEQ ID NO: 34154 - DNA, 584 bp, Arabidopsis thaliana columbia
gacttttaaatcctactctttgtaatacattcatctaattttaaaaacatatttttaaaaaaatttaagaaattgaaaagaactgaaaaacaagaaaaataaaataaaaaaaattcgcacgtgtgtgactgtccgaactactaacggaaaagagttaacgaggtttatttcttccgtcaactcttgtttggtcatcacaattcgcacgtacgaaaacacaaaacacaagcgaacactttcgataaacaaaaaggaaaaacaaaaaatccctttagggcacaaaacaaagcgaagaaaaaacacttcttcttcttcttcaacaacaacaaaacccaatttcgcggctaaatcaatcgcttcttctactggtacgtacttactctcttaattcatccttcaatcttcgatttacctttctgggtttcgttttcctcaagtcaatttcgattgatttcactgtttcttcgataaagcttcttaatactttataaacctcggatcttctcaaatctctcttccttcttcctagaatttgtccgaaattacgattcttcaccgactctttcagaaatttatgtttgatt

SEQ ID NO: 34155 - DNA, 99 bp, Arabidopsis thaliana columbia
gtgaatcggcaggacggaagttgagtttccgtgctgctgcggatgaactgggagttacccaaggtgcgattgttcagcaggtccgggcattggaggaac

SEQ ID NO: 34156 - DNA, 532 bp, Arabidopsis thaliana columbia
aagtacatgatataaactaatctggaacatagaaagaagctaaatcagtgttagactaactaaaaataaatgtaaatatattaggttaaattcatattaatggacctaattatggtatacttacttaaaataaattttaaaatattatgtataagtattaagaacactataaatattaattagactttcacttgtaatcttgtaacttaaaaatagtacatgggtcgattatctttttgggatgggtcaatttaatatttttaataaaaagttaagctatttttaaaaattccattggggtcagttgatcaatagtcaatactgttgggaacttacgtctaagcccacacttccattatggttgttctagtaaattgataataaactataaaggtaaattaggtgtgatttatatgaccagtgaaaaatttcccttaacgttaaatatgtgttgtcaagaatgttaagaaacatgaatggccatgaaaactgattcatttttggtttgatttcggtttaaaaaaaaacaaaa

SEQ ID NO: 34157 - DNA, 140 bp, Arabidopsis thaliana columbia
agcgtggttcgccaacaccttcggcttcacgctcagcgcgaccgaatcgtggttcgcctatgtgctggcgctgatcttcctggttttccgcccacaggggctgttcggcgaaaagatcatcgaacgtgtgtgaccacgcg

SEQ ID NO: 34158 - DNA, 596 bp, Arabidopsis thaliana columbia
tgaaagcagagaaagataggtcaataaaaataaaagaatttgtgttgctctttttgtttgttatgggatcagccaatcaatatttcatcaacttgctaatatgtaaaagacagacaaatagagtaacagtgaagatgatggttgtgatgtgatgaaatgtatgccgtttaagaaaagtgagtatcaattagctgagctttgtaaagtaagaatgaacaagttccaaaatatttaggtccaaaagatcttcccatggagcttggttgtgaaaatgctaactgagtttatgctcccattgttgcaaaagctttccctgcgatttgttacaaacaaacaaacaaacaaaatgtcaccaaaatgtatgaatgtttgttcccattacaattgttttaggtggttgctcgagttctttacctcttgggatcgagtaaccatgtggctatgcattttcttctattagaaggtgaccccacaaacagctcgtttagcttctaaataaacatttcattatcaacatggttttgatacaactgaacaaagcgaaactatgaagaataagctaataattaagagatctgatcctgattgaaaagagg

SEQ ID NO: 34159 - DNA, 533 bp, Arabidopsis thaliana columbia
cccgaccaaaagatgaacttgactaaacatgaacggtgatgctaaactgttttcaagacacaatttcacgagaacaagagactagataggaaaattgcaataagcttttctcattatataaaatgttataatgattgttctcttccacaacaggccacaataaactaagagaataaaatgtaatgaactataaatatcaggaatttttgacttagcacataaccagatactatcttttgatcaagatacctttcaagaacaaatcaacttcagaaaaaaccaacgtcagctttgcatagcttcaattccgtcgtctaccagcttcatagttactacaggaactggtggttacagacatatacaaactacgagcaaataaaaatgttctttaccatattctaaaaagcttctaaatcggatagaactaataaaacaataccaatgatacatacaaagaacccgcaaaattgtctaacagcaattcttaataccatcattttcaatagattaaatgacaacttgtaaaacaataa

SEQ ID NO: 34160 - DNA, 472 bp, Arabidopsis thaliana columbia
  unsure (1)..(472): unsure at all n locations
cacatggaaccatacgcagatgattcagttgatggtcaacacaactcatggcgtcccagtcatattcttgacttcagcgatttaaccataggtaagtcttatctacgagatatctcccaaattcataatccaaatgccgaaatttctgaaagagttgaggaaattgcaggagatcccatctgcgacttgataccaatatacttggacgtctttagaggagacgctgatcttcttaagaagcttctagaaaattatggacttccattaatcagaagtagatcttcagagaacggaacaacaaaaacagcagacagtacgaggaagaaagtattgtctccatcctaccgtacaatgtaagtagtaaactgtcgtaaacatggttaagaatagccttaaagccttttttatgttgtttaagtaactgtgattgttggtttcaggtgttactgtatattacatgaagnaaatgtgt

SEQ ID NO: 34161 - DNA, 537 bp, Arabidopsis thaliana columbia
caacaaattatcaaagtaaggatacctattcaagcgtatattaactatatatacattaacaccatttcccaattcctggagtttagagcttgagaatcaaaggcagaggtagaggtcacgagcaagaaacaaagtagacgaagaggcacgaagaacccacaaagaatagatcgaagataaacccagtgagctatactagacgagccaaccagagaccatttggctgtagaaatttccctagttgaagaaaactattggatttgacttgccaagatctaaaattgcacaaagtcaatctttttcctgaaaatgacaatttgttgctcatgaagggatgtttgagttccagtagccaagtatcaatcagcaatgtatatttcccaatcccatcacaagttttatagatcagtctttaattttcacggctaaacccgagtatcagaccatcctgcatcattgtttccagaatcaataaacggcatatcccatatatacaacatttgaattttacagatgtcgcctcggatatccgtggag

SEQ ID NO: 34162 - DNA, 267 bp, Arabidopsis thaliana columbia
tatgaaatattaaccctaattaaattattttggatcgtaataaactaattttcctagattgtgggtactcttacgttatttacagtatactataattaccaaatcatataaatatagtattccaaatcgcggcttaatgcaagcaaaaaaaaaaacaactaacacatcgtagatacaaaaatatatatataaaaaaaaatatatgtgtgtatatgtatctgcgcaactagattaagattgatcagatctgtgctaccatgttttttg

SEQ ID NO: 34163 - DNA, 448 bp, Arabidopsis thaliana columbia
tgtatctcaatatctcatattgggatattaagaagtttaagaccactttaacaaaaaaaaaaaaaaaaaaagagtttaagaccaaatttcaaaacatttggattgaacccaaaacagtgcctcgattttatctgaatcaatccgttaacaaggatgttttggtctcatcatccaatagaagcaatcagtaaactaatttgcatgacaactaaaactgttttaggttttatgcagaccagaggtattggatgatgaaaacgatatggtgacgaaaaggatattattataaatagaaaatttgtgataatcctatcctaaccgatatagtgacgaaaatcatacagaacttggcacactttcccaaggaggcacacatgtcaatgcgtttcaccgattatacctatccatttccacctttataattcatattacacgatcacatttatat

SEQ ID NO: 34164 - DNA, 507 bp, Arabidopsis thaliana columbia
ctatctacaaaaaacataataatctcagtaaaaatttcgtcatcaacccctatatggtaagtgtcggtaccctgaatcaggggtacccttactacagtataaaggcacggtgcccgtgcggcaactctctagccgcacggtgaacagcacccgaccccaccgcatggacgacttcagtggcgccacgtggccagaaaggatgatatatcctaggacgcaattagttggaccagacctccacgagaaagctgaaagggaattaggcttacacctagttcctaaatgattttggtggttgacttgtccaacacaaataaattggactaactagtttgctctagtgtataagttatacaggtgccaaaggttcacgcttagccaataaaaagaccaagaatcgggttcaacaaagagagcaagggataaccgaagtgtgccctggactggcgcaccggactgtccggtgtgccaccgacagtgtccgtgcaccaggggacttcacgctga

SEQ ID NO: 34165 - DNA, 783 bp, Arabidopsis thaliana columbia
tattatttaattcaatttgatatatcttcatagagaaacaatttgtaattttaggaaaaaaaggaaataaaaaaggagtgaaggacttgagagaaaataagaaaagagtttgtgaataatcttttgtctttctctttcgtcttcctcgctctaacgccgccttctcacactctcaaattggctcatccattccaagcacgctccttcgatcttcctcttggtacgctcgtttctaattgtaagttttcttcaactcctattccaacgtttgtgtagatcttgtattcgagcaattagatcgataaaccctagtttctccgtggatattctagcaacttcccctagatttctccgtatataatcgtaaggatttagaaatcgaattatattgtgatgtttagttaacgaaaacccagtttattgaatcgtctccatcaagtagaatccctaatcttagatcccctgcttagggtttcgaaatttgtctattttgttcagctttatactgattctatttgtccaattttgaagatttgattctaagtctctagtatattctttgttatgcaatgcagaaacatgtctaattcaaaggacgagaaatcacaagatgcagctgatagaatcaaggctgcaacactcactgctgctaaaggtctaagccgtacacaagcggagagagcagcggctgcagcagcgagaaacgttaacgcttatggccagaaagaagaaggtccgagtagatggcaggagaaaagagaattaaagaggcagatgtatttg

SEQ ID NO: 34166 - DNA, 483 bp, Arabidopsis thaliana columbia
tagtttcacactttttgtttgtttttcaatactttcacaaacctctaaatatggacatctaaattctagtgaattttatgagtttagattattttttttcagaaatatcgtgtctggaatgagcttttgaggtaacattcactacctgaaatagatgacaaaaaaaatacactacctgaaatatatatcctggcatttatggaaaatgacaatatattatagtataagtttttggtattgaccaaatatttttaaaatggactggtttgtttactttaatgttaattttgtttgatacgatactttaggttatgatgatcttatttagatttaatttgtgatttcttatcataactatgaaaagtgcatatatcaatttggttactagacaaaataatatcaatcatctcttgtaatttaagattgaaatacttattggctatagttttagtaatttatattaacatttcaatagatagtatt

SEQ ID NO: 34167 - DNA, 458 bp, Arabidopsis thaliana columbia
catcacacttcatttattgtgaatgggtgacttttaagaaaacaatgaccaaacaccacccaataaccttcctgcactgtgtcatttaggccttaatggtgcagtggataaggataaagtacgggacatagacaatgcctttaatcatccaccattcacaaatgataataccttgtatacatgcgatgtaacttcaaatatagggatgattgtgtgctttgcggatcaaaacaagaactttaaaacctctcggtaaaaagtacaaattaatggttactctaaacggaaaggcacaggagatttgttatttatatgatgttctcaaacaaagaaaagctactcacacaaatcacatgttgccaactttaagctaaagacccaactcttttctttacgtgtaacagaaaagtggcgcaatgaccttcaatggcttagctcttgacttctcgatggtttga

SEQ ID NO: 34168 - DNA, 429 bp, Arabidopsis thaliana columbia
tagatcgctttgacgtttcaagacaagagagacatctcacggcgaagagcagagccaatggaaccgcggctaggaggagccaactcagcacatcttcgcctgaggagacagcaacttcgaatttaacgacggaggaaagggctaagaggacgagggccaccgtgatcatgactattaccggcaacggagacgtcgatactctacaccgtccgcagcagcagccgtggtaatgcatcgccctctcactgttttctttggtttgtttaatggtttacttattgatttgtcaaatgctagctttttattcctcggaagatagtgaaacaaagaaagataaagcgagagataatggtttgttaggtacactataaatgatattattatggtcgatgatgataccactcactgtttttagaaaaaacataagta

SEQ ID NO: 34169 - DNA, 198 bp, Arabidopsis thaliana columbia
ataggtcaccctggtatgtgatgcaacagccttactagcttcgttgctacgtaataatactggtaaatttatgggctatgagattcaatatgacgacgatgacagtaatctccccttttcccatactactgaagatgtaagtgatcgttcctggagtgactttacccagcagagcaaaattactcttggggaatgtaa

SEQ ID NO: 34170 - DNA, 430 bp, Arabidopsis thaliana columbia
tgctaatgtgcacaaaaaccttgtcaccaagacactgttagaatttctcctgctccaacattgtaatgtgcaatgacttgttgtcctctaaaaccccagctttccacttaacatctgtctgtgtgataacgagtccaccgtgatttcaaagactccacatagtcgtctgcaccagaaactctgatcatgatcctaaagggaccctgaaaatgtattactgctagttagatacacgagtctagtcacaaggaaggaaaacaaaaacattaccggattttgagctagaaactggtcctctggaacaagagcgccaaactttcgtctctttgcctcacgttcctagggtcgtgcagtttgcatcttctccattgaacacccttatctcagcggtggtatttccttcattatacttaaaaggggttcagctggt

SEQ ID NO: 34171 - DNA, 542 bp, Arabidopsis thaliana columbia
tacagtaggtccataatttatgtttctttacctactctatttaccaaaaacatacatagtttttatctgacttacacaagtgtactaatggccagacaagattgttacttgttcaagtaaaattgtgttaccagatattcaactttctatatatacatatagatttgacaactattcgactttctatatttaactgaaagagttgtatcactgaaatttggagtattgttccctgtaaataattcgatttgtttccaaaacgctatggaacaggccttgattttgatactctttcgtgctgacacttgaaacggcgtcgtatcaataatagaagaaaaccttactgtggaaataatcaaattgtgaatctccaccaacctcaatgggtcccattgccacccactaatctccccacgtacaccaactccccttcacgttttaatctcttaatatacttttattataagttaattaaatgatttcaaccttagtaatactaaccattaattattcatttctaatctccaatattttttttgaaa

SEQ ID NO: 34172 - DNA, 1012 bp, Arabidopsis thaliana columbia
tgtggctgctgagtacacacgcatttggttactaactaagtaaaggatttggacaggtaaagttgtttcttagtgatgattgtcccgttaaagttgcatcgaatcttccacctggttttgaagctactgattatgcaacgaagcgaatcatctcacacattcctcggatcaaatggaaacgcccaccattggtataattcttttcttgaattgcaaacaatgtgacccttcttgtttttatataactctcactgtctttctttattcgccgccaaaatagtttgtcctcgatgatgctttgcttgttgggagtggtggaaaaagcatcgagactcgttctgagaatcttaggatttctaaagtcttggaagctttctatccacatcgctctgtgatcccttctcggtaattttatcatttgaggatttgcttttgtgccatgtcatgtttttccacttatcaaattctctctgttttcttctagtccttcgctcacactagctgttgaagaagaacactatgacgacggcaaaactcctaatatccctctcactcacgttgaagatgaacgtgacgctgctgctgaatcttcccacagtttcgaagctcctgcagctgtttctggacttggaccagagttaagtcttcttgcttctgcagctttgtctgccttaactaaggaacagggctctcaggtcgatcctgatttacttgtcaagttactcagtgaccccaaaatcgttgagaacttgatcaatggcatgaaaggtaaaccacttgaaactgcaaataacagtctaaacactgacatcaccgaacctagacttgctcctcaacatgtcacctccacaaccatggacagaaacccacctcccatgcctggaaatgttgcgcacataatgtacgtgtttcggttcagtccagtgctacagatcctccactccccaaacccaatcagcccatgtccagtgctctctcaatgaaccttactctccagaaaccaccccggttg

SEQ ID NO: 34173 - DNA, 823 bp, Arabidopsis thaliana columbia
caaattttgctcatgtagctctgattgaatctgatgctgaggggattggtgggagtggctttatcgagtgtatacgagagcatctgtattcggtaagcgtagaactgtacggcatatatatactgagccagttttattgagctcaacctgactgtatagtggatttatttcctgcagggctggcatggtcaattgtccgaggagcagttcattgcggtcaaagaattggtaggtagatgatcgattaactagttttatctgtatactggccttcatattcccagtttctcaattgcgtgcacgagagctgtgcatatttagatttggtcagattagtcctggctgttgttgaaaggtttttagctttgggtaaccccattaatgatttttttttgggtttttgaatttggagtttaagaaatcttttaaacacttaacaatgatattcttcaacaatgattattcattgttatcagctcaaaatggctgtgggccgtgctgcttcaagaagcgatttgtcgacagtgcgggatgcacttgaagtttctgcagaaatgttcaagaaggatgccaataatgtctctgactatgttcagcgtcatctcatctccatacccatctgggaggagttgaggtatgcaatttaacatgctgccggctctatgaatttaatgaatttttcggtgctgctcagaaaatagattattcgacttattgtgaatttttttgacagattttgggaaggttacttcgagtatctcatggagcagcctgcaaatgagtgagtcttcttaaaattttgtattcatcgataatatcaatt

SEQ ID NO: 34174 - DNA, 572 bp, Arabidopsis thaliana columbia
gctgataaaggtctcaagaagcctcttttcacctctgcccgcttgaagaaaggggaagttttgtacttagaaactcattcatgcaggtatgcacatcacatgtttcttttatctgacattaatgacataagacgctgaatctaatcagtgtatgcaaaaaggtatgagctctgtttcgcaggagagaagaccatcaaagcaatccaagcctcacaacaacaatcatcacatgaagctatggagacagataataataataacaagtcacagaaccatctgacaaacggtgacaaaacagattcagacaacagtttaattgatgttttccgctggtcacgatgtaagaaacctctcccacagaagcttatgcggtctatcgggtttcactcccagcagatcatatcgaggttaacatttttctccaatttgactcttcttgttttgaaaattctttataaaacaaatgctgatgatgtgttgtggattttggaatggagtaggtgttggaggagaatcatgattgggaagatgtacagtggtcacaaactggtgtttggattgctggaaaagag

SEQ ID NO: 34175 - DNA, 613 bp, Arabidopsis thaliana columbia
tatttgttgcagttatgccagcagacctgatcagtggaaatcaagacaagaagctaagcaatcaacatataacgaattttgctctgcattgtgggtccaacaaatcaaattttccaaagaacacctttgtctctgacgcatctgaggattgcagctcaggaaatagaagtaaagaatacaaggaaagagattgaccatcatcctacttccgggtttaagcgtcaccgagaaaaacatgcaaaggataaggatgaaccttttgcaggtgaaaaaagatcgaaacagaagaagaataaaactagtgaagcaacagataaaccaaaactagctggcagcaaaagacctttcctttctggtgagatgactggaaagaatcggcattcaaataaaatgagaatttgaaggttagactccttactcttgtcatatctagtcaagctgtattttcctcatctctgtgacacagttcttttttcctcatctctgtgacacatttacaagaatgctaataaaaagtcttttcatataacactacaaaagaacttatagaggtctaagcacactctaggaactgttaacagtagcaaagcttacagcatccagaaataagtgc

SEQ ID NO: 34176 - DNA, 1021 bp, Arabidopsis thaliana columbia
ccatctgcttatggttttgcaagtacttttattacccgctagtcaatactgacacgtgtcttgtttatcgtaacaagtatcgtatgaccgattggaacctttagctgttttgattgcgtggcatattcttgaccttgcgatcaataaagttaaatcaattgtggatcgttcgattgagagcatggatcgtgtgcgacgcgtgtagtttaaagttgattgaccaaattatgttttttattttatttttttgtaataactgtaccaatgattgcagctgtaaatgagtgggcttacgacaaatatcctcttttttgcatgattacttattgaccccaatattactccctttgacaattcaacccctaaaatatttcgacaagatcatccaactatatggagctacgacccaacaggcctatttcagtatttttaggcccattattagcccataaataattatactctgttctccaaccgttcaaagctctgttctcgaacagtcttgaggtcaaacctaaccggtgtctctgtctctaaagcactagcttgttcaagaaatgatcaaagaaagctcgtgtgtggtccgtacggtccatggatcattcaaaacttggcaagaagacacacaacaccgacgataattctagacaatgtggatctgcaagaaagagagatttttaagttgcagagtttgtcggagttaaaggcgtgacgtgtaacacaagtttctgtttcagttatttcattagcttacctgtacttagaaacgtagaacacgacttataaaatacagaagaacgatgacaaataaatataaatgtaacaacgacattaatatatcgtcattatttatcagaaatagaaataaatatgtgggggatacaacatttatattaaatatatgtatctgtgatggactgataatgagacataacaacaatcacattagctgtcactcttttctttaacttttttttctcattgtataaaattttataaaacaataatctgctttatatga

SEQ ID NO: 34177 - DNA, 524 bp, Arabidopsis thaliana columbia
actccatataacatatacttaagaatctaaaataaaattaacctcaccaaaattagcacatggtgatttttaactccttttattttttgttttttaatgactcttctaaatagatgtttgtaaagcaaaaaattagcttccaaaacttataaagattatataaatcttactaaaaaaatcaaaatcaaaaaatgcattgtgtttccaatcactttttaataaatctttttgttctacatctatcatgaatcatgacaaataacattcaatacctacatacaacttaacaaaattatatttaacaaaaaaaccgcggcttggcgtgggtttcgccctagtcctttataaaggaattacagaagaagattctagactatcgtcatttacacagtttctataagtgtgtcaatcaaaatatttttatgatcaattagtatccttgacacgcaccctcaagatggaggtgctttagaacaccaatcttgtctcgtaattcaagaaatttgctcgttgtagatggtttg

SEQ ID NO: 34178 - DNA, 630 bp, Arabidopsis thaliana columbia
cacaccatcactagcccaaaaacagaggggagtccctgaccacccaaaaacctagtcaccacccaaagatacaatttgagtcgagttaattcggtacattaaaatccttataaaccgggtaaccgaaaatcgtctccttcagtgtctagggctggtcaaatctgacgtggcatatttcaatatttcattctgttgtgcttgtagatgttgaatctccattttcgtcttcttttcgagtatttcgtgctactactctcttgataattcgaagctttttcgttatctccagaaatgggttcttcagaaacggaaagtgaaagcagaggttttcaaaacccagattgggaaacagagtttaaccgattcgaaaacgcgatttcgtctggttctgcttcaattcgtgtaagatccgttttaaagttatcagatttgacgaatcgagtacctgagagctatatatcccgtgcaattccgattctcgccggtcttcttcgtgtctcagacgactccaatcgttccgttcaagctgccgccgctcattgcttgaaatgtattacctgttgcggcggtgaagaaagtggatttgcggtgacgatggggaggtgtggtgtgattgctagcttattaggg

SEQ ID NO: 34179 - DNA, 387 bp, Arabidopsis thaliana columbia
agttggtactttgaaaagataacttattggcaaaccttagattagaagaagagctgggcaccatgggctatgcaagtctagtcctagccagttggaggccgaggcaggaggatcgcttgagcccaggagtttaagcccaactgggataacatagcaagactctgtctctaaaatagatagacagagtaaatatgtacaaacagaaaatacagtggggatactactaccttacagaaactaaaaggattatgataacatgaataataattcttcaaaaattagataattcaggtgaaatagataaatcttagaaacacacaaattactataactgattacagaaaacaatagacattctcaataaccagtgatgggattgaatcagta

SEQ ID NO: 34180 - DNA, 537 bp, Arabidopsis thaliana columbia
ttgattctattttaggtttggttggcgtggtcaatcacgtgatagtgtcggtactgttttatgtgttgatgaggatgggatcttacgagttgggtttcctggagcatctcgaggctggaaagctgatcctgctgaaatggaacgtgtggaagaattcaaagtcggggattgggtccgtatccgtcagaatctgacttcagccaaacatggttttggatctgttgtccccggcagtatggggattgtttattgtgtacggccagatagcagtctccttgtggagttaagttatcttccaaatccctggcattgtgaacccgaggaagttgaacctgttgctccctttagggtaatatactattatgtaaatttcttacaaacagttcttacttcatatcagaagttcaatccaacaagtttcttaatattatatagattggtgatcgggtgtgtgtaaagcggcagttgctgacttcgatatgcttggggtggggagaccatcacagtgttggaaaaattagtgaaatagagaatgat

SEQ ID NO: 34181 - DNA, 566 bp, Arabidopsis thaliana columbia
ggtagtgtatagaggtaggaatgttttccatggtcccattattatacattattaggaatgatcaattacgaaggttggaaatatgtcgaggatgtcaatccactatgcgagttcccctttgtttactctctaaaaagaataagtctaggagagagaaataataccaaaaaaagtaatataaagaatggtcgatttatcatggtatagtacatgaatgagtctcgaaggttctcgaatattagcttgcttgatgagacccaacaatgaaaggctgttggctatacttgttgatagggggcagaagctacaaactgtgaaaaggggaggctcgtgttttcggatagcaaaacagaggggatgaaacatgacaggggaagagagggaatgagagatggtagtgataatggatgatgaatgcgaatcagagagtcgagctcgtcacgtagggtgcaaatcctccttgcaaggccttttacaaagctcttaaacattcgtttgtgtgaatcaatataaaactgagttacaagattctattaagactgagaagtacgactagacgtgataca

SEQ ID NO: 34182 - DNA, 1007 bp, Arabidopsis thaliana columbia
tatttccattttgtttagtgaagtattgattttctctactaagaagaatacaaataaatcaacctggcaatagactaattaacgtacggttacgtctacgaaatagatattcatagaagtctctatccgcatgatacgagagataaccttttactcacatatcatcgcctacaatgcaataaaatagtaacaaagagaaaaaaattctaattaaaaattgatgagttttgtgatggtacgactctccttttgttttttatctattcaatttacgaatctatgcaaaatctccgaagatttaatagtacctgtgcaaactggcactagctatgttccaatatgtgacatcgctttcttctacactaataccaaattcaacatgaaacgttttatcttaatcctatgttatatcaatttcagtgttccttattatatttaaaggaactcaaagatattacgtcaaaatgtaattagattattataagtttttatatggttttacaaggtttgtaaagtcttatatacagactataaagtgatttttttgaaaagcttttctcttaatagtagttttgaaaagcagtatcatatttttcaaaattcctattgtttattcacggataacctaatgatgtgtagattaggttaaaaatgtggacaatatgaagaacattcaaagaattagttcatgtgagcttttgttggtttaggatttggtagtagctagtcggttccatatgcttttattggttttcttcaattctcttacttcttcacgtcatatatttgaccttgttatgtttgattgattccatgtgtattatcctacactttagtttattttttgggttatgaaatcctaaactcttttgacgtcgaacccaacataaaaactcctctttgcatgggcccaaagacaagtccttaaaaagcatggaagaaaaagaagctacacaatgtcatctatacattacatttttcatatatttagagaatgtatattaaga

SEQ ID NO: 34183 - DNA, 472 bp, Arabidopsis thaliana columbia
gatagatgccgtcgcgtcgactgcagcaaaaccttaatgattgtttggacccgttcgtgttgctagttgaattttcctgtaagtttcttccttcccccgaatctgtcaattaaaagtgtggttcttttattatgttagcatgtcataatcatttgctctgtttgttgatcagtttcactctcagctggattcccagatcatcctcacagaggtcaatttcacatataccttcttacacacgaagttgctctgttctgaaatgtctataatgtaattgatcaactgtgtgcaggttttgaaagtgttacatacatgctacagggaggtatcattcacaaagatcctaaaggtcataaaggtacaattcaagccggagatgttcaggtgaaaacaaaaacagaacacagacaaagaacactcgaatactctctgaggtttcttgtttcactcaattttgactttgattgacagt

SEQ ID NO: 34184 - DNA, 671 bp, Arabidopsis thaliana columbia
cacatatagcgcaccattttgcctcggcatatctccaatgcccgtgtgaataagtttgtcgtactctcttctcgtgctttcctcattggttcgggcactgaatctgtcgcatacaccgccgaagctaagaatttccaaactcactcaatattgtatacagtcacatcccatataatatatatatacgcatagagaataaaagaaagagagaagcgtttttttcttcaccagttccaccagaaggatagatatattgaaggtacgttgggtgaacatgaagcaacgtaagtaaaccgccttcttgaccggtttccggttcggcactaataacaactctgagatgatccacagcccattccaacgcatcgaagctgttcttgctctcatcaatcgcaaccatcactttcaacttcttcttgttcttatttgcagccgtctccgccgtcgttgttgtggctgccgtgtcctctccaatcgcatcaacgtaagtctccattttttactccgtacgttttctctatcgtatgttttttttgttcggctccagccgactttttgatatgtataataatttagatcgtaccatacgttacgtaatgctagtgtgtgattgagtaggtggaagatgaagagtgttaacagatgtttaagatggatactggattgacacg

SEQ ID NO: 34185 - DNA, 503 bp, Arabidopsis thaliana columbia
ttacacacgtaaatcaatcttatctgcttaatcttataggggaaccttatgacatcaaaaggaccacagataataagcatgagtatttcatcataggaatatgtaatacatatgcctaggtatatataaagttcaagctttttctcctatatatctagctacgagcctaaaccaagtcttcattatatccttttcgcaaacctcggcgatcttcgaacatatccgcctgataaagaaaacataactctcatcaaaatgaactatataacaacatacttgatgtgtggtttatatgttgactgaggaattaattgaaatttgttaacaattagaagaggacatttgatcccacaatctcttacttaagaagggcctaggagagacgaaatgcccatacgtttcaaagaagtccttgttttctctttgaagtcctctccaaactgcgggggggggaaaaatatcatgtaattttttttgtagcacacttgcaaagcctaatatat

SEQ ID NO: 34186 - DNA, 600 bp, Arabidopsis thaliana columbia
tgaagaaggagaggaagatggtaccaaaaatgacgccgtcacgagtcaggaggaaccacagcactcggagaagaaggaagagcagattgagctaatgagtgaaggagaagccatagtcgacgacggatcaaacaaggtgaatccacattcaaattagtttatggtttatgggtttattagctagttctcattacaactgtacctattgacaaagtttcaattttgctgttaaaggttgaacctttggatgagattagtagagaatgctttaaagctagtgttgatagttattgaaatttgtcttttttgtttggaaggagaaagctttggcagaagcaaatgaggctaaagcggaaggaaataaactgttcgttaatggcctttatgaagaagcattgtcaaagtatgcttttgctttagagcttgttcaggagttacctgagtctatagagcttcgatccatatgctatttaaacagaggtgtatgtttcccaaattggtatgtctttattttgatacttcttggtctatttgaatccgatagaagatgagtatagtgccaagattttctgtgaaatgtttgtcagggtacatgtgaag

SEQ ID NO: 34187 - DNA, 828 bp, Arabidopsis thaliana columbia
gaatcaaacgaccttgtggatattttttttttataaaattaaatttattttagttggatatttgtctaaatcaatgtattcttttataacttgatgtaaactgttagtgacaaggtttatattttattttgaaacatggaagtaggatacaagcttctgtaaaaagtaaaaagtaggatataagtaggatattatattatgggtacatcattgccatcgctataatttgttttattatctacagttttttctcttcatacaaacgtaagttatttctttatgcaattttctaatttgcaaacattattagagagattattgggatgaataaagttaaggagatcatcactattgcttaatctttagtttaaagatcttgggtaatttttattttcacctttagttcatgtgtaaatttttttcgttttaaccattagtttataagatctaatatttcctccacttctttttttactcagggattcactcattgatgctgccttgtgggtaaacttgcagtagatggatgtccactctgatattaaatctcaaccatcagataagaaatcaaaaatttttgtggatgattcaactatctcagagaaaaaagaacatgatttgttggcggtggaattgagggacgagaagctgattagaaaaaaagtagaagttgatgaaagaaagcaaccaaatttcaggatgaacaatctttgatagcggttgagaggaaaggaaagatggtgtgtgacacgcgcccctaatttttctctcgaaggcgaaacctagtctccggtcagatcaaatcgacggagctgtaatcggcaatga

SEQ ID NO: 34188 - DNA, 685 bp, Arabidopsis thaliana columbia
aatatccgtacgtttagtctattagattatacttgttagtatccgattaaacatcacctgaaaactaaaaagtctaacagactaaacgtatccgattatacttgttgtaaaaatgttaacgaaaaatgtttagctatagtaacgtttagcataatgaaaattacgacaatcatcccataaaatgatgttttgtaatataaagtaatctcaaattacaacaaaccgataaggtatacagatactctactccagaaagagagtatatatcgagacatattataaagaggatggtgcagagaaaatgtacttgctcgttttgtcttcgaattaatgaatagaagttcaactaaaacagttgcaagatctctttttaccttcccaataataaaaagaaaacctttgactacaaacaagcattaaaccaccagagctttgctccacacttgttggtcagaaaatctcagaaaagtagcagagaggttaattcaaggaaacctatgctccttgttcacttcactcatggatacttccgctgacttttgtgcacctcacattcataggttttaataaagcacaatgaaatgtcagtgagatcatggaacctagctatatcattttgcgtacgaatcatttaatatattttcttctttttgcacatagttatacatcatcacatctagagata

SEQ ID NO: 34189 - DNA, 525 bp, Arabidopsis thaliana columbia
aatagccaaatctaactaaacaattataaaataaattagagacaacatcgatgatctaccaatcactaaactcctctcagaaatgagaattaaaagcatagtcataataatagaatatatgtaattgtgtggattatttgaagagcagaaccacccactcctttttcctgcattgaagattaatgaatgatacagtctgaacaatatgttatgtcagtggacacaaaataaaaagtaatactgatattttaaaaaaaactataatactatgcgatatttccatggaggtaaatctcatgggtatcaatactaaggtggagatttgttagaatccatgttgattttcagataagtcgaacaaagaatagctcgaccagaagctaagctcactcttaagttttgacaagcttcgcgtagagccagaggttttgttagagtaaacaataacagatttcatattaaaattatgcttcataaatggagcacaacataaaccatcttcagacactaagttccacacaaact

SEQ ID NO: 34190 - DNA, 1450 bp, Arabidopsis thaliana columbia
ttcaaatctacatttctttgccattgttggaatctccgcctcgatcgtttcttatcaaaggatctggtattcgatttttgctatcgtttcaaagcatggtctaatgatgatcctgatctccgactgatccaataacggttaagcaacgctgtttttgatcctccattgttgtttgccatcgatcaacactcagaaataaggtaattaacgcatctcgagactcattgttttaacaatctttgttttgtttcttccaaattattctcgtgaatatccgtaatctctccgtcttttaatgaacaacacatatcatatgcttttgtttgttttgttttgttttttcaacatttcaataattttgtctttttttcttcgatttaatttgtttatttcctgctataataaacgaaaactataattccatgtaatgttcgttgttgttcatagtgatttatcataacgagcaacaacataaaaatcaagagaataagaaattagagttatgctgcttatttgaattagacaaaacctacttttacttgttaaggaaatgaaaagatgttaataaagatgagcacatcgtacgtggcgcacgtggaagcacttctgtacgacggacccagtccaactcgaaccccacacacatagcaaaggttgttaagttggctcgtaggtgaatttaatacctgttatttcctttatagctggctaattacctaaattcgatccataataacacattcctactatgccaacatttaaccctagtcaaactaattaaaacgtttcttactttttggcctattaaaacgtttcattatgttccgcaaatagtatgaaatatataaagattttctaacaaaaaattactaagaacagttagactgattgagattgtttttatttccttttatttaattttcttttattatactctgtttatttgtgtttaataattaggattctatttgtcttgtcttgtttgctatagttggagttttgttcataaagaatggcgtttaatacggctatggcgtctacatctccagcggcggcaaatgacgttttaagagaacatattggcctccgtagatcgttgtccggtcaagatctcgtcttaaaaggcggtggtatacggagatcgagttccgacaatcacttgtgttgtcgctccggtaataataataatcgcattcttgctgtgtctgttcgtccggggatgaaaacgagtcgatctgtgggagtgttctcgtttcagatatcgagttctataatcccaagtccgataaaaacgttgctatttgaaacggacacgtctcaagacgagcaagagagcgatgagattgagattgagacagagccaaatctagatggagccaagaaggcaaattgggtcgagaggctgcttgagataaggagacagtggaagagagagcaaaaaacagagagt

SEQ ID NO: 34191 - DNA, 480 bp, Arabidopsis thaliana columbia
tgattatcaaatggttttaaatgaactttggtaccgatatgatatggtttagtgttcaaaaaactcggttcggttgatatactagtgggtatctgttatctctgtagagagaacagaagaagctttgacaatattaaaaccggtggtgggccaattaaaagagttataattgaacttgggccttttcgatcaacctggcacagaaaattcaaatacttcacatatggtctaattaataatatacatttcttctctctataagtttcttagatttacaacactaacagagagtggtttaccgtaatcgtcgaactacgatttataacgtacgtaatttagtaatgtagattattcgtacagtaatctagttttgtctacaagcattgaataagacacttcaatgaaaaataacaatgcattttgtaccggtgtgcaatattattgtgaattagagtagtgatctggagtagccaagtattg

SEQ ID NO: 34192 - DNA, 636 bp, Arabidopsis thaliana columbia
  unsure (1)..(636): unsure at all n locations
tcccgatagccatttgttggattgggagtagataaatcatgaattcctttataagctcaaacatttaatacttcttatgaaaattgtgtcttgttttgtttatcaactctatctcaacttgctctcgcctgtcaaatggagcaggatggtcgtagaccatttgagctggtctatcatggtcaatttgatgattcccggcctagcagtaactcaccagtaaccgggaggttcgttgttactgcttttaacatatttcagagaagtcttaaagtaaaacctaacctgttatatatgtgcgtagggatctaagcctggcgattgatctttcccttagctgtcaaccaataccatcaaatcaaaagccaaggtacactgaaatctgatacatttttcttcgattctatagcctttgatgaccaactgatatcctgcatttggtatctaagtgttggttgcagcataaagtggcacccagaaacaaagtcatgagctaagacatgattgtacttacaaatagcattattttcaggcaagtcgcttgttctatatcaattatgttccatagactcaggtccgtagtatgtcggacatacaaaagatcgatgnaaagtgttaatatagttttggtctgataga

SEQ ID NO: 34193 - DNA, 372 bp, Arabidopsis thaliana columbia
ttctctctttcttttccctttctataaatgtttatgggtggtttgtgtgtttgtctttctagccaggctggaagtttccacattgaacctctcactccataaccctccccaacaaaaggcattgatctaaaaacatatcctttaaataaccaaattgccacaagttacatgatcaagacaagaagataaaagagcagtaaaatacaaaaacttagagcggttcacctggttaaatgtacaggatggggaaggacattggaaggtaaaggcagactgtcattctctgaagcgagaagtgcctgaaacattttttcaggcaaagcggttccatgtcctggtcatttcaaaaatatccaagttcctacattttat

SEQ ID NO: 34194 - DNA, 339 bp, Arabidopsis thaliana columbia
  unsure (1)..(339): unsure at all n locations
taaaactaaataaatagctgaggacgaaaaatgttcgtactcgaagttgttgagttcttaaaagatcctcgacgatttttgggtgagggtttaactcgcaagatagagataggtagcgagtgcatcgcgggaactggtaaaacttattaaaaagtaacggaccggaaaattaaaagacccgtctaaaagcccaccaatagtaatgcatacaagtaacacgtggcaggtatggttgaccgagtgagtaacagaacgtgagaaaaccgacccgctaaataagaaccgcccaatantataagctttctccttaacttctgcctccacgcaaaaaaaaaactt

SEQ ID NO: 34195 - DNA, 320 bp, Arabidopsis thaliana columbia
tgaataagcaatacacatagaggaacactcacgttcttcgcaacgttcatccatttcgtatggacgccaagatggtcttagaggatattgtaaaacataaagctgtcacatttaagaaacatacattagtcaatactccaaaaaacgattagcaaaatcaaaatattgtttgaagaatctaatccaatagacctgagtattagcatcaatagacggcttaaagaaaacatcaatttcacgaacaacaacgtcgtcttcttcttcttcttcctccttctcctcctgcaatggaagctgctgatcttcctccatcaactcag

SEQ ID NO: 34196 - DNA, 486 bp, Arabidopsis thaliana columbia
gtttaggttttaaggtttagcttagatttggtgtaaaattttgtcaatagtcattagtcaactaagtccaaagtcggtgtcaagcatgtgttatgtcaaatctcgttgtatctaattgtgtaaagagtttgtgattaatgtaatcactgatgcacttctactctcgtgttcttaggatttggtccaacttctaggctcttttgggagccattggagtcaaacagcaccgcaaacttattggttggaagtgacttagggatggctgagaggagagtcagtaacggagaagaagttgttattaatgtttcagataaagaagattcaaaagatccaagagcatctccttctttcaatccattggcttcaccagactccgatgctgggattgagaaatcgaaaccagtgccgcccataagcattcctactcctgaaatctataagttctctggtagcgttcataagccacctaaaattccaagtcctgaa

SEQ ID NO: 34197 - DNA, 512 bp, Arabidopsis thaliana columbia
ctgtgaaatctccaatggtattataataaacgttgcagagattacgagagcgacttcgcagccaacggttattgtttcttgttggtttcgtatttccgcagcccatccaaggttgccgcacatgcaatcagtataagcaactgaaatttggaagtaagatcaattccaggtttttatcgatcccccctcaatatttggtctttttctgtttaactattacattgatacctagagaagaattactgctcatcatgttgttaaatcaaggtaatacaaaaaaaagatattcaggagagacttcacatatttacctaaataaaatgtacaaaataatcaagaagaaattatccgtgtgaatgttattgtccatgatgatcttgcatgaaaatcatttgctaagcagcatgttcacctatgtgattaattggttgtttcaccatatatgaatatttaatgccaagccaaaaaaaaaaagagggaaaatttatcatgaaggagaagagtgtagattt

SEQ ID NO: 34198 - DNA, 546 bp, Arabidopsis thaliana columbia
taacatttcttttgctccgttttcaagtccgtgctccagctcaggcccagaacttggtctttcatgattaggttgaatactctgaacctcatcttccatacacattacctcggatgtcttaggtaccggaaacaaagcaaaaagtgccaattagtgcaatttcaataagttgttagataatccaagtcgagggcaaactactttattcaattcagtaagagcttatactagattaatgagtaaatctccaccctcgaccccaatctcagtcctaaaccttagaaagatcctgaatacgcaactctctccgcctaaacttccatttcatcagttaactctgtagctaaccatctctacaatagctactgaactgtcaccacagctataatccagtacaaaccacctacggtaatcacaatgctcttgcagtagactaccacaaggacttatcaatagaaagcaaccacaaagattcttacctcggcaagagaaacctcatgggcagatacatagtcactgggagtacatagtcctggcaatgtgaga

SEQ ID NO: 34199 - DNA, 662 bp, Arabidopsis thaliana columbia
  unsure (1)..(662): unsure at all n locations
taaagcacacgcatttgaatagatcacagatcaaaaaccctaatttaagaaatcaaagcttgatgtggacaaacaaaacggagatcgatgattggagaaaggatagagagagagaacatacagtcgccgagaacatcaggagcaccgacggcaaccttcacgcagatatctagagccatcgatctttcttcgattttttagaaaacttatcccacggagtcgaagaattataattctcgttttaaaagcaaaatatgaatgaaataggcaaaaatgtctttcaaataaaatacaaggaaaacgaaatctttggtctttaaatatgttcatgaaatttgtgacgtcattgatgaagtggctgttacgatatattcgaaccttctccaattggttagtctccttcttttttttgcaccaatcaaatggtcaaatcattgtccaagtgttaccaatacaaaccaaaattgatgttagaatgtatttgtcaatgaatttgatctatattgtgtccagattccatatataagtacactataaaccagtctactaattcctttctctcttctggtttaaggcttcggtttgctatgtaccagtttagtttgcgtatgaccaaacccccttaagctcantaacgatcatgttgggggctaagggttggg

SEQ ID NO: 34200 - DNA, 540 bp, Arabidopsis thaliana columbia
tgaccgttgattgacaccgtactgttggactgcgggtttcccgaagcgccgcgccctgtgtataaaaggggacggggggcggcgcgttttgaactttatctttccgcgctccacaaaaaccctaactgccttttcaaacctcttgctgctcgtctgccctccttgctcttgttcgccagagatctggcccgtgtgaagcagaccgcccgccgccggcgacggtacgtagcgatgccgacctcttcttcttctgctgccgctacgccgccggccgacgcgtcgtctgaggagacgctgagcactgtggcggcggaggagttgcgcgccggcgatacggtggatttcggtgtgtcgtggatgtcctcggtccgcgtgcaagatatgcagcagcttggttactttggcggcggaatcgctcgtgtcccagggacggaggaggtcccgagccggaaggtgagttggttgtgttcgaggcattctttgccgcaggtcttcgcctgtctgcgcaccgatttgtgggagaagtctgcgcagatttac

SEQ ID NO: 34201 - DNA, 449 bp, Arabidopsis thaliana columbia
gtattttctcaactccttgtctcttaccgctacaaataaataatttgaacaatttaaggtttataaaataatttttaaaaaatgggaatttgtttcacttactttgagcaaggtggatcatgttcttggtggaagtagattgaggttcgttggcaaggaacagatcaatggttgatgcgttaaggcagcaattctttcctatgtttttgtaaaattacgttaattaatatatgtaattaattcagcaatggtagattggtggacttttttagttgtagcgttaccagtgatatcagagactaaatcataacagtcgatccccgctttaaggcatatagcgtttataaaatcccctactaatccactgcaaatgttgtcttaactatcttacgtaatcaaatcaagccaataatatcaagcatattttaagatacaagggtgaagattta

SEQ ID NO: 34202 - DNA, 585 bp, Arabidopsis thaliana columbia
gcaaacacatgtttttaagaatctttttcttttttgctttctttcacattatttgaaatatgtaacatattcttgtgggatttgaacccaatggtcctacactggtgtgggtccaatgatgatgtcgggagatggggcctagccgcagatttgtttgaacaacagatcaaacggtcatcatttatttgatctaaatgattatattaggttttgcattttttcttctcctttgaaaagatgaaaaacgaaaaaaggtcagaaatctactggagataagagtaccgtctgagactagaataaacatagatatcagctgaaaaaattgataagagtatgataatgtgcttattcagttttattattaaaaaaataaaaaaattagtctgctacgaaaacacaagtatacatactatagttgataagagcattatccatggtgtgtagtaagtaagtaaacaaaccattatatttggattaatcgagtattcagcaaatattcatattgtcttgttaatgattaagagcctagaagtctttaagatatccatcaagattcaaacattatgactcaaactagtgtggtgt

SEQ ID NO: 34203 - DNA, 638 bp, Arabidopsis thaliana columbia
tataaaaaaaaaaaaaaaattatatatatataaaaaaaaaaaaaacattattaaattaaataatatacggataggaattactataaatctttataaaataaaaataaaaggagaagtcccttttatctaatttggatggttaatttgtgaattttccatatttatctaatttcgatttgaaacatatccaacgttaagtcagattcttgtggtgaaattattgcatcataacataaagtcatgagagtaggagagaaagtaataagtggcaacatcaaaacgacgacgtttttaagctagtgcgtcagcaacagttaaaccatatgaagttaatggtctgtgttaatgaagacaaaaactatatcctcaggttagcgataactcggtccgagtcgactcggtccgacaagcgattttcgtgactccgtcgtcaccacgcctatgttaagtgagtaaatccgactcttctccgtagagatttctcctactttcaggtgaatttctcctccgatctctagctccgttcaatttttttgatccatgaatgaaaccttctcattttcaatctcttggcttatgtgaaaagattcgtgttattgttttgtttggatcagcatagggtttaaatgcctcaatgc

SEQ ID NO: 34204 - DNA, 498 bp, Arabidopsis thaliana columbia
  unsure (1)..(498): unsure at all n locations
gaaaatattgatacgccaaatcaagtatcaaattcacaaataataacaaattgaaaaatgggaaataagagagaaagagaaaagagaacaataatttggagaaaaatgggtttaggccaaatcatgttacttggagcacatggaaccatcatccagtttccatcttctttacctataagaaacaactaaaacagctcattgcttgcttctctcatacctactcatttcatcacacacacatacaccaaattaactctattaatcattttcttatggacaaatctcatacagatgaagtgtaccaagagaggaaagaagatcattcggagaaagaaataaacattcattgaatgagctcattggaaaatttgaaacganacctaacacttgcacaaaataataaatgacgatacatattatttgcagatttttgagtatgagagttcgacttcatcttttcgcaaaagtttgatggacattaacaaacaaatttaattt

SEQ ID NO: 34205 - DNA, 580 bp, Arabidopsis thaliana columbia
ccttcctctacctctaagatttcagctttgacaggtgctgcgtcttttgcagcctggagtcttacagccttcctactagctttactccattttctcccttttctacctgatcgagaaatggatgcatcatcgtcgccgtcgtcttcagcaacaattcttcgtcttggactagctgatgcattttttttattacggtgctcaactctgaacttgttagagggaggaccctttccaggcttagtaggagctaacacagcctgagaggccgcaggatcaacaccttttttcttcgaagcaaatttgtcaaccaaaataggcttcctttctttacttttaacgctagaatcaacttcttcagaaactaaaggttttgctgccataccaagatcttttaagatgggtgatttctttacgggtggagctaccataggcttcccttgtaacattggctggggtcttacaggcggttgaggtctaaaaggtggctgaggtggtgccaatggagtcctgctttggcattcacgctcctcttctctcgttctaggttcggtctgcaccctctattaaaaattttaggtga

SEQ ID NO: 34206 - DNA, 518 bp, Arabidopsis thaliana columbia
gtttaataatgtaacttacatgaagcctcctccattagcagcatacggaattagttacgtgcatcatttgttaggttaccattgccaccgtagaaactagaaagcaatgataaactaggactacattatttgatttatgtcttcggccaaagaattatcttccacacaaaaattttcggtagatttttttcagaatattccgcaaattgagaagatgatttatcgaaggttgctgaatctttttgtccttttctactgtgtgatcacgttctatctaatacatgattcaaatcatattacttagtactaagaaaaaatactttctttatttgttttttctttctattttgttaaacacatttctttagttttgtacatattcacaagtgtttggtatttctcctatatttttcaacaatagttttcctatctatgacttttcaaatttgccacgtattttcttgtaagaaaaatctaggtaaatattttcctatacatgtatattacaaatttacaca

SEQ ID NO: 34207 - DNA, 495 bp, Arabidopsis thaliana columbia
actgtctctccatttttccttcgccactggtaacaaaccaaacataaagaaacaaacttttagataaatcgatggttaaatccaaacactggctcagtagctctagaccaaaacttaccgtttcaataaaacttttcctccctcgctgacattcaacctagcaaggtgcgtcttcttgtcaagtacattcgacctgtcggtcttcctttttggcatcttctgcaactgggtatcttgtaaaggatctaaattagtatacaagcaatatacaaggataccataactttgcatgttacactcttaatcggataaacgacatatttcaccacttaaaatcttagcttttaagttctcaaggagtaaccaagccaatgagaaagattcaggacataagtaaatctacagaattactggaaacatgcaatgagctacaagtcttaacacattccaactttttagttcacaaacgaatatcaacattaccagagtaacaaa

SEQ ID NO: 34208 - DNA, 571 bp, Arabidopsis thaliana columbia
ctagaggaacctgaatcaaccaatataaacaagtgtcctgttctagttgcgtacactttagtttctcctgattggttagcttcgtcatgatttgccaacgtgtcagatctaacggatcgtattgtgagatagccacgtggtagttttgtattggagcaaggttttgttcttgacgtggagcgacgtggatttcggggttgtggcgtggatggacgacttttaaattatcaaagtatgctaaatcaacggtgatattcgtttacgtcctaattgggacgatcggacggctatatttagttgttttacatgtgacaaataactattggatattaggatgctatgcttttattgatgtcggatacaaaagtaaaatgatgtttttctttgtacaacgatgattatgcttgccaaggttattacgtttggctggctttaatcggttgatggctaaagtctcgcctaaaggcgatacaatttgtcaatttgggaagatcatagtcatcactcatccgtagtagcaatatgtatgcgcggttcaaaaatggtaatgtctatttggtcccattattta

SEQ ID NO: 34209 - DNA, 526 bp, Arabidopsis thaliana columbia
tctgccatttcctcattgtttgtattgagagctccccatttgattgcaatctttgcaataatacatttctcccatagtttcacgatagcggaagtaaaccttgaagcccatagttcctccctttgcaaattaagaagaagaaaaaagactgttgagagctcgagagagtaaaccgcaagcaaatgcaaagatagcagcacttagtcaataccaacgcaatgagaatgtcgataaatagtatccgcaaatgacaagaacaaagccagagagtttaaacattaaatgttgcaacttctggaaagcaagacatttcccgatctatctcttctcaaaaattttaaactactcaagaactgtttcatcttttgttaaaaaaatatcaagtttgagcaagtttcctcattctttcatgatttcttcgggaacatatgaataactctccctgaagcttaactctatatcacacacaacacagagtgagaaagacatctaaaatagtgaaggaaattaccaaggacgaaatgaa

SEQ ID NO: 34210 - DNA, 359 bp, Arabidopsis thaliana columbia
gttcttttgatatgtaaagatacatgaatatgagatatctaagttctgatttagttttaaaacaacataatattaaatagtaccacatcactaaaataaatataagaagagggaattatcaatatgataatgatatctcatacacatacggtagctagatccaatgggaaccaaatgttgctaccttgagtagaaccagacaacatttcaatcagatccatcgctctactttcgctagtggagttagcttggggcaaaagcaacacgttttcatcggcatgctcaatggttgtcagaagacagaaaagtaagtgaataagaagacgacgccgtaccgttcaacagatcagagaagtagg

SEQ ID NO: 34211 - DNA, 832 bp, Arabidopsis thaliana columbia
cgcaacaaacgagaaggctcctctgaaacagcttccttatcacgatattttgacacgataattacacataggcgataaggcgtcgcttatcgttttctcattttttattaaattatttcttaaaacgcttgttatgatacagctaaacaaagttaaatatataattaacgagtttcataaacgtatgaatactagtattagtatagaaccgttatcataaacgtattgaaacaacttagaaccgttattagtgtaacaatacactttgtttaatcataagtgtgaactcgatggatgtgtatgaaaaatctcaatcattgaagaaaaatttaagttagcattttttaaacatgcaagataataatacatatatgtttatattgcacatcaaattatttgataaaaaaaaatataaaatccacgttttatgtgagttttgggtaaccaatagagtaagttctctcttgagacactggagcacgataaattgggagattagattgtcaagtcacgggaaatacattatatcggtcacctaaatggtgatgaccgtacacgtggcaagctaagcttccgacgtcataagcgacttgccacgcattgccgtccgatctttcttttttgagaaaaatcttattaacacgcgaagtcttccaaagccaatcagatcttcttcccattgctttcccagttttgtttttattattatagattttgtaataaatacatcttgataatggttcactaatactaattcgtctaaaaccttttaaattatatcagatgtaaacggttttaatataaatttaagtaagttatttattaaaatgtg

SEQ ID NO: 34212 - DNA, 929 bp, Arabidopsis thaliana columbia
aaaaataatgccatgttccttaatagtatcgattacaatccctagcttcccttcaattctttctccctttcttggctcataagagacagcatagacgtctgcttccattgaacgctcagctatgagcttaccgatgagtctacacgcttcgttatcaacaagagacggtatattagtccttatatctctagcatttgtggtggcaactgaaatgactttgcttgttggcctatgcatcactttagcgtgtatgaatttcctggagaagaacacattcagaaggaaaggcctcatgtacatgtccgttctctgtttccatgacttcctgttgggtcttttcgctgcttcacctcgtgatcttcgagtccacgcagcttgcacaaaagaatcctacagcaatccatcaaccaaaacttttctatagcaaaaataactcttattaacggtgactggaatactaagacaagactcaagagtgtattctgaatcattaggtgctatttagaagaaaaaatcgaatcttgaaatacccaaccgataaagagataagctttgaagataatcactcgcaagcctaaatggcaaattgaacttccgtgagaagaaacacaaatcatgaaaaaagaaaaccacatttttattcacattaagagtttctagtttcatgttcataaagattcactagaagaagcctagatttttactttaaaccacaaattacaattgcctaaatctgaacaacgagctcaaacatataagaacacactaagctataaaaaatcagacaagcacaatactatacgcgcaagagaaagtacgaaacaacctcagagattgtgcatggactacgaaagtagacggctttaccttcttgacaatgggggatgagatacagagccgatttcgatggagagtttaggaaaggaaga

SEQ ID NO: 34213 - DNA, 559 bp, Arabidopsis thaliana columbia
aaagctttcttctccagccttactgcgctccgccacaccacacatcctgacgactgcgttcactcattgcagtactttgcatagcattaggagatgaatgctactgctcatacttattattacgctaggctgtgataccgcgtgtaccaatgatattcccaggcagattcgaagctgatagccgcggctttcgcatggccttcagctaattcatatccaaaatccctctatataatcttcagcgcattccccgacctttatcctctatacaccttttaacctatctgaggacactgattctacgcataatgtccacaatataccccaggcaaagggtgttgcctgccgatatatcaacttcgacctcaatcaactatcttcctcacctttcctacatactctcgctcgacccctcgctcgatcaccgctgcgctggctacgtggacaccaacgggcgccgctgcacaactgaaacaaagccacaagaccgcagtgaggctattgcgctcctgaatatggcgacacgagacgttcgcgccgggatgtggagagacattga

SEQ ID NO: 34214 - DNA, 347 bp, Arabidopsis thaliana columbia
  unsure (1)..(347): unsure at all n locations
taattctgctgcaatatttggaaaattaaacgttgaaattttataaaatgtttttcatatattgacncaaccgccagtcgcaggcaaaaagccagccgggacatctgatatacatcatgttttagtctatattacattggttttcttaaaacttttctttttttttggccaaatgttttcttaaaactaagatttcaatatttaacatttagtgcatatactcttctttctgtatctttgattgaaatattaaaatccaattcgttattaatttgatcatattttggtctatacattacatttttttttttttattactagttcccaatattttttcgcaaagatta

SEQ ID NO: 34215 - DNA, 435 bp, Arabidopsis thaliana columbia
tctttttttgtttgggttgaagtgtttgatgacacgtgtacttaagaatacttgctttatgttctggctcgtaatgtttatattttttttttatcaatcttttaattataaagttcaagtttcatcctactgataaagctttcagtttattagataatatgaacctcttccaggtctaccttgtgcgtgatgttgcaactctttttggatgccactatggctttatccggttttactttggcaacacggtggtatacttccactgcttggttgctttcactgcctttttggatactttgtactactaaatctgttatagttgaagatggggaacaagatgcaaccataaagtaagcagatgatggatgcgataggaccaattgcaagcttgaagcttcaatgtttggtcttattgagttttgctatggatttact

SEQ ID NO: 34216 - DNA, 533 bp, Arabidopsis thaliana columbia
ccagtgtgactgagatatataagggtaaaatgaaacttgaaactgttagttaaagaatattactgaaagtgcaggacaaaagataaaaggagctttggtcatatcttacttgaatcatgacaatgttatgtctttccacagaagtttttcgtctggcaaataaacctcgaatatgactctgtattaagactgctgattttattctcatattctttgaatggagaaattctctccaccaacgctgcactttaatgacggaatgtagcatttttgtcatcccaaagctgtgttgtggaagtcttgaaacgccttcgtcaagttttgaatagagagtagaagctcctacgatatttcaatttgagtaaccattagtatgctgaagaaagcataatcccagccagaaacaattatatgcaatcagctaaaagcaagatactgaagaaatagcttaatcaccttgaagcctgcttcgaacaatttgatccctaacaagccgttgaacctgtgtggctgcatgcttgcaacgatgaaat

SEQ ID NO: 34217 - DNA, 240 bp, Arabidopsis thaliana columbia
gactattatatgtctctttcacgattaggttatgactaatttggttagtctatgactaatttggttagtctgataatagtcggtaataaaaataactatttaaagactactgtacgactaaattgctacttaactcccactatcccccgactactagtttggtccgaatcaggctttggtcatctattgttgggtttcttgtttgtagtttaaagtcattgattgttaacgtttgtaatc

SEQ ID NO: 34218 - DNA, 379 bp, Arabidopsis thaliana columbia
  unsure (1)..(379): unsure at all n locations
cctgtcatttactatggttaaagctcaatataataagttcaatttgcaaaagataactttttcagaaacctaacattagtatatccattgttaccctttaagagcagtttaagatctatgacactgtttgtgactgagtgcttgtccggatatgtgggaagatgattatgatgaggaggaggataagtatgaaacctgtttgtgagtgcttgtccggatattttcctaatgtcgtgtcctgtgaaaatgctagagatcaccgattaccggggaactaaaggagatcanaacagattcattagattgaccttgagcttgtcaaagttcgtccttatgcaacagagcccatagaaaagcattgtcttagaaacaatctact

SEQ ID NO: 34219 - DNA, 544 bp, Arabidopsis thaliana columbia
  unsure (1)..(544): unsure at all n locations
ccccccaaaaaggacgatacgtttgttattacacctttctcgacattgtcaatatcaataatttgattaatctaatctaaatcctttttatctacaaaattaactaatccattacactttccaccagttacagtataatataatcgtcaatcccatatatatatatatatatatatatatatatataactcatccattaatatttcaccaaaaaaaatacaaaattcaattactcaattatcattccgtccacaatacgtaacgccgctaacggacaacggtgtcgttttaattcttcctaatactcttccatccactgaggacgacgtcagtgtacatctcagccgtcaatctttagcttccactgctcatcccacanctctncgcgncngncgtctctcagagctctttcgatctctgctacgccactgtctgttttttcttctcccacaatattttttattttcatatatatatatatctgtcttctctctctcttctacttcgctccacgttttttgttaatctcacagacggcgcagag

SEQ ID NO: 34220 - DNA, 557 bp, Arabidopsis thaliana columbia
ccgccttattgataatatttttttatcgataatatttaaaaaataataatcaataatattgttcttgacatataattttgaatagtaaattagtagtcttatgcattttattttagagataagttggagagtaggcagtttttgcaaaaataatttgaggaatgagtactttttttagaaataggaggaataagtacttttatctctcctctctaatagaactccccctctaatacagcttttagtaaagtactattttacccttctgttgttttgatgaaataaactgggcctcattaaaacgagcccaatatcatctccaattttgaattgctcatgggcttgacatcaactaaaacccatattttcttaagtcattgaaaccaaacacactcataaaccctcgtcgtcgacatcttcatttgtacggtaaagacctcgtcgttgtcatagaaggataaaccctcgtcgtttgccaaattcatagatacattgtcaatttcataccagatggaaggtatgtttatcataaaatgctttaaagtgtatgatttttt

SEQ ID NO: 34221 - DNA, 455 bp, Arabidopsis thaliana columbia
cgggtttcataaactcaagcttctcatctacagaaattctacaactttccttaaacaccttaagaaaccgagccaagcttccattttcacgacagatatcaataaccaaatgcccccagagatcaaaaggaacaaagtacctgtttttaaacatacacttcactaaagccaaagcaggccctgcagctttcgcaagtttcatcgactccaaaagcgtacgaacagtctcacactcaagcaaaatcggatctatctcaattacataagcagcagaagcaaaagctcgtttaagtctatgagatatactctcaacggttccttcgacaccggacaaatgggtaataagggaattgatgagacgcttctccggtagagaagaagcggcggtgagagaccgaaaagccttccatgcttcatcggtgtaatgggcatttaaggaatcgtggagggtagat

SEQ ID NO: 34222 - DNA, 540 bp, Arabidopsis thaliana columbia
ctagtgcctttctaattcagggattcaaacgtagataactcgggatatatatgctgggaaaggtatattttagttggaaatgaaaactaggatgtggggtattccattacaatatgtggtaataacatttcgacaaattcaaagcagagcctacatacagaatcaattcgttccttttcagatacatgatctatacttcaagtgcattccaacatagaaaacaggaaaggttccattttactctttgatacccacagtttcttattaaatatgttgggaaatcgtaatatatgaaccaaaagaccgaccagtcatgccatcatccattacggttagaaaagctgtagctacatcagttcaaggtgaaagtttctaatatcataaattgtctataagatcttacacatcaaattctctacatgtaagacaattgaaaatgaatagtaagaaagcaccaaatgagtaggttgttgctcatcaaatcaactctacaagtaaaaatccgacttatgcggaagtacaatggctgctacggtaaga

SEQ ID NO: 34223 - DNA, 382 bp, Arabidopsis thaliana columbia
tgtacactatatgtctgattttagtgtgaagcaataggtttttgctctgtacaactagtttactaatctgtattgtgtttgtactatagaaaagtttgtgaattttcaatgatgtgtaagaaattgtgtgtcctcacgaagtttattcatatatttattgatgctcattggtactgatgtttcctatataatgtatccagaagcaatggttattgctctgcattaccagtctttgtgtctgtattggttaggttatatatacagcagcctacatcagctgcttcagtttccgaagaggatgaagaggaaccggcatgtgtagagtacaatattaaagagatcaatatgttcactgtggacaagtatcagcaggtgagagtag

SEQ ID NO: 34224 - DNA, 472 bp, Arabidopsis thaliana columbia
tcgaacaagtggacacacacaagaaaccgaaaatacggcaaaatgtttgttatgtgtatccatattttataccaattgaattaataaaataaactgtaaaaacaagaaacaattaataaaattaattttttgttttacaacgtgaataaaaaactgttgacaaaacgaaaataaaataaaccctcgagtgatgttaaaaaaaggaagaaggaaaaagaataaaaactcaaagggaacgcaacacactaaacaaaaactctttggcgtccttctccttagggtctatctctcttatcttaagcagcagcagcagcagctagaacaaaaacgtcaccgatggcgtctcaagctgcgaatctctgggttcttctaggtttaggtctcgctgggattcttatgcttaccaaaaagctgaagaagaccgtccgtgaagatttcggcgcttttatcgataactcatgcttcttcccct

SEQ ID NO: 34225 - DNA, 668 bp, Arabidopsis thaliana columbia
gatccccgcagatacaaatgatggaagggtcactttgcacttgaaggttggtatatattctactgtatcatcctgcagttacttgaatacagttttagtggataaagttttagcgtctcaacaccttatactttatgttacctttcagattattaatttgacagaacttgaactgaatcgtgtggatatacgggttggattatctggtgccctatacttcatggatggctctcctcaagcagtgcggcagttgcgtaatcttgtctcacaggttgcatgtcattcttcagtgcttatatactcccatctctttacagttctctaatttcttaagtcttgtcagttggaaaccgtttctgttcttaccaatcaatcagtttcgtatatgttagctgtattatcatggactctgtgatttacttttgtaggatcctgtacaatgcagtgtcaccgttggtgtgtcccaatttgaaagatgtggtttctgggttcaagtcctctactatccattccgtggtgctaggggagaatatgacggtgactacatagaagaggatccacagatcatgaagcagaagagaggttcaaaagcagaactcggagagcctgtgatcttaagatgtcagccttacaagatcccactgactgagcttcttctaccggtaccc

SEQ ID NO: 34226 - DNA, 283 bp, Arabidopsis thaliana columbia
acgaggtggcttgaatccctgaaaagggtatgtaggcagctcgtcgtcggaagagttcagctagccccattaaaaaagagggggagatgggtccgtatggccatactcccatcataatctagggaagagtcgaagcgaaacatgagtaacaattcgcaccatattggcataaaggactgaacgctccggataatacgatgggcgacgcctcaaagtaaccgtagacgcctgatcggcgtacagcgccgctatacgaatacgagatggaatctgccggagtagg

SEQ ID NO: 34227 - DNA, 537 bp, Arabidopsis thaliana columbia
tgacatgtaaatttgccgcgaaacaataacagggagaaaattagcataattctcgttaatcctttcttaattgtcttaaaaaatatcttagttcattaaaaaactaatcaagagtgttaattgtaattacacaaaaatacaatagttgagattatttttaaatatgaaatgaatattcactaatagtttttgaattgaaaggtagcgacggccataatcatcgtcagataatcgaccaagcattatcaaaataccaaatattgatatagaacacaaaatttattattgttgtttatatctttatacgaatctcaattaatacttaaatctaatcaaatattgttattgttgtttaagttgtcacaagtgtttatggagaattcgggttcaagaccttcaacacttatgacgattcggcaaaaaccttgactaactttggtaaaccttgccttccttttcattttccctgaggacatatctccgaccttatcgtattttacaataaaaactctaaatttttctccaacctattatata

SEQ ID NO: 34228 - DNA, 534 bp, Arabidopsis thaliana columbia
tataaaatatataatgaaaaacatttatgtatttttcatataaaattcgacaaatcatgttttagaactgctcatttgtaccaaactgctcatgccatgagactgtcggattttgaagtttcaatatttttcacgtatctgctgagaattataaatgaaaaaggaggttcttttattctatatagtttatactgtagatagtagatacaagcaacaaaaaaattcaatccttacttaccaacagttaagagttatgcctacgaaacattgcccattagttgcaaggcaggtccagcccaaacatataagacagatctatgacggtacataggttcatgaccaattattaaatttgtctacgtgtggacgttcaaatatttgggtagaatttttcaggttcatatatttcggatttacaaatctataatcaattctggtattttaaaacttgagttcaagtcaaattcaggttggatattttggattcggattcagatttaagataccgaagtatcgaaatatcaaaaatgtgta

SEQ ID NO: 34229 - DNA, 165 bp, Arabidopsis thaliana columbia
tcaccagttgaaggacacctagtttgtgtccagtttttgactattaaaaaataaagctctgcagtccgcagtccggcctgggcgacagagcgagactccgtctcaaaaaaaaaaaaaaaaaaaaaaaaaagctgctataaacgtccatgtacaggtttttgtgtg

SEQ ID NO: 34230 - DNA, 489 bp, Arabidopsis thaliana columbia
ttttgttcaggacaaagagaataaaacattatttgtccagcccacaagaaactggacttgacaattgctgcactagatccttctgcactatctttcttaaatggtctaaattaaaaacattgtcaacacataaaagcccaaattagtatgaatttgggaataaaaataaggccattttgtaagttgattcatcggccatggcagggccattacgaagcattgtcagaaaacataaaccacaaaatgaaatggaaatttataattgcgttttttcagaacaaagcaaaaataaaaataagaaggaaataacccatcattaggcctaattaaccaaggaactaaatttgatatgtctctctaattattcaccggcgacaatttattgaaactcttttcctcaaaagaacttactaaaattacccatcattactcttagcagacgcattattataaataacgaccacccatctatttgttcacataatcaac

SEQ ID NO: 34231 - DNA, 494 bp, Arabidopsis thaliana columbia
cataaaattattcaattatcgatattcattcaaaataaaatcataacacttatttgaatttgaaatctcgttgttactacaattctatatatagaactattctaccaaatattaattgaaaagattatattcatttaaatatgaaatagaagttcagtgctccaagctcatattgttttcctctatattcaatgcgctttgtatataacaaaagttttttttgcattgcactgcatttatatagtattatacacatttatatatatatatatatatatatatacatttccatttacaacatttataaaagtatatatgtatacatatatatagacccccacatttctaaaagtgtataatactatataactgtctacacatttacaacatttatagaagtgtgtcactgatgtatgatggaagtcctgatcatggctcattacacattagaaagtgacttatgtggcttttgggcttttggttttggggataga

SEQ ID NO: 34232 - DNA, 449 bp, Arabidopsis thaliana columbia
atatttacgcttagcatttgctggttgaatgtagtttttttagcatgcttttgatgttgatgataaggccgtctactaaatctttcactgtccacagcaatatggaagacattgctcgtgaagcaggtagcattaatttggaagaagacactcttttcagtatgtaccattcagactatccttgcagatattcatggtcttgttcacctcgtgtcctttactaatgtggtttaagtgttatgcagaattacagaatgaactagaacagatgagcgtggcgcacaactagcttcatcaacccttgtgtgaagtagtagaggtaagtcattttaactgcaagataatttcaggtgtatctatgctgataactcttgattattgggtggactatgagtgtagggactgataagctggattggatgacagtaggactcattagcaaaacgtga

SEQ ID NO: 34233 - DNA, 440 bp, Arabidopsis thaliana columbia
cctatcttatatagaaatctttacatatgtatgtaatcattgatttatgctatgtttattatttatgtatatgaattctgaagaatactatttagaccaacaataattgggatgataaaaataaaattattatttgttaaatagatcttaaaagaaagagaaaaaaataataataattaatttatcaaaaaaattgtgaaaaaatatatataaatccgtagagactttttaattattacggaaagaagaaaaaaaaagttttctacacatttattttaacacccgtgtatttgaggctttaaaaaagaaggagacataaagaagaaaagaataaaaaattggctttcagaactttaaaacaagacagcctaaaaagtttgattggtagaaaaaaagaatattgccctctcagacactttttcaaaacattatacgtgttt

SEQ ID NO: 34234 - DNA, 552 bp, Arabidopsis thaliana columbia
agaacaagttgcaattacctaggagcgcctctaagctaagagcgtctctaacctaaagtcattattttggctttaattttaatcttttattaagttaagaaacatcttaaatcctccctttgaggatgctctaagagacttgtaggggcaatcatgttgaggggaatagggttgcttgtagtggaaacataaccctctcgccttcatgtcgagatattcttggtgtgaatattgatgtgtaccccttggcctatacatgttgctgcttgacccaacattaaaagatgtatgtgttaacgcaactggtttcccatgatcaagtgtcgatagggaatgatttagagtcccatatctttaaattacataaatgccttatcatgtggtttgcttttcgtcccatagaaaaactccagctccttttcaatagaccatgcaacacgagtcgcagtcataagtctcccatgtcgtttggacaaaatttcacacaaatctcctcttttagtccattgagaaataatcctaactgaagatgtgaatctagaacggaatttg

SEQ ID NO: 34235 - DNA, 524 bp, Arabidopsis thaliana columbia
agtgaaatatgactttattgttgtttgcttattcatgaacttgcattctttttggagctcacctataatcttccttactacattaaaaacttcttatttttacatatagaaaactttcaaaaatctgaaatcgcatctaatcgcatccaaaaacttatgaagtgaaattttgaaatcatagaattataacaaaacttcttatttttacatatagaaaactttcaaaaatctgaaaaccaaaaattctctttataaattaataaattattaatttatcgataaattaatacctctctaaattaataaaatatcctggtcctaacattattaatttatagaggttttactgcagtatgttgcttgctaacgtgttgtatgatagaagctcatccttaaactatatatataagttggaaaaataaaatcgtctatttgatattacaaaatattagtagatttggcaaatcttgatagtattatcgaaaacaatataacaagccggaagagagaggcgggaacattaa

SEQ ID NO: 34236 - DNA, 585 bp, Arabidopsis thaliana columbia
cccaatttcattcgcgtgagtatgatcatactgaagctcatggtactggaccatacgatcaattttttggatgatgcgtacatgttatgtatctatcatatcattatcttttggtccactctccaatttataaccctttcacatcactaaaattcaagtaaatttggtaacgaaaaccgatgggaattcaaaattcatactatcaataatcagattatgaaatgataaaataatacagcttatagttaaggattattgtgagatttactctaatcaaagtcgcactttgcaataaaagaatcgaatatttttatttttttatacaaaaaacgtaaagaatgttaaattatttcgcattttaagcaaaagcatatgacaaaagttaggtcctaactaaaatattgcatacaaattattcacattaataaaataatcaaatccatagaacgcgcaaatcacatgcagtctcgttataactcttaacccctatatatagacactcctcttctcactccaaatccaaaccaatagatctcatttctcataatacaacaaaaactaacattcaacttcactacatatact

SEQ ID NO: 34237 - DNA, 940 bp, Arabidopsis thaliana columbia
aatttttcaaaacagcaaaatatttgtaaaaaacataattcttccactcatgtgtatatcaataaaatcacaacgacaaaaacattattgtaaaatgtagcaataaactatttgtaaaaataatatatctccattataaaaacatttttgtaaaattgatcaattattagatcgaatagtgtagaaaaaaccaatattaaaaatttggattgtagcaaatcaaatattggaaaaaactattgaaatcccggttgaacagaaaacgaatcgaaaaagctaaccacaaagcaaaacaaaaacaaactatcaacttcaatcatcgtaatttttatagttaagactttagactaaataagtaaaagcacttcaaataactaaccagaaaaaaatggaaaattaacaacaaatagaaaaatatcccaaaattaaatagacacatgacctgaccccaccagctctctcttctctccccatatatcgcattccctccaactccttcctcttccattaattactaaacccaaacccaaccaaagatcttcacaaagaaaaaaacaattggtggtatcaatggggagaagaagatgaaactctcttctctgttcaaaggcggagccggaggattactagcggttcctctctgttacaatgccaaaactctttcgttccgagtcggcgacgacatgatcaagacggtgaactctgttttcttcgaccaccaccacaacaacaacaatggaggagatttgttggaagcggagacgcctgagtcatggtttactaactcgtccgagacagcgagtcactcaaccgagtcggatcaagaccttgacgctgagtccttagagatggtggttcgtggcgttgttagatcggagcggttattcatcgatcaaggagttaagagtacgattctggacagagattgacactctagagt

SEQ ID NO: 34238 - DNA, 329 bp, Arabidopsis thaliana columbia
aatagatcgataacaacaagtccaggctggggttttattgtttgtttccacaaattcgtggatgaccaaaaaccgagaaagtgagaagagtttcattttgaaaagcaaaagaagagatgggttttaagatcggccctcttcgtttacttgtcactggcataaccaatgctagaacaaaaccattttatggtggagactagtataatgacaccagaaattgtctttgcttctatgttgttttctttttttgttcgatggaacctataaatccaacgttatacatttttgtaaaacttaaatcttttcattttcaatgaattaattacatt

SEQ ID NO: 34239 - DNA, 133 bp, Arabidopsis thaliana columbia
  unsure (1)..(133): unsure at all n locations
tnnnnnnnnnnnnnnnnnnnnnnnctaaaggatgatcaagcaaggttcggtagacagttagcagacacttggtgcgtgaagaagcaagtacaatcgtgtcaggcgagaaggccgaaatggtaagtcgacatat

SEQ ID NO: 34240 - DNA, 479 bp, Arabidopsis thaliana columbia
agcctgatgttagattctcttagaatcatgttggatattactcacgtaaaaagattttgttgatctacaacatataaccaaattacacagtaacaagaactataagtttgtggtcttggataaacagagtttctgtaattttgaaccatttttcaagaagtgcttgcagcatcccctgtaagatttcacaaaccacaatctcttcagttatgtaatgattcagggaaaccatacctcaaaatttaactagaaaattaaaaaccatctttgtcacacatttgcatgactgaaccagaatcgacaaaaactggaactgttatgttgacctcagtgactgaaacgaacagaaaatacgcaaacacaagaaaactttttcttttggcagattaaaactttttggctttttcattagtttaaatgacaaacaagaagcaaaaagatggaattgtaactcttaccaacaagagaaacatggatac

SEQ ID NO: 34241 - DNA, 214 bp, Arabidopsis thaliana columbia
cgcaaattgctagagttttgcgagggaaaggttttaaaagaaaataaaattttgcggggtatagagtgttttctgcttactttgcgagggagttgcgagattttgtagtaaatccctcgcaaattgctagggtcttgcgagagattggtttaggattaaaataaaatgtatttatgataaaaggagcaacaaaatgcgaaattataattataag

SEQ ID NO: 34242 - DNA, 761 bp, Arabidopsis thaliana columbia
gcctgaagaaattgatgagtaccgttgtaaagaagtgtctaattcagactttaggtgtctggagagaggaagagaagtgcatgaagaaaacaatagctacagttgaaatttgtatggcgtttggcacacctatttagcatgtagagagtaaagaggattaaatctcttacagtgaaaagctgaataaataacgtaagacataactcatagtatatttcccattttcttaatccatatattctaggtaatcaaatctgttactgcaggtgactggtgattgataagggtgtgtgtgtcttgtcttggctcgggaacaatggttcgctcaggtacactcttgtatttcataacagttgctgccttaagttatgttgtgctgcttcttagaaacttttcttgacatgtaaaaatttaaacatttcggatcttatttaaaagaattcactcatataatttgctctcattagcatctcactaagaatgaaagaagcttattgacaagaacttgatgggaagtcttacgaaatccctacacaatatcttctttaatgtttggttagtattgggttttagttgcgtaggtagcgtttcacatattctcttagcatcatgtaggtgtacacacgtaacaagattttgtcgatctacaacgtgttaccaaattacacaatacagaaactataagtttgtggtcttggataaacagagtctctgtaattttgaccatacttcaagaagtgcttgcagcatcccctgtaaaa

SEQ ID NO: 34243 - DNA, 517 bp, Arabidopsis thaliana
  unsure (1)..(517): unsure at all n locations
nnnnnnnnnnnnnnnnnnnnnnctaaagtcttctccagaggggcagaataaccacaccggagtgtggttatggttaatcccttcatacttctagccacagatgcaatgactcgaattattttggggatacatactttattactgggtactggtggtcgtggttgtggtggtcccggtattagaaccatcaccgccaccggttgccgcaagcgcgacacccaccgccgagcttacggtgctgacgctggtcgcggaggaactccccgccgaaaccgacgttgctgccgaccctgccgcttcgcccacctgtacaggtgcagcccacgcagaagtcgccgcaagcgcagcatatggcaaaaatgccatacagaacttttttcataacaatttcccttcattgaatgaatggagatttacccaaaaacatttcgggcgggatcgagtatacacaactagagcatgcgaattacggcgcggggaattagcgatggcgttttaggataattggaatgaatat

SEQ ID NO: 34244 - DNA, 496 bp, Arabidopsis thaliana columbia
actttcagaaaatcaaaaggagacccacaaaaaggtgatctgattttacataagggtaaaagaaagactaacctgccaagtctcatgcgcctctttgaaaagctgaacattttcttccaatctcagaaatccccagaaaaaataaatcctagcgtaaagctcacattgtcatcatcctaagatgcctaaaagcaagaaatttatctaactttttcttaactttgcgaatctaagatacagaagtttaccaaaatccaaagaaacagagatccacataacaggccaaaactaacctgttttggtttgctgagaaaatccccagtaacaaaatagtgaatagaatcaatttcagagaatagccattatccacagctggagacgacccgaaacgacgtcgtagtgaatcctagcaagctgtttctggggccagcagagcagggaaatgattgaaggggggagtgatggatttagcttacggaagcatattaaaatgttg

SEQ ID NO: 34245 - DNA, 588 bp, Arabidopsis thaliana columbia
ttgaattctcatagaactcttttgttacttttcctctttgttcttgatgagaaggctgaaggatcatctgctataactgaagacacttctgcgaatgttcaacaatggaggcgaaagaatctctctttacagataccctctagagcagctggtctctctcctgaagattcggttgttatcaaaatgcctccaacgcctagtccaactccaagaagagtcaactttgctttgacttcgagttctccaggtcctactcctacttcttcttctgttcttcctcgtggcaaatcgtccctgaagaatctattgccaaaagctgggtgtaaacaaaaacctctaacactgatatcgagaagggacaagggaatgcctgttctccgtctgcatcgcaggtagaaggcttcgatatcgaggtcattatcactttcaaagctatttacacctaggatcaagagaacttcgtccctacctgtgactcctgttattctttcagactcagagtcagctcacggaggaaccagtgttgctcctcaaactccaaacgtaagctttctcttgtatcatttcagagaccttatgattgtttag

SEQ ID NO: 34246 - DNA, 262 bp, Arabidopsis thaliana columbia
atatacgactagataatacttaatacatatgtgggtcctcaagaataatccttctcactaaatatatgggtgcgtgagtgtctgagtccgacatccatatttgggcgcctcctgtgtggaccgaggattcttcaattgtcagattttctataccacgatttcgagataaccagcgatagccgtagaggactccatcaacgcgtcgttatcagagactctcaaaaccatgcaacaagccatgtgagaaataacgcaaaaattc

SEQ ID NO: 34247 - DNA, 540 bp, Arabidopsis thaliana columbia
  unsure (1)..(540): unsure at all n locations
caaccaaactagtcaacctcaggcatcacatccaagtgattccttatgttgatgtaaaaatgggatatataggaccaatcagattcatataataatattcataaatcagattcgtaatgcagtatttatcagctccataaatgatcctagagaatcttatgtaaagtggatcatgcacgtatctttatcttctcaaaccttcgaaagaaaccctcaaaacgttattatctaccgaatacatttaatccatatagcgtgacaaaagaacagagcccgtagttgataaaaagcatgagagtgatgatgaatgtgaagcactgagagagatctcaccgcttgccgtataacgtctccgtctccgtctttgtcggcattcgtcagctgaactcttaaacgtgtcgactgttgtctcgatccaagataacactgtagctgacagttacatttagagtttgcgccatctcatgcgcaacgcacaccgtcaattttctgtgaggatactaactactatgtaatgatngcgacaaaagagtgaaaggt

SEQ ID NO: 34248 - DNA, 111 bp, Arabidopsis thaliana columbia
agtatccaagtcacctcatgaatgctttgttgcttagaaatttcttctgccagataccctcagtcatctctctcaaggtcaaagttccacaaatctctagggcaggggcaa

SEQ ID NO: 34249 - DNA, 537 bp, Arabidopsis thaliana columbia
gatcaaatatctatccatgagagattcataaggtttgatcatttctagtattgactatttggataaaagcatttcaccaaaaatcgtaagagtgaaaaggaagaaggttttgaatctcaagcctaaattctagcatcaaaattcaaacatctaacgtattgaataatgaatatgtcatcgatactccatagtttgataacaccaatgtgaaaatataaactatatataatacatggcccaaataaatgaacactaactgggctcggtttcttaacccacaccgaacccgtttggcaacaagtaaagcaacaacctaagtacacatagattttcaataaatataaggcccaaaaaactattaaagcccaacatctctccacatatgttaagttcacttagtcaaacgactaaaacccaatgattagattacttccaagataagcatttcttggttgaatatatatatcacgacgacacgtagataaatcaacttaccataacattcatttcgagttatattaattctagttgaccaaa

SEQ ID NO: 34250 - DNA, 473 bp, Arabidopsis thaliana columbia
ctctagtaacgtgcgccagtgtgctctaaagatgcgtgggatcatgtcactagaatggaggctgattgaagaacgtaaagatcgtcgtaggttactcgcaaagctggtttgtagcctctccgacaaggaacgaaacttgatggcagagcaagtccctaaatacccgcttttgagcctcaaaacccatacgcgcagaccttggaatgtctaatcaaaggttcaagggatgtagaggggatggaggcttccatgagccatctagtcatgcgaatatcttccttctacatatcatggcttcactgtgcgcgtcatgatcttcaaggtatcaagaaaaggagtgtccaagcagcccttgaaaagcttgaggataacaagaatggcgggtttgaaacatactactctgagcttatcaatcgactggagtgcctgcaagcgtagcaaccgactacggaagctgacccagaccgtgattt

SEQ ID NO: 34251 - DNA, 533 bp, Arabidopsis thaliana columbia
cgaatgtagttaagctaataatcatatgttttcagattgaatctgtgttcaagagatctcattctctacttctcttgttgttttttactatataaataagttcagtcttagtaggctgtccctgggtttaatctatgagacctggtttacctgaaatgatcatttgcattttcggtagaagtggacagttttcgtgtcgtacatttttttgactgagctttatagtcttgttggtctaaattctcaagtcgttagtcttgtttgctgcaatttttaatatttaggttttatattttaggtatttaataattatctaaacaaattaatagattaatttttgtatattatgataattgatattatataaaatggattttaactaaataagtggttttgattaataatttaggtgtcttttagatttttcatttaaaaataatctttacttcgatatttattttactatgatatctattaattttttgacattacgaattttaattatattaaactatgtactaataatattattt

SEQ ID NO: 34252 - DNA, 698 bp, Arabidopsis thaliana
acggttagacatttcctccaaatgtgctgatggagatgggtgacccggcggagatgatctcaccatcggattagaggagtagacaggcgccggcggtaagaccgaaagcacaggcgacctatgaatcaacgacccttttccgcggttggagcggggaaatgaatcacgaccgaacaacggcggacagagctggccggtgctatggatgagaacacaggggaaggctgagggatcgaccatgttccggtgttggagtgagaaaatgagtctggaccgaacgacgacagagcagaactggccggtgctatggatgagaacacaggggaaggctgagggatcgaccatggtccggtgttggagtgagaaaacgagtctggactgaacgacgacggagtagagcatgatgaaggactcgtctggggaaagtagaagctagacgacgaagcagagctcaccgacgcctttgagttatgggacgacgacggcgtaggaatcatttggtgaatgttggagaagctaaacgaaggtgtaaagcttgccggattattgaatgacgtcagtgaaggactcgcttgagtgaagtcggagaaggtaggggacggttgagtcgtacaccgtggtccggggctgaagtccggcgacccggctggataacggatcagtggtggtgaaagagaagtccgggaagagagtgacac

SEQ ID NO: 34253 - DNA, 287 bp, Arabidopsis thaliana columbia
ccgggctgtaccagagatgattgtccacagaagctttaagaagatgccaacaacgggaagaggatggtgagaagacgagagacagccagcagacggaagcgagaagaagatccgaagtagcgactaatgcggtggtgaaacgactgagacgacaaggacggattcgaggaggaggaccagacattgcagaagagcaaggacggcgacgagaacatgagtagaggtaaggaatgaatgagcacatgacggtgagaattaaacgcatcagccccaagcggacatttccg

SEQ ID NO: 34254 - DNA, 528 bp, Arabidopsis thaliana columbia
ctgaaattggaaggctgatatattttccataattcaaatttgaattttgctcatcatatatatatgtatatattaaaaatcgaatattaagaagaaaaatgaagtcgatcgatggctgccaatgctgtagctggccatgttttaaactactcaattgtcggattgaagtatagccaaaatatataaaaccgtaaaaggactaaatataataatataataggtattaattaattaacactaattaattataacagaagcacctaaaagtcaagagcagtagagaaatggaagaaatatctgaaaaacgaccgcttatatatatatgtatcattggaattgaagaggctatatatatatatatatatatatatatcgatcttagcttatatattaattgaaagtacattttggtgtataagtaattaaagaagatagataaatagagagataatatataaggcagaaggagtgcgaggagaagagggaagagatcataattaagcaaagaagctcgctagggacaggatt

SEQ ID NO: 34255 - DNA, 488 bp, Arabidopsis thaliana
tgtggtgtggggtgtgtgtgtgtgtgtgtgtgtgtgtgggtgtgtgtgtgggtgtgtgtgtgtgtgtgtgtgtgtgtgtgtgtgtgtgtgtgtgtgtgtgggggtgggtgggtgtgtgtgtgggtggggtggtgggggtggggggtgggggttgggtgtgtgggtggtgtgtgtggtgggggtggggggggggggtgtgtgggggtgtgggtgtgttgtgtgggtggggtgtgtgggggtgttgtggtgtggggggtggtggggtgtgtggtgtgggggggtgggggtggtgggggggtggggtgtgggtgtgggggggggtgtgtggttgtgtgtgtggtggtgggtgtgttttgtggggtgtgtgtgggtgggggtgtgtgtgggttgggggtgtgtgtgtgtgtgtgggtgggggggtgtgtggtggggggtggggtgtgctggggtgtgtgtgtggggtgtggtggggtttttttggggtgggg

SEQ ID NO: 34256 - DNA, 573 bp, Arabidopsis thaliana columbia
  unsure (1)..(573): unsure at all n locations
tgcggtacaccggggttaaattctagtatagaacaaaaaaaaattcatagaaattcaaacgaagagtttattgacgtgacttagctacctctcgacgaggttgaaaaacatttactaataaggaaatgaatggacttttgaagaagaaatatgaagcatgtgaaaattttagaaggtagggcacatattgcatagacaaaatcataagagtatggaaagagacaccctatgaaagaacaaaacaaataaaacgagtgtttgcaaaaagatagaaagagtgatagctctctggaaaaagttgtgaagacaaaattttttatacaattgaaaagaatgtgagaaaaatatgagttgttaaaaagaaagtgtaacacccaaaattaaaagaaaatataggatcagattttgggataaattgatcattttgaaactgtctgatttcaggaagatttcttagaaactcgaaagtctggacaaaatctgtaaacaaagaaaaatcagaggactaaagtgcaaaaacgtgaaaaaggagagaaattcgagtttacntttcccgaaactgaagggaagttt

SEQ ID NO: 34257 - DNA, 972 bp, Arabidopsis thaliana columbia
tgtgctcgaggaggaattgtatcaggtactggagacagatccagtcttaagtgggcagggggtagtatcagagcttgaactgatgtaagtggagaagtattcttgtttcccatgaagagaacaagtctaccatggtgtcctctccattcagctttgatgccaatctgaggaatacaaacaatcaacaaaatggggaacataagaaagctcggaggcttgtctgctgcatacttgaataaataaaagcacaaactagaaaaaaacaaacctggatatgaggatcctcgtataagacaccactgtctttcaaacataaagcatgaaatctctcagcaatatttccgataagctgtaaaagaaaacaaaacagtataagaaaaaaattcaagcatgcaaatataaaaatggtacggtttcttttattatggatcttgaattgtgaaacagaacatctcaggtagcattccacctaagtaaacgttatataccatttccaactaatagatacaaaaagacgaaacagaaaaaaatatggctataggtaaaaaaaaaaaaagggaaataatgagctagcaaaagtagaagtataatgctaaaacctactatgccaaagaaagtaaaggaataggaaaagattacctccactgtattggtttgctcttcaacaggtacaatggcggaaccatcaacttcatctggaactccttctgcccctacgggaccatgttgttcatttgagacagctccaggtggagcctctattgcaagaggaccgagtaggtcactaaggagatcaggtgatggagtttgtggatctatattacttaaagttccattgggatgtgagagagatcgagccactgactcagggtcctgctagacatgcaatgaaaaacagactgtcagagataataagatagaagtatgtactatatacaggcaagcacatcaaagatgtctcgtcaattgggg

SEQ ID NO: 34258 - DNA, 497 bp, Arabidopsis thaliana columbia
cctttttattttattcaaaaatgtttttaaacctatattttgtattactactattcaaactataaggtttttaaactataaagtttttcttatatgtgttaaatttttaaattttgtgtaaactaattggacacaacgtccaaacccctaagcggcgtcatcggttcaatatggtttacactaaatttaactttttaacacttatttttattttattcaaaaatgtttttaaaactatattttatattactactattaaaactttataaagttttttattatatgtgttaaaattttaaattttgtgtaaactaattggacacaacgtccaaacccctaagacgcgtcatcggttcaatatatagtttacaattaatttaactttttaacacttatttttatttcattcaaaaatgtttttaaaactatattttgtattactactattaaaactttataaagtttttaattatatgtgttaaaattttaaattttgt

SEQ ID NO: 34259 - DNA, 477 bp, Arabidopsis thaliana columbia
  unsure (1)..(477): unsure at all n locations
cttataagtgttaaatatttaaattttgtgttaactaattggacacaacgtccaaacccctaagaggcgtcatcggttcaatatggtttatacctaatttaactttttaacacttatttttattttatttaaaaatgtttttaaaactatattttgtattaatactattaaaactataaggtttttaaactttaaagttttttcttatatgtgttaaatttttaaattttgtgtaaactaattggacacaacgtccaaacccctaagaggcgtcatcggttcaatatagtttacacctaatttaactttttaacacttatttttattttatttaacaatgtttttaaaacaatatttttatataaaataacaaatgtttttcccacaatatctttatgtcgctgctatgggcgtctgngaggttttttcttatacgtgttaaattttcaattttttgtaaactaattggacacaaca

SEQ ID NO: 34260 - DNA, 632 bp, Arabidopsis thaliana columbia
aattattgctaggctgatgattagatggttttggaacatatgtgactttggatttgttgtcaaagactctcctggagtcagaatttgaatccagaggttggcttgatggaatctctgaaccaggctttgggatcgtttggttggcaacaagttgtaagctttcggctcgtgtaagagggattccaccagcagataggctagtccaaagccacacagtctttgcagcatgaacaagtggcacagatgctttgagaggctttgccaaaaaaacattgtaacgtctcattctcaatccgtgaagagcagttttggctttctttgttcaggatgacgaagatgcaaaactcatcgactttcttcgtcgagaaacaacagggcagagaacggctaaagactcaccacatcaatgggccttatcaatgggctttgctgtgaggccctccttcctacccaagtccaaccaggtatccttttctttatttctttttctttttaataataattttgatttccttacaaatgtttttaacttatatttttgtactactattaaaaaaagttgttttgataagtgttatatttttaaattttgtgtaaactaattggacacaacatccaaacccctaagaggt

SEQ ID NO: 34261 - DNA, 909 bp, Arabidopsis thaliana columbia
aatcttttcagaataataataataataaatgctaaatataagaaaaacaagtgttaaaaagttaaataaaatgtaaaccatattgaacctagaacaactcttaggggattggatgatgtatccaattagtttacacaaaatttaaaaatttaacacttatctatataaaaaaaatctaaagttataataaaatataggtgtaaaaacattttacacttaaactaatgaaaatatataaacattttagttatataaatgttatggtgaaactaattagttttagttttacttaaaaataattttgaaggaaaataaaacaaaaaaaaaaagaatgaaaaaagtaataccttgttggatttagtagcaaaaagggcccatagagcaaagcccattccaaagtcagatttgagcccgtcggtctttgggagccctctcgtgacatcatccaccaccataaagctctccgctctcttggctatatcctcctctttgtagtctccggtgaaagcgtctctcgttggtcagatcattatctggcgacatcgatcttgatgacatagatttgatggttcaatcacgaaacgatgatgatatgatatcgctccgatcaattacggacgtttcagagatcatcaccatcggcttttacttgaatatctctacttggatcatcatcggaattcacagagagataaagacaaaattgtcttgagaagagaattagggtttcagagtaagaagaagcgagaaatagagagttttgatttgtcgaatactttagaagaagcgttgagactcgcagtgagagagtaattatttattaataagcgaagaaaaggcaactgataatcacaattaacggtcacaaaatcttcttttaacggtctcaaaaaagatgtctattgatag

SEQ ID NO: 34262 - DNA, 592 bp, Arabidopsis thaliana
ggttggggggggggagggcgggggtgcgggggggggggggagggggggggggggggggggggggggggggggggggggggcggggggggggggggggcccggggggggggggcggggggggggggggagggaggaggataggtgtgagttaattactgcaaggaaagagaaggaataaaagacaggtcttcaaaggaacaatgatcggacgaaggtctcgaaatggcacagtaacaaaggaacaactgtgctggactcagcacctaccataggtcaacgtctttcgagaataagtcctggggaagatgtctaggcataagcagcacccggtcataagtaaacaaatgttgcttaaggagccaatacaacacaatcagaggactactttacgcttgagagggccgatcagctcataccaacaaaacaaagaagatggcaatgctgtggagtaaaccggcagtaagtaaatacctgggaaaggctcggtagcacacctggagcaacaaagaaagataggtgctttagaactcgaccaagaggagaggaagagacggacgatcggacaaaggaaaagtgctggactcagaagaag

SEQ ID NO: 34263 - DNA, 582 bp, Arabidopsis thaliana columbia
aagttttgtagagattcgaccactacaatcaaaaagtttaagggaatgttctattaaaggcgagcacaagcgacaaactcgaactcgctagagcaatcacaatgttcaaggaagaagaaattcgtcaccttgcagaacctgatgacgttgattttgtcctcaccttagaccgtggctgacgtcggggtttcaaggattgtgattgatgttggaagtttgatagatctactattcttgaatacgcttagagagaatggaaagtagcgaggctgacatagttggagccccatgaatttatcggatcaaggttatcccatcaatctatcgtcaatacgttaaatatttaatcccgaatggtgtgaaaattttacaaggagatcaagaatcttcaaaatcttgttatttaacgactcatcggatggttatccaattaacaaatctcgtgaagaaagaagtgattttaggaatatcaagtgggcaagtagtggatgacgtcataatcaaagtgaccatcgattagaaagatcatgaacgaacaattttggagaaagtagcatctagttacaaccaaataacgatgag

SEQ ID NO: 34264 - DNA, 455 bp, Arabidopsis thaliana columbia
atctagtagcacatgagtaagccacacactgtttgcctatccctccggcgggcggctgttgttggtagcatggaggccagatatcgaatttacatgacgtagcaagacaccgataccctagaccttccattgagcttacttgtcttgctaccacattcccgaccatcaccgctgtttctagatcggggaccaagcttaacacacgttctgtgatatccattccttttctgacacatccacagcatatgaggagtattccatacgcaaaacgggcaaacaatgaatgttccacacataaacttagcatatgacacgcttcttctgaggatggatcatcttgagtcaatatccgcaacgcttctacgtaccttgctatcatatttcgctctttgacgcactttaataagaacactctataactcgactctacgttcggaagtgtacgattgacaata

SEQ ID NO: 34265 - DNA, 621 bp, Arabidopsis thaliana columbia
ggtaccggggattaacggccgccagtgtgctctaaagagtgggcacgagcttgatcctgcggcaaagggctacagcacagatacagctgtgcacttcttacgacctctcaatcagtacctccctaagagaaaggctaagaagctcaagaacctactcgcgggtgccgatgaaacagatgaggaggaagacgatgggacccccgatgtttcaattgcatcatattaccacccgaacttcacactatccgtgattcctgattctgggaacatgaaataccgtcaaatccatcctgccattcgtcgccacacacagctagaggcgactggcgcgagagatgcttcgggtcagaatggttggcactatcctatcgtcttcctgaacactttctggcagttgagaagccatatggtggagctcaactcgacggttgacactatccctctacggtttacactccaaaacctccagaactggaaattcgcaatgatggcgagccgcgacgagaacgccaaacaaactgccaagcaagccgcattcggaggatctaccctggtggtggcgatggtagcgagtttgagatgatgaagaagtgctcctggataccaacatctggttgttgg

SEQ ID NO: 34266 - DNA, 314 bp, Arabidopsis thaliana columbia
taaaattaggtctctagttttaaatacccgattacagaaaatagaagattatcccagttaaggaaaacggaaaccagtcgtcaggaagtcagatcgtcggatctagaggtggactgattacaccgtcttctctctgcttcagcttttctctccctttcttgacccgaacaagctaacaaccatctaatttcgtcacaagttcctgaaacctgcaaaagactcaagacacgactaaaaagacgcaaaagacagacttcaacaagacaaatgactcaaaactaagggacctaagacaccaaaaaagcaacatatca

SEQ ID NO: 34267 - DNA, 470 bp, Arabidopsis thaliana columbia
agaaatagttcagttatctaaagcttatgtgatctttaggcagatacaataaaacctctataaattaatattcgataaattaataatttttataaattaataaactattcaggttccgcgttgggaccaatgtaaaaattgatacaaatcgataaattaataagataatatttttttttaaaatttatataaatatacgatctcatcaatagtataaattaataatagtataaattcactaatatatattacccatctcatatgttaaatatgactctagtaatgtttttcttcaattttaataattctttgtagttttcaattctagtttttacaacatcaaaaaaattttgtattgctttctaacttgtaattggtttcataaggactattgattataaagaacaaacttcattttatatcaaatttttgtaagaatttacaaaatttgtataatttttattaattta

SEQ ID NO: 34268 - DNA, 550 bp, Arabidopsis thaliana columbia
taatattaacaaccatatgtatatctttcggactcttcccgggacaggttggagaaaataacataagctcaggtcggaatcgctgaaaactcatagacaacaagatatacaaacgttatatttcgctcttagatttggtggccaaatgaacgaacactaaataaatccccaataattcatatttttaggatttgttagcaaactcaattgggaaatttagtttttaagtctaaaatccgaacataaatggaaaccaaacttctattttgaaaccaccgatttggaaaagctgaatccaaaccaatttacgaatatcgttttggttcggggttgttgctcaagacctacatatagggttgggcagaaaaacctgatccgatatccaatctgatacccgaaccgtaaaaatcgggttggggcggattagggttttaggtagaaaattatttcattggatacagtttcagtaaacccgtgggtattgagtcggtccgtaataacccgtacccaaataggcccgaaaaccgaacataaatttagaccagaatat

SEQ ID NO: 34269 - DNA, 375 bp, Arabidopsis thaliana columbia
cagtatactcaaaagaaagaaacgatttaaaaaaaaaaaaaaaaaaaaaatactgccactaaccccaatcattcaggtttaaatctatttaaccatctacagagcaaattggggggaggggggaggtcgtcgaggggggttggaccggtttttcgaaacgtgctcttacaggattccacctctacttagattcaagctccgtgtaccgcctgccctctttgctcctccccggtctgaacatccccgccgctatgcttggggtagcggatttcagcagccagctatcctgatctccggactccgtgaggccttgtctcgaggggaaaacctcggtcctccacccggccggagtcccatcgagcctgttctcttttc

SEQ ID NO: 34270 - DNA, 1000 bp, Arabidopsis thaliana columbia
tcacacatttgtcatcgccaaggtggcgtctgatagtctcatgccaaggcacagcctctttcacttgataattagagacgacgagagaagaagtattagagaggctgctccttgatttgtgtagaataaaacatatacctaattattaatggatttacatggtttttctacgtgtgcattatttggttgactccaattatttaacaattgcatatttgtctcaggtctcatttagcaactaggtaatgtaggaatttaaatagctctataacctactttttaattgtttttttggtgaaacttttttctcataacatggtttttttttttttttttggtttaagggatatcttctcgtaacatatgttcttctcacatgttaacactaaagcagacacaagaaaacaaattagtacgttacgttgttgcatgtgttattttgatggctaactggaaaaatacaagtcgttgtgattagccatccaatgggcctctaaaaataatgacttggtaaaactagacaacccaaaatcacaaaacaaatattctcttcttctattaagtaaaaaaaaaaatcttattaaaatctggtttaaatgtttgttcattcaaataaataatggagtgtattttagaatcaaataaaaaaaaactttatcaaatgatttatttggtagataacaaccaaatcttgagctaaaaagggtgaaaaaatattgagaattttgttaataagtaaatagttatggttttgactgggtataggagatatatctaggctggtgaaaaaaaaaagaaaaaaaaggatatatctaggctttaaaatattcacatgcatacaatcagattttcatcggtgttcgataagaaaacaaaaagcaagtgtttgttttgtaaaaaactaatggcatacttaagcttcaagtctaatatggaccaccacggggatataggagatatatctaggctggtgaaaacagaaaagcacataaaaaggaga

SEQ ID NO: 34271 - DNA, 559 bp, Arabidopsis thaliana columbia
acttcaaatcttgaattctctatcaaatgtttgatttttaaataacaacttcacgctcaatcggttattttaattattatgaaataataagaaagtaaaaagtttgaggacctagttaaatcatagaggaaaggaacacattatattatgcccaaatttaaagttgcctttaagaaaaatcgtcgaatttcacaaaagctgtttatacgtacgtaaatttatctacacacattagatggccaacaactcaatgtaacgagttaatatacatccgagtcgaacatcatattgtaccatttcatttacgctttttctgatgaaactatagagaaacaagattaattaaacttgaaaatcacacttttaattagcggacaacacaaccacattctttcagtttgaatattattatctttgggtggtgaaagccggaatagggctatccaaatcggttctttatgggatatgtaaaatacaaaaattaaaagaaggattatgatatgcatgagagattaattcctaatgtaactttttttcacacataagcggaaaacataga

SEQ ID NO: 34272 - DNA, 547 bp, Arabidopsis thaliana columbia
tcagtgggccccaacttcttttctgggcccatgggcacccctgtccgacggtcggtacaccatgtcgaggaggctttaaagacttttaaccgaccctacaaatcaccacatgttcttttttcatgttttgtcctcacttacatggttccaacaatcacttctcggaaggtcacccatcccaagatgtttgaccaaaatgataagtgcactttgataacataagtgtccaaatcattctttgaaacctctccgcatgcaccaccatattcttgaaagcagggtgttacaattcctgtaacgccccaaaatttcaaaagcatctttgaatcattactaaaactaatataataaaaatactagaacttttataatgtatgaacttgaaatctcatataaactccaaaatttaaaaaacaaaataaattaaaatttagaaaatctaccaagtctctctctacaaccgaaaaacaaactctaaacctcaactgcacctttctcctcgtcaaacagaatcacaactttatgtgagcgaaaaattgccaagtga

SEQ ID NO: 34273 - DNA, 426 bp, Arabidopsis thaliana columbia
tagtaacgagcgccagtgtgctctaaagctttagaccattgtgaaaatattgttgggcaaggtagagtaaaatgaagaaaggaagaatgtagagaccgtagttggataatggctctgtgtggtcgagaatttctgtcacgagcgccatctttgatgttgggcaatggagagatggctgagcacaggttggagactctctgcacttatatacagggatgttacagggtaggcgcctcactgggtgcctgggctcctcgtccgtattgctaagacgcatatcgccctgatggcctccatgcaccgatccacggcagttatgcctgcggagaaccgatggttccataatcactctgcaagatattcgcaaggttacgcagatgctccgttatctggggttgacaggagaaatgagactgcgagactgtc

SEQ ID NO: 34274 - DNA, 565 bp, Arabidopsis thaliana columbia
tgcccacgaacccgttgggtttagcgtggtgggcctggacattgtttctttgccttcatttttaacgggccgacccagttggaggtgggccaacccgtttgacagaactagacataatcagtggattctgttacaatgtcattagaaaaaatgtaagcacaaatttaattctcctcattaagggttatatataaagtaatgttacttttgaatccaattgtgttaattgctaattatggatctaaaatacggggctataaaataatatctgttatttttaaatttaagatttcacaattttcggtttgaatattctactatttttaatagtttgaaatcttgcgtgaccaaaattattttatcacgaaaagaaagtatattatattaaaaaaacaaattaaaaaccacatgtcagttgaatcaaatcatataaatgaaagttggtcagctctccccatatgagtgacacatcatcacaccaatgagtgccacatgtcattctaaattaatatcattagaaaataacaaaacttagtgatagaaaaaaaaagtttccattgcattg

SEQ ID NO: 34275 - DNA, 345 bp, Arabidopsis thaliana columbia
ccctatccagtagacaaaaaaaaaatattaatttctccacacgtctctttaattgcacgtgtggaggagcgagagacatgacgaagttgagcttctaacacatgtatgttgatcacttgatctttacttgttgaccatttcattttcattaatcataaatacgtaacacagttctcctgtatatgtcttgcatgcgtgtagcacaattgacaacctcataaacacaattacgaatcgtactacaaaattataaatcccctagattttcatccgcgatataccgcgagaacaatttatctttttaaagttagtataattataaaaatgtaaatagtatctatctat

SEQ ID NO: 34276 - DNA, 755 bp, Arabidopsis thaliana columbia
caacatatctgattaggttatgctttgaatgttattatgatttaattattgttcagccgtcttagctcagtggtagagcgcgtggcttttaaccacgtggccgtgggttcgatccccacagacggcgttttgatttgtttttaaaatatataggaaaaatattctttctttctgtcaaaaaataggcaaaacttaaaaattctttttaattcttcatttcttattccccaacattgtgagaaaaatggtaaagtgaacctgctgtcgacttgatactcatcgcaataggttattactgattagtgttcttttttttttttgacaatttttactgattagtgttcaagatttcatttttttttcgctaagagtataaatatcattatatgaaagtaggtgttacacaaaagataagacctaaaacactgaaccttgtaaaaaaagaataacttaagatttcatttggctttgctataaaatcacttaagaaaaacatccattataggatcacgatcctgatgatatagtttcacttggccttacaaatcatcatcactatgtaatttttgctaacttagactaattatagaagaaccttaaacacatgcggattaaaattaagtttaataattaattacgaaatgttgtatcagctcgccgtcttagctcagtggtagagcgcgtggcttttaaccacgtggccgtgggttcgatccccacagacggcgatttgttttatgttttttgataattag

SEQ ID NO: 34277 - DNA, 597 bp, Arabidopsis thaliana columbia
ggtcgagtcgatcccgcagatggaaagacatgcatggcatatctcttttgctaataaggtcatgcgcgactggggaatggaagttttgtggtgaactattcccaacttcttttctttggcgcacatctcacgagaaccaaggatggggctaacaggagaaaatggaacatgtgagggtggattcacttcaccagcttgctcaagaagtagaccacatggtagaggccatattgatttgacagtacgcattagtggaacagatacaacttcgcctgttgccaacaattgccaaaaatcagaaagtaattacctcagctagtgttacctcagaaaagagacaaacagtactgattaatcagatctagtcaacaagtaaaaaggaatacgcaatatatttccaagagcagatgaaaggaaactagaaatagaacggctaaaagttaatcaatcaacttgaacgttcaaaaagctatcaatgcacagaaagctacctgaaatctattcttcataaaccgattccataaattttgatttgtaattacacaatgtcaaatgaatcataaagaaagggaccaactatgtgcaccagtatgagat

SEQ ID NO: 34278 - DNA, 460 bp, Arabidopsis thaliana columbia
cgtccccgcctcagccgatccctacccggaccgagtcttgtgtaggagttgacggtcaacgtggacgtggccgcggcctaacgtgtgctgggagcgctacttgaggaacggcaggatgaggggcaggtgtcccggagctacttcagcctggagtccacattttccacctcttgtcggcatgatggagtcaagcccccgccgggcggccatggaagggcccagcgggcgactaatctccgtccccaagaggcgggcggaggcggtcgcggacgcagagcagagggcgcgccgtgtcccgtcatgggcttggagcccgaccttcttgtctggtcggcccctctgcgcatcgcccgcatgggacctggaggcgtccggtcagcccggagaagtgaatgcatgcgtacgcggtcgaaggaaaaaccgccgtctgcgctccgagaatcacccgggcgggaggggg

SEQ ID NO: 34279 - DNA, 578 bp, Arabidopsis thaliana columbia
gaaaagtcaaaatctaatcaagacatgacaattactctgggagatctcgttcactcctatgtaaagctcaaaagcattctcgtatgtcccatgagacatattagctttttgaatcgagttccacaaacgcaaatccaacaacaaaacaagagaaacaatctcaaagacgttacatgcatcgaggacgagtcctcaccgagagtaaacaaatatgagattcgcagctaatgacccagaacagaagatgaaatcggataaaattatttgggcatgcacttacctgcattgttgagccgtcacgcataatcgaagaagatggtggaagtaatggaagaaggattgatcattgtcagtcgtaagggagtagtacgaggaaattgaaacggtattgggaggagaaatcgatgtgtattgacattgagaagtgagaaaggaacattacgaagatgccaagggattatttgaaagcgacatcgccaaagagaagcatgaaccatctattagaaaaggaaaacaaagagaaattgtaaagtcgtcgtgggggattgggtgagaaagagaggtttcttcaaattgat

SEQ ID NO: 34280 - DNA, 559 bp, Arabidopsis thaliana columbia
cattcactcaaccatgtaatattttttcctgggtctctctgtctctatcgcttgttatgatgtgtctgtaagagtctctaaaaactctctgttactgtgtgtctttgtctcggcttggtgaatctctctgtcatcatcagcttttagttacacacccgacttggggatgaacgaacactaaatgtaagttttcataatataaatatatttgcaagctctcttcttctgtgtgtttttgttgagtttgacttttacaattgaaaagtttggtgtaattcacgctaactacctcaaagttagggaatggtgggataattatttattacaattgtatttgatggataacgtgcttatcgctagtggctcgtgggtagcatttaagcatgggtcaatgcttgtgtctacgagctcgagtgatcgacacacacaatccaatccgaacacaaaacaagaagaaaaacaaaataagatcttagatgtaaggtattcttaaatacctttttttttgacaatatatatttcattttttgtttgtaattataaaatggtcctagattag

SEQ ID NO: 34281 - DNA, 462 bp, Arabidopsis thaliana columbia
cctctgaatacacggttaaaacggttacggttaaaacggttacgattaaaacggttacggttaaaacggttacggttaaaacggttatggttaaatacggttacagttaaatacggttatggttaaatatagttacggttatttgataattataatacaattaatatatgaagcaaaatcgaatattttcttaaataattttctttttaaaagaataattatataaactagttttttacagtaaataaataaacgatgaaatgattaaagtactatttaagtgaaataattatgtaattaggaaaatgaagtaaccaaaaaattcatatttattaattataacaatgtttattaagctaactaaaacaaataataaaaaataaactttaataattctcgttgatgatacatcactatcaatatcttctaattcttcttcattctctcgaaggaatttttgat

SEQ ID NO: 34282 - DNA, 662 bp, Arabidopsis thaliana columbia
cctcatacttctttgccaatgtttcagcctgcagcagaaattgttctggataagacagaattgcttctaaggaaatgagaaaagtgattttctatgtgaaaagcacctcacgcttgtcagcagaagccctttcggagatctcatttaatctattgtcacacctgcttttgtacaagacctgagagaaagatgaatgaaaaagtgggatggtgagaattggatctcagcacaagaaccttactctctgacacacagattgtaaatataatctaaataagataatagatcaagctgaagaactagatctaaatagcaaagcctcaaacaggaaatacgttcctataggaaaagatcagaacttcaggagaccaacaatctcaaacttataagaccattacctagataacattcaagttctgcagcttaatctagatggtcagattccagtagattggtcttaatcttacacacaatctttcaaacgtttcagagaaaaatcaagattccctctttcaaaagagctaacaatttcgttaaggtattaatgaatacaaatatatcacagtttacatcaacaaaagttaattatttttaaatatagcaaactgagacagatcaaagtaatttctcacttctcaaataacaagagtaatctcacaata

SEQ ID NO: 34283 - DNA, 739 bp, Arabidopsis thaliana columbia
cggagcaaactgaaactttttaatgtgaaagaataaaagaaatgttttcaagttgagacaaggcgtgaaagcttgcttgttctctaagaaatggaaaaaaattgtattacaagttcatggattcagaaggcatagcaacaaaactacgaagcatgtgcaaattctgagatatctgcaatagaattgcttctccttcactaacatccaaaacatcagcaatgtgtttcaataaatcaccatttgattgaagagtacttagtctctctgtgatctctgaaagctcttttactatcccttctttgctttcactccctgcccaatttcataacaacaacacaagattaaaaagggtttttaggatcagattaaacaacacataatgatcaaactttgagtaaagaatcatacctttttcttcatctgcagagacaacattctccgcggtagactcctctgaccttttcgattgcccattttgatcgatgttttcgccattttcctgctgatttgaagaagagacagccaaatccgagactggtttggtttcttggcaatcatcatatgcactagcattgccgttttgtttatgaaactcttcccttgcatcttcttgatcagtcaaacatccatatttctctctgtaaacctcaaattcagcttcaagctccttcatttcctcttccctcttcgccaattcactactcatagactgcaaagcttcttggtcatactctgcttg

SEQ ID NO: 34284 - DNA, 129 bp, Arabidopsis thaliana columbia
ttcgaaatgtaagctctaaaatggtactcttaactgaaactaaaatatatataagcgcgcccccccctacatttcttgaagaaacattttcccccttcactatagttgctaaattactattttagattg

SEQ ID NO: 34285 - DNA, 331 bp, Arabidopsis thaliana columbia
ccactgaatattacagatccacattggtattaaagagggggtgggggtgcagagaggtagcttatttagcaaagaaaagtgctagtttttaaccgtacattaatatttggttaaataagagttttctctcactttggttaaataacggtgggtattacggaaacaaaaggagtaatatagatcaataatttcttaagaccataaaaatgctagttttttttctctctgtaaaatgattttttaaaatttctaatatttttgattaataagataattttctatttagatgatgatatatatatgtatatatatatatatatatatatatata

SEQ ID NO: 34286 - DNA, 297 bp, Arabidopsis thaliana
cagacagacagacagacagacagacagagagagagaaagacaggaagaaggcaaggaaggcagacaggcaggaaggaagacagaaagacagacagacagacagaaagagagaaagaaaggaagacaggaaggaaggaagaaaggaagacaggaagacagatacacacacagacagatacacagacagatagacagatagacaggtaggaagctagataggaatacagactcagagacagacaggttgacgggaaggaagctcgaccggaagataggaagccagacagacagacagag

SEQ ID NO: 34287 - DNA, 543 bp, Arabidopsis thaliana columbia
agtaatggagaggatccctttttttcgtatcaaattattttgactagtcaggtggccgctgttcggccacgtagcccaatcccataatcagaaaacaaagccgtgttgtgtgtgtgttttccatcgacatctcttgttaaaccaaatctcacaattattcctaaaaaaaagcttttttcctttcattttaaaatcttttatacaagtgtgtcaatttgatgatgaatctttttttttttttttttttgttttttttggagtttctcggccaaaacccgtaattcccccagacccgaaaccatagcatgtaatattagtttcgttccaagcgtcactcgaaccagagacctctaagtttcgtctaaggtttttaccaattgaactaacgacacttggtagatgatgaatatccaaattagctcataatatcttacattttataattaatgcaaataacactaaaacgaatatcatcaagagttgacattatacatgttcagatcctctagcacaaataacaatgccaccttcggaagatgttta

SEQ ID NO: 34288 - DNA, 545 bp, Arabidopsis thaliana columbia
gtcctaacaataagtaagcgggtaattacgttcacttttatagaacaccaaaccgatattgatattgaaacaaaacttttttctttaactaaacgagaagaaaaaaaaaaaaaaaaaatacgagaatgagaaatcgatattgctcaagagttttcttttatttgttggagaaacacgcataaagggtagcgcgagagagtcatataggtaaacatattttttcaccctccaacttgattaggctgagacactacttcgagttctgaagtagatgcagattctgtcttctggatatccactggcaccaaacgcttcagtcacatttacagcaaacttggcatgcttcacagggattttggttttaaaaagagttaattaagtactaacgatatatattaaaaaaaaataatatccaaaaactttacgtaagaatacttaccggattatgtatataccaaggaaatttaagaagagtgaaactgtcacacccgtctccctcaacattgagacggcgtgctttcccttatttatatcttttttattta

SEQ ID NO: 34289 - DNA, 183 bp, Arabidopsis thaliana columbia
gccagtgtgcttctaaagcatgatttggtgaaattccaaagccgacagtatagtcgtgtattggctactcaaatgatctaaagtcagatgaagtttgttccttttttctttctttctttaaattagagaaagctacactatcttatagtccgattgaagaacaacggaatataggttctgcat

SEQ ID NO: 34290 - DNA, 366 bp, Arabidopsis thaliana columbia
ctctagtaacgagcgccagtgtgctctaaaggatgtttgtgaaatctcagcaaggcctcataacttggcgaatattgcgcccaagccagcagcgccgcatacatcgtcaataccagcattagtggtcccacatgagcaagtccatacacgaccaccatcagaacatcagtcaccgtcgtctagccgcatcaatgggactttagcgaaccaaggctcggtcaatattgctcctaagccagcagtattatatccaagactgacgacactgccgggtggcctatcaggcacaacacagttatcgtcagatccaccaccatctgagagccatcgtgggcctttaacggaacctaaagacttggtcaatgc

SEQ ID NO: 34291 - DNA, 237 bp, Arabidopsis thaliana columbia
tcgacaattccttactcacggtcaagttttctcgaccaccagcgatgattctctagtcacggacaatgtttcctccaacacgggcgacgattctctgaatttgggcgagtttcctgatttcacacgacttattagtcggacaagcacgacgatctctcgctctcgccttcaaaaatgagattgggcggcgagagccctatctcaagtccgcccaaggttggccagactgcattgtcc

SEQ ID NO: 34292 - DNA, 509 bp, Arabidopsis thaliana columbia
atcataaaatcaaattataataaaatattatttttttttttgtttgagaaactatttgggtttctcattgatggagatgctctaaactatacttaacacatcgggaaagtgcctataatcaaatggctaattaattgtctatttctacagcttcttttactggaactaggagtgtacccacgctacgcatgagttgttattttgaaaatggttttaaaataattatattctaactattttattactagtttatgtttatatttgtgtatgttattatgtagttgataaatttatattcattttctataataatactttttatagttaaatttaccttcgattaaaaaatcgattatacttttcatgtataaatcttcttatctatatattcaagtttctattcttttttaactatcatgaaatacttacaacaacaatatataatacaatagtatgcaattatgttattcatgtggtttgaacttgtctaacttgattataagcaaact

SEQ ID NO: 34293 - DNA, 557 bp, Arabidopsis thaliana columbia
cgaatggtcgattaaaatccaggaatatgctaagtttgcaattaatcatgtttcagacagcattgatgcaagcttgtagatacggacattgggaagttgtgcaaactcttctgcttttccgatgcaatgtgagttcttttcatcactagttgaaagaaaattataacatttggttttgattttgattcttagtatcgtctttctttgtcaaaggttacaagagctgattatttagctggaagaacagcgcttcatttcgctgctgtgaatggtcacgccaggtgtattagacttgtcttggctgattttttacctagtgataaacttaactctcttcctgaaactggtgttgtcactgcaaagaacaaatctgagcaaaggtttttttttttttggaaaccatcttcatgtttgtaaggttttgattgactatgtagttccaacaaaaaaagaaattgtcttttggtgcagcgcattgtctaaatttgtgaataaggcggctgatggtggaatacagctcttcacatggctgcattgaatggattatttgattgtgt

SEQ ID NO: 34294 - DNA, 599 bp, Arabidopsis thaliana columbia
ttgttgccatatagatctatgttgcgtctctcctctactattttatataatccgtttttgatacatactattatatcttctttgcttgtaggaaactccaaaaagaaagggtcagatatttgggttaggaaaactaggtgtagctcgatataagtctcattccacatcgtcgtattcatgtgatcccatgcttgaggcgtctctcaaagagaaagaagcacggattgaagctttggagactcaaatggccgaagagaaagctgagaacaagcgccgaaccgatgagatggcaaaggagatagccgaaaacaagaaaagttccgagacgatgatgcgtttcatggaagatatgcgaatgcggtttcccaattctagttcttagttcttcttttaaattttagtgtgaatactttattttggatacaatgttattgtaatatgaatggtttttccatttagttattttattttgaatcattttaaaatttaattatttttagtttgcataatttataatttctttttgttaaatcaattataaatcaattgttttcgtctaggcatattccgtcatcgtcggtaatcctcagtaataactg

SEQ ID NO: 34295 - DNA, 523 bp, Arabidopsis thaliana columbia
cagacttgtccacaatgaccaatcacaataactttatcaaaagcgttacaaaaagttttactctcagtttttttatacagatttagatttattatacagcttattttaacagctttgcattattccgataaaactaatagctaaaaaactcgtacaacttatagttaccaatcacatccattaccttttcttacttaattatcgtaacaatagaaaatgtgttaattttgtataactgtcaatcaacaaataagttaacacttaacatagcccaccgtcaatatttggccgtttctatgtgtcaactctttggattccattctaaatagataggtcaaagtcaactttttctatttcattgattgaatatgtttatcagcaaatgaaatcttggtttaataattggatgattttgttttaataattcgtgtatgatatgcataatttgaataattgcgaattttaaaaggaatctatggagaatacgactacagttaaagtgaccaacacgagtaacatagag

SEQ ID NO: 34296 - DNA, 260 bp, Arabidopsis thaliana columbia
gattagatatagtttatataaaattttgtataaataaagttggtgatgatagaatagagaaatgccagttgataatgaaagtaggtgtgaagtaatggcacgaacaaagaacgcatgtgtgccgttggcggtggcgtccgcggcggaggtggtggtttcacagacaatcaatgacgaagtagtagtagcgtcggctgttgaagtggattctgaagcaacaaattcaatctctaacgacgatagagcggtatgaactttaa

SEQ ID NO: 34297 - DNA, 681 bp, Arabidopsis thaliana columbia
ttgataagaaaggaaactagttaaacctttgtgaagaacgaatataaagttgagaagaaaaacttgttaactcaccgtcatggattagtagttttggtatctttagatatccatttttgaattcgatatcccaaaaatggccggtttcctttctcatgaactcaacacctgcgtttcttagttcagtcacgcaatgtatcagttgttgaggttgcttgttcaccatgctcatatcctcatccgatgtcccactagattggaggagacctcgacggagtacgtctaaacagtgcaacccgccttcttcagttagcacctccctcgttggcagtagtggttggaagaatggttggaagagttgaacatttactttgtccaatacatcgggccgttgtagctgtaataacccctttagaacagaccaaggaagctgattttctagcattaccatgtcacgtcgaatcgattgcatcaatcctcgcatcccgaaaaccgggtcattgggtgcatatctattcagcacacaagaacagtgtcaatagtttttttgtttcttttcttttcaacgttgaataatcacattaataactagtctatttagcaaaacataaatagtaaactgtctatcggtaaacgtataaatagtaacaggttccttgactcgatagtttggactttaga

SEQ ID NO: 34298 - DNA, 430 bp, Arabidopsis thaliana columbia
tgttaatttaaattatggattacatatgtaaacattgcttataagtcaatttactataattgtccacacacaaaaaaaaaaaagattacatagttttggttttatcgataggacaactaatacattacaaatgtttaggtataacaatgtaatcagaaaactatgtataacaatgaaattacacttactttctttcataaaatcttacacattaactaataattatcaaatctgttttttctttataagttaaaaaaaaaaaaaaaaaaaaaaaaaaaaaaaaaacgggtttccccaaaagcccccttggggtaagtttcccccccttgggggggtttcccatgaaatttttttttttggaaaaaattaaaaaaattttggaaaataaaagttttaacggaaaaaatttcctggtatccggtaatttggg

SEQ ID NO: 34299 - DNA, 127 bp, Arabidopsis thaliana
aaagcgtcctttcttccttcctttcttcctttgttcctttcttccttccttcctttctttctctctctctctctcttccttccttcctttcattctttctttctttctttctttcttccttccttcc

SEQ ID NO: 34300 - DNA, 535 bp, Arabidopsis thaliana columbia
taaaataacaatgaaagtaatgtatttatatacacgaattaatacaccaaatatattagttgactacagaagaagctggattttaagtttcagagtagtttttttttgttatcattagttgacctaactacaaagataatactaactatttagttaattaatctggtaacgaagagaaggcattgatttaacttaatacaaagaagtaacattgtttaattaatttgatcacgtagacagcggaagatgcctataatactataatatatctatatggccatcagaattatatttattttcttctaaatattttgatgtcacggtaatcttcattgcatgtgcatatgtgttctaagatcgagtattagccgctctcattatcttttttttttcaattaaattgaaaatatagttcaatccaaagcaaaatttgtgttgggtgcaagtttattactgtaatatattcggttttcccatatatatttgaatagtaaatggaacaaagatgatagagaatcctattagagatagtgtg

SEQ ID NO: 34301 - DNA, 555 bp, Arabidopsis thaliana columbia
ctaaaggaatcgatctggcctcgtcagacttcgttaaacgacgatggagacgataggtaggatctcagaatggttggctcttgagaggttgctatacatcattctcggtcttccaggctttcagctgtacattcttgatatagttcccgaaatcccattgacacctaatatgtaaccgtagctgcactcctaacgcaagcttaagcccagactcggcgtggtagcggtagtgaaatgctattatccagctctccaggcagctgatccaacaaatacccgaaatatatgtagagagtaacgagaagtgtaccgcacctaagctcagtttaacttagatcaacccgaacagaaataagtgatgccaccgaggcgttccctagaccatatcattcgacttgtacaaaacagacacttccgtagtcaaattgatttgattcttattatccacagtactcggcttgggcgcgtcaccggtagaatcatcgtttggctgctgttatcgcgaggatccgtcacttctcgatcacgatccacttgcgttgcgtatatagaggt

SEQ ID NO: 34302 - DNA, 1419 bp, Arabidopsis thaliana columbia
atactaattatgttttgatcctccaaacttaatagttaaataaatatacgtgatgccctcaatcaaaacgccgatgggcctttgaagagaaattgaaatgatggaagatgacgatgatttctcggcggctgcgactaccgttgtgttcgaccgtccgattccgctgctccggggacctgtaccctccggtggttcttatgttctagctttccgatcactggattcatggtcagccgctttcaagcgttgcgaaaccctaatcaaggaccagtgcgaggaaggtgctaaaattgggtgcgccgtctccgcctccaacaactgtaagccgccgtggtggcggggatctggtggtgacatgagggaacgagagaagtgcgaagagcgggaattcgagggctgtgtggctgccgccaagggcaagtgcgctgctttcgccaaagacaagtgctctggtgcctttttagatgcgcgaatcgccaaggacaaggaggttgagggattggtgtggctagcttcaatgccggaggaaagcaggtggagggatctcatggggcttggtggttcactgcgtctgcacaccaacaactgctgctgcacagccagggatcttcttcttaaaccatagctcttaatttgttgcatgctgagagctttgttattactagttaccgttatgagtgagcttaattagttgtaatcttcccttctacttattcctgaaccattgtttagtttcataagatgatggttagtctatttattctcgagcaagccattgtatttgttggttgggattttgttaagcttgctactgcttttggtgcaaacactcttgtttctttcttatccacatacagtaactcgtgatctaatgtatgtcactgagcatctctgtgtatgtatgtatatgatttgaggagtttctcgacattcacttcatcgcttgtatcggaattttatgccaaatctggtctcacctcacgtctagttttagtggaggtcaacttattttgtttgtttataaaaataaagtcaactgcttttatgtcttgctgtcgtcacatgaacaaagaaagagatgacagcgaaaatggaaagtgctatgaagtttcggtgatcaaactcataatgccttcgtcgtacacgctgctccattttattatttctaaacatagatttgtggaaaagtagacggattttgagtttgagtagtataaatttcacttgatagatattataccaaaccaagttggtgtggaagattcaatctaaatcctttttttcttctttcgctttactatattcgccatttcttttcatttgtccgtgcggactaagcaagttggtacacgcacgctattcctcctcattctacaatgacggcttgtccacaccattacatcatacggctgctttaga

SEQ ID NO: 34303 - DNA, 371 bp, Arabidopsis thaliana columbia
cccctccaccccacatcttccttggtaatatagttttttttttctctgacatcagatgtttggtcaatagtttttatgaaacaaaaacacacacttccgtagtcgcaattttttttttttgctgtcaaccacggtactttcagaccgcataacctaaacacttcaagaatcctaaccggtcaactataggcacatgaacacttcacatctgaaacggaacgtaatattgcaccactaccacaatctcggctctttgggagcgaagaaatcgcggaaataacgttaaaaatagtgctatccgatcgcattccgacaacatagattggtcgctcatatcttgttcgaaatctgcctgtgcttggaaacgtgtt

SEQ ID NO: 34304 - DNA, 668 bp, Arabidopsis thaliana columbia
ttctctaattcttgatctaaccaaagttttttttggaatctaataacaataacaatctcaataaatagcttttgcactttttaacggtattgttttttgcaacttttcgttaaaatatttacgtttttttttattttatagtcgtgtctttttgtcatatcgttttgttagaatatttacggttatttactagctagggctggacattcgggtatgcgggtcaagttcgggtaatatccggtcaggtacgaatatatcgggtatactattctatgacccaatagggtaaatagaaaacttcggttcgggttcgattcgatttcaatcaagtttgggtcggttcggatttagaatttcagaaccattaaatacccgaaaaaatcgggtatccttcgggttcgggtattttatacccaaatacccgaaatttcactgaaccggaaatttgaatccggcatgccactttttgatctccatccaattcgtcgaccgtcgatttctccggtgctgcatgtgtcttcctcctcgatagtgttggatcaaattcttgatcgatatttgctcgtccactctggaaacgtcctcctttagggataccatctccggtaggtattctatttgcaatggtagttagtacaatgtaattgaatttgataataggtttttag

SEQ ID NO: 34305 - DNA, 549 bp, Arabidopsis thaliana columbia
cagacatgttacccatatcaaccaatatgtttaaagatgaaaaaacttaagatgatacaatctcttattcaaaaaaacaaaaactttagacgttggagacttggagttaagcctaccttaaaaaacaaaaaaaaaaaaaacaaaaaccttacaaaggggtttataaagttagaattactacaagacactaaaatttagaaaagatctagaaaacgtggaaaagaaaatctcaacgataggatttaagaacagagccgcaaaagctgcagacgatggctctccaagatctacaataaataggtataagacaaaacctcgtcgaagtcttcatatcggggactcttgcaccacgaccacaccgggaacacgttcctgccgccggtttgcttcctttaaccttcctcttctggtcaaccaagaaacagaaacacaccattattgatccttcttccaattcttgttttcaaattgggataaaatgcactggagatagtgatcgatatcgctcctaagaacgctgttccttgtgttcttgaagatacatttggg

SEQ ID NO: 34306 - DNA, 948 bp, Arabidopsis thaliana columbia
tatattttcaggaccatccttccgaggaaagtgatgctttagtcggtcagtgagtgtaagaacttcaggacggagagaatccaacaacataacttgttctgaagtaattaccgcctttatgacctctaaattcaggacaatagctttctctctggctgcgtcatagcaagacatggatttgttattgtctgttgtgaaaactagtcagcaaaaaagacacaaacgtgtgtatacctagaattttagaagagtgcgagaaggcagttcttaaatccttagccgaaacagaagaacgttcgatgatggtgctcttgtcacatccagccacttccatgaatccagtccgatcaaacctcgtccatagacagactcctcctcttctcttctttgacttccccgtccctcccacgattgcactacaaggcggagtaggaggcgatagagatgaaggcatcctattcatcttcaccgccgtacccttcttccggctgcggttgctcgtactacggcgaagtgatcccattgacttacctgcagctggtcagagatctctccgccgagtcctgccgcttttgcttgactttctatttttccgacgacgtacccgagcagggtttgtgttgtgtgtttcgtttcggtttcggccatgcgtttgttgtgcatttaggtttgggaagtgtttattaagttattaactaatataaagtcttttttaagtgattttttaattgattttttgcttttcttaaaacttgtaaatagttttgcatattatcatagatattacgtttttctttatcaagataagtatgaactcttgtggaattatcttggagatcttgcataatctttgtagtgtttgtttgttagaatcctttttttttggataactgttgtatgtaaaatcgccaaacactgtactatcgaattcgggatggtcgacctgca

SEQ ID NO: 34307 - DNA, 727 bp, Arabidopsis thaliana columbia
tatgattctacactagtctaatgagaagttagcacatcacatttggagcgcaaacaacaaaattcaagtttgagaaactaaacagagttactatattggtaatgaacactctctatgtaaccagcactattaacttctacatgaatcaagctctcctttaaactcaaacagagacatagacaatagatactgtgatagctgaaatattttgaacccaaaaacgtttatcttactactaaagcctacatagattaataaatcttattgagctaagagaattacatacccgaacaatctcttcatatgtctcgtcatcgatttctactgtagtgatagtttcttcaacatcacccagaatcatattcaaatgctgatcaaacgcctgcccaaagaattaacaacaacaacaacatcaaacctaagtgagtaactcaagagtgtagaaatcttccaaaatttaagaactttgtcaaaattaaatttacacaaaccataaattcccaattgcaagctcatcgccataactcgagaaaacgtttttagaaactgaaacttgaaaatcaaaaccctagactttcccccaaaaaaggaccaaattcgacaccaaaacagtgaaatcggcaaaataaagttacaaaattcaaacgaactatgtgtggaacgagtattttaagtagtgacaagttcaaggtactaagcagggcacaagaaaacgtacgtgaagctt

SEQ ID NO: 34308 - DNA, 919 bp, Arabidopsis thaliana columbia
tgcgtgttagtactaatcggagttttaacttgtactaaatttaacaaatatgacggagagagttgaaagcttatcacaatggcatttaccgttttgcccatgtcgttgtaatttcaacatttccaatttcttaacgcctttactgacatcgaccccaaaaagaaaaaaaaaaaagaagaagagtcaaacctgagaatctcatctctctctgaagtagaagaagaagaagacgatgaagaagcgaacgatgtccgcgtggggatcggcgattttaatcttcataatacttatgatcgtcactcccacaatccctcaatctcaggcttaccacaatttcgccgatcaacgctccttcctcggtataaaattcacactcttctctcatcatcatcattttcttcttaaatacccttttgaatttttagggttttgatcttacaaatccattttctcagggattccaaattttttaaacgtcatctccaacttccctttcctcatcatcggccttattggtcttatcctctgcttttacccagaagattactttagctttaggtgcgtaattacatacttcttctttgtgaaatccagattcaaattagttaaagtctctgtgtattgaaacagtttgcgaggtgagaaaataggatggacttgcttttacatcggtgtagctgctgttgcttttggatcttcttactatcatcttcacccaaacgatgctactctcctctgggatcgtcttcccgtacgctcttattctttctcttctcttctctgagattttgtttgctttgttttgtttttgatcactggtttcgattgctttttggtttagatgactattgctttcacttcaatcatggctatatttgtaatcgagaggattgatgagcataagggtacttactccatt

SEQ ID NO: 34309 - DNA, 853 bp, Arabidopsis thaliana columbia
taaacttaaaacaccaagtgtttatgccaaataaattggctagacgaagcaaaacaagaacacattattgatagtgtagatttggagttcactaattgatagtgcaacgtttgagttcaacattgcctaggctgagtgagaatatcttattgtttccatccacgaatttgagaaagtaactacatgttacctttacctcctggtaatcctcgtcaacctcatttatctcggtcatctcaacatgaacaagttccgcaaacctccatttgttttcattatctcattttgattgtcccaatcatgtcaaactcatcttttatcgcttgcacccccttcttcatgtagtctccaccaccggttgcataggcgtctttaaaaatgctctcgagttccctccagttgtctttgccccaagttcctggtgtctcaagacaccataattcatatataactcataattcatatttatttatgtatataatttgtatttgtatataattcataatttgtttagcttcaagtgtacataatttgtatataatttaatttcacagtttatagatatatttagtaaacctttatcattcatgatcaattgatcatatgattgtttcatttgttcaacgagaacactcatagggtgggaaatgagatgataattattgaaatgatcatataaacaattgtaggaagtcgtaatttatctgcaaataaaattagaatattattaactacactaatttactagtttgtgttgtgttatccttgtaacatcatatagatacaaaccactgaaccagtaagattgtttgtttgttgaaaaaaaaaaaatggttttatgagggatcctcta

SEQ ID NO: 34310 - DNA, 672 bp, Arabidopsis thaliana columbia
attaggcaaaaaatactctgcaagctggctatttgagtatagttgaaagttgcaacgatgttgtcgctttatggcaacgcgttacaatgacacaacatatataacaatttggaaaacacaatgatagaattattaaagagaggttatcttagctacatagatctacgtttagagaccaaacaactagagttttattttgatgtacagtcacacattgatgacggagtggtttctagtgaggagttggtgttgagcagaccaacgttaattgcccaataagttgtgtgagttgtctaatctttcaaatcaaacagcccgtaaagcccataaagtcgcaaatttcgcattccaaagtttttaagaatggagaaacgttcagattcagagagtgtagagattttgggtgattgggattcacctcctccggaagaaagaatcgtaatggtttctgttcccacttcaccagaatctgattacgcgagatcgaatcaaccgaaagagatcgaatctagggtttcagacaaggaaacagcgtcggcatccggagaagtggctgcgaggagggtgttgcgccgtggatggatccgcgtatgaatggggtggtggcaaatggaaagtagacggaagaaagaacaagaacaagaaagagaaagagcaagagcaagaagagat

SEQ ID NO: 34311 - DNA, 503 bp, Arabidopsis thaliana columbia
ctcgccgttcgatattttagcacggcgtcgttcaattaaacacaccaatttttttaatgcagcctatgcaggcaataatctagattaatcttgtacatactgtcaaaattagtctagatttcaccgttcataatcaaagggcaaacatacacaaacacaaacacaaacacaaactttaaactttcttctccaaaatactaaatggagtcaccaaattaatttatacgagtgacgagtcattcaatcccaaatccctataaactaatttttgtcttttaccaatttggaccaaaatgttttaaagttgaaagtttggtcaaaagtgggtcttcccaattacgatgcggcccattatggatagaaaactagctatcagagtatattgtttaatagtaatcttaaaaaaattaagtataccacttccaataaatcacacaagtattaatttcataaactcttttcgaaataaaattaaaattaacatagagtcgaaagattttaat

SEQ ID NO: 34312 - DNA, 880 bp, Arabidopsis thaliana columbia
gtggagatctcagaatcgttgacttcaactcaggtcgagactataagcaagtagaacgtatttgtttaaagtttcttgattgaaatgatcttaaccttatgaagcttttgtctaccatatctcgcttattctcagggcatgttcaaggaattgaattcgtggaaagataaagtagatcagcagttactgggaatttcaaacacgctgagcaatctgcagccgaatgggagcacgtcattcagtccagctcaggaaaattgggaacatatattgaagacttccaatttggaagattttacaacgaatggttttgaccaatgggatgaccttattgatggtctaccagaggctgtcaggccggagacctacgcgcttccaacaaatccttgcaaaagctctctccaagatcagtcattgatctctctccaagaccagtcattggtctctctccaagaccagtcattggtcaacgtagatatgcaaatgacagaaaggttagagcagttgtttgtttgttttggcccaagagtaagggtttgatgtttattattgtctaatattttgtttctctatttagcagcatgactagaggtgaatccagaagctccagtcaggaaaaagctgaaatgactccgggttcttcgattactgcaggtccaaaatcagatattgacgacccaacaatccagactcaggtgagttagtcaaacatattagaagcattggtctggtgtttcagttaaactggatggtcaatcttggataatcctctagcctctagattaattatgatcaatttactactgcgcatcttatcacagtctttgcttcattcactataccactcatgcatcgtctgatatgcatcagatgttattgg

SEQ ID NO: 34313 - DNA, 883 bp, Arabidopsis thaliana columbia
  unsure (1)..(883): unsure at all n locations
ctactggcatatcccagtgggctaattgaattaggaacctaagatgttggtgaatatgcaatgcagttctctggaactacttgacctagaatcacaaacacaagctcaagtaagtcaagtatttctgtgagaaattcctctggagaaagtggaaagcaaagcaaacaatcacacaagagccacatttcaataaaggcaagcttctctaatacgccgatgcaaagattcaaaccgaatgaaaggaagctacatttaatctgataagaaccaaaagagttcaccgacagaagaaattgaatacataaaccattctttaacagggccgcttcaagaagagattaatacgtcactattggaacctagaaaaagcaaacacgtaaaaagaaggaaatctattcgaatgaatctgagtttcacgaaatcagatgtaatccaaatcaggaaaagctcaatgattctgagctcaaaaaaagtaacgcaacaacgaaaagagaactcctcgcaatcaatctggatcgggagtgagctcaaaattcatagattcaaagctaacgaacgcggactatgaaatcagcataatacagatagggaaaatcaaaatttcgccagaatggaagaaagagacctacaaagagagaagaatcggctcgttggatctgatcgaagctgcaggaactttgtgtgtgtgtttgaagatagattgattttggagtcgcaaccgcaggttgttggagtttggtgaatttttacgaaatcattaccgctcggagtctgcaatgcaacttgcatttacctttacacagattatatttgtttcacaagaattaataattgtcatttttaatggagtcgcgttttgacaaaaaaatattgaacanaaaag

SEQ ID NO: 34314 - DNA, 631 bp, Arabidopsis thaliana columbia
ccaatcgccttcccttgggcattttaccgcttggaacatgaataggacccgaaccgccgggaaaagctcgagcgatctcgttgtgatgcgacggctcttggttcgccacggcacctccgttgttgaggagagcgaggatgtgcgttcccggattgtgattgacacggggagattggggattgagaggtggcgtgggataagatagcgttctctgtggttgcaagttagtagcggaggaagaggaagacacatcctgttgcgtttgattcaccggagatggttgggcggcgataccaggcggcgcgtatagttgctgattgtactggttgttaagaaacggacctgtagggggaggataagggttggatgagggtttgaagatagtaccgagatcgaacggcggaggattgtgagggttagtgttaccaggtgaagacgccattgatttacgatcgccgaatctagggtttgcgatatcgatcaatagacaagtgtaatttgaatgtgaaggttcgtgaatatatttcagaaaaagaagactcggcggatctgaagaagaaatcaaaagtcacgtagagaggggaacgcgaaaacgagtagagatagcgatgatgcttgaaggagtagagac

SEQ ID NO: 34315 - DNA, 1628 bp, Arabidopsis thaliana columbia
cttgccatatcttaatctgtacgatggttataaggaaagaaagagtaagactcacacacacagaaatactagctgttgcaaaataattcctggttgaaaagagatgatacccagtgcatgtcagaaatggaacttagcaaaccttaaaaaattcaaaatgtgctagaatagtaattggatgtcaaatgcacttactaacaaggctggctagttctaattacgaaaaatgtcaggattagacccagtttgcaacgtaatcagtataaacttgggttgtttggaatgattcatttcagagaggtttaaagaaaagggatgatatgaacaaacacaaaccgtgccatcaactgaagaagaaaccagacgcgtggtcatccattggcacattgacaaatctgtcacttctccatcatgcttaccaacaatctgaacaccatcgatcagcttatcaaggggacactggagaggagcctcagcagagaatacttcacctctgccaacttttgtagtatcaatacgcagtacatgtttaccaattgaaactaccaaaatttcctgaaaaaatgacatttaagcaatcagaagcttgttctaagaagaatcttatgcaacttctcgtagcaaaagaaatatgttcaactacctgtttgtggcagtgccaacaaacgcgtggatgtttggtgtcttcctctcctagtatctgaagagcaagtactatcttcccagttatttggggctgatcctctccctcagacccttcagaaattttccacacaaaaacttttccatctaggctaacactgtttaaaagaaacagaaaaatagaggtataaaccacaaagtcgaagaagctaaccagaaaaactctaataaacaaagaagaattcaatgagccactcttccatatatgtacaaatagcatagcctaattagacgacagttccaaaacattacctggccaacatatcaacatcctcggcaaagaaagccatatccgtcactctctggatatataaccgtagttagaactagatgagtacctactatacttgaataagtaagtaattcacaaattacagagaaaaagtaaatgaacctgtgaatggccacggaacagagacctcaatgctgtgttgatattgagaaccctaatgtttcctcctttcaatccatagcaaatgtaaaccttattcacggcgatttgcctacccactacgagctgaggatccgacccgtatttggtaatcggagtcacctccagctgcggctgaatctcaccttgtaatctcacatcaacatcgtacacagcgtgttcaccaatcaatcgccttcccttgggcaatttacagctcggtacacgaataggacctgaaccgccgggaaaagagcgagcgatctcgttgtgattgactactgggagctgatgcgacggctcttggttagccacgggggctccgttgttggtattgttaaggagagcgaggatgtgcgtaccgggattgtgattggaacggggggattgtagattgagaggtggcgtgggataagacagcgttctctgaggatgcaagttagtcgcggcggaagaggaagacacatcctgttgctgctgagtcaccggagatggt

SEQ ID NO: 34316 - DNA, 698 bp, Arabidopsis thaliana columbia
tcttacaaaaacaattgagaatttctactcatttttttccatcatttatgagaaccttatgtaaacaggtgttgacatctgaatcaaattgaaccgagatggttcggtttggttcggttttgggtttggttaaattgagaaacctgaattatgcagcgaccaagatcttattctctgttctgtcttttcaacactcgagtctgtctgtctgtctcttctacgcagccgcgactccttctgtctccaccgctctataatctcccctgcgatcaataaggacattttctccggtaaagtctctatctttcttcgtctctatcatgtcgctttgtgtttcgtgtcacctacatttgataaaccctagagagaaacaaattgagtgcctttcgaaatcgcagaagcacattgttaaaattcgattgatgggtcattgttttattacacgtaatctatttctgttgatgaaattaggtctattaaagatgtgattttgatatttggggtctcacagcttttttgaaaaagcttacacattttgtttgaatttgtcattgttgttgtagataaaagagagtgatgctgttccaaaaccagttgttgttgatcctccattatacgacgaagcttctccgtcagcttctcagcgccgtccggtggtgatcgccgccgatgcagctctccggcagaaaatcatctca

SEQ ID NO: 34317 - DNA, 687 bp, Arabidopsis thaliana columbia
tgagcaatcattgttttcttaggcaccaatcctattaaccattgtagaattatttgggactaaacccaagattgaagtggaaccttctaaaaatgacaattcagaatacagaaatgcatttcgtattggattatttgaagtaaccgtttcattgagaaataagaaaaggtgtcagaattcttttacaatcaatccgagcagagtattgaagcacacgactgcttaagtggagtttttggacatgttagccaccacctcctcccgtttatcggcagtctctaactcgatgccttgaaatgtaagtctagatgaacgatagtgactcccaaacgcagtcccgaaaccccacccgaggcccaaacccaccccgcaaccgccacctttgtcaaataccagacgcataagttacgtaattagaatttaggaaaaacctgctcggtgtgtatctatgcgagtgtgggatatttgaagtagaagtttgaaatgcttaccagcaccaacacctaagatgttcataggcattcctgcatgaaagcaacggaaatctccaattcagtaggtttgcaaaatagtatgaatccatcaaaatgtaagcgcaactgatactagctatgcgtttaagcaaccattagctaggaaagaagaagcatttgagtaaagatgatatgtaggagttgataatctcta

SEQ ID NO: 34318 - DNA, 718 bp, Arabidopsis thaliana columbia
gagaatagtgagtgatgaaattactctctttttttccaagtatgaacatcaatgaatccaatgaaataagtgcaggactcactcttgctatgacaacagaaccagtctctggaataggaccatgtgccttgtgacctgtaacttccacaatagctctctgcttaccatttttatcatccaataagttatatatccataacaatcacaaaaacaagtataacaatccaacgatttcgatttcgattacgaatagatgtgccagaagaattaatcacttggaacaaagacgaaacctgatcaattgattcgggaagaggagaaacaatccggcaagttcctgtgagggaagcgtagatggtggcgtcgttgacgtaagctccttttccagctttaaactctgtcgctttcccgattacatctcccggcgttactagccccgtcgtcattgtttcaaaattttccgatttgagagtatcaaacaaaaccctaggaaggaacctctgggttttagattgagaaaattaaaacaattcggaatccatccctttagtgttatataaatacaactttgaccctaaatgttctggttgtaattttaaactattctaatttaagcccatagtgttttcttattacccaattcgacccggttagacttaaataccttagatcgacccggatacatctcatacccgagtccgacgcggttattcccagt

SEQ ID NO: 34319 - DNA, 580 bp, Arabidopsis thaliana columbia
tagtatatattaacaattaattctcagtctctttttgaaatagactagatcctatagttacgtctaatatttgtctcaatcccctaaataaaggtttatagtaatacactaatttggggaaacttttataatactggacttttgattttattattttatcaagatttgtatataaatgtgttttccatacgtcagaaaataagaaagcacattaaccagttaactaaaatctgacgattaatactttccacatatcctccacatacatttcagtatttcacactaaaaggcatttcgacttttcatcggaggttccccctctttcccttgatcctttacaaataatgcaatgcatcataagcattacgagacaacattgttcgatcctttggaaaacaacaatcaaggacaaattaagaaacataatgtatagtaatttaatattatttaaagttttttttttctttctttttgtcttctttagcgttggacgtcaataggggcatgactagtcatcatattccgtcgccgatcagtgaagctactacaggaaaccaaacgcggaaccagacgaccaaga

SEQ ID NO: 34320 - DNA, 547 bp, Arabidopsis thaliana columbia
gaattaatgaattaatagtctataagactcttggatgcatacataccaaactatattattcacgatccagtgaacttactattaataattttaaaacaattggatcaaacacatacacacacacaactgtcaacatataaaagagagtcggacaaatttattttgataaaatgtgaatgttatatatcaaaatatgaaggtatatttacaagcttacttaaaagaaacaaagtcgatgcttaaaacagagtcctataacttaaaaaaaaacagagcatggtaatagaatataacgtttgagttagaagtggtgtagatgagcctaaagttgagctaaatcaccaaaatttgaatctgagggagtcgatgcttttgggtaagtgatgctcttgtaaatttatattcaaaaaaattaagatgcacaacagatcaattggtggtaagagatgaaaatttggagatcaaaactcacacaaactcagatttttttcgccacagatacaaaaatagaatcaaataaattgaaaaatttaactaatgaaaacag

SEQ ID NO: 34321 - DNA, 594 bp, Arabidopsis thaliana columbia
acatgtcaatgggaaaaaagtgtatgattggttggtgacggacaaggacaatgaaataaagaaaaggtgaaaagagatgttcacattgttgaaaaacatgcctttgaagcaaaagcatatgatattcaattattaaaatagagatagctaattgacttgtaaatttatagagctttattttctgagattttatttggaaatcttatattccagattaggctaccaatagacaaaaaaaaaattcacattatattcaatttaatatagagatagctaaatcacatgtagatcattgctatattcattcattttaattactcaagatttagaatatatgtggcgtaaaagtattagactaactttgaataaagtataaaaataaaaggtccaattaattaattatattgtattatgatttatgaatatgaaaccaaggctttttcttgcatgaaatggtcgtatacgtattacctttgtttggttgtgtatagtcatatagtgtatagtgtgtacgcaaacattttattatttaaccaattaaagcaatggagtcaagactacagaaaaaaaaaaaagtaaaatatatatatatat

SEQ ID NO: 34322 - DNA, 917 bp, Arabidopsis thaliana columbia
gataacataaacagataaatacttaaattccatgatttggaaggatataatacggtcatctagaagaaactcacaaaagtagaagtgtcgttcccagatgcttccttgatcgaaccctttctccatgacatctgtgcacttcaattttcgaggccatgaaagatgaccgcgtagtttatagaatcggatttatcattaacgaggacttgaatcagctgttagcaacccgaaattggccggtattatatgtgcttggcatgttctcaggagacgccctacaacaagtaaggatattttttgacatcaaaatgcttatgaaaaatggtgtttctttttaaggtaccaacatggttatgattcttactggatagttaggccctttctctggaggagtacactaggaattgtacctttaagcttgttgttcttgatggacctgcagattaacaattaacatcaacaatgatgatgctagttatgatgatgttgcaatcgtgttacaggtcaaaactttagtttctcttataactatagtgaacacttttggtcaggctatcagattcgcatgtctaggcttgctgttaaatgcagagaggaggggaaagacaagtttacagtgtgcggagactagggagctttgcaagtgactcaggaattgctccagtgaactgattgtcctctaaatgtctgcctcatcccacaaaacaaaacggtaagtccaataatctaaatctcttgcacaacacttagaagtttggttgcaaaaaggcatacagagtttccaatctcgtcattggactcaaatctgggatcggtcctgtgagcttgttctccccaaccatctgcaaatccggaagttgcagctgagtcttatttaacaaaaagaaaaaatctcagacaaaattttaggatgtgaa

SEQ ID NO: 34323 - DNA, 699 bp, Arabidopsis thaliana columbia
cgcatttggcgaatgtattcattgagcttgatgataatttcttgaaagcttctgaaagtgctcatgatgtttctaagatgcttgaagctactaggctccattaccattctaattttgcagataaccgaggtaattttgattcgataaatgtctgagagaaacaaaatgattggtttagctaagattgatgtgttgttgttgtaacaggacatattgatcactctgctagagtgatgcgtgtaattacatggaatagatcatttagaggaataccaaatgctgatgatgggaaagatgatgttgatttggaagagaatgaaactcatgctactgttcttgacaaattgctagcatgggaaaagaagctctatgacgaagtcaaggtaactatatcaaaacttgtctcttttttatgcttgtgcttgtttagtgaagctgaaagattttaactttttgaggaaagattcttgcaaccatgtttagtctttttgggtaatcttctctcctgagaaaagcccctttgattgttttgggtagttttatgagcaaaaatgatatatttttctcttgagagtctaattttgggatacacttcttgttggatataggctggcgaactcatgaaaatcgagtaccagaaaaaggttgctcatttaaatcgggtgaagaacgaggtggcactaggattcattagagaga

SEQ ID NO: 34324 - DNA, 398 bp, Arabidopsis thaliana columbia
ttttatgtatattctattgtttttgatcatcttatgtgtaattatagtttatggtgtaaccgtgtaagtttggtttgattctctctctgtttttaagttttgaagtatgaacaaacttaataatgtcaaagtcttcgcttcttgtttttggcgggctgcttacttttatcactttttggcgccttattgggccattcattaaggcccaatagtatcagcccataaaattcaaaaaggaacatatttttacatttaaacagtgtgtctcacacttccatttacacgtcagctctcttcgccggcgcttaatacaaccgtcaagcatcgcgccggctagaggaaaatggcgtatcacaaccgtacgatcctttctacgtctatcaacttcattctcatcc

SEQ ID NO: 34325 - DNA, 472 bp, Arabidopsis thaliana columbia
tatttgatgaagcttcaaagaagttctgaaatgtgatggtgctaatcaagatgtacttccactctatttcgaccagcactcatgtgataagcacataaccagagtaaaccggtgtcatagaaaagagatgtggtctcgtgatggctcctaaactaatgggattgtactctccactctccacgatcttagtagtagatttagtggttagtttctttcttgtttttgtgtatttaaagacttcaatgtcaagttgagggagacttgaaaattgacaaaacagagtttaactcttgggttactttgtgtgttcttctgttaagacaaaacacatctctttggctttgaggagggaccacctatcatcagaaaccttcgtcttgagaaaattttgacctctcctctccactcccgatcttctggtggatatgtttggcgaacatgcttcactttctcatcgcatagtatgaaagaa

SEQ ID NO: 34326 - DNA, 594 bp, Arabidopsis thaliana columbia
tgccatgacaatcccagatgttacttttctcttaatccctaggaagaaaatcttttggtaacttcaaatcattataagcgcaaatagctagctactatgtctgatgcatttagttactttgtgctgaggattggggtctttaatgtgaaatcgaaagtttagggtttctcgtggatattagaaaacgttaaggttggaatataaaggaaaagattaactgaaagagtctgcatagcacactccagcttaattccgtatcgttttaggatttctgacttcactctttgacggctatatattaatgtgattttccattatgtcaaatgttaattattattttttagataagttttcgtgaaagttgaaacggtgtgacttgtgagtgacgaatgtataggaagaaactgtggaggtgggttccgtttaaggctttggtggtgtggagattagaagtcatggccgccatttttgagtcacgcacgtgtccacctaccttaccttcttataacttattcattcatgtgttcgataaaatatatttgatattaatttaaacatacaacatagaagtgcacaattacaagagtttttttt

SEQ ID NO: 34327 - DNA, 532 bp, Arabidopsis thaliana columbia
gcctgcaggctcagaccatcccttttttgttcggaccacaattgtcacattaatcccacgaaaaaacatgtactggaacagtacaattttttcatcatttaatcaccttttttttttggtgaatttttaaaataatcaagatattttcattgaagtctcagatagttatttgttttttcattctcaattccataaatcacaaatttcacattcaaagtctcagaaatttacattttatccctcatcatgacctagatatggcacaaaacttacaaaaaaaaaaaaaacgaattaacgatgcaaaaggcaaaagctaagattttttaaatacatcattgatcagaacaactcctaataattcaatcccaattccaattttttccaatattactcatcatcaagtagagttatgatccaacccgaatacccgacgcaaccgggtcagatgctgcaaacagttcttcagaactgttcacaataagacgatcctctgtttttctcttcccttcctctggttttgtcaatgtgtctc

SEQ ID NO: 34328 - DNA, 621 bp, Arabidopsis thaliana columbia
agaggtcagcgagttattgtgtctttataactcaagagacaatataactaatcggaaatgataattagagagttgttgaacaaagaaacatggataatgcaggtaaatgaaaagggtcagcttcgacttagtgtacgggctttacttcccgaatcagagacagacaaagacagtcagaaacaacagccggcaggtgattctaccaaagacaagagttcgcaaaggaaatatgtaaatacttcgtcaaaggaccgtgcagctgcaggagcatcaaaggtttcatctggggatgaacttgtcctgaagaagaaagatgtaaggagagcaactggtggtagtagtgacaagacaatgaatagcaatagcagtaccaacgaagaaagtttagtcaacggtgaagctacaatcagctagtggaatgcaaacaagatcactgttcatatctgtgtctcgtgagactcattacgaaaggaggagagtttcttcaacggaaccacaggtgcgacttgagaaatcttgaaaacttgagacaagacaagttgcaaatgtcttttcttgattttttttctaatgttttgtaattatgtgtcttggcagtatcttgaagctgtggatatatgt

SEQ ID NO: 34329 - DNA, 679 bp, Arabidopsis thaliana columbia
tgagtatccgagatagttaggattggttctagtgggttctttcggttatgaagtttataatttactttttggttccagttaggtacttttggttcgattatcttgcccactaaatcaaacacatagaagaagagataagctcaaaggtcaggtgttttgagaacttccattggagtagggtttaggaaaaaactgtactaaattactgggattgtatccatggaatgattttaggttcattgttttacctttgatgtaattaaatttaagtcacacaatttcttactactagatggggtagagagaaactttgttacctcttagctgtagattcattaacattattgcatatattttggtcaaaattcaacaatatacattaaagtgcctaaaaacgatgttgacctttttatgtgtctaaacaaaaattcatataagaaaatacacactaagacgaattatttgtacaccatttaaagtgtgacattaatcacattacaagcaagaaccaacacacacacgtgtaaatgaatagaataaaatgacgaaattggaaattaaatcttgagttgaaatgggtaagaaggccaatccttgagatcttcttcttgcctcctcaccttaaaatcatcatcatctacaacactctcatccaaataatcactatacttcaacaaaa

SEQ ID NO: 34330 - DNA, 448 bp, Arabidopsis thaliana columbia
gaatttatgcatgaaactacaaaattggacggctggtaataaatctattcaatggccacgattaaacggagaatcccatttttttaaaacaggataaaaagaaccgtgttttcttttgagaaatacgaaattcgaaaggctaaaaacaattcaattcaatggccaggattagaggcgagtacacgattttttaaaaccgggtaaaatgatccgcatgtaattttaagtgaagccgcgaaatcgaacggagaaaaatagtttaattgaatggccaagattataacgtatgatccattatttttaaaaaggggtcaaaaggatccgcgtgtttttaagtgaagccgcgaaatcgaacggatgaaaacaattcaattgaatggccaagattataaagtatgacccagtattttaaaacccgggtcataaggatccgcgtattatttaagtg

SEQ ID NO: 34331 - DNA, 852 bp, Arabidopsis thaliana columbia
tcgaaatgaaatattagatgtgttagaattatggaaaaatgtaaaataattcaaaaagaagatcacaaagaaatattatatgtgctataattatggagaaatgtaagataattccaaaagaagatccaaacgaaatattatatctgctataattatggagaaaatgtaatataattctcaaagcagatccacacgaattactgtttcatcgttatcaacgaagatacgccaaatatttaatgaaattaatacgattattttcctgaaatatagtcagatgaatttttgcatgtaactacaaaatcggacggcttgaaataaatctattcaacggccaggattaaaaggagaatcccatatttttaaaaaaggaaaaaaaaagaagcgcgtgtttctttaagcgaacgtgcgaaattgaacggataaaaacaattcaattgaatggccaagattataacgtatgacccaaaagtttaaaacacgggtaaaaaggatccgcgtattttttaagtgaagctgagaaatcgaacggacataaacaattcaatcgaatgaccaagattataacgtatgacccaaaagttataaatccgggtaaaaaggatccgcgtgtttttaaacgggttattttcatgacattaacaatttaaacctataataaaatggtttttttcagcgaaatctcaaatccaactcacttaacgtacgtctcaaataatagagtagattgaaattaaaatcataatttacttgaatcaatacaaatcgagtaactatatttcataaaccgacaaaacaaaattagacatttaattccaacatttaattccgacatttaattccgacgagata

SEQ ID NO: 34332 - DNA, 343 bp, Arabidopsis thaliana columbia
gtgtgacacttatgttaataagaatcataacccttaaactctgcttcatctcccagccgtttcttctccctatacgtgcattgcatttcttgttgtttcatacacaaatcatgagactaatgctgcctcatgaacctttttgttctcatccatgcacaatagtatatatacgttttagcattaacattcaacgcagaaaataacaaacacagattttctataataaacgtttagctttttcatcagtttcaataccattaagtgtaatgcatttaagtaagaaccaatagaacccttaacatataaaattgaaaaacctaaaaccggcaatagatacgataca

SEQ ID NO: 34333 - DNA, 266 bp, Arabidopsis thaliana columbia
ttgctgcgtcagtcaatttattaatcaagaggtccttactccaacattttttaactcttgcaaagcaaatctttaagaccttgataataatagggtttaaaccacatactaatatatcgagatattaggaatataattcaccgctgtagcggatcgctctataccgtgatatacgccgggaattctggcgtgccagctaaggagattgtttatagagcgatatcttggactcagaggactagatccttctctctgtagtgtgcatc

SEQ ID NO: 34334 - DNA, 479 bp, Arabidopsis thaliana columbia
taccttgactctacaacagccaatattggttcggttcttcgggatttacaccaccgtctcccggagcctggtcggagaattttccgatcaagatagagagaagatgatgaggaagagagagagacatctctcgaggataacgcaagcgttggatgtaagaacgcgctaactttcagtcccacactcatacctcacagctttcactttctcagctcctgaaaggattttccgggaaaatggtttccactgaacctttttgtttgactgccacaacttccggtttggttcaattcggatagaataagattctatttcggtttaaattcggtataagagtaaaattcggttcaaattcagattgatgaatgttggttcgattctgtttcactatttcgtaaacagaaagtacaattgagatttgaggaaaaaagagaggaaatttacacttttcgatcagaaaataattaaagaagtaagat

SEQ ID NO: 34335 - DNA, 449 bp, Arabidopsis thaliana columbia
gtatcgttgacaaatccagatatgatctaatactgtaattttttttatgaatgatgtaatctattagatgcacgaagtttctgcaaatcccaaatggatatatacacataggtatgtcaattaatatagagaataatgacgcgacataggatgcttctgagttctgacatattatttcgagatcaatcaaactcaaaagacatacagcttgtctcacacatgtgtgagattttgcttattattgtgcatgcatcatcaatcatttataaattggtcggatacattcaacaagttacctcatcgacatctaaagctaaaacccacaaacattatttccactccaagaaagagagactataaatcttttgtattactttagtagcaaaagaaaaaagaaaaaaaaaatcctttgtattatagtccatgtttaaagttttctacactttggc

SEQ ID NO: 34336 - DNA, 479 bp, Arabidopsis thaliana columbia
ctttgcattttctctataagacaaacaaacaaaaaaataacgtttccttcaaacaatttataaaaaaatagaccgtttcaatcgaacattttgtcacctcccacatttgacctagtatcacaaaacttaaggtatgtaattctgtatgatataatttgcatttgagatatctcataaaaatgatatattatttatcgcgtattttataatgatagataaaaaaataacaccagcgaatatgtcatatttcgccatcacatagctttttaagttagtgctgagaatatatatagttacttgtagtagaaactagaaacacagttcgaatggccatttcttattcaatttatgtttgattgcagttttctagattacgattttcttttttcttggtcaacatcatccgttactctcattagtaatttatttcgtttcttgcactgatttcccatttcattttcccaacttctaaaatagag

SEQ ID NO: 34337 - DNA, 1143 bp, Arabidopsis thaliana columbia
agtttagtaatctaaagaaattctcctatatatgttccaagtgccttatatatgaataaaggaaattctcctatatatgttccaagtgccttatatatcctttaatttactctattctgtctttgtttacaaatatatatggaaataaaagatataataacttagttagcaacattcaagagagcatacagtagattagccgaagtatgtagattagttggtggaaatggtgaaataaatgaagatcttttgaacgtctctgtcatacacaatcaagacgatgtgttatgatcgcagttgattggaaaaggacttgtaacaaccaaacctatatgtatatccctggacatttcatttgtacacttaccaaaacttgaccaacccactacttgaatccgaatatatccagttggtaaaccgagtccgagaaccggaccagaatcaaaaaccaaaatcttaaaccgaatatatcaaattttaaaaaaacaaaattattttcaaagtgaaacaacgactttaatattagacttgaaggcacgacattaactcgaggttgattttaagaaattaattcgaaaaatattttcttcaaattggaatgcttatttgactttgcattttccctttaagacaaaccaacaaagaaataacgtttccttcaaacaatttataaaaacatagaccgtttcaatcgaacattttgtcacctcccacatttgacctaatatcacaaaacttaaggtatgtaattctgtatgatataatttgcaattgagatatttcataaaaatgatatgttaattatcgcgtattttataatggtaaaaataataataataacaccagtgaatgtgtcatatttcgcgatcatatagcttttaacattagtgctgagtatatagttacttgtagcttttgatcgattggccatctattcttcagtttatgtttgattgcagttttcttgattacgatattctttcctcttggtcaacatcacccgttactctcaatagtaaattctttcgtttcttgcactgatttcccatttcatttcccaacttctaaaatagagatcataccaaaacattacaaaatttccaaatcaaaatcaaaagcttaatttattgagaaggagatgat

SEQ ID NO: 34338 - DNA, 437 bp, Arabidopsis thaliana columbia
ataatggaaattcccaggctggaacttaaatggattatataatttaattaatgataaaacatattccttaatctcgactctgctgcgttgctttatcaactgaggaattttgaatttcatatctccaaagtaatctcttttccaaggaagatcagtacaaatcttaaaacccccgatcagagtaatccggggaactatctccgccgttgaattcagtctgagggtttctccgatttcagttcgatctgtgtccgggattctctctgtgttgctttctcattgcgtttacgattcttcttcccctttcaaggtacgctcttgttggttgcgttctaatcactctcaaattccgggttttggcttcattactgcaaattttccccttttattcacttgcttcgattcaacaattgctgaaacgtaatcgatagttaaat

SEQ ID NO: 34339 - DNA, 504 bp, Arabidopsis thaliana columbia
cgtgtttattgccaattccagtatcaaagctctctctgcaaatgacgtatctaaaaatttgctttatgactttgactaaactgatttgagtggtacaacacacactcacgcaaaacccaatctcacactcaaagactctcacatacattaactacattgttgaagattctacataacgctacagctttttcatttgtagaatcctgactcaagcaaagacaataaaagaagaagatggtgttagaaaatgggtttcctccatatccagatttcctcaagatcttcaactcccatgaagattctcaacttttggtaagtaactagtatctttcgtgtttatcttctccaaattatctgtcatgttagattgtagaatgacttaagattattttgaattcttgatgagattattcttgaatggtttgttgtgtgtctagcgttcgtgtaaccttagtagatgaatttctctcttggctctgtttctgtttaacacataacttttga

SEQ ID NO: 34340 - DNA, 583 bp, Arabidopsis thaliana columbia
gctattgacatagaagtaaagagctgcgagactaaaaccccaactgcaattcctataggtagagccttcctgcatgattaccataagataactataagaaacaaagtgacaaatatgtgagattgatgagaaaggaggatcattttacccgacggcttcgtctctttggagctcagcttttctagcctttctcacatctttgtcgttgacattcttgctcacatcaggcatgtaagctctaaaccgccgtttaggagcagcacacactgaaaacaaaaccttaaacccatttgaaaccaaacacagtcccaactagtgatagctacaacttgttgattctttaaacatgaatcacgatacctggacagaaatagttatcaggtaacttgtcaaatggagttctatcattgtaaatatacctgcaaaatcaaagagaagaagataaataaacaaactttgtatgttagaggtaccaagaagagagaaagagagatcaagattgaaagagaccgcaatcacggcaaatataggcttgcttagaggagacacgcatggagaactaggagcagaggatttggaaaga

SEQ ID NO: 34341 - DNA, 530 bp, Arabidopsis thaliana columbia
tatttaagttccttcgacgtctaaagttggaacatccaatgctaatttagtaaaaaggctacacgaaaactccttaagcttcttcctttttcttatggatcttcaaaatctttttttcttttttttttcctcactaatttttgtttctttcttttgttgccgttatgttcgtttcgtctatgttactctctttcttttatgtagctttcggttttgttgacctgtctcctaatttgttaattaattgaccatttattgttattatgattccagcttgaatgaaacgttatggttttctcattcaccaaagaaaaaatatgggaaatagattaaatttcttgagacggagttttgctgctcacattcttcaattaaattatacaaaaacttggtttttcatggaagaccaaagaattattttgctaccgatatgcaacaccaaatatcagtggttatatagtcaatattttgcatagaacttcaacaaatgtaacaagtaaaatttcgcaaaattcgtatacatgattgaa

SEQ ID NO: 34342 - DNA, 653 bp, Arabidopsis thaliana columbia
gaaaagctgtagggagaagaaccacagccacagctgcacgcaggcttaaaggaaaaagcactctccttcttcttcttcttcgtctactcacacttatgtccttgtccaattcccaaatccttcgttgttgaattttgtcttctttcttcctgagttttcccttcttctcttcaagaaaccttgatcaggtgattttaagtcttctcctttacagatctcgattcgctgttgttccatgtgaattgggttttaaaccttttgattattgatgaatctagggcttatgggtttcgatgaaacaatgagattttgatgaatctaggtagtggagaaacttactgctcccaaagagattttggccatagagtatgaaattcccccaaaggttgttttgatggaagcgaaggttcctagacctaggggaagaccgaggaaacgtcagagattagaggatgataatcgaaaattgaacaatcgagggaaaaagcaagttctggaggttgagcctgcagtgccgatatctttacttggttgttatatgctgaaagattttgatgacgatgaagtttttctagggaagatagtgtcttatgatactgggttatatagagtgatatatgaggatggtgattgtgaggaattggagagtggtg

SEQ ID NO: 34343 - DNA, 622 bp, Arabidopsis thaliana columbia
gagcttcatatccattattacaagagattgagagaaattttgaatgaatttgttaaaaaaacaaaagggtttcttgtgcatcattacaaaatattaggatttttttttaataatgaatttgttaaaatttgaggtttcatttgcattattggcaaaagattgtttttttttttatatatagtgaatttgttaaaatcagagcttgattttcattactacaagaaattgggggaaatttggaatgaatttgttttaaaaagtgttacttgtgcattattataaaatagtagttgtttttatttgaaatttaaggtttcacttgcattattacaaaagattgtgtgtttttttggtagtgaattaataaatttgttaaaagcagggttttattcatctttacaaaatatagttttttttttaatactttgttaatatcagggttttatttgcattattacaaaaacaattgtgaggtttgttaatgtgtttgtcaaaatcatggtttaatacataaaaacaaaatactggggcttgctttctgataacgtaattaataagaggttttttgtgtaattattgcagaatacggatacacgatgaatatacagagaagagtgacgtg

SEQ ID NO: 34344 - DNA, 530 bp, Arabidopsis thaliana columbia
caggacccccagcggttttctcagagccttggcttccctctgaaagttattactagacgaaatcctcttgctctctgttgtttcagagcctctgtcaacagtcctaggcttaaaaccaggagacttcaggtggtaccggacatattcttcttgctttagaggtatattctgttctgtgatggagtaatttgaaacacggagagcactgggaacagtgtgtgttggatcatgaaacaccggttctgtaccttggattgatctttgtgtagtttccaaataggttaagaaagggtctgggatagaacagccaagagttccgtagggtggtttctcaaatgtcgtacctaagtatggagacgctgcaaatctagtactctttgaaccggtttcatggatttgcaggagattgtttcctggagctacatagggtttcctgaggatggcagaagaagatttagggactaatttgagacaccctttggcaaagtctgatgatgatggccagcagaaactaagcctggaccttgata

SEQ ID NO: 34345 - DNA, 521 bp, Arabidopsis thaliana columbia
catggttcagttgtggcactaattcgggtcaaagcacctcagaattttagacaaagataaggggcaaacactttgggcctttgattgcattgatttgtgttccaaacacgtcagaagttaagtctttttctaaaccagttatcgaatgggttagtcttggttgccatttttcaaacatactggcttccaattggtcatgccaaatatgtagcttactagacctatatactttccaaaattacttcataagctgtttgtctaattcacgcaatgaatacatatatgcataaaatactccatatgagtaaaaagatgtataatatagcggaatatataacagaagtcgacaatgcaatatacatcaaccctaaaccataaaatcatgaaggtcattttggcttgtaggcgtcgtcgagtccctcttcagtgatcgttgtggttcttctggacagaatattcaaatggtcatataactcataactcccaaacggccaaaccattgttctaattgtgatgacgag

SEQ ID NO: 34346 - DNA, 563 bp, Arabidopsis thaliana columbia
actctatacccggtctcatttaataacaacaacaaaaaagacgtcaagatttgacttttgagttcctcaattttttcaactccagtatttaaacagctaattattacataatttatcgtaagaaaaaaaaaaaaaaaaaccttatccccctgatattgtagatctcgattgtaatcactacacctgatgccacattaaatacacacagagacgtaaataagagtcaaaaaagtcgatgaagccttctgcatatataacaacaaagttgaatatataaagagtaaaattcatcatactacaatcttgaaaaattataatttattagatggttaagtaaatttgttttatagtattgttatattctttttttccaaaaaatatagggaaaacaaaaaccagtaaaaaaaaaagtcaacttaatttgctcaccaccttcttgatcatctaaacacctctttaataattcaaaactaaaaaaaaaaggtataaatgaaagagacaaaagagggaagtatatatcatcaagcttgaagaagagagagaagaagaagaaggaaaaaaga

SEQ ID NO: 34347 - DNA, 609 bp, Arabidopsis thaliana columbia
gctagcttcagtgagagacaaagtgggtgttcttgggtgtgaggagcaaaagtaattgagaaaaaatgaataatcgtggcttgcttagagtgttgcagcttgtttgcaacaatgcgaagaggaaaatataaaataagaagaaattcagtatgaaaagtgaaaaagaatgaaatcgtaaaaagaaaagagatagaaatatctaattttgtgagacatataaaatatgcttttttcgataaaaggataattgtgatttattcataattgatccgagaggtaattaagtacatatagttaatgaaatggtcattcccgtcttaaaacttttaaccggtcatcaaaattcattgaccaccatacggtaatcttttttttatttttggacaaatcatacggtaatctatataacacttattcttaagattctccataaggtactctttttgcaaaacttacatggatatccaaatggacacttaaattcaaacaggtgaaaaaacatccttagaacatttaaatcagtaacggagtgatcaatactatatattcagatttgagaaattgaatgattgcaatatctgagatatcagtacaaagttgagtggccct

SEQ ID NO: 34348 - DNA, 211 bp, Arabidopsis thaliana columbia
ggtgatgaaaccccatggtttgagtgtgttggatgttggttcccattcttgatattttgagaattaagattgcaatgatgtctaacatgtaatggttatttattactattgtttagaatactataaatttttgaatggttgataatttatgtggtgatgaaaccccatggtttggtactgtttgactagtatcagatgagattatatatat

SEQ ID NO: 34349 - DNA, 117 bp, Arabidopsis thaliana columbia
cgaagaacaactggcggaaatggctaagcaacaggctcagcagcagcagcaagagattcaaatgcgtgatgctatggcaaccattgcaggcaaagaggcgaaactcagcgtgacatg

SEQ ID NO: 34350 - DNA, 454 bp, Arabidopsis thaliana columbia
tgtgccccagacactggcccccagcgtgagaagggcctcctggtagaagccgcggcacgctgggagccctcaagccggctgccatgagccagctggagaacctgggagcatccatccaccaactgggccccaaacacaccattcagtaaaggaaggtccttcttattttaccacagcctctattaaccacttggtctgtggaggtgacagcagtcaggcatgaaccagacaagaaggtcaccaagccagctgatttgggaatgctggggcaggacacagaggacagcaagcgccaagggactccacgccttgtccggccactggggatgaacagccgtctaggactccttctgtcccacataagtgcatcaatgaaagagggcaccaccctctctgcagctacacccccgtcaccgtggcttagtggcaatggggtcacgggccatggcaccta

SEQ ID NO: 34351 - DNA, 593 bp, Arabidopsis thaliana columbia
gcttcacaaggtgacggtgagaattgaaggccttcaaatatcacttggcagcatcataaagccatcgggattccaaagtccaaattacccacaagaatcggatcaactaggattttcagtccagctgtttcccatagccagctattgccctaactcccacaaaaatggaagacatagtaatagtcaaataagatgcaacatttggaaatacaaatgctcaagtagtaaagattcacctccaagtaagtcagcttgaatgcatctgtcccagagccactaacgttagtagctctgtcctctgacaaaacagaagataccacagtgagagaccgggaaacattcggcgagaggcggatggagagggatctggaagggaggtgaggagtggacgagaatagtggaaatgctgatgcacttagtactcttgatttggtgttgatacttagaggaagagaattggcatgaagcggcatcatggctgctttgcacctgacaccactagagccattgattttgttttgcacctaaagaaatgtcgcaacacaatgagatttttcagccttattaatatgctatgatcagccttaggttag

SEQ ID NO: 34352 - DNA, 577 bp, Arabidopsis thaliana columbia
ggcattaacttggaaccacgtgcagacgggaaccggataatacagaagcatcgtaaaataaaaagctgagaaacattcattcttcaacaggttcatgtacaagtgagataatcaaagccctcttagttaaccaaggcttccatgcgtcggaccacttccccattggaccggagtgcaaataaaaattaggacaaataaatataggctggctggcgaacaacggatcaagttcaaggttcgagctatagatttttgtcgataggcttgggttcgaatcgaaaacattttatctaattttatggcccaatagagagtgtttccaaggcctactcaaaatctccattattattattattattattttcttacagctaattttatttttaattaacgaagaagaagaaatgatgaagaaagtgtcacattcattcctccgattcttcttcttcacctccccttcttcgaatttctctccttcccttttcatccttttgaaatttctcgtctttcttcttcgaaattggaaactcacagcagcacctgaaaaataacatcataagcttcaagatcgaatttg

SEQ ID NO: 34353 - DNA, 475 bp, Arabidopsis thaliana columbia
gggagtttccgctaaggcagccatttctttctgtcccatgagctttcctccagtggtaccaaaaccaagaggctcatagagggcagcagcagtaatgaaagactggtagtcccagaaaccaacagcatgagcaatgggagtgttccttttggaaaagagttgctcaaactgagaaacctgtaagtaatctgatatcgtctggttacagcagtatttagaccaccagctgcattcccattcttgcgtgcacaccttatttcccctcactttcttcactttaatcgttttgtcctctccattggcaaccaaggccagtaatgatacagccagcagaacctctatcacgattgaagcactcctgattgctcacatagcttacaactatggaacaaataccagctacaagctgctaacatcagcgcaaaaaccaatttaggaacatccattaatcccaagtaagcatctgaacattact

SEQ ID NO: 34354 - DNA, 522 bp, Arabidopsis thaliana columbia
ccttttttttttgctgccaatgttattaccaaaagggctacaagtgagtattctccaagcttggatgaggttattcagggtaatagggtatcaagttagtaataagagtcagagataccatgaaaggattccaagttgtagtaagaacaactcaaattcaaagtgaagttttgtgagttgtgtaattgtgttggagttttgcacaaatgagaagactcttatagaaacagaggggttgaagaagaagcgatatttgcccatctcacttgaaaacactaaccggagataaaccaaattaattggaactattctcagttatggtttggtcctcgtcgttttgggttagtgttgttggtaggtggagaattttgcatttgcatttgcacaacgaagaagaagaccacaagagccatttgcaattaggcataatatatgtcctaactcaccaaccccctcaaaattgccaccaacttcaaatttctctcctttaaacctttctcaatcatctttcttctgccttgg

SEQ ID NO: 34355 - DNA, 566 bp, Arabidopsis thaliana columbia
  unsure (1)..(566): unsure at all n locations
ccaaactactcctctgaagtagtgccaatatagtaggatccaagtttttttccttcaacattacagcaaagttagggtccaaccccttgtcttgcagcaaattagtcagttcaagatcaccttcttttgctttcttcttaagtatcgaggctatcctaggattgtttaactggtcctggaaagcaagagccaaattcatatccaaaagctgctggtttgcagaattcgatgtgctagactcgtaaccttggctatctagaccactgctcgaacaaacaacaagagtgttattttgatcagaaactttgtccataaaataagacgttcctgcttcgggctcttggaccacagaacgacatgaactactacgtaaacctaagcttggtcttccactttcttcgcttttgtcgctattgattccctcctgagagctgcctgttcgagttagattgtcagccgtgcaagattctgccgtacgatttgcttcattagtacaaccagtatggccagcatcgatactactacttctttttatacttgagccacaacatctgaagancttgaag

SEQ ID NO: 34356 - DNA, 613 bp, Arabidopsis thaliana columbia
cttggcactgaaatcgttgtcggaatactgagagtttgacatctggaacattaggattcctttggagttcgaaaattctggttcctacatttatataaaaacaagacagtgatatcagagtttttagattgtttcagctttctacattacttttttgctatattaggtggaacaatgactcgtgcaacatccaaatgttctttctactcgtcaataggtaggtggttgattacataatttggtgagagttggtcgcataaagcttaaccaataccatatctttccccagatctcctctcagaaagtctgataaacaaattatttaacagaacagatacacaattggaaaacaaatatgtgacaattattgcaaaaacaaataagaatgaaagaaacagacgaaagttaagtaaccatgactttagtgaaattaatcaatttcgtaagcaaaataataaaaaatcatttttctaggaagcagaggaggagagtcctaccaattcatcttctctctctctctatcggctcatatctccaaaagacctatccaaaaaaaaaaagtttgagtctttacgaattccaaagaagcaatgaaaaaccctatccatatgta

SEQ ID NO: 34357 - DNA, 593 bp, Arabidopsis thaliana columbia
gtaggagtgctgaagtaaaatatgtgattctaaatgatgaacgcataagaactgtttatttgatattataggtaaagaatatacgaggaatattcgtttgtaattccatatcaacatgtcataatcagtccattaaaagttttttatttccttcttcaaattgctaaaatattttttagagcccttttctctagcaatattgctttgcaaatgaccacaagataaattacctgctaaaatatagctttgcaaatggtaagtgcattgtgattgtacatgactatttgactcagcaaacaatatcatatattgtgaaacggattttaaacaccaaatgaaggaatatgaaaatcctttaacaaaaaaataaagaaaagaaaaagaactcaaatatgatagaaataccatcaaaaagtcgaattaatatttgagtacctaagtcgtcaaaattaaatattaattcgaattaaatagatatgcgaaaatcttaaatatgtattcaaatgaaatcaaattccataaaataattctagccataatatggatattaattgtatatataatttgtcgaaaataaaatggtcttaagatgt

SEQ ID NO: 34358 - DNA, 578 bp, Arabidopsis thaliana columbia
ccttacatctaaatctcaatttgtcagtttgctgaggatgatcgtttggctgctgttttcgttgttggttactccttggctggtaagtatacactgccacaaatacggatttaaatgttctttgattgctgtttatatataatctcaccattgggttttcctgccagaggatggggagagtgatgagcaagtagttctggtgagccaaagcggaactgtgaaccggatcaaagtcagggatatctcaatccaatctcgcagagcacggtactcccttcatgtgacagtcttttcaaatgtatattttatatggtttctcatttgattgttaatttctcaggggagtgattcttatgcggctagatcatgccggcaaaatccaatctgcatctctgatctctgcagcagatgaagaagaaacagaaggaactctaagtaatgaagccgtagaagccgttagcctgtaaattttacaatcccaattccaccagtttttgagacaattgtcaagttcagtacatagagtctatgtgctactctcttcattttgtttttttgtgatgtactacgagaagaga

SEQ ID NO: 34359 - DNA, 501 bp, Arabidopsis thaliana columbia
cccctctcttgttttcgaattcaatcactggagaaggaagacttgttaggtttcaccaaaaagtctcttcttcaatttttttaattcagaggcagtagtagtacactcagatataaaagaaaccaaaacgatcggaatcttcttccacttgttcttttaaaagattaaagcttttttttttctcttaaagcaaaaaaaggaaaactttccctctcgcgtctctctcttttgacctcacattcgctgaatcactcttctgggttttttttttttttttttttctttgccctagatcttaaagacaaggaggatcaaattatacttttttgagatctgggttcggacaaagattctgtctttctgcattctctaccgtttcgattcagctcgaggtaaacttttatttgactctttttgactgagaatgctcgttagtcattacagtgtctttttgttgctggagggttgaatctgggatttgtagcttttgatttttgtttg

SEQ ID NO: 34360 - DNA, 456 bp, Arabidopsis thaliana columbia
acatatctcggggtttgtccagacaaaacctccattacgattatcccgtaagcaaatatgtcataagctggagacagtgacctctctatccggttctcttctgtggctaattcattggttacgcactttgacatcccaaagtttccgactttacctctgagatcttcgttcaagacagatgtttctgctcatgatgttgccgtggacgtagttgatccgatgcatatactttaacgcgatggcgacatcatgacataacttgaacactgtatccatgccaagaaacagtaaccagactcgatgacttgatacttgatggccaatttgatctgaatccaatcccacagggacccattccttgcatactcgaaaaccagataagaatcttgatcgattactctaaaacatgttccaagaaccctaatcacattgtgggtaaagtagtgtgactgatca

SEQ ID NO: 34361 - DNA, 535 bp, Arabidopsis thaliana columbia
caacttcgatgaggttccagagaatagtcgagaaaaatcaagcatggagaaggtccccaccccagcacccaccgcaaggtgtttgatgtcccatctctcactgattctggagtaaatttatcggcaaacaatgaaatgaatgacattgaagatcacaatgggttaaacatagaaatggtagcagaaatggaatcgtatgcaagccaccctggcttaaaagtgggagagaatgaacctacagagtcaaatacattcactggccatatagatgcattgacaaagagacctcaacatgaaacatcctctgaaaaagctgttcccccaattaaaagagatgtaacatgtacagaagcagatgaatgtcatgatctagagagcccgattcaagaatttttctgctctagtcccccatgggggttccatgcggcagaataagcggagaagaatcctggaaaaaccaactagaagagagctttcgtcaagtccaggggtgaatattctttcgctaagtcttgggacagctcaatatatgaga

SEQ ID NO: 34362 - DNA, 469 bp, Arabidopsis thaliana columbia
ataaggagagttcaaaacacaaacccaaaaaaaaaaacaaaaacatgatccttcttcctcagttttcttcttcattgtcatgtaatggttcttcttcttttcttcttcttgggggttatggttaaggtttgtgttttgaggcagattgtactagggttttctttcatgtcgctttccagttcgtcgtctttaagtccctgtgtattgttctcgatagtgtgagatatggaaagagtatttagccatgtagggctttcgagaataagtctttttctcactatgagattactttgttctcaagctgtttgtatgtcttatgcgaacgcctgcaaactcgtttccgttgacgtactttgattttatagaaaaaactattttcatcttgtattattgagttctctcttatctatccctcttactattgccatgcatgcctagcctgatttcctcgaggacgacactaacattg

SEQ ID NO: 34363 - DNA, 601 bp, Arabidopsis thaliana columbia
tcaattagatgatttgatatcgtaaatgaatatgcaaagtctaaaaaatttacaacgtcatcgaattacacaaaaattgtgtaaacaaagaactgttgacggttaaagaaattcatagaatgatagtcaaaactcaaaaccggagcaatgttatgcaattttagaccaaggggtttaaatgatcaaagtttatatacacctaatttcaagtacaatgaatgtttttaaaaggtctcatgataatctttaattggtaattctcgttttagatgccacattactcaatttgaatttcaaaaagaaaacattcgtgagactacttgaccagccatcttatatacaaagtttagtggaagactgtcgaattttgggaaaagaaattcaaaactgataaaactttcggttattaaggagaagagcctccatagaccatagtccatatatagaaagagtccaaatactcagcttctcttcttttcaactcttaattttcaatattatgcaaaggaataattatcaaatgattccccaattttaaaaaactgtggatttttaagagcatcctaagcaacttgagatattacctaaaacctttgtttga

SEQ ID NO: 34364 - DNA, 390 bp, Arabidopsis thaliana columbia
aggagatggacttgtggctgcttcaaagattgttgacggcattacacaaaatgttggaaactatatgccaaaggttagtagaagaatagtatcaatgtcagggttttattatttctattgaagattgactgtatatcagaatccttgttgataatacattttgcaggcaaaggagatggagagtttgttgtcagaattaacaagagtggctagaagtgaaagatcattgacagaaaattgcgttgtggctcttcttaaaacgcaagcttcacaagtactcaacctttctttacataagttgagaatattttaaacttttatgatcatcgtgcatcctttttttttcctttgtataagagttttaaaagatctttatatatatatatataa

SEQ ID NO: 34365 - DNA, 534 bp, Arabidopsis thaliana columbia
agtcgttacctggtcaaaacaaaacgttaaaaattctcgagaattgacaatataataaattatacgcgacaaatatggaaacaaaatatcttccaaattgtggaggtttattgtttattctaattacacacttttgaaatcttactgatgtaaattattgggatctcgttttaaaacactttaatgccacaattattgtttgtttctatttacctacaaaggagaatttgttttccattgtgactcgatttggatatattctggagaagaagaattttggactaaacttcaatatgtgttcaaattatattgaaacactgttacaacttaagagtttacgagatataaaacattaagaagatagctgaattttctagtagaaaacgaaaggaagagacaagcgtcagacaattttaatgaacaataagaggactagagtgtttaataataatagaccacgaggaaatattcaaacaattagtaataggatactaatgacaaaagaatgaatagtaatgaaataggttttgggtt

SEQ ID NO: 34366 - DNA, 921 bp, Arabidopsis thaliana columbia
tctgatgccaaagtacacaaacttataaattttaataatttgtttttacaaaatgataatgataattaaactatttctatattttaagcacatgtatttatacttgatcctttttttcaaaagataatcttaaatgaccttttaatatttttgttattgattgaggttttaacatatagtagtatttattttgattaactcttaggaaaggaaaaagagtcgagctaataaggactaacttcagaaaacaactccttatcgcgtacttgtttatgcaaaaccttattaagttgctattttttttttgaatatttcaccgttacagcttaaaatctagagcgttttcctgtttttttttttacaagtttattatttaccctgaagaagttgatcaagtcttgctcctcaacgaagatgatgacggtaaaatctgtgacatcgagtctaatcttaatccttctgataacttacgtggccgcaaaaggtggtggtattcgcggtggccgttggtttggtggtagagttccaagccacggcggttctggtcatcgtaatagcggtttggttgacggatcaaatatgggtttaacgatgacgtgtgtgttgtcttcttgtgttttgcttatgttgttcaaaagattctgaactcttcagaaaataaagaactggctttttaattaggggcttttcatatgatatactcttttttgttaaaagtttttaatatgatatacataacaatatattgatttttttcattttttgcaaaaatttgtcattcctaattggggacatctgattagaaaaatatgtagtacttatttacgtgaacaacaacgacatcaacattaaaaacggaacaaatacttttcaattaattatctgtcatttggggatcattatgtatttgatgcaactttt

SEQ ID NO: 34367 - DNA, 481 bp, Arabidopsis thaliana columbia
agactaaaaatttgttgatcaataatttccaataatatcattcttaagtcgttaaaaccaattgttatattggtactagttttgtataaatatcatgtattaatctcttatcttatatgtaactttcaggattttttttgggttaatctttcgtacttaaacagtcagcaaagatatatttttttttctattttgttatttctttaatattatttattatatttcccacataaatataaaacttaaaaagtggtagacatgatcaacaaatctacgacgaaactgtatatgagtatatctatcattttctccttccgccaacttccactgattccatcgcatgtgggattcttctatccatgcatatatatcataaaatttgaacaattcgtaagttaagttatatatttgtaaacacaaaaacaaaaacaaaaattagttaataaaaatatttatagaaaggggtagagaaataatatag

SEQ ID NO: 34368 - DNA, 299 bp, Arabidopsis thaliana columbia
atgtaatcttgactgccacattgagttgataagatgttattctttttcatttttttgattagatatatttataagttacactagaccagttcataaaactttgataattaactaagtctgagttttgaatttcagtgtgacaatggacatatagcatgttcatcttgctgtaaaaaggtcaagtacagatgcccttactgaagtatgcggattggtgagcttcgatctaggatactggacaaagattggagaagcagtcggtgtctcatgcccaaacgccagatatggctgcgaccgag

SEQ ID NO: 34369 - DNA, 470 bp, Arabidopsis thaliana columbia
atcccccttgcaaggtattcagcatttagtctttgctctttacctgtagcttttggataatttggggctgtcatatcattttcctcatcataaccttgtaggtgactacgatctaaaggtcatgcgtcaagaactgtatattagtaaacagaaagtggtatgttggcctggccttcagttttattagtatttctgttgattagatctcttcaagatatgttggccacaatactgtgtgtttcccatgtatgaaatacgaagatctacttgttaatctgtctttgatattccagattatttgttgcagttcatcaatcatctggttaatcagctagcaagacaccagttcttaaaattagcatgtcagctagagtagaaaaacatgcttggagcattctctctgctactagtcattgaatccgtacttcagggctacctctccgccagcaagaagccgtgtggtatgggca

SEQ ID NO: 34370 - DNA, 508 bp, Arabidopsis thaliana columbia
ccttgaaaatggagatctgacatagaatcgctcctgaatcctccatctccgcagaaatcactctctgtctctctctctctctcgctcgctcttgcttccgcttcttttcaaaattcaaaatcaatatcgttatgagttaggggaagataagattttaccgggcctttatgggcgtttaccaaaatcggcccaatcggatttcggatctttcaatatttgtaaatacgaaccgactttttaatttatttcggatctagtttggttcggttcagattcgagttgggtttgtaatctttcaatatgtgcgttcgaaatggtagaattgatgatcgtcttcttctctctggtgacactggcacaccaatgttgactgttgaagtcagctattttggacaaaaacagtttcacgttgggaatggctatatgtactttcaattgtgtaatcggggcattagtgtcaaacgacattatgggagctttgagcgttctgataatgcattacaagtgt

SEQ ID NO: 34371 - DNA, 904 bp, Arabidopsis thaliana columbia
cattacatctctcatgaaaatccatggcacgggcattgttcaccgggacgtgaagcctgccaacttggtgttacaaagaagggccagattaagctcatcgactttggtgccgctgctgatcttcgcattggcaagaattacatcccggaacgcactttactcgatcctgactactgtcctcctgagctctatgtcctcccggaggaaacgccaagcccatctccggagcctatagtcgctttgctttccccgattctctggcaggtggttttcttattcttgtttgccttcttttttacttgagtctttgcctgatttggagtgctgattcttacagttgaacagtccggatctgtttgatatgtattctgctgggatagtgcttctccaaatggcggttccgaccttaagatctactgccggtctgaagaattttaatctggagatcaagtctgttgaatatgatcttaataggtggcgggaaaggactcggacgaggccagacttgagcatactagatctggactcgggcagagggtgggacctcgtcactaaactcatatccgagagaggttctctgagacgtggacgcctttcagcagctgctgctctcagacacccttattttttgttgggcggtgatcaagcggccgctgttctttcaaagctcagtttcagcaagtgactctgatttaaattcttatgatgtaaatgtacacaataacacgactctcttccttaaatatatttgttgtatattctctgcttcttgattcatgctcaaacgagtttcgttttgcgtgacgggttttgcatatcaaagtagccgtcatcaggtcagaggctgcagaagtatgtttgttttgatattgatctggaatcctccctccaaggtttggtatgt

SEQ ID NO: 34372 - DNA, 635 bp, Arabidopsis thaliana columbia
  unsure (1)..(635): unsure at all n locations
tgactccttaatgggcataatgacttccaaattcccgccggagaaagatagttcctgtatgataaaccaaaaattcaaaattttcttttctcaaaaaaaaaaccccgtcatgtgagctaaactaaagatagttgttcataatataatttctctcatgtcgagctaaactaaaagttaaaaagtgaatgggtgggtctctcgcttttgccaacttgcaatgaagactacttcgaggaaggatggtaagatgatgattactcaattgcgctgcctctattggttttaaatcacatcaacctctatattcttatcgttgttggaaaatctaacaggaggaccccattctcattgggttttaattccacgtcagaaacataatgggacaatcaaatttcgaaacaaggtatataaatagataacatcttaaacttacaagaaacaaattaaagacatcaactgtttaagaagcaaaaaaaaactgcaaaacatgtattcatgtattcattttatgctcataagtcatgacgacgttcanaatggacataccaatcataataagggcgtatagagatgtcagatgagtttggagtgaatcattggttagattattgacaacaggattttttatataagaa

SEQ ID NO: 34373 - DNA, 511 bp, Arabidopsis thaliana columbia
tagatcccctgggacagtcctgcaaaaaaaaagtctctgagcagagtttcatctttctatcaaactaaggttagttttcatttactcatcatttctctgtttctcattggtttcactaatttgttttgaaaactccagcaaaacggaccatcatgatctgcacggagtcaaaccaccagcggttttcgtttgctggtgatctcggccagtccgataaaggaactcctatggaacaacaaccatcaggcccggtccgaagagacaccactcttttggattcatcaaactcagatttcgagttccacatctcaagcaactttgatcctggagattcctcaccagctgacgagatatttgcggacggcatgatcctcccagttcttcctttccaagtcacagctacatccaccatgccaaaacgtctctacaaatatgagctccctcctattgtctctgctccaaccttatcctcttatcttcctcctctgcctggaacatctgttaaaagata

SEQ ID NO: 34374 - DNA, 714 bp, Arabidopsis thaliana columbia
acatgatgaatctttaggtgctcaggtgtttgtgttattgcttttgtcccttcaccttctccttcttcttcttcatcatcttcttcttctcttctcctttttcctcctttttcttctgaacttttacttcctccttttccaccattcttttccgccgtctaagaaattaaaaatacaaaaagttaatcactttatataaaagctgaactttcaaagaactgggttcttcgaataatgacgctagaaaaaagcgggtcttccaaaatttgaaaagttgacgaaaaaattgaaactttccgggaaaattttgtgtacctttgagaaactaggagatggagaagctgtagaaatggggttttctttggattttcctttaggcacagattttctcttccgggaaaattcgccgccgggtgtgacttccggtgaaacgagagccttaagagctggtgtgcttgagacacgtgtcagcttcccggagttgttgaccatgttattaccgttgttaatcggaagatttgtattggttcttccgttaaagctccggctaccaaaacaagagaatctagcagctctctccgcaaaacccggatctgctgagaattccgtcaacggcgtcgttctgttcatcatcatctgagaattcgaattcgtcggtggtggtggagagctcatcggagttgcgtaacatgaggcggacgaagacatcggagt

SEQ ID NO: 34375 - DNA, 508 bp, Arabidopsis thaliana columbia
ggtaaaatccacacaagggcggtctttaacacgccaaatcacaattttttttttatcctggtaacctctgattctttttttttttttctttctaattttgatgacgtgattgatatatttatttgataaatttgactctctaaaataatttaatttctgctaagacatacaagaactaataaaatcacacacatatatatatatatatatatagaacgtattatatgataaacttcgattttcttggagaattctcatgctgattttttttaataactttaggaataattaattagtttcaaatcactctagaagacatttacttaatcatagcctctgatgataatagttccgaaacaagaaaacaaaacatacaatatatattatttattttattttcaattttataatagacatcaaaattggtgatatttattgtgatggggcctacacgcaactggaagacaactgtagagaaagtgcccatagaagaagatcttcatagtac

SEQ ID NO: 34376 - DNA, 496 bp, Arabidopsis thaliana columbia
tattattgataaaagcattgggtttactgtatattttctttttctttttcaatttcttttttgctaaaatgttcattttttcttttcttatttgattctgatatgcatgattatttcagggaaaatatctacatatcatattaacaaaaaaaaatacaaatccattctataccatatacgttacattgtgaaaattataataaactcaagatatatatatacatatacatcatggtagtagtagtagtagtacacatttaatttcagcagttgcaccaacaactgagtaaaggacaaaaaactataaaattttgccatctgctatttaaatcattacgtattactagaaaatgatgtggaattcgacaagaatgaataataaaaattaaactcactagagacaactttcattaaaaaaaaaaaaaaagacttgtatcacaatcatatgaaagatgaaacaaatttgcattattatcatttttataattgaaaaaaa

SEQ ID NO: 34377 - DNA, 509 bp, Arabidopsis thaliana columbia
cctccaacgtactatcaggcctccatcaaatctccatgtattggttttgtacaacttaaaagccaataaggcccatgaaactagagaacagtatttacgtaggctcataaacatcctaacttggtatagatatcctaacaatgtttttgtcaaaaatgctttagaagttagaactattatttttctggcaattgcaacagatatcaaagtgttttgaatgttaacttagctagtaaaactaaaaagtaaaaggtgaagagatcaaataaaatgttttctttattatatataaaaagtgacaaattttaaccaaataaagaaagacaagtgaaaaaagaagaaagtcaagaagagaatgaaaggatgtgaagatatagacgtgacgaaagtgttaatggttttaagtactttggtttatctcatttttggtgaataagaagaacaatatccacatcgaaaatatgatttttctttataaaaatacaaagtttataaacggaataaagtgg

SEQ ID NO: 34378 - DNA, 583 bp, Arabidopsis thaliana columbia
gatattttcggagctacttcatgatagaagtaaaaatccttcttaaaaggtctcgacaatttttcgaaatcctcaagtatcttgatcatactagatccaacggttgagatagagatattttacaaatcttcgagaagaatggtacgaaaaaatgacccacattatgacatgttttgtatcaaagtggcttcgagccacgtggggagtggctatatgccacgtccctatatgattctctgtctgactcctaattttccctcttccaaataaaagttcaataatgaaaaatagtactagtataaaactgtcatgttaacctattatgacccgtataaatgctggcaaaaaaagggactatctatagaataaaaatgaaatatagacagagttttcagtattatgcttgacataacacagatttcaagtcttattttttcttaaatctgattgagtagcgttttcaaaagcaaatacgatcactattagagtgtatgtatacagtatatgtgttattggagtgtcattttcaaaactttttgcattatgtcattcttagaacatttgaaaagtctgtggggatttt

SEQ ID NO: 34379 - DNA, 453 bp, Arabidopsis thaliana columbia
aaaagtgaccacaaccgccaatgacaccgacaagagtcaaaagagacgtcactaataaataaactaacacattttcgaacaagaatccataacgttaacattcactcactgtctatcacacacacacatgctgtgtacttcattattactctctctcacgctctctcttctcttctcttctcttctttaaaaatctcacaccaacttcattgacaaagagaagaaaacaactctcaaatacaaaaacatgagctacactttctttctccttttgctctctcttgtccactccactttctcttcattagctcctacggatcgagccgcgctccaatccatcagagactctttaaccgacatgcccgtgttcagcttcttctcctcttgtgacttcacagttcctgacccttgttcctccttctctggccttacctgctcttctcgcggccgtgt

SEQ ID NO: 34380 - DNA, 563 bp, Arabidopsis thaliana columbia
taaagttataatcaattttgacatttgttttgtttgacccttcacataagccaattcattgcatataatttgaagttttgaactcctaaacatagttattaattttggtttgtattaaaaattatagctcaaacttgtacttacttaacaccatgtaaaacttagagtaagcgtcttatctaaatgaaaaaaaaaatagaatacgcaaatcaccttcatatattgtttaaaatatttgttaaagccactatgagtatgatatacagaaagatataggagggtacaaaagaaagaccgaagctgaaaacgaccgattctatttctctaactcttttggtcccactgagagcaacaagcgtttaagtaagtaaacatcagccgttggatattgaccttcctcatttttctttttctttttggggctaatttgcatgtctcaccgcgtagaaaggatgtatctaaaagttgaagatattcttattggatcaatcaatattgcaaaggagattgtctgaatattggatatacgcaataaaaaaaaatttctttcgcttgttacagag

SEQ ID NO: 34381 - DNA, 761 bp, Arabidopsis thaliana columbia
cttactatacttagagaattacatgttataacaaatgatctttgatcaaaagaaaaacaacaacaaatgatcaagaattgctttcttttttttatatgttgcaaaatgaatagacgagccaaacttatactcaaatattgttttatctatttttaagaaatattctttatgcgagagagcaaactccccaaacgatgttaaatggatcacaacacataagtcgatccgaatagttgaagttttctaaaaaggcagtccctataattgtattaaacacactaaatcctccacacagacaaaaagaaatcacgtaaacgagacatttacatgaaacaatcaaaccagtttgattttatccgattttgctaatgagatgagttctgtatattgttataatggatataggagaactaactaaaataaaaaacgcaaagaaaactttatacagtacatattcttacggtcttaccaattatcaacgatgtgttggttatgtacacaaggtaaaatacatcgattcatattatgcataatataaaaaaaataaagaataaaactacattttggtaacttgaattcaaccatgaactgtttggattggcaaacataaactcgaataaaatatctaggtataattgtggttcatacaagaattacttcatactgttgggccaaaggacgtatcctgtcccgcacctccaaaccatgggcttactactgatccgacatcaaaaccgtgttagttgcaaccaacgaatgat

SEQ ID NO: 34382 - DNA, 214 bp, Arabidopsis thaliana columbia
  unsure (1)..(214): unsure at all n locations
ttgggttaccgaaagcgaagggtgccgttgcgacaacccgaacacgagcattaagctcaaagaacgactcttaggcggataaacgttgagcncagacggtttgactgaaccacatttttctttctatcactattgtttacctaggctttatcaaaaccggtccgatacaangctcgaacaaggttntccgcgtcatgaggcatgaaaaagagat

SEQ ID NO: 34383 - DNA, 311 bp, Arabidopsis thaliana columbia
atccccggttcgtattcgtactgaaaatcgcaaaataacccttcaaatcgatctcgattgcaagtttaccctccaagtctgaactatgcaactcaaccccaccatctctaaaatcacatacaatacaaccctcccgtgtatcgatgatatggcactcgataactccgtttgagaacaaacagatttagggcaaaaaaatctcaatgtactttctagtgcaagatactactccatgtcaaataagtacgggtcaaaccacgatctgaaaatctccgacgccctttcgtgtatcgatgacgtgacagtcgata

SEQ ID NO: 34384 - DNA, 556 bp, Arabidopsis thaliana columbia
tagtaaccaagagagaaacagtaaatttccaaagaaacaaacggctaaaaggatgataattgatagaacaagcatatgtaaacatatatacactcacttatgatctgccggctgcgtctgtttaccagtctgctgtgtagaagcagcagcaccaccaccagtaggtgtagaagccgttcgtgaccaagtattctgatttgcaaaagcatcatcatgtcaccattcattcaacaggcaaaatgctttcgtttcttaaagaagatgcaccatttttctcatccaaagccgaacgataacttgcattctatcaaagcaatacttgcatcttaaaagaggaaaaaaacaaattgacctggaactgattcggtctgctggaaccaccactttgtacaccaaatccaaaagggttcgaactattttgttgctgctgctgctgttgttgttgttggtcttgtgtaccaaagccaaagggattatttggcttagcttgttgtggatgaagaaatctacagtttccccatacctacaactgcaaaaacagcacaaaggacgatga

SEQ ID NO: 34385 - DNA, 579 bp, Arabidopsis thaliana columbia
ctttactggtttggagattttcatggaaggtttgatatttttagagttctccagctagtgaattaggttttgattggcacttatccaagaaagtgataatacgttgatgttttggtttggaagttgtgataaagcacacattgaagaatgttttggatgattcagagttctcgagccaagaaatgataatgcgttgatgtttttggcttgaaaaatgtgataaagtcactacttttgcttgattggaaaattatataatttgaattggtaaaattaatataggtaaaactgtttttgcaacacgaaaattgaaagaccaagttcaggaacttccaaagttatgttttgctatattggtgaaagagcaaaacaccacaaatgaatatcgtgctggactgcaagagagggttagttacgtagatttccattatataaaggctcaatatgtaatttcgcaaatatacaagccctcattttggaaattcgttaaaaacaacgagtcagccgaagacagaaaccctagaaatcgcccgagtcgagttaattcgcctctcacccagctctatctcgtcccgtgac

SEQ ID NO: 34386 - DNA, 595 bp, Arabidopsis thaliana columbia
tgggatacccgaaaggaggagaatgtcgaatatacagttatggcggtgtttgttgttgtgacctcacttctaagcctcctaattaaaaaaaatttcattataaatgtactcccaataatatatgaaaagattatattcaataatgtttcttgttaaaaaaattatttagttttacctgcattaatgatgtttcctttcatctttttacccattatttcaaataattcattaattatcaaggttacgttttctcaaatttttgaatcgacaaccgtaattaaccaaaaaaatacaaaaatgaaaattttagaaagaaaattaaaatttggttctattttgtaaaagagtatttatttggatattttgattatttaaagtatttgattgttttggttctaaaaataattaatattttgagtttataattacagttatgggtataaattttggatattttctaagtttctggatattttggttaagtgtttggttatcgattcggttttattttatttaaaacttaaatcaataacttaattaaattatatgcagtaaagtattatattcgataggcttataaaatctctgaatgagt

SEQ ID NO: 34387 - DNA, 539 bp, Arabidopsis thaliana columbia
ttgcccaccaatatgtgtctgaggcaccattaggtgttcgatatgatcagcaggtatacattgttgaccattttgtacatgagtcaacggggcttcaacaagagcacatttcttgccagtttgtatcatagagtctctatgacagggagctaccatttgaggcattgatgatgtatgagcaggctgagaatcccacatcaactgatcaacacgcttcctcaatcttcttgcttttccctgtgcctcatcaatcttacacagaaactttgcaagtacatcatcagaacaatctaactcagaaattagactatcatcttcaatcgcatcttgcttccccgtagctttgcgacctgtaccaaaatcttaacataatattgatgattcagtactaaaactcccattttcaatcagacaatcaaaatcaaacaatctgtatatatcttacctgaatcaagatactgccctttaacatttaccggcacccgcttatctgataagaacaaaaagttatacaccattgttaccccaaaaagaagaaa

SEQ ID NO: 34388 - DNA, 619 bp, Arabidopsis thaliana columbia
tgaagcaatactaatgtagtgtattgtggttgcggcttcgttatgcgttttttcttcaagttttgttatttcgtgaaaatcaacaactttctcattcttccgcataaaccaaatacatatcaatcaatgaacaaaagccactagtgaagctaaaaagtttctcggagcagaagaaagcgaactgaacctgctatattgtgatagtaaatcggccaaaagataccctaatgtttcacatgaagtaaatctcacgaatacgctacatcaagaacttagccccatatatgtacccgaagactaaagctgtaagtaccaaaaaaagaaaggccttagttatatactgttactacttactactgactgattgtgttagtgaccgtgtgctacaatctctaagccatcagatatcaccatgtctcaggaggcattgaccaaaacgaccctgaatacccaagaccctctgccactggaacgaactggtacccgcttgtgtttcgtattactacgggatagcttgggtgcctataaatgcttgaatttcactgctccacataagatgttgaagagggcaggaggtgtttgacttgtggatgactggacgggtagatgaatgacatat

SEQ ID NO: 34389 - DNA, 534 bp, Arabidopsis thaliana columbia
taatcttacacattcaatttttctatacaatttaactatttatttcataacaataaactgcattttaattctacacactatatcttatcgataaattttgaattataaatagtattttgctcacttttatatatttattttagtacttttatttaaaacagaattcaaatcttaaacattccattagcaaatacaatttaactctttgtttaatcatgataaacttgattttgattctacatacctaatcttaataaataaatggtaaaagcatttctcatacgataacagatctatatcttagttaacattagggtatcagggttttctgcaaaacaacccttcaagtcaattccgtttgcaagttttcatccaagtccgaattatgcaagtcaatctcacaatctcaaaagtcacccgcaatacagtcctcccatgtagcgatgacatggcactcgataactctcttttaaaatataaggcttttgtgcaaaaaaaaactcaatttaattttttttttttgcaagacaaacg

SEQ ID NO: 34390 - DNA, 519 bp, Arabidopsis thaliana columbia
gcttcacggctgtataggcatcgcgatcgccacacattcctttcgctcaccgggtcttattctttttctcaagattttcgtaatctgaataaaaaaataaaaataaaaacttcacgaggatagaaaatgaaaagagaaaacatacaatctatataatctttccaagtggccgaagaaaagggtgatgaatcctctcgtcaataagatcagtaggcccaaaagagatatttcaaattgagtcgcatctgtcgggtaagttaaagcaataaataaccagccacaggtagggtttaggccctctcatctggctctagatgacgaaacgtgttacaacgcctacttcttgttgaggcccaaaataagcctcataggagagaaaccaaaaacgtaactgtcacgattacgaaacaccccttaattccattttgcaaatgcacccctcctcacctttgtctgagatgtttttatatacagctcagctcgataacataactcgacacctctaaacacaaagttaca

SEQ ID NO: 34391 - DNA, 424 bp, Arabidopsis thaliana columbia
ttcctaaatattttgtcaccaaataataaaaaagtattaaaatgaaattaactattttattaagtttataaacgaaaataaataattgattatctatactattaattgagaatcacttaaaaataaataattttataaagagtaaaatattatatagaaagtcattgatactattggatttaaagaataaacaaaaaaaatcataaaaggttacattagacaattacaaatttggatcctgggctttaggtcggataaagacgaggtacggtcctggacacggatcctagagtcgattcatttagtttatcattaattgtttattgttcagatattaatgttgtttgcagttatttcctgaacctcttacataaatatttgccaagatcttaattatcatttaaagatatttctacaactaact

SEQ ID NO: 34392 - DNA, 849 bp, Arabidopsis thaliana columbia
catcaaaatactggaggtacataaaacaaaagcatctgaatgttaagcaaaaattactcacatgagtgtagcctgctcctagatagagacgaagagactcgaccatcattagatgtcctttagcagctaaatctgaaaagacaagacgaagaattgcttgacgaggctctttcttggcgcttgaagtaccattctcggccacctttgaagcttcactgtttttcatatttaaggcttcatccttctttgcactacctttcaaaggtattctaggggatacagaaatcaactgaagagattctagagagtgtttcttggcagtttctggatgaatataggcaatagacgtgagggctacccttagctcaaatcctttgacatcagcttcatgaaaggctgatctatcagtctcttgtacacgtagtagagccttcacattgttacattctttttcctgactcttttttgctttgagatttctgtcacgtctctttggagccacagccacttcagttcctggcacaagttgtactgaaaacgagccaccagtcaagaaaactctgtcattaatcaacttataatgattgtaagtataagagacaagtcataatggtaaccccttgttgtatcccagggaacataagttgaagaataagaagaagaaacttgaaaagtatggtatagacaacgggaatacaacacaagtgcggattaaagatggtcttaccaccccttttgatggaaatgttgaaccacagaaaatcttatcacagttcggtcatgcaaccacaaagggaatttcatggtctcatgtagtacctcacctgaacacacatgtttcgatcagca

SEQ ID NO: 34393 - DNA, 475 bp, Arabidopsis thaliana columbia
ctgagatatccgaagctaatgagcaatcatcaaggcctgaggtaaagaatggatcataccatctctgaacagcttatcatctctatctctgctgaattcgctttctcatccacctcctgctcctcctcctcctccctatcaccaggtgtgaaatcaaacttgagattcggatcatttggcctaacccatgccccttccaattgctctgctaagagtttgcggtgtttgctttttgtagacttggctgagtctgaggcggatgacttgtgtttccccagggactgtgctttcgtgcctgtccttgacttcagatcattggctgggaacgtgtttggagcccatccagatgaatcttcaatacaagcatttgcgagcattcctacaaacaagagcatcaatccattagtgactattactgctctcaaaaagtatgggaagataagtcaaatatatgagagttccaaacctgtaacgg

SEQ ID NO: 34394 - DNA, 543 bp, Arabidopsis thaliana columbia
cgacaattcaaagatagatgattagggaaagatcatagagactaaaagtgagtttggaacattattggtcttaaactttaggggcgtagaatagggtggaaaagagattagctgtgaatgctaatccttgtaattattaggttagtacatatcttttcactttaccaaaagcaaaatatatgtgtattatgaattgaaaatttgaagacttttttactagaaagtaaaatgtgaagacagaatgtcgtcatgttactatgtgagccgtgaggagagtggttttggtttgatttgttaaatctacttttggattcaagaaacgtaagatggtctcatcgtccactcaaggtgggatgggtgggtaatgctggcccaatcaaaccacgtgtttcaaattcagatttcaccatcgccacttgagtgtgatggttactgaacctaatgattttggccttttatatcttgttttcgaaaactctgaactatagataagatatagaggtttgagaaacaatggttgaatttcataagccaagaaattgg

SEQ ID NO: 34395 - DNA, 363 bp, Arabidopsis thaliana columbia
cttcttttttactggagaaaaaaattattttatggagaaagatattttagtcacacattttcaccaaattgaccttacaataactctaaaatacgaatttgcacctatgtttagctttggaatatttcatatttgtaaaccaattaataatatgaatattaccaatttagtgaaaataaaatcttcagtcttctcttcttgtataagaatagctttagtatcatttgaaaacagagtaatgtcactaatttcttggcgaaaatgtgtatatttgtaacttaaggtaaaataggggcaattttgttgaatctgataagatcagggggtagtacagtagatatagctgtccagttcagttatgaa

SEQ ID NO: 34396 - DNA, 568 bp, Arabidopsis thaliana columbia
taagaaaaagagcatataatggagacaaattcacaataacgtgcccatcaccatcgcccatcggcatattttttgttttctgattgaatatgcctgcatagatctctgatgactaaggagtatggacacctcatcatggcaggcaaaacatatttaaattaattaaagtaccgactagtcgtttacttgttaaagttaccaaactaaaatggtacaaaaacaagtaagaaaataagagttatatttatatatctttttttttttttttgggttatatttatatatctttcgttgtgtttagcaggcccaactaattgaggcctatttttgatttcaaaatatcaaccatttgcttttcatatggttgatactggatatttatgtttttagtagtactgtattcctcattggttttagtgtttttaggtgctggcaagtagcaaagcctcaaaggcattatctaaaagagacatatgattctgtgattctgtgaccggcagccaaaacatatgccgaaaaagatgaatgattaaagtttgagtcatgaatgctcccagaaagattttta

SEQ ID NO: 34397 - DNA, 764 bp, Arabidopsis thaliana columbia
cagtatcatgtaacacttgtggatcacaatgtgttcttcgtacagccaacacagaagctaacaggggaagacaattcttctcatgtccaacacaaggctgcagtttctttgcgtaagagtctggttttaccccaatttcttcgcataatccatttttttttccttttacatcactcaacacatcagttttttgtttgcactgcttgtaaacagatgggaagatagcataaacaacagtagtgggaatgcaacaacagggtctaatagcggcgggacggtagacgtggcagccgtggtcgtggccgtggaggtagaggcggccaaagcagtggaggacgacgcggctctggaacaagctttgtctctgcaactggagagccagtgagtggtataaggtgcttctcatgtggcgatccttcacattttgctaacgcttgtcctaatcgtaataactctaacggtaactatttctaagtctacttactacgaactttgactatgtatgtagcatgattaattagtgctactaacttaatttgggtttttgtattttattttattttattttatgaccactttttctctggaattcatcctaatttgcgtagatcactgttagctggatattttaaatataatatttcacgtgctattctgaatcactgaatagttccacctattttatttataaatcttgaatagtcgtttttaatttttagttatgttcttagtgagctaatgtggaccatattcatcattttttt

SEQ ID NO: 34398 - DNA, 569 bp, Arabidopsis thaliana columbia
caacaagaaatgttattttgccagtgcagaattatagtattgtacaaacttgatgggagaaataagtagcaaacagagatggaattagctttaattgtccctttttagcatcatttcaatctatttttttttataatttagttttgttgttgcaaatacatttgatctgatgtatataaattaaataaagtttttatttcaaattcattttggttttcaagtcagttattctcataggaaaagaataaacagttatattttcatattttgttggttatatttggatcgattagttactaggaaatttcaaatttgatataattacctctgcaaaatgtataaatttacagatgttcaaactaactactaagtcgtatatttactaggaaagtgaccaagatagattattgtttgcttaatagaagtagtcttaactcttaagagatactcggagtaactcaacgtatgtaaaagtcaaaaagaagcagaagacaaatcataaaaagagataattatgatttatttaaagataacgattattcgtaggagcataacaaacaagtgtttat

SEQ ID NO: 34399 - DNA, 525 bp, Arabidopsis thaliana columbia
agcaaaagttcgaatttgtatagtatggttttaatcatgattgattgttgtatatatctagattcataataaaaaaaactctaattattcacaatcacataaaattagctgtatgatcggtttctgatcctttgttagaaaatgaaaaaaataaatacaaaagctaataaatatgggtgactacgaatgtggttgtggaggtgaagtaacatgggatcatacatactccctgccacttacttatctggaaaaaaaaaaaaaaagagtggcacattttgtttttctgtgagcttatctattgattttgtgaggttatctattcccccaagtttgggaagaagctaatgatactgttgccatacttatgggaaacatcttgcggcggtttctccaaaccaaattcttcatgcatgtgttgatgaaaaccagaaaaataaaagccttaaatctcgattatttcacttatatatataatcccatcttcaaatagatctgataaaccaattagataaagaatatgtaatt

SEQ ID NO: 34400 - DNA, 597 bp, Arabidopsis thaliana columbia
cggattcataaagggtcgaagaacgaacgtataaagcccaactgcaaagcccattttacgaagtctgtttaatatatttatcatcttttcacccagaccagttaatttgtgttttgtgtaaactaaacaatttcatgggtcttatgtaaatttaataaaaataagactttgagatcttttaatagttttacaaagtcaaagcatcaaaaagattttttctttttatgtgacagtcaaaaaatgattaactatttttccaaatattgtagattataatatataaaacataactaaaaatattttttaccaaacacatatttatttcttattaaaactaataaatctataactcaaaaggaaaaaaaaaaaattatgtcgttgagttgaatactaacatagagtaagtacatgtatttaacgttacatgaatgttagtcaacttcactctcaaatatattgacatgttcttatctctataaatagggtgtcctaagttctatctaccacacctacataatttcctagttatgactttaataataatccatttccaatgttattatgatcttctatcttatctttttgtgctgcatgatt

SEQ ID NO: 34401 - DNA, 577 bp, Arabidopsis thaliana columbia
gaagcacaccgttgtcacggcgccaacgcctcgtggtagacgaaaatccacgtgtctctctgtgatccatcgttgagttgtcggatgaaactccggtcagagattgtggtcaaaacatacttattgagtagtttcattcggatgatctcaggtatacaaagatggaatagaatgttttgtatgagttcagaaggaagaaggcaaaagccaatggtggtgtttgtgtctttgttacatctttggcttttttccatttcttagtatttttttggagtggtgtttttgagttgataggatcaacttcaatgttgtaggttatatatatagaagaagagctagctatctaacaaaatataaatttgtggtgggaatataataaccttttaagttcacttgttaggtcaaagaaaagttaattacattttgactaaatgaagttttgatataccagtttttttacttgaggtttagggaaaaatacagtaaagtagatatgggcatgaacatgacctactaaatcacttgcatcatgcacatgcctattttgactaaatgaagttttgatataccagttttt

SEQ ID NO: 34402 - DNA, 515 bp, Arabidopsis thaliana columbia
gtgataagagaaatgtgttaaaatgtgtttaaaaatgtgtattaattagttatgagtatgtatttttagtgaaagtaaagtatttacaaaaatgtaagattcacaaaattggtgtaatactttttatgattataagtgtttttttaactatttgacaggttatacatttttatggcaaaataaagaccatatgaattatgttatttataattatctgtctttcccgtgaagataaaaaaaaagtgatttcacttatttttgttgaacggtttagattaaagggaattaattttattgaacggtttagattgaatcagatcatataaagtttaggagattgttaagaccaaattatccttaatgattttgaatagcaaagaacaaaatccaaaataaaaataaaaattgaggccaaattagacaagattttaatttgtacttcccttttaataataaggcgatcaccacacatttgttcttgaagactttatgtttgtatgctcatatatatatac

SEQ ID NO: 34403 - DNA, 423 bp, Arabidopsis thaliana columbia
cgttaagtttgataggctaagaactctgtaatgctgaagaaatttgtatatgttgggagagtttccattcaagaagaagatctacttgcattgctgtggcgatatagcatatgtgaaatagaggttcgtggactgcgaagatgattatgtttatctgtgatgagaatttagattcgattaaaatcataaacatgttcgaggatttggaaaactttggtttgtaatttggacagaactcatggatgatgcttgaggattccagaactctttcaagtattgtttcttcatctattcatcataagtcgttgactccctacttggcgccttggacctgattatctaattccgactgtcttgttgactcggcgatgatacgcaacgttttgatgacatcatcatcagcgactgagcgaccttgcacgt

SEQ ID NO: 34404 - DNA, 584 bp, Arabidopsis thaliana columbia
attgaatatgaaaatataattacttctttgtaaattaggtgttttttaacgaatcatcatatgtacaaaaatatgatgagccaatgatgtattgaattagatacatgtagaaaggatttgtatgatcctaaagaacttcgaaacgaactaatcaaatggatcaaaaatatgattgcagaatataagaaatgttgggctcatgttgggctgaaataagacgtagagattaagttaagctaagctttctaaagtaattgtaagcttctcctgcagaggagaatagaagtcatcaaacaaggatctcagaaaattgcttatctccctaatttcttcatctccctctaaactctcttccagaatccttgctcaattctcttcatttgtgatctcggctctcttatcacgaagacttctcccggcggcaccgtcttcacatttctgctcgtcattctcaaggaaccaaggtagaagctcactctctgtgaacgaaacatttgccttttgttcggaacgaaatctcacaaattggttctatgatctgcgcgatcacgtcgtcttctctctggatctgaagtaattgattg

SEQ ID NO: 34405 - DNA, 557 bp, Arabidopsis thaliana columbia
gaatcatcttcgtcgaagatgcatcaagaactgaaacagggatcggttgttcaacggtaactttcagaggttttagggacggtctgtcttgtttgattccaaagtctggactctacattggtagacagaagagattcagtttattgagtactaatgaattaacttgagaagtgaagatacgtgagatagagatctatttagtaccctttgtttgggggtgtgctgctctgggaagtcacagttcctctccagcctatgtctgcttgtaacctcgatgtcaacattcgatcccaagcttatgttgctgtcagaccttagactcctcaagtcgctccttgcatcgcttaatcggtcgacaggttgctgaagagtactgtgaggttttatcatctgttttcttctcggagaggctacctctgtttgctgccttccgagttgccttttgcctggctctgattttggagttgtgggtcgagtctgtttctcgaacccgagcttttttggctgtgttcttgggcgtgacactgtggtgttggctcctactgacttggtcatgg

SEQ ID NO: 34406 - DNA, 519 bp, Arabidopsis thaliana columbia
tctcaggaaccctgtttcaatcaaagtttcattttttttaatcagcactatgaaatgtttctatccaaaatatcaaactaaaaaacaaaaactatttcaccaaatcacgtagttttacttaacaatagacttgataacaaaagaggttaggaatcttactgtaatccagaaatttcaatttgtgaaaagtcaaaattagttaaacaatctgaagtcgctgtcgccgtcgccttagaggtcttgtgtcccttaaccttcaccggaggcgaaagttccggtgaaggctgctttatagccatcactttgcaattgaaatttctcgctacatcgatcccacttattgcccatctacacatcacaaagacacacaaagtcacaaacattactcattcgtctatgtagggttcaaaatctttaataatgaccccgtatcgatcaaaatagttcctacctgtaaagaaagctgttctgatggagacaacgagaagcatcgaagcaccaatctctttgacaacttga

SEQ ID NO: 34407 - DNA, 521 bp, Arabidopsis thaliana columbia
  unsure (1)..(521): unsure at all n locations
tgaatcacaaggagagtccttgagagagtttttcaaagtcaagtggtggttaaagcttaagagttcagagttgtctagtctgtttcaagatccgaggaatcacaatcaaaagtcatctggttgacttttggattattagttgtccgattcatatttgtttatgcaactagttgcgtatttgttataatctttatatttgactagataacaaatctggtcagcaaaaaagggtttaaagtaatgatcttcttaaacagataattatacaacacataaaatttaaacaaactttgcaatattcaattcttacagaatgataaattttattggttttggttttgctctaaagaattacggtttaccgaatcaatcccatctgacaggatgttttgcctcacgattcttttgagtttattcattttaaagttaattatcggacattttagttaaatgaaggatttaataatcacaacgctaacaaatgaaacatggacaattanaaatagattaaaactaattgc

SEQ ID NO: 34408 - DNA, 519 bp, Arabidopsis thaliana columbia
cattccctagtttagtcgcgatctatatttcttaatgactaattttgagaaatcaaactaaattcttcaaagagcaagatttctaaattgtaaaagtaactcccgctcatcattatagtcctcgaactgttcgcgtgctcctttaaccaccaccacgatcgaccagagaactttgtcctttttacgatagtaataacataacatgagaaaataaacaaataacgcagtgtgatgtttacactttctgataacgttgtaaattaaataatagaagcttgaggagcgaggccgatataccaacagacagatcagtgttcttttgatagctatttgatacaaaaaatagagtttattgtactaactaaaagaattggtatatttttaatcttttatattcgcctttttttcattaacaagatatatacataaaaaaatagatatgtatatacataactattggctgtttttgtttactcaattgggcatagtggtatatcttagcatgtaagcattgtaaat

SEQ ID NO: 34409 - DNA, 399 bp, Arabidopsis thaliana columbia
tttaatgaactgaagtgttctaacttaagatccctatattttccatttgaaatttcgctccaccaataatcgaattaaggaaaacgtaaaaagcgattagtttattcgtcgattatgattaaacgaacaagttccaaaaatgcatatttagaatttctagtctattatggctttgggctataaccttacggaaattatcaatgtaagtttcgtcgaaataaaaatttcacttctctatatatcgtaaatacataaatctccaaacacatgtcttggatttttttaataatgtatatatatatatatagagaccccccccctccaagatttttttgaattttataaagagaaatatatattaagcataagagagaggaaggcatgtaggcatgggattgt

SEQ ID NO: 34410 - DNA, 503 bp, Arabidopsis thaliana columbia
tatcttatgctggaggaactagttccatttatttcctttgatctctggaatatatggatagctctgtagctaccaaaatttatcctccaagactgaaaaacagcgggatatgatttatttagccaaattttcgctatcctagttttgctgatgaaccaatggaaatcctggttgtctgtctaacatgcacgggtctcataccgtgttgtctgttgtgaaatgatggaatatatgagattaaaatggactttcaggtcgctacaattgcttggtttgaagctgacgctgtctgtggcagtcatcaaattgcaatcccattggttcttgtttcccctacatttgccgtcttttgcaatgtcttcgacaatacaaagatacaaaggaaaaatcatctctattaaatggtaaaagcctaaccttctagcattaatgttaaattttcccacactatgaagaaagatgttcttttcctaccatcaatcttatagttgatctgtgatttt

SEQ ID NO: 34411 - DNA, 542 bp, Arabidopsis thaliana columbia
cacggtggtttgctgcacttatcaacccatcacctaggcattaagccccacatgcattagttatttatcctgatgctctccctccccctgctccaacaacaggccccagtgtgttgttcccctctggatataagtttcttgaatgacagttttttcgtttgaccaatttgaatatgtcatcccattcccttctggcctccattgtttctgatgagctgttaatcttgtaagagttccatgtatgtgacaagtcatttttctcttattgctttcaagattttctttttgttttttgccttgtagcgtgtttcagcatgtttactatgatgcatctggttgtagatatttttccatttatcttctcggagttcatggagcttcttggatgtgtaattaatgtttttcataaaatttgggaagttttcagtcattatttcttcaaatatttttctcctttcttctctaactctcctctccttctgctaatcctattatgtatatgttggtgcacttaattgtgtccatgtttctctgagacttta

SEQ ID NO: 34412 - DNA, 316 bp, Arabidopsis thaliana columbia
actacgataaggctagatactcagaaaaacagacatatatatatatataaagtgagttccagtatactgaaatcatgtgagatgagttttcatgaggcgactgagaaacatgaaagtgtcacgttatcacgttagatgatgcattaacggcatattctagcataacagtaaacatcactcaagctaccttcgaatatcggatggaagtacatggaccagaattttgacgacaatgatgaaccaatccgaataaagtgtctgcggaatgaccactatactaaactggtgctacggtagaatgtctttgcacccgata

SEQ ID NO: 34413 - DNA, 650 bp, Arabidopsis thaliana columbia
agcaactccaacaaaaaaaaaaagttgactagaatagctcttaaaagttgaaaatgacctttaagtattttgttgatgccattgtgaattaaaatgaggaagaataattgaaactaaaaaaggaaaataaagataaaccatgagtcttagttcttgttgtctcttctggttagactctgtttttcttcgtggtggtgtccgcctggttctcggttagcctctctaccttgctggttttgagcagaggcaaacccttatcaaagtttcgttatgagttcaaatgttctgttggttcaatgagtttatcttctcggatttagttcgtgtgtatgctcactctcggttcatggtgttgggtgcgtttggtttgtccgggatattccttgattcttagattaaagtgctcataaatttgagtttatagataaaaatgatatcatattctctaatgagagctaaaatgtttatttaattcaaatcatacgatatgtatgaagctaaaatttataatttaattctctacagttaaaattaaaaaaaaaatacaataaaacgagacttatgctatttatatcgtttttagaacattgatcttatataaataatagagataagttgaagactatgcagtttttggtaaaataatttga

SEQ ID NO: 34414 - DNA, 448 bp, Arabidopsis thaliana columbia
tcaaagtcagcgtctaacaataacatatcagccaaaacaagtacgttggaaaaaacacatcaaaacttctcaactaatatgatgaatatatacataatatagtcttcttttaacatgtctaattttagataaattaaacatcgcatgatttcaaaatctaaaattaaaataaaagacattaaataagcatataaactggagtctataaattttataaacatgttatttacacattaataaaaacatttttgcataaaatccaaaactagtttaagaacagttagaaattgttctgaatacagattttaaaaagatgccacctgaaatattcaaaggccataaaatattactatttgtataaagaaaacgcgaagtcgaaatcaattagtcgaacatacttggtcaataaatgcgtattgcttacacacgcacgcacacacaactatat

SEQ ID NO: 34415 - DNA, 627 bp, Arabidopsis thaliana columbia
cctgaatttttagctgaatcgattttgttttcgttaccagaggataatttcttcggtcctgtgtcttcccattttattaatcctggaagattgttggatactcctatctctgaagaacaccatgaaatgacgatggattctacggcgttttcgatgcattttcggagtcttgctaggtcagagtctggagatgtaaggacccctacgagtagccatcttctagtagaagagaaaacaccaactgaggttacttccagatctgatacaggaagtgcaatggtgttaacagaacctaagaagctatttccaaaatcacctgtaccagttgataaaggaagtggtggtagagactcgaatgatatgagtatcgtcggtgaaaattctcggagatatgattacgggtatctatctcctacactagcagctctaatgggagatgaaagcaaggaattgcttcctgaagacaatactgtggaagcaagatcacctatcgatgatttttcctcgtcccttccaaatggatgcattcccataggtctgcaggaatcaggaagccaacgttacacaaaagaggcttccctttcctcgtcaactattagaaggcaaagtgcgtttttagttggtatg

SEQ ID NO: 34416 - DNA, 336 bp, Arabidopsis thaliana columbia
gtgacaataaataacaatacccggcggcgcttccggttagctagccagcatgttggcgtcaacggagagtgcataagtgaaacgccaacctgagattgttgatcagagcactcggaaatgagacggtcgtgcggcgatggtgcaagcttgacacttactctgtcgaggggccgcttagcctcgccgcatctaacatcgtgcggtcccgttgctcgttacgagggagagttagcctgggcgacatgaaagcccgcttacgacgacagtccagctaaaagcggtctgcaagtggggttcatgatggaattccaagggatttgaggcgcagagctggtg

SEQ ID NO: 34417 - DNA, 137 bp, Arabidopsis thaliana columbia
ggttttctaggctcatcaattaccatgatgagtatgatgagggactagatagcatatataccttgagataagttatactcattagaataattcttacgtagacaataaacgactcgtaacgtgtaagtcacccagag

SEQ ID NO: 34418 - DNA, 509 bp, Arabidopsis thaliana columbia
caagcaaaaaaaaacttttcaaagtttaaagttcaaaatgggaaagagaagtgcggtgtaagcaaatatgaaagaggaagagatgcgaaaagtgtatcctaggaccagcattttatacaaaaaaaaaacactcacttttcagctcttaaggcatagagtgaaggtagccatatgaatttggccactagagcgtccgtcaaatctcattctttttggaccacataatgggtatcatacattcactggacccaaaagcgtaactggagctagtcctcaaacctagagagtatcgtatcctgtagcttccacatagtaaacattatgagcataacaccaacaaggcaactccaagtactaatggttattaggtcaggaaaacccacgatgctaaacacatgaatgggtcccaaatagagtgaagatggttaaattgcatctatggatcatgtggactagtaaatgagtgtagcagaaaacttcacaattacgtgtgtgatcttagaaacatg

SEQ ID NO: 34419 - DNA, 459 bp, Arabidopsis thaliana columbia
ccccttctcttacctcttgactattttgacttacttcgttgagtttagtctgcaactcttcgattctgttcttcaaatctttttccttttcgatgaaaatctttgaagaggcctctaaagcattttcctttagtttgatttgtccctggattaccaaaatttggcatcaacatcaaaacaattagccaaatactgaatgttctagtgttagacacattacctcaagctgtttgattctatcttcattgcttctttgctcggtttttgttatgttgtcagctgacgcttctctgttctctagatttgccatttcttcttctttcttctccagctcgcttctcacttgtacaacttgctttctgagattctcgatctctgattcattgttggataaagaatgcttgagattatcacatggcgctattgcggtctctagttgtgattttaaagcggtaatga

SEQ ID NO: 34420 - DNA, 514 bp, Arabidopsis thaliana columbia
cgtccatgtaatgaagcttcttcttcaactccacaatctgagagtaatggtacggctagtagtgggaatatcacagatggcattcaatcaggctcttcagactgtaggtctgctattaagtcagaggttttctcatccagtgatgcttatatgctgatgtatagtcttagatgcgataaacaggaaaatcaggaaggacaaaaagaaaatcctattgacattactaaaggagaagttaaacagcttaaaggtggttatcttccaaaacatctttctgaatggatcaataacatgaatgcagtattccttgagagttgcaagcaatataatttaagaaaggaaaaagaattgaatgctttgactgaaaggaggcaagaagtacggacaatcctttcagaagctgctgttcagtcacttgaagaacaatatttttggatctccacagattggcttcgtctatgggctgatccactttactccgtaagtaaacacctcatacatgcatttgttgtta

SEQ ID NO: 34421 - DNA, 279 bp, Arabidopsis thaliana columbia
gtaaatattctataaattaatattaattaatttatcttgcttcttagaatttacggactctttgtttcaagctgatacaggaaaccagcaacaaaggcttacaactttgctttgtaaagatttacaagtataaatagaattcagttgcagtaaaaaaaaaatattaataaatttatagattaaattaatattactataaattcatcagggttcattgtccaagtattattaatttatagagttctacaccttttttattttgtgttaggaaactcgata

SEQ ID NO: 34422 - DNA, 630 bp, Arabidopsis thaliana columbia
tacaactataattttgaaagttaaaacaatcatgcaatatgagctgctttcagttaaaatttaaccaatctataacttacttttggcgaccattgttaaaacaaatcgagagaataatattttttttcttggacttatgttagtatgggtaatctcatgggataagataattagttatttaattagtctagtttggtactttggttaaaactaaaacatagagtagtaattaaaaaattagttggggattagttcaaagtttgaccggaaggtttggagtgcacgtgagacgtgagcgcgtgatgtaatgttttgagattcagtcataacggaatttagacagcgaaggactctgacaaatcacagttccatattctactgtgtatgtattaataatatttacttcttatctcaaataataaaaattagttggggattagtatccatttttccatattatttctttctctttttttttgtatatgtgaaatgaaaaaggttatcttgcctaggcctataatttaatttgtagaaataaattaaaatataaaactataactattgttgtagaacatataatataaagtattttaccagaaatacatcaatataaagaaaaataggtgagat

SEQ ID NO: 34423 - DNA, 474 bp, Arabidopsis thaliana columbia
tgtcgaatgttaccagacttctccaacgaggtcatcaattcaccatagtcaccatcggatgttgtaagtaacatcgtgccttttctacaagtctcagcccatgccttaatctgggttatgatctcctcatcagctacttgtttctcttctggctttcccatagagtttattacaactccctcattcgtaagcttttgccaaaggcttttgataatcttttaggaatgttatgagatctaaaatgggggccacaaaattttcagtaaactccctgggaggcttcaggcctttgatgtatatcactgaatagagctccactgctttatcatacgcagaagccgccatctcttgctcagttgctctctcccttatcttctctctccgttctcactttttcgcgttttctgaaaaagaaaagtttttgacctagtttggatttatgctgagaataatggggcctcgcactaaactatt

SEQ ID NO: 34424 - DNA, 543 bp, Arabidopsis thaliana columbia
caaaataagagaaaattatttttgatacaattaattatgtaaacttttataaaatatacaaataaataataaattaaaataaaccattaacttaccttaattattaagtggacatgtagcaaaagctaagtgatgatgtgtcattcatataaagagagtttgccaactttcatatatatgaatatagtggttaaaattgtatgactctataactttaagaccatgaggccaaacttggcatgtgatacattttcgcaacgcccaaagggagccctccgactaaataaggaacaatgggttgaggtacatttttatttcttactccaaattttgacctttaggtgctttttcgggtctgtctgtgatctgtgctatattacaagtccaaaattatttgtatcggcattctttttgaataattttcatatttcaaagctcgtgaaaactagatggggtatccctcattgcagatgggcccacgctgaatggtccaagagtctcaaagaaggataacacgattgcattttatgactaatggatgtg

SEQ ID NO: 34425 - DNA, 385 bp, Arabidopsis thaliana columbia
  unsure (1)..(385): unsure at all n locations
gtggaatgccttttcggcttggcactctgggtagtgattcagggatggtatgggcatattggacgaggaatgactgccagttcggttgctgggactttttgtcggaaaatttttatggcgagttctcaggtgatcggttttgttgggtctttgggagttcttctcagtagttattggacaaaaactggtcgctagtcgaggagaatgggattgcattgcgtgcgctgagattagttgctcgcggtgttagggcgctcgngctataaaactgtcggagtcttcttagtagttatctcgataaaacattggtcagtggatgacaagaacgggcgtgttatgtctgggctgcgatgcattgtttgagccgtaggcctgccggtatata

SEQ ID NO: 34426 - DNA, 572 bp, Arabidopsis thaliana columbia
atctgcaaaggagcgtgaaaaaaattatagcagagattggagagttttcgaaaagcaaaaattaccatttaactgcgaggaagtcaagtaacactcaccagaaaacttttcacacccgctgtctgaaaaattacatctattgaggttcaaatacatcaaccctgcaagagctataaaaccaaaagaaaaaactcatatgagttcatctcgaaggtgtcattacatgtacagtccaaaacataccatgaggatgtctatacaaacctgtgagtgtgtccaagcatgcagcagtaacatgacggcacccctccaagttcaataaattaagcttgtttagccctgaagcaagcaagtggaagaagtgaatcacgcttcgtgtacaacgtaagatgtgagacaaatggtgataaaaggagtatgataatcaaaacccctagctttaaggtagctaataccgatatcggtaatcttactgcagcaaatctgtaagctcctcagatttgtaagtactgaagcaaataggagtaacacatctacttgggaaagtaataaacatgtgaaggagcgtatat

SEQ ID NO: 34427 - DNA, 366 bp, Arabidopsis thaliana columbia
  unsure (1)..(366): unsure at all n locations
aagactcagatatgctagctgaggagcattaatgctaacgctccagtcgttgatatgatcactacaccaactgctggcactattacgacngagtttgagactgttaagtgacntagagngnanacctaacatctcctnggtgatacacatatanaaccctaataaacgttaaatcttcaacacttgggcatcatcagatgaagttctcnagactctcaagagaatactatatcttgtgttgtagatggctcaggttgcgacttggcaaagatagacaattcgtaacgctgtacgcgtnacaaaatgaactctgaatgaaantaaagtgtgagttaactaaagggttacctagantgcgtcaaaatg

SEQ ID NO: 34428 - DNA, 300 bp, Arabidopsis thaliana columbia
ggaattaaacccatgacgatgttggaggtttctgattcgggttgcagaaaattttggattttgagattgcgaagaagaaagggagatagcttgcgaattgtgattgggcgagttatgaatttgggtttatgtagagagcgatttatacggtccgatttgccaaatgtgaccgttgaggctttacagaattgaagtacagatcaccgatagagtgagtcgtagttgtatgtgtcacggctagtgttttctgctaaacccttgttccatagcgagactggcaggcccaatggcgcaagttgc

SEQ ID NO: 34429 - DNA, 554 bp, Arabidopsis thaliana columbia
tgctgtgttgtgtatctttgatcaaattctacagttattaccagtttatctcgtttgcaaagaagaactttcaatgcagtttcggatagtgatgttgctttagaaagaagagacgtctgtagctcctcaagatttggattagagttatgagcagaagcaggagttgaattaagcttatgaatgctattaagtctgtcaggaacagctttcttcctctggagacctctttctttaagttcctttgggtcagacgcaacctgcatttacaaaagggtgataaaggatacttgaagattgaattgagaatatataattgttagtgtagatttcagatttcacctcgaaaccacctttctctccattcgaatagttatccttacaagggctcatttcattacctacattcttagccttcaacgcaactactgtctccgagtgaacattaggttccttcgcaccactcatacttccttttaagtaccgattttgcaactcgtcgtagctttcctctagctcaggatgctcagtagacggcacttttttggctgcaattt

SEQ ID NO: 34430 - DNA, 498 bp, Arabidopsis thaliana columbia
tttcagacacattttcgtatagagaagccatagtataaactggttagagctttgacagagcttacctgaactgataaagctagtaaacagtatccgctgcatccagttccaattacaatcgacaggtacatgagttcacgcttcagctacaaaaataaagacacaaacgcagcaatttcaaagttcattctacacaaattgactactggtacatactgaacagccattttgcataatagagtgttttgttgaatcataaagatctgactggcagactaattaagaaaacatactgaaaggaataatcatacagcttcatatttcagaaagttaaacttcttccttctctcgctgtcatctcgtagtgcctgcaatcaaggaagtaggacaaacgcagcagagttttgcaatgagaaggacgtgtgaatgaatgaatacagagaacaagaacattcataaatagatgaccaaccttagctagagctttcttattcatgg

SEQ ID NO: 34431 - DNA, 490 bp, Arabidopsis thaliana columbia
agatcagagtcacgtatatccgaactaaggaaaaggattcattcggttgcagataggcaattcaggcttccacagcaccattaagactccaggtgcggtaagtgaaactgtaacttgacacgcaaaggctcggaccccgacgcgtatgccaacacgggcatctaatcggacgtgaaccagcatcgcaagcatccgcaccacgatgagacgcaatgacccgcccaacagccagaatcaagatcaggcaccacagcacctccgactggggaacctgcgaacagtctcccacacacgcatttaagcactacacggaagacacagaggcagcgagaagcagcgccgacgcgcgccatgatgacgaggcatgactgaagtgaacgtcgccaccagggagcgtcaaatacggcagcaccactacgaggaatagcacagagtcatattgatcaacgcacaatcacaatgttgatagaggtaggacgactctacgatg

SEQ ID NO: 34432 - DNA, 606 bp, Arabidopsis thaliana columbia
tcctaaaattaaagaacagaatataacaaaatcaaagattccaaattatataatcgaaagaaaccacaatttaaaattcttgaaacgttgacaataaacgttataatcactcaccagactttcgttttaaacaatatgagtttatgcatctgcagcaccgttgcctgtaaataaaggacaacgcgataagtgtagcaatcaagccacgtttgttgactttgaaacgcgtaagatacgcgagacaagctaagtaagtacatatcaaatacaaaagataaccacttggtcttataaaatagtcctctctacggatccatactttattattgtatttaccgtacagatcatcatcatcatctcccacctttttttttggtatgaaattcatttcccacttttcaaagccaagttgatgttgctcgttaaagctaatagaatgatccataatatatatttagaagttatttgtattgccgtacgagaatgtaactctggtacgtagaagcgtatcaagttgattatcatttcttctcatcttacaaaatattattttagtaatatgtattttaatctattttttcttgtagattttttttattacattta

SEQ ID NO: 34433 - DNA, 484 bp, Arabidopsis thaliana columbia
taaaggtttggtataatcgtatacgtcttgataaaaaggaacccaccaaacataaattggaatgttgtactttaatttaatgatgtataaatgagcttattgacgtagatacgttgagattacgagaatccgcactcatattaactactgtactagtgtcattcattctttgtcaactaatagattatgacagtgattctctagctaatcagacgattggcttgaatctgtttcatgtcacagcttcttcactatataatatacatagtaaatatttgttgtcagaagtatataatgatgaataatttggttcttattaaattataaaacataaaaataaataaaaattggttcttatacgactttctttccttgggctaaaagcctaaaacccaaagatttttaactcaaattgaggaactgctatagtaggaccacatgtgcccatattgatttcggcatcgaagaaaaacaaaaaattggg

SEQ ID NO: 34434 - DNA, 499 bp, Arabidopsis thaliana columbia
ggccagtatcaaagagacgcattaccatttacagataaacagacagcctaaaacattactgtggcaaatcaagtcatttcattttctacaagaacggatctagctagcatacactaagactcattgataaatatgtaatcatgctaaagaccctagctttaccagcccaatgtggtagtagctagacagggacaaacgtttaatgtcacacacattcacatgtaacatgcacacaaatcagaacccattttcccaaaagcatcagaaagacacgagaaagagacagtagagacaataaaagagagaccttcatcgcaaccaggtgtgcattcgcaggtgatttcaaggtcaccggctggggaacaccctaagtctagcaacagcatcgccgtatcggtgactggtacaagcacacatgacctcagcgtaatcgccaccaacattgtaccccactcatctcttgtagctcctcttgcttaaacagcatggacgcacattg

SEQ ID NO: 34435 - DNA, 597 bp, Arabidopsis thaliana columbia
tgacgatgaattatattggcgggatttagcaatgaaggtcaagttaaggaggaagttcaaacatatagcagaagcgaaaacgggaataaagaagacgatggagagagtaagaaaaacaacaatcattgggcagataaagacgcacttgcagattctatcagaagctttgcagttctgcaggaagttctttggaaaggtttgcacacgaaccttgatttttgatatccatgtgaattgtttcaatgttcatgtcctaaagctcccatgtttatattatcaatgttacatgatatttctaaactaactatgcgattgaaacgtgtgcagaggttcaaagtttccaggagctaggtaaggaatctgtactactacattcgaacaccgatgaattgagttcagaccagccaagtcatcaaaattgtaaagaagataactcaacatcctcaggatcaaaggcactgatcttgaaggagaaggtaaaacttctggaacacaaactcgaggaagcgagactgctctcgaggcaaaggaagctaggatccaagaactcgaaaactcatagattgaatctgaacttgaatgcatcttccagagaaa

SEQ ID NO: 34436 - DNA, 713 bp, Arabidopsis thaliana columbia
atttctacaacgagatagctctataaacatcatattctagttatttcaattgctcgatgtatgaggatgtaaatcattacttacagaagaatgatttatagatttatacacaaagttatcgttgaagaaagaatgatgtaaataagtaaaagaagatggtcctagagcatcttgtcatgggcaatatgaaaacccacatcttcgtcaggtatgttgtgttgttcgaagttacatttttttgcatcctgatatattatttctatactagcttatggatgtgtattagttacatatttaacaccctcatttctgtgtatttaattttcatatgaactttaacaagcttttaaaaatgaccaaattcaatcttggtttggtgactgtgacaaatgtaaaccataatatcttttgacagatatcttaccatcttatctctttaaatttggacaacattttatccaaaactaggcaaaatctagtaacaccaaatattagcttggaaacttcaacaaacaagacacaacactgtaattatctcaacgccatggaccttcttcacggcctggttctttattaatacaatagtaaagtaatggttgctactacttggtatctattttcatatcataacttattttcactttgatactttttgacaagaggagtttatgtttactgattccctgaaatgggagcatcacggactctcttga

SEQ ID NO: 34437 - DNA, 494 bp, Arabidopsis thaliana columbia
gtcacactgaaagaaggatctttcatatttccaaaaagatctaccattttaaaatgagtcttttaaaaaatgatgcatctatctttgcataaacctaagaagaagtccaacattaggtgagtttgaatcaaagtaattctaagttatgcaatttactagaagtaatcagcagcatatgaattaagtactaataaaaaatagtttaattaacaatatatatcccaccccactatatgttgattgacacggatcattttaaaaacatttgtgaactgtcttatagagtaaacgtccatttcaaaagagttggatatgcacattaattatataatgcttgaatgttgatcatgctcttatgacatgtttttaagtctccacataagaaccatgcaattttccatgaattaataactaaacgtcgttagtccgactagaaaaataccatggataatccaaacatgcatagttcaataagtgtgtagacgtgaagatgt

SEQ ID NO: 34438 - DNA, 729 bp, Arabidopsis thaliana columbia
tagtaacggaccgccagtgtgctctaaagtcatcgagtaataactcaaaggcgacgtttttgggggtcggacttttggtcggggacggctcttggaggggacggtggtcggtgtaggtcggagactccccaggagatacaagctgttcattctggacagcctgcatgatgaaaatagtccaacagggagtgtcaccgcacttctactacatggattataggatcaaccggctgttcgttggtcgagaggacaagtcgagggtggggaggttcaaggtagagggagacggcaggaatagggtatgggcagaatccatccaaacctaccacaacaggaaatttagagcggtctggttgatagatggatcacccgcgattattttgaagcaacgattgatggccgaaggtgggcggtggtgtgagggcgatctaagtcgcaagtgccgagagcgtgggagggaaaaataggacgaggacgagagaactagacagaaaggagccacaagcgtcagtatggagagtctcaggagattttactaagctcgatagcctgcaagaaagatatcagatgggatttgagatgtcgattcccatccgtcggatcctgacgagttgcagacgttgcaggttgagggggaagaggaagaaacgatccgaaacgctcggaagacgatggggagcacgaaagacacacctaattctgatccagagtcttcctccagagctttaa

SEQ ID NO: 34439 - DNA, 493 bp, Arabidopsis thaliana columbia
gggtaccgagctgtgtcgtcatgccataaaagctgtttttgcaatcggtaaggagcttcatgaatttgatgatgaagtgtatgtaactgcagcttggagatcattattcaaagaaacaattaatccaatagttattcctgaaaataagtgacgtgtcctaaaacatgtcgaaaatgctaaagtcctaccacttgaaacacgaagaggccctggtcgacgaagaaaattaacgaagacacgaaacagtggaagacaatatacgatcatcaaacagatcacaagggtctaagaggcataggtgtggttgttgtggtcaagaaggacacaatagaacaacatgtaatatagcaatataataatggtttgttcaataattctaattctcacatgaagtagtgttaattggtatttcattatcattaaattcactgtgtgattttttgttttttcaggattgttttgaatgtatgatcgttgggacaagaagactata

SEQ ID NO: 34440 - DNA, 633 bp, Arabidopsis thaliana columbia
tcaatagtcacatcaatttattaggagtactttttgttttgttcctaaacaacaaaaagattgttatgagtttaagcctatgtgtaaattatggaccttgatgtactattgcacacagtggcaggccaataaagacttcctcttaaaggcaaccaatgatatcatcatggtaaaaaagatcttaaatttgaaacaaattttcagattgaacttcaaacactaaactaggaaaactgatctttagttttcatattactatcaattatttcttgaatctaaatcaaacaaactaatgaaaatgtttttaatacttatctatgtaaatctctttttctttctttcccaaactttaatttttatttttctgagctagcacatcaacgtaatcatgcacttattccaccagagaaacgtacaagaacacagtggtccatctcccgactttacttcaccttttaaaccttcaatttcgtcaacaatatcatcaagtcccattcctcaaacattgcttaacctattagagttccttcctcaacaaaccatctttataagactcaaaatggagggtaagagacacaaggacaaggttacatgaaaaagaagccttaccttgtggaagaagatatggagcct

SEQ ID NO: 34441 - DNA, 350 bp, Arabidopsis thaliana columbia
catcaagttgatctttcaaaggtcactgcatacttcagatcaactgatcagacacaagtgcctagccatcccccatgcctgccaattctcgaggaacacatgttgataccaacgaagtttgcgagaaaacacgataacaactccgaaaattgttaagagaagtgtggttgcctacatgaatgcattacacaatacaacatgaaaacatacgactgtttcgtttgtgttgaacagagtcaaaaacagtgggacgggaagcacatcagcggacttctggtgttgagagaagtcatccagatgaatgcactcacctgcattcatcattgtaccaatctgcaatgcattttgca

SEQ ID NO: 34442 - DNA, 592 bp, Arabidopsis thaliana columbia
ttttgtcgacgatcaggatttcatccaaaatttttcactttcacagtatgagtttgaaacacaattgttttgtctcttaagttaaaaacctttgaatttagcttcccgcgatttattagtgggctgtgaaggcccaaaagaagcccataaaatgagtcggccggatacgatgtatacatgatcgtcatcgactgaaacctaaaaagccctcctagacgacgataataatgttgatcggaggatttgaggataaggacgcagctgatattataattccggcctctgagaaactactggagaaaatgcggtgtatgtaattccttctttcaatcttccaaaattattagaattgtgatttgttcgcagagtctttgattaattttttgcatctgctgctaattaggttttcgatctaaagggttatacgcttggactacaagctagaacctgtaataaatggtctccttgtcctgtcttagtcttactctatgctactctgggccttcatcgttacaatttgcttcaggtcagaaaatatatatgattcatgttcaattgacaataatgaacacacatattttgacattcagtt

SEQ ID NO: 34443 - DNA, 611 bp, Arabidopsis thaliana columbia
  unsure (1)..(611): unsure at all n locations
cagtagtgggagttttcctaacccagaatgtcgcagacattcatcaaggtatatgcattcaagagatttctaataagtagaagatataggcaacagagtggtttagaaattataacttgttcacttttgctgttctgcatatatggatttagctgctgagtttcctgtcgagtggaacttcaacaagggatcatgtcatgaagagtggggaagttcagtaactcaagaaacaatactgaatttggatccaagaactggagtttcaactccaagaattcgcaatccaactcgcgtcatcatagaggagattgatgatgatgagaacgacattgatgctgtttgtagtcaggaatcctctaaaacaagtgacagttccataacttctgcagaccaatcaaaaacgatgctgctggatccatttaacacagttttgatgaacgagcaagttgatcccaaatggtaaaaggcaaaggtcatataccatacacggatgatcttaatgacttgtcccaggggatttcgatggtctcatctgcttctactcattgtgagttgaantaaatgaagtccacctgaagtagagttgtgcagcgatcacaagacccggagag

SEQ ID NO: 34444 - DNA, 981 bp, Arabidopsis thaliana columbia
ggatctccggctaatgtctagtgaaggatagtcacattacatcttgttccacatatcaatcaccataaaacttagctatatgtatgcatgttatatgttcctcttatgagcgatgtaccgcgtaagatcctgacttgataagtgaggttcagtgagctcggtgctcatgctgtacaatgtcgtttgctatcagacttatgcatcagtttcatctctgtattatcaacaacacgtgtcttaaaaaatcttccaagatcatattcttgatttaacaaaatagatcacatactgaaaatgagacgagtgttttgaggcccaactagtcataccttaagaagaagcaattgactttagtaatctttacgtctcagaaacagatcacattaaagaatctggaaagagtaagaagcaacttaactagtatgacaggtgaagattgcaaatgtaaaacttaaagttgtatgaaagttttcaaacattgcagaatctttcataaatgaaacaaaacaagaaagctatgctaaacctttgaatcggtttctgaagaaaagagtttaacgtacttgtaaactctgcgtaaggagctagatgcttgtctttccactaccaccacatatcatacaagatctcgtggaagaacatttagtgcaatagctccatttcttgggaagcctaagaatgtgtgtttatcgacaatcaatgaacgaatatcgatgagattggagcgaaagaacaccgagggagttaattaattacccggctgtatatcgcgtggccatgtttttagctgcaagtcttgctttctcagcatttgcatctgatagtttctttaatacaaatccttcacctttgcattcaggacatattcctgaaccgagacaagcttcacattctttcatagaagcctgtaattcagttcacagaggaaaacaagcaatgcagatatcagtaaaacctagagaaactggcatagatcatata

SEQ ID NO: 34445 - DNA, 607 bp, Arabidopsis thaliana columbia
ttcaatcttcattatgacaattcaatggaacaattttttggtcgaattaaatcacataagttattcagggccatactaaatcactttcatctttatcgactgttatacttttggttaaatgcgatcaatgtaaaaaaaatacatatgtaggtaccaataagacacaactgttcatgaagagagcacagaacgcctggaaaggaaccctaagtttaatacacgagaaagaactatcgaaaatggtattttaaaatctgctattccctattcactatatccaatcattcaataaaacgaatcaaaagatgttaagaaaatcaaaaagaaaatgtaagaaactcggtaagcagatgaatcgaccggagagatctaaatccctctcgcgaccaccggccagatagcttcttattcaatctagctacagccgtttttttggcaaattcaagagtaaaggtatcgaaatcgagcccttctctcggtacaatgtagccccaatttaaaaaaaaaaaaactaatctgattcaaaaaattgatgttgaaaccctaaacctaggcgtcgtaatgaaagagatgatgtagctgaaaggttgaagcgatgtttatatag

SEQ ID NO: 34446 - DNA, 322 bp, Arabidopsis thaliana columbia
atacatacatataaaaaacaagaccagacaccattatattgaagcaaacaatggagcatcctttgtatgcaatccttcaaagaacaccaagagttgcaattacattagcatttatactatttgtactcacaataattcctgctttatatactctccttgccgatccaatctatcctccatcaatctcatctttcgagactgatcatacgcgtctcagtcatttgaattcttcatcaaatcagattccttcacccgtgaatggttccattcccacgccaccctgccatacgccttcaaaacgtcggaagtcttctttccatcg

SEQ ID NO: 34447 - DNA, 571 bp, Arabidopsis thaliana columbia
gggataaaatagtgtggtgttattttatttagtaaattatacttggttaatcaaatttgctgtttgttttcaaattcaatatcagaatatgaattttgatttaatttttactcgtttttaatagcatgtaaaaatgtaatgtagaattcagtttacccttaaaagttacaagagtggagcaaaagaaatggcagccatttaatggcagataaagattttgtctctgaaacctcttttgtcaattcataacccaacgtggacccaaacttctgaaacctctttgaaaataattgggcactggtgaccagtccgccaataattctacaagttttgttccttttcgtatcgttacttacatatacaaattatttacatttttgttattaatctatgcattgcacagtcttatttctttcgctggattcgctattctctgttctgtaatatgcggtgcatttaattttacagattttccccataatcaagagatgctacattcaccttcctacccgctatcgttttacacgtaaaacacgtaaacataggaaatatctgagggtaataagtaatg

SEQ ID NO: 34448 - DNA, 503 bp, Arabidopsis thaliana columbia
agctaaccgtaaattcagatataaaccaaacgaagggaacagagagtttacacagctacgggtctgttttttgtgacaagtgtttgatacaaatttaagacgaaactaaaatgggatttagaaaccttgtacaactctaggactgttaactttacgttttcactttcttacattaactagattggaacagtgtgctctctcactcttaaccataagcttgtatttgtttgcttgccaacggattaggcgaggttagcttgttgtcccttcagtttgctcgccgggaagtgcaatcttgcaatcaaaggcttcggtcccctcgtctttcgatcaaatccacgtacacatacgtaccctacataatatcaaaagataagttatgtttcagaacaagaagaaactgcttaatacaaaatgtacctttccaaaagcaagcctgtatcttctcagttgataaacctgagaaaaatagagctcaagtggttagaacaactttcttttat

SEQ ID NO: 34449 - DNA, 296 bp, Arabidopsis thaliana columbia
atcatggcgcggatctcctcgcgttccgaggcgagcatgttgacgccctcgatgatgaggttgaagaaccgcggctgcccggtcttgtccgagacgtgccattccacctgcatcgggctgcggccgttcagataggcggtcgagccgaccgaccagaacgacttgacctgccgggcacccccgacctcgatcctggagccgatgaactcgcggaaccgcttgccgtatttgcgcgaaatatagcccgacatggcggtgcggaactgggcgaaggtcgcatggtccacctctcgcgc

SEQ ID NO: 34450 - DNA, 393 bp, Arabidopsis thaliana columbia
  unsure (1)..(393): unsure at all n locations
ttaccatacaagatttctttccatttttcccactcacgaaaattacaacataaattatcttattttatcttctcgctcagaaacaacataaactacttattatctattattaataagactactgtgactcaaatattggattagttgagnttcgattcagnatantcaatagcatcattgttattattccactttatacgcttagttctgggaaatggggctaatctgggataaactcgaggatttctcattcaaacttctgtcctttgtccgtaacataaccctacattgctgagtgttacttggaaacttgagccaacccaaaagggatactaacttaccgaggcaggcttcaacantgataacgaactttttccaccaacacaaaaagtc

SEQ ID NO: 34451 - DNA, 549 bp, Arabidopsis thaliana columbia
cctgtttttttacctagctagcaaacataattctgttcaactaagtactaacggtttagaccatctctaatgtaaatctctattttttcttctaaaatagagtaactctaaaatagaacataattctctccgatatatcactatatgttactctaaaatataaaatagtgtaaaaaaatagagttactctatatatatagagcaatcatattatttactctattttagagcaggcgcgactctaggggtgtgtcagaggtgccaatacagagggtcctcatatttatttcttaatttttgtgttatagtaataggtttagaagaagaatacaataaatatatgtcacataagattattttgtttagatttaagggtttaaagatggtcattttttttgtagcacagggcccaataaaatattgagccggacctgttttagagtaacatatagagtgagattggagaaaatttattctaaaatagagtggatttggagatgctggtagaggaactctattttagaagtcttactagttagaaatatttta

SEQ ID NO: 34452 - DNA, 630 bp, Arabidopsis thaliana columbia
atgcttctcttctctgtatttggctcgctttatcatctctatttatttcttctgtcttttcccctctttgcgaattatgtagcaattgcctcttagttcctttttcagatcatctatcctcttatttcactttttgggttttcaggtttaggcctcgagcccattcggatattttacatattcgagtcgagttcggtttgcttcggatccgaatccgaaactataagtaaaaaacaatcaaaaaatatttgaaagtaactaaactatccgaaaactaggttaaaatctaccataaatccctaaaaatattcgaaaatatatgaattagctggaggtccactagttcgggttcggttcatatattacccaaacccgaaataccatatcaccaagatccattagggtatttctcaataaaagttcggatcaggatcagattttttggttcgagttttaggtttttgccaggccgatccagaaccttatcacggtttagtttcaggtttggggttttggtttaatgatataattagttcgacttctaagtgtatgtacggacagatttacgtagctttatatttttatttaatatattttcgatattgttaaatattttggttataatttagt

SEQ ID NO: 34453 - DNA, 491 bp, Arabidopsis thaliana columbia
gaaagaacttggcttaattaactcttccttgtctttcatttcttttaatgcttttgtttctctaaacgctgcctcctagttattggtttcgtggatatcctctacctgagaaggcaatgatataacatcttaaaagaacacacgccaacagtgtctaattatccaactctagtctgcttactcaaacacgctgtttccacatttgcaagttaaaaaaagaattttgataataaaaaaaagcaggttttaacttacctaagttgatttgcaggtttcaacatgccaccggacctccgccaagccaagggttcagaaacacccaatgtgaatcatgtttcctatttactctatttcatcaaagtcaaaaaagcaggtttttaagctcttcaataaaggaatggtgactatacttgatcaattattaaccaaccttgcaggagaaacaatatctcatatcgcctggatattgaccttgcgcttgaagaagacag

SEQ ID NO: 34454 - DNA, 519 bp, Arabidopsis thaliana columbia
tctatttgcagtttggcactttagctcgtatgcttcagtcagccccacctccaaaatttgttaaagtcaccatgtctaagagggttcctttggctggggaagagttaattgcatatgaggaagagcaaaacagactgaaaagggaagaagctttgcgagctagcctcgttaaagaggaggaaacaaaagcttcccatggatccgatgataattcaagtgaacctatgatcatagataccaagactactcacgatggtaaattttttcttattttatataacattttattacccttgaatattctgtggcctgtaacttcttatttttcatgtaaactttaacttaattgaagtatctagtactgaaaatggctatgcacatagtaccctctgtaatgtactggttagttggttttaggaggcatttatgtggttatcttgagtgacctagaagctacatttagaagtctcacaatacatttctgggtaatttgtttagttttcacagtccacaatatgt

SEQ ID NO: 34455 - DNA, 871 bp, Arabidopsis thaliana columbia
tattttaaatgaaataaccgaatggatactaaattttaaaatcgaaaccgaacagaactttcaaataaccgaatggatactaaactttaaaaccgaaaaaatcgataacggaatggataactgaacgccgagaactactattatatacaaagtatttagttattcaataaaatttgaaaccaatcgttttttttcaaaattaataattatcgaatttaaatctaaggaataaaaaagcttattacaaatcattagacaaaatgtaataaaaaaaaaggaaattatacacattaattatcttagcttgtcgagtttaaattttgttaatcagagaacgtcaagttgtacagctggcgtcaataaatacccaaaacagtcgtctttttcaacggagaagaaaaagttgaaaaaattgtaaagtcagtctctccgactcttccttccttccgtgttcaccattgctacacgttctccacgaactttccgatgcccagtcgtcggagaatagctacaccgtcggatctcctgcaaccacatcttccaattacagtaacactactttcaccgatcgttccttcccgacaacccctgcccgtacatccaccgacacaaccacctccatcgctcgtcgcatctccggtatcttcatcaactgcttcactcctcccgattccgtttcctccaactacatcgacaattcaaagtcctcttccggtatagtttgatcagtaattcttagattttagacttttagtggaaacagttgatgatgattttatttggtctctgtgtgagcagacaataatatccgtagtagacgtagctcaacaggaagtagtagtgtcagaggagtatggaaatcaaacgaaca

SEQ ID NO: 34456 - DNA, 880 bp, Arabidopsis thaliana columbia
tgacaattggttacttccagcaagttcaacgtatccattttcttcaatcattagttgtctccgattccctttcccaattacatggactctgatttccgatctatccaaagaactgtttcccccttccaaaagacccttttgtaaggccatcatacagcattcagctaaacggagccaaatgaggggttgtcggcggaaaacatggcttgccttctggaaacattgagcagcaagtagaggctttccagatgccaaataaagcaaaccacagttgtatgtgattaacatagacttattctgtgagagagaaaatgtcttcgctggtttcccatttctaagtgatgaacagctccttagggcctttaagaatagcacagaggaagcctgataacatccaagctgatagaatatgcaaccaaggttgttgttaaagatccctgaagtccctgcttctttatgaataccagagaccaacaaaagcttcatagcctttggatgattcccatgagcatactcaagctgggatttcaagaggagagccatagaagagtcccttttttgagctatgttcatcgcatgcttgactatcgcgcttcgccagcttcaagtttctggtcagaagcaaaaaccgtactttgcatacttgctattctcataagattttcttgtctgatgaacgacctcatgctaagactgagagaattgtatttgagaaataaccattttatgctacatgttaaaacggaatttatttgagcaatgtatgacaaaagaaattgtttgatttggtttacaaataaagatgcatgagtgtgcaacaaaataatgaaacattcaatctagagaaaagagatttgatattttcaacttgatttcttta

SEQ ID NO: 34457 - DNA, 447 bp, Arabidopsis thaliana columbia
cagaggatcgaggatccccataattcaaggcggtccgaacgacgcttccgccgaacggacttagccaacgacacgtgcctttgggagcctaagctcctactgagggtcggcaatcgggcggcgggcgcatgcgtcgcttctagcccggattctgacttagaggcgttcagtcataatccagcgcacggtagcttcgcgccactggcttttcaaccaagcgcgatgaccaattgtgcgaatcaacggttcctctcgtactaggttgaattactatcgcgacgcgggcatcagtagggtaaaactaacctgtctcacgacggtctaaacccagctcacagttcgctattactgcgtgaccaccccgacgcacgagacaagagactccggaacggaatcaagggaagagagcggcggagaacagagtccggcgagggagagcggcgggta

SEQ ID NO: 34458 - DNA, 523 bp, Arabidopsis thaliana columbia
cattagatatatcatcactactactttggaagattagtaaggtaaatacagttttgtatggttatttcttttggggtgttttttaaattgtccagagagcagtaaataatatcctaccaaacaaacaaacgaacaaaaaaaacagcaaatattattgaccaagaaatgcaaatagattatccttcgaagatgaagtctccaattcactctataaatttgtaaaatatcggtacaaactttaaagtcacgtttaaagtataagtgtataacaatagtatgaagtctgcatgctcaaatatgagtattcacattatgctcatggagaatttttggaggtcaactgcggaatgtatatagctattagctactacgcgcctttcttaatattctcgtataaattttggtattattaattttataagccaagttgtcaatttcataactaattattatattaacattaaatttcatacaaggataacatattaagtatcactgagatatatatgaacaaagtttagtg

SEQ ID NO: 34459 - DNA, 306 bp, Arabidopsis thaliana columbia
caattcaattctgcgtatattaatcttccagtctactataattacttaatacgctctaaatatttgttagtcaatcacctcagattcatataagtaaattaaccgaaatcacattccactagcaattgttagtaaacacattcactacgcacagatctcaaaatcacttgtcgtgctacgaactacatttaatcgacgctaccctgaatgttttattcatgtacatacacaacagccatcaaatgatacacagaagtgaattcggtttgattcccttcaaatccgagtcaatagtagcagtcttct

SEQ ID NO: 34460 - DNA, 454 bp, Arabidopsis thaliana columbia
actggtgtatatcataaaaaaggaacagcttaaagagtgctgttgttaattccctgaaaagctcaactcttggcttcatgttttatcgacgtcaccatacatttatttcccttatagacccacttctcctccccaaaataaatactataattagagaaagcattaaacccacccacccaaaaccattaaatcattaagaagaaaatgtttattaataataagaaaaatgaaattatacacaactaaaaaaaaacaaaaggaagaagaaacatcacaatcaccaatcacctcactatatcaaattctttccttattcactaaccaaaaaataaataaactcaaaaccattcttcatttcgccgacactttcttctccaccaccaccatggatgatctctccaagcttctcttcttcctcctcctcactatctccattaccaccgcattacccgat

SEQ ID NO: 34461 - DNA, 614 bp, Arabidopsis thaliana columbia
  unsure (1)..(614): unsure at all n locations
ggagaggatctatagaagctggtaattgtgtttggttccagttttttacccgcttgtattaaaaaattgtgtctcttcgttgaagttaggacttttggatccgtgaatgggatttttctagcttttttcttaaattttaacttaatcaaactttaaattgtttttcttctgtgcatctaagctaattcattacaatgattttgaatctcaatgtgtttgattggctgtgcaatattgcgtagaatgcgtactcttggattgatagctagattgggaatatatatcgtgatttgtgagaattcattgttttctgagttaaaaagtgtgttgtttagtaattaacaatgagacttggaattgcagagcagaagctggaactcaatctacaagtgatttcataatctcaagatgttaccaactgagtcaaagaaagccttttcattcaaaaggtgtattgaagatggggacttagttattgtttacgaaagacatgatgtgatgaaccagttaaagtaagtanagacggtgtgctcagaacagttttggtgtgtataagactcggattggattgggaaccattagggacgaaagtattcagcacaagggtaaattgt

SEQ ID NO: 34462 - DNA, 439 bp, Arabidopsis thaliana columbia
tacgtttaatctcttgtaatattctttcaggacaagatatttttcagaatcccgacaaggacatactcctttgcatggaagagcttactaccagatgatggaatgcttgggtgtaagtctctggtttcccatcattctttattatccagttatccaatactagttgttagatggcaataaccacttgatgtgtttaatagatttgcattggcttattatagagattcagagatctcttcaaggtttttggttttaacttggttctctcttttttagctcattaaaatacactctcccatgagagctgatccaaaccgtgtcgtgaaatgggtgccaagccgcagtacaattagatctgcaagaattgcagcagaaaagctcttaaggtaatcatcaataacacagtttcatcttctttctttgccaaaatctatcaatt

SEQ ID NO: 34463 - DNA, 583 bp, Arabidopsis thaliana columbia
tgaaaaattttcaaattttttgctggaatactcgatcgcaacataggtgtaaaagctcaagagtgcgatctagcggttctaagataacaatttcctcaacatcaatgtcaaaccactagatcgtagggaggactgaaagcatccgcagaacttcagtgacaacccatgctaccataaagtccactagacttaagtcttcaccaaaactccaaaaagcccatgatgtgtccccttgtagcccctgagacaaaattaaaggatcaacggcccatactcgatcacaaggcgagtgacttgaaggaaccacatcctaccgacataaagcaccatgctttgtcgccttatcactttaccgacatcataaagggcattccatctcatccgtccgtttaaaagcaacacacctcctccactcattcaaatcgcaaagggagataagtatcactactcttcacttttcttcatcagttgtgatttcaaaacatcgctcttatctatctctctacttcactaccaaaatggtctcaactctttcattgttgcaagctgttattcactaaaacagaacctcagaaacactcaa

SEQ ID NO: 34464 - DNA, 572 bp, Arabidopsis thaliana columbia
caaggagctttgctaagagatccctttctttgtcttttctctcaaacgaatcagttacccagagagaaatcattgttgggtggtaagctggtgaattcatatctttcatgcacataccaatctcattctcatctcgggcactgcacaagaacacattggaacgcaccagagtgcttatcaataataaagagggtaaacgaatagaaactaacatcatacataaaacgcacagtcagtaaaaaaaacagagtttacccctgtattagagattctattaaagtcaaagaacaaagtctctcatatgtatttttcaagccgttttgtttggagcaaattctaatttacatacttcaagaaatatacactttatcagatgatctgtcgttgtaaacaaacgctctaactgtaaacgaatgaactgtaatttgatccaattatacctacacaggttcccacagaataatttcctaaatgtggcagtatctgatgactttgcgaagaatgaaacaaatgaccagcaagaaaggagagatatagtacctgtaatatccttaattgcggacaatgacaga

SEQ ID NO: 34465 - DNA, 451 bp, Arabidopsis thaliana columbia
tgtagaggatccctgctgatctcttcaaggattgtgtcaacaattctacatcagatgctgattggagggagttcagggcaaggcttgttgcaggggaacgagctgcaacgtccgagaaggatcagccctcgtggtctaacccggacatggtggtggactatcagccatcatcgtcctcactgatcacaattggaagcaaatgggcacacaagatccatgagccagagacaggctgcctcctaatcgccacagagaagctagacggtgtccacatcttcgaaaagacggtgatcatcctcctctctgttggaccctcaggtcctataggagtcatcgtaaaccgtccatctctgatgtctattaaggagaccaagtcaacgatattagacatcgcaggaacgttttcagacaatagactcttctttggtggacgtttggaataagggttgtt

SEQ ID NO: 34466 - DNA, 500 bp, Arabidopsis thaliana columbia
gtctaaatgagtgcaatagtttgaaaaattattgagaaaaagttgtggaattttgtttgctaacattcttttaacaaataaaaagttgaaaaaatttagtcacatcatttatttatataacgtatttaaaattttatgttttgttattagttttataataaattatgactactttcattataaatcacattatttaaacatataaaaagttgaaaaaattactcacataatttacttatatataacgtatttaaaactttatgttttgttattactttttaaaataaattatgactacattcatattataaatcaagagtttaaaaaattcattaaatagtttacatgaaaactatacaaaaagtttagttaaagtttgtttatgtgtgtatatacttatacaattttgtttttgatatcagtgggtcgacaaaacacaatccataactcagatcattattacgcatgatttattggattcgaattctggtgggaaatgt

SEQ ID NO: 34467 - DNA, 578 bp, Arabidopsis thaliana columbia
tcaactccgggtaattaaatcatacgtcttcaaaagacgtgtgtcttcgatttagattttaaatttcagaattcatagatgacgtcagagaagaaatctgtaagtgatataaagatttgattaaccaactatcagatttcaaacttggtgggaaatgttgccaaccttccttgagagcttcccgaatctacactcactcgtgatggtgagtttcatttgcatctgccctcatgtaaatcacactgcgtgtcatttttaatagcaaaaactcacacttcactcggttatatatgttctcaggaatttgattgttttccagacaaaaagcagatggatctttcatctgtgcaacgatgtttcatatcatctcttgactttgttcacctcaagacaccgtttgttgtaaacaggcaaaaggaagggagacatcaagtaagagaaaattaacaaagtactttgtagaaaatggtgcagctctcaagaaactgacagtaagtgcctgtttctgtaacatcatcgacgaaatcaaagcgattccaagaagctctacgagtagtcaagttgtcatggattaattg

SEQ ID NO: 34468 - DNA, 573 bp, Arabidopsis thaliana columbia
atgtccagccttgccaaaagctcaaacagaagactcacagacggatttacaagactcatgaaaccaatctggttccctcaaaaaaacactcggattaaccagttcttcttatccttaggcaatgaacttaagacctataatctatttctacatatttttttctaagcttttaagcaactgaatatccctgttcttgcagatgagctattttggtttcattctctcagcagagtttacactgaattgtgatctctggaagtagaatagcctgaacaagagagtcaaaattgacacaacaagcatcagaagcctgcgaactagctaactaagagtgatataaacatattctatcatttcacaaacttatatttatgcaattacatctttatttcaatcttcaaaagagaattaggatctaatgaatctagcagagcaattgaaagtgtaatgtgaacagttgcttactgtgagtttttgactgtttatgtctgctctgcttccagctacgcctagcaatgtgtagagaatgtacggtggttgaaaggccgatgcacagatatattatatagaaag

SEQ ID NO: 34469 - DNA, 589 bp, Arabidopsis thaliana columbia
taccatgcatataccatgtgtggtaacccacgaacggaaggaatcatctcagcatacttctccattccaggaatcgtctgcaaattgcaataaaaacggagaagaaacctttgataaataattcgaggctcaaaacgctcaagataagaaacaaaatgtcttcagaatcttctgttgaatttatcgtgctcaaatggtgtacctggactatggacgggttgaacatcacatcaggaactttgaacctatcagcaccaatctcgagcgtccttcaacagacatggttaataagatattgagaaagactacaaaaattacaggtgcagcttcctgtcttcaatgaagctagcactttttcttttaacttaattctcattatgaacattaggttccatgcaggtttccaaagcaatgtctgactcttctaaacttttatgcccaatggctttaatgactcagatccaactaagcacttatctcagcttaaacaaggttcagagcagtggtacatttggctagaaactaagctcaaaccttatacgtagaaaacaaaagcaacagtagcatgtacatttgaggcacaaataaa

SEQ ID NO: 34470 - DNA, 631 bp, Arabidopsis thaliana columbia
tgagaatgctaattaatgatttcaagagttttctttaattgagaatgacgtcgtttagcaaatgaatggatacataacatgtctgattactctcttaaaccagttaacaatatttaaatcatattgaaaacaagaggacaaagccagagcgactctgcttttaagacacggcaaaaaagtcaaccaacgaacccaataacaaggaaagagatttgtttttcatttctaatggaaaaaaaacagcaaaaattgaagtctactcgtcgtagtagtcgtcgtcttccactaattccgtggtttttttatcgaagacttttgaataaagtacatttgcagagtctgtcaataaccctttcttcacggtattgctctcaagccgcgtactggtaggctccaaaattatcccttctttatggtttttggaacctgggttctccgattttgaggtaatccttatgtgggttctttgtgatttcgtgttttgttttattaaaaggacttctatgtttttttgggggttctgaaaagttcggtttttgcaggttgttgaaatctttgagtagatttttgtggacatctgactctcatggcgaagttatgttgcttcggtccttcagactacgatgtatgt

SEQ ID NO: 34471 - DNA, 493 bp, Arabidopsis thaliana columbia
agcttcttagaaataaattcaactcaaatcaatcaaaacttaacagaatctcccaaaagcttttaagaataagaagaatctggggataagagcgaaagtgacaaaaagtgatagaaattgagaatatccaatagatctagggatgtataatcataggaaaaagagtgaagaggtgaaggagagctaaggagaagggaggaatgaaggaagaggaagaggtaaaggaagagagcgaagaggatggagaaaatagaaattagggtttgatttttattttgagcttttttcttatttttggctaaatattggcggcataagcaaaacatttggttaatattgtcggtcataagtaattttagttttgattccgtgattatagggcttagggtttctgaaatgctttaatatagttaccaaaattcataccatctatgataacagttacggaaaatgcgctatcgtaatgtgctatcaatactcatatttcttgtag

SEQ ID NO: 34472 - DNA, 130 bp, Arabidopsis thaliana columbia
gtagaacgttataaaaaccttctatgtcttgatatcaaatcatataaaagttcaagccttgttagtaacataagaaatcccaataaatacacgggtacaaattatgcgcacatgtgtttgccaagggctt

SEQ ID NO: 34473 - DNA, 261 bp, Arabidopsis thaliana columbia
tttgttgggatttttgtctctgtagctaataaatcataggtttggttagattcgtcaatctctcaataagacaatggaaaaatagtgaaatgggttgagtttgattccttttatttctgtatcggcaaacaagatttgcatgcatgccatcaaatcccctaagggcacgttaacaaagtcttcaaggatgtgacaggtgacaaaaatcttggaaaagcttaagcaagccacatagggagataacttaaaaggataggccat

SEQ ID NO: 34474 - DNA, 514 bp, Arabidopsis thaliana columbia
ttttccaactctatcccctctctctttccttctctgcactcacgttgtccgtgaataggtggtactaaaacatggctaacaatggcaatcatctttctctgtctttgtctgttgatgaaaagtgttccttatgggactgtcgacgacgacgcccacaaggagctatgtactgccaacctgaccatcttcaacaagcttatcaagaacgcacttcacacaacatggcaaacttatacacttgaagacgtagtattgcggagaatcttagaaagccttagttatccggagcttcgtggaagtccggggataccaaaccttcaagaaaacagtcagttattgtctatagctccgcacggatatgtttcctacaaatttgacatgtagcgagaaacatagcatatggctgtttctcgcgctgttcgtgcccgaccaaggggtttggaaactggttcaagaacggcatcgaaggaactatgtacgtgatacatttacacacgttttgctatgaacaatg

SEQ ID NO: 34475 - DNA, 570 bp, Arabidopsis thaliana columbia
tacggaaattcatacatgaaccgaataagattgtgtgaacttgttcttagaattcgtctgttgtacactatgactctgttttgtgtggagtatgtttgttgattgtggacccgtgaagacaaaaagggtcagctagaggaatcttggataatgtcttagcaccagaattctctattagacaaaagagttcgttaagccaaccaaccttcgtaggtcctcttttgttccttatgtatagtgacatcaaacccaaaacatcatcttcttgtctccaaatccaaacaaatgctgttttgtcacaacacctaaaactgtaaaccaataattccaaaacaaactcttgttaaattattgtaaaatctcaattattcgttttgtcctcactaccatgttttcttctctttgtcccttcttttcagattactaatcaacatctctttactattttttcagattctatgtatcggaagtgatcgtagcgattgaatatcttcacatgttggggattgtgtacgcgatttgaagctgagacaggctggttcgacagatggcacacatgttactgatttt

SEQ ID NO: 34476 - DNA, 552 bp, Arabidopsis thaliana columbia
taacggccgccagtgtgctctaaagcatgattgaatatgaataagtaaaaatcttctaacaaatattattgttctctaaattttggtcatgttttaaaattagtgacaaatacaaaagaaatttctaatgtagattttttgtaatcaatctatcattccaatctacatctttttgtttcattttaagtgactttttttttattccataaagttattagtggcgcaaatatatattttaaagtaaataatacaactggtaatacatattttagctaattttatgaaatatgaactaataactaaaatacattttagcggtatactacatatgcttcaagaagttgaaagaatcagtttgtttaaaaattaagaggcaaaaaatataattcagatgggataagaaaaccaaaagtaataaataatgaaaattttgagaaattggtggaggagagtcgaagggcatggggatgcgtgtctgccgggttgatcgggtcttctgtcggacagtacaatatttttgtgttgttggttttttttcataaattttgttgt

SEQ ID NO: 34477 - DNA, 599 bp, Arabidopsis thaliana columbia
tcccagagtcccaaaagaaaaggcttttcaatcgcaaacctgaattttgagagcagcagagttctgctgttctgtagtaaccgacgattacgctccattctagtctgctcgagaagcttccgagcatctctctccttggtgctccggccacctaaatcaactcgcttccgagtcgaaggatcgccggagaaaaacatgttcttgagctaaaactagaataccaatacacgattcactccccgaaaacctaagattactgtattattagagccaaaaggagctagggatgtgatcggcgtatgcctagaactggagataacagagcaaggagatagattctttcaaaggtgaaaaatgataacgaatttggatgatatgtgtgcaaaggggcaaaaacaaaatcaaacagaagcaaaaatttctgaggagcaaggcaaggcaaggaaccaaagcaattaagaaagatagttttcggaagccgactctcaacaacgaagacggaaacttcgtgagtggtgaattcaatcgacgtcgttttcgagtctttttgaggaagacgaataattgggtcgtctcgtgttcacgggaaaaaaattgtg

SEQ ID NO: 34478 - DNA, 494 bp, Arabidopsis thaliana columbia
actaagtcccttggaatatcgataaaatagtttttaaagctttccagatatcgcgaaccgactgtaaaaatatattgtcctacaaacggagagagtacgtatgtggaatccactaaaaaaagtgacggtcgaagcattacaagtagtatcaaagctgaacttagacgagggtggagtcaagagggctcataccgtcgggaatgacggtcttgatacgcaacaaggacgttatgatctgtttggtgaattataacaccccggtttttagtaaatatggtagtgcataaaaacattcaaaaaattgatttgaccattaccatctctaaaaggtacttatttttttatcaaacgtcacgaaagaactccacaattagtgatgcttgagctagaataattttatggtaaattatttcctgaaaaaaattgttgcaatcacttgagtgaaaacaaaacataaaaatattgtggtaaatttttagatcgataaacaaata

SEQ ID NO: 34479 - DNA, 456 bp, Arabidopsis thaliana columbia
caaaaagattatatattagtgttaaacattatatattttctaattatatttagaaaatgtttgataatatttcaaattaaataaatctaataataatttataatatcctcaacaaaagaagattaaaaaaacaatggaaaaaactaaactggaatcaataaggaattaattagaataatacacaaaagtgttagaatatatagtctaattgtcaagaaatatacaattttaatttggtcaatatcgacacaaagaaataggtaatgaagcatgaggtattgatcgaataaaaaacaattggtccagagtccattcatcagtttggttttctaacaattgatagtggttatatcaaaccttgtattcatacattttgtactagttgaagtaaagagttaggcgattgtgatatcactaatgaacaagtctaaattccgtgtcgaagatccaccaggt

SEQ ID NO: 34480 - DNA, 529 bp, Arabidopsis thaliana columbia
ggacaccgtttaagtaactgctgcagacagaattgagattaagtattgacccgaatcttatcttcttttctccggatacatcaactacaacaacaaccaggtgcaaaagtatgttgagtaacaagtttcccaacaatgttttatgctggattctgttgtcaacaaaagtgaggttggattttgtttttctctctcaaaagattgtgtatatggaagagaatacatatggaatttacgaaaaacaagagattcggcttggcaaaagttacttggaataggagatttgctaattatggttaagttttcatgaggcttcctcattttactcacatcctctctccttccttagcacagagaaatttgttgtcgcctagctttttccaagttgtctctcgtcttcctccacctcctcatttttctctgtttttttgttcgttgtctctcatttttcccttattaaaaacacataactccttctctctcctcacttctcggacatctgatttcttaaacccgtatccgtctggtt

SEQ ID NO: 34481 - DNA, 598 bp, Arabidopsis thaliana columbia
ttaaaatcttcatcatcttcttcagcagactcataattagcatgatctctcgcaattttcttagaatatccttcatcccaataaagcctctcccagttttctctaacctcattatacaattccatgtacttcttgcaccatggctcatgctcctaatcatactaatccaatcagtaatcaaaagctacacattcatattcagtcctctaaatcctaacattgtgaaaagacactgaccgattctttaagaacgagacgagttcgtcgcatgaactgctcacggagctgtttccggcgcttattggggatattgtctctcgggattgtgaaacgctcacgcagaggtacgtgatctccgatctcgtgcatctctccgtcgacgatccaccactctgatttctcctctttcttcttgagtggcgatagagagggaaatttgttccgccgtcttggctgacttgcctccgttctcatgaaccggagtaaggaagctcagttttgaagcgacggcgtcgcagaaccgagacgtcttgcgacggagagcatagctggtgaagttggtaagtgagcgtcactgagtaacctatttgcatatatg

SEQ ID NO: 34482 - DNA, 618 bp, Arabidopsis thaliana columbia
cgatcgatagaaaaaaattggaccagtttatgattaaaataccgcacacaaaagacttcacgtacgtttttgcttttaagcattagaaatacgggcaaaagacgcgaaagtaagttagatagattcgggaggagtactgtgattggataaggtattgaccaagtaccgatgatccgaccgcctccacgtggtcacacagcttggctttcactttcatgctctgaccttttgaccgcacgtgacttttgtctgtgcacgtgcggaccaagctaacgtgtccggttcaagtacattgcaccgagccctgactcgccaggttacgccgatgaaaacgacggttcctgggtcccacatgccatgaggatggacggttccgatccacttcctactttcctactgagattggtcccaccatggttcaggccacatgcgtccacgttgagggagcttaggtgttactatatgggtgcagttaaaaattaagacaaccagtcacggtccgatatgaggtcatgcattaatgggtcggatcgagtttagtcagttcaataaattaagatgaataagtcaataattatttgaatgggttgatcaattggtaagtgtttcaggattacg

SEQ ID NO: 34483 - DNA, 572 bp, Arabidopsis thaliana columbia
tacgagtagaagagtcagcacaagagcgacaatggctcacctttgaaagtttggtttcaaccttttgacttttgacctaaaacatatccatattcgtcaagaagaacaaagaaagtattccaaaaaaaatataataaaaaaaaaaagaccaagaaaaataaaatggaaagaggaaacaaagaaggcagcttcctctctccttcttcattgcaaagaaagcaccaccttttaaagaatcctcctcacactccattcttcttaaaaaacccaccacaacacaattcccacttgtttcttcatcatcacctacttcaatcaaaaaacattccaactttcttctcaatttcattccaggtttgtgccctttcttcttgaatcttcttctatggaacttccaatttcgtctacttatgggcttaatttggtttacaagtcttgctatttctagaaaactcgtcttatcttgagtttcttggacagaaattcttgagtttcttgatttatctttgacttgtttcttgaaaaaaaaaaggaaaaaattttggttggaatatttcaacggagaagagtag

SEQ ID NO: 34484 - DNA, 537 bp, Arabidopsis thaliana columbia
attctttctccaaatgtttaacgatgaatgcattcttggcaactttatgaaatcctagccccaatatgaccaagcacactttctacgatactatgagtcaataaactcaccattttgaggttactgattttttcttcccgggatgcagggaccccttgattagccagatcaccatctgcatcaactccacaatcagaggaagactcaatcttacttctggagcggcattttcccaccttgctgatctttttggcttctacttctcctggttccacctccttgcatgttaatatacctccctcttgatgactttcctcgttactcaacctaaaacacacaaaaatgtatttaagttaagaatcatgaagcttctcctatcccccaaagcagtaagaatcaaactctacttatcaaaaaaaaaattcccgcatttttagactcttgctgaaagatatccaaagtctcgatttttagattttgcggcataagaagacatcaatatattcaacccgtaacaaaaatgtcacttcaaacata

SEQ ID NO: 34485 - DNA, 505 bp, Arabidopsis thaliana columbia
gatggtacaaactaaccctaacgcagctcgaaagaagaaaacactggctcaattaatgagcattacccagaacggaagaggatctacaaagctgaaaactttattcggttccaatttggcagaatttaaacaggggacaaagatggaaaaaagttccctccaaacgaaaaatcgaaacttggagaaattgtagaagagacaatgagaagtagagatggggaatcacacctttaagagtttgagcaatgaatctttagaaacaggagctaggtcaagcttcgatcccagctctttcaactgttcctccggcttctgagccatggggagtgaaacagagaactcttaaaccgaagctgttagagacgagccacaataaacgaacaaggaaacaaaaagggtattttcttgaataatctggttctcagagtcactatgcggaagaagaaggagaagaagaagaaagccacatctgatctgagctctctctaacacaacaagagccccg

SEQ ID NO: 34486 - DNA, 567 bp, Arabidopsis thaliana columbia
cacatgggaggtcttccccacatccagcgcaagtctgatgagcaaaataagaaaaacaaaggaaagttaacgattttgattcaagtgcgatgcttaggtaactcgggagtggaaatgcacctgatgaccacaattgaaagccatgttctttgcactcactagacatacggggcaaaactgttgctgtttatccaacaaaaagatgtgacgagcagcaaaagattatcaatgcattgttgtttctttctttgtaaatcatacctggctctcgttatgagtagttgaaggtggtgtagaggaaacaccattatcatatggtttgttttgaaaactggttgatcgggaagttcttgggctgttgcgcatagattgagtagcataagttggtggtggaagcgcaatcctgtctggacaatgtccggttctttgtctgcaaattcgaaacaaggaacgaaattggcggttattgagatcaattcataaatgctgcagtgatgaactcaaatatctgaatttacttacccaagtaagcctagttcgagggtggctttatactgagacgggatc

SEQ ID NO: 34487 - DNA, 560 bp, Arabidopsis thaliana columbia
aactagtcgtcctatctaaagaactagcatcaaatgatggatgaaacacaaggtagttgtcaacactcctaaacccttcagcaaaaaaattcttttggtaaataatcgctgagtgatgacgatgatgataattaatttcgaaagcgataacgttttgggagatttggaggagcttaccgttgtgtgaggagcgtttgaggtttttggaagaagctctctcgatgtgttccgcagagaaaagctaaagaatgtgaccttatcggtaatttgtttaatagttcaaattattttcacttttactcctctatttctttagtgtttcttgttagtgccttcaaattttgaaaactaacaaactcaaccccaaaccaaatccagttaccaagttgcagcattacacttcatatgttcatggaagactacattaggtggaacattgaattagcatagcgtcacgggagctcaagcgattctctgaacctttcttcgcttgtaagtcaaggaaaacaaatggtcactattggcttctcgagcatgattgtctcgctcaggaccccagc

SEQ ID NO: 34488 - DNA, 450 bp, Arabidopsis thaliana columbia
ttttctttctctttgacgagttttgttagatccgatccgattagtgtccgagagagaagaagaagaagaagaagatgtttctttctttcgtattctttaaatttgctttcttcaggtgaatgaagaagataaagagaaagttcgatgtttcgtcgtttaatgggaaagtttttgcaagcaactttttaaactctcgatcttgcgatgttccctcaaaagcaaatttaattactgtaattaagtagggagccgcatctaagcactaattagtaagattatattatacactcgttgtgtatgaatcttcgtgttatgtttttgttatgtctaggctataaagtttgagtattagtatagatgtagtagtaggtccgtaaaaaatgattggtagggtcacgttcattttggtcatattcgacgaatctgaaatccaaattttaaaatatgaaa

SEQ ID NO: 34489 - DNA, 594 bp, Arabidopsis thaliana columbia
cgagcatacaagaagatccactcattttcacttaataatcacgtttaataagcggaatatgaatgtcagtagattaatgtattcaaattcatttagcaaatccgtctccaaacatcagcatctaggcagagtggagaattcatagcttcatgaacacaagtcaacaaacacgaaatgaacacaacatacgattttataacacctgtggcactaacaatccattaccctgtcgatacaaacacaaactaagttgatagatttagataaattgttttgaaatttaaaagttggatattttatagaaaccaatccacaattgaagtatattgagctcaaaaggagcttaatttgcagtggtaggtaggtaagaactcatccatatatatttgaaaatcgacgggggcatcagaagtagaaagcatagatctcagtatgagaaaccagaaccagaaatgaaaaatacgatacgaaaaacaaaaaaaaagttttaagatttgcgataaaaattaagactttgagatccaaatcagtataacagagatcaagaaacaagtcaactataagacaaagcgaaaaacatagagattgatataa

SEQ ID NO: 34490 - DNA, 514 bp, Arabidopsis thaliana columbia
atttttttattcatgatatcaagcaagtcttatgattttttaaaattttaaaataaaacttaacttccaaaatgttagtttaataatattgtataatttgatatcaaatctaagtttttcaatttttattggttaacaaatttgaagacatatattttattttttcgtctataattaataggaaagagaaagtgagtttaattttgggaaactaataattacttaaaagaatattaccaatttttatatttaaatatattaattttgtgattactattgtattcttaataaatttatttaaaaacactaacaatcaatggcattctatgtaatattttacccttcataaggttgtctattttcaatgatttccaattaatagtatagatgcatcacgcaactggatttttttttttttttctttgtaaaggatcttcatgaaatttcatcagatgaaaattatacggttcgcttaatgagaaacggttcgatcttaatgtgtgcaaggttagta

SEQ ID NO: 34491 - DNA, 564 bp, Arabidopsis thaliana columbia
atcccacgtgacaatggcattccttgtaattatagatacaagtttgcaaaagaaggatatattgatgctggatgtagaggttagtcaatttcttatttcagaattgtttgcgccttccaaggcacatgcaaccattaactacatgggatgttaccttctatgatgacttatttagttgcacgttttcctcagttaaatcctctaactatgatatgacgctttttacaatggtggtttatggtttcgttaagggcaagtggatattctattagataagtatttgtactgttgaaatcttgacactattccagcaatttcatatcagtacaaatttttgttatacaggcaaatcttgagaagaagcagactgatcatcttcatcatctggatgggaaaagtgatgggttctcggagaacagttttactttacagcacagtggtatttcaagggaaataatggataccaaccagtattaccctccctccgcattccaacagcgagatgtgccatactcgcatttcaattgtgagcagccttccgttcaagtatcagcatgtgaaagt

SEQ ID NO: 34492 - DNA, 450 bp, Arabidopsis thaliana columbia
ctgcaggtcgacgatacccgacaatctatcttatgcacttacagatgagtttaagaatacaagtagcaaaaggttgccatcggttggctcccaataagttcaacacaagaccatcaccatctctgggctgattagcatctggcagatcacccccaattccagaaaaggacatacagaaacacctaaatggaatgtgagattcacaaacttccggttcaattgagtgcagtgatgcaataggttgcatatctggacacacaaaaaggcacgttagttcagtataagttgaagaatttggaaccattattaacattcagggagccagtttttcaagcaactatctccaacagtcttacactcaccttgaattgcctgcaaagcgtcatggaagaagatccggtatgccttccttgagttggaacgcagcaacattaagagcgagccaacagt

SEQ ID NO: 34493 - DNA, 906 bp, Arabidopsis thaliana columbia
caccggtatctaaagaaacaacagagcagccatcaaaaagaattaagtaaccaatgaacaaaaggcttatgaatacagattaagttcagaaacaggatcaacaaggaacagctaaagagaaaaaaacaattgttagtctactaagtaaaaccattttgtggtaagtggttttaacatttaagggggaaaaaacacaagttttcacttggatgactccaaaaagcaaagctataaggaaggatagactcatagtacatgcttgtatgcatatctgtatccatagaagaatctacgaagctttgtacaagtttctgagttaacaaaactgataaaaattatttggttatgatcctagagctgataacaatgcaagtatatgattttgtaaagctatgaagatccaaagatttttaaaaagaagaaatcgtgacccatttatcatttggactttgggctaagagaaaataccaaatacaagacttaagcataacaaattcagactattttcaaagattccattaatccaatgatcccagaagctcgaattggagaacataaacggtactgtgaagattaaaacagagtatgaatgctcaaatctgatattcccatcggcgatgaacaaaattaacccaagacaacttaccggagaggaaagacggtggtggtggtgataacgagctcagagattggattgaagaagatgcagatgcgatttcaatgaaaacgaaatggaaatcgatagtcgattttgatagtcctggctccgacaagcttaacgctgtctagtaagaagggcggccccaaaatctctgcaatcactcccctttgatccctccttaaaggatctgttggagaaattttttaaggctacttttgctcaactttattataatgttttaagaa

SEQ ID NO: 34494 - DNA, 500 bp, Arabidopsis thaliana columbia
  unsure (1)..(500): unsure at all n locations
agagttaacatacacacactaagattcgcaactccaggattgtgtaggaattgttcaacagtctgtatacgatgaaacacagagattccagagaggcaacagggaaactcttcctttggactgaactgagatccattcaggtcactacaaatgcgagggaacaccgaatgtcacaaagatgaattattcgctggcgcgtaataactcgccggacaaattgcgaattacgccgatgtggcagagaccgagactcatgctctcttcggtgtcgctggatactgtgtgagcgaggcaagtgaangagagatcgtcggacatattcccgcatgtaagagagctcacttctttggacgagataaantttaaacgtctatggagacgttatttggttgttcgagaatttgatttgattctgggtgttcctagacctatctgangcaactggagaangaagaagaaacaatagtagattaataatcatgtgttgaacttatacttta

SEQ ID NO: 34495 - DNA, 812 bp, Arabidopsis thaliana columbia
tagcattattcggaactgaattctgactactataacctatgttggtggaagctggaaccacttgctggcgttggaatggagcgttttcgactttaacttgggatctaggaggaggattcacagaagaaggacctggttgtgctactagttgtggaatctgactaaaaggttgtttagaagattgctggacaggatactgactatggggagcacgacttagctgctgtgacctttgtgccagtggcggtaaaaggttttgaccagataattgcgcatcttgaattgaagaccctgtcatatgacttggggcctgaacaatatttggcgactgtaactgcacaattcaagaatggcaatagtcctcttaagacatgacagatagataaagaaggaagtagcacaaaactgttcgataagatggaaaacttaccacttgcggactcacaatcccaagcattacctgcgcctacaagggtagacaaagtaaaggttcaaatatggtgtaagtatcataagaaatatttgtcaataatgaaaaatgatttgcacaataagaggatgagtgagtaccaggaaaacagcttttagcaactgaggtcttgaaaccaacaactgtctagcatgttccttattttgtgtagccattaactgacattgagagaacacaatcacatcacacaactcgcttccaatagtataacaatgcacccaaaaaaagaaagaaaaaacgatatcaagattcacaccttaatggacgatataatttcagtaagctgacttcttgacatcttggctagatgaagagccagggg

SEQ ID NO: 34496 - DNA, 584 bp, Arabidopsis thaliana columbia
tcttatttcatcgtctcaatatcaaaaagatgttttttcttgagattcaatcttcgattctagatttcctcaattaatcgctacgagaatcgctgataaacaatttttgtcgccctcttttgccaacatcaaattcgataaccgttcacaatctccttttaatcgccactaaaattaatttgatttcattcgtcgtaatgaatatgatatcaacgaccattgatatgaacttcttcttcgtcgtgagaaactctctattcgaatttaaatccttgacaaataaacaattttcgacaaaatctcaatttgaatctcattgtatttctcatgatttttcaattcataaaaatggctaattttatttttacctttttcaaagttttttttgcttttttcttgaatttaaaaaagataatatttttttataaaaacttttgggataatatagaaactaaatgttaataaaataacttttaaaaattaaataaaattaatgcttcatcacctaaacattagtagttaattgagctagaaatggtaaaattggaattgtatttttgttctgagattaaattggttgagta

SEQ ID NO: 34497 - DNA, 449 bp, Arabidopsis thaliana columbia
acctttattgtttttaacctcgaatactagcttacgtacaaccatgagagcacactagaaaatattactaaaattaattaaatcacatgattttatgtcatacttgttgatttgtttaaaactaatctaactaactattacaattttttgaaaataatttaaatgtgggcatgtcaggggttatttttcttgtcaccaccgaatttatagttgcactgtctcataatacatagtattaaaaaaaaaattcgtttgaaataatcgatacctcattgtaattacaaaaatcagtaggtattaaatttcaaaattcttctagtcataacttctttaactattgttcatatacgaaaatcacaatcattgtatttcatctattgcataataagtatcgttttaacacttgcaaaaaaataacgttttgtatttttaattcattttttaaaata

SEQ ID NO: 34498 - DNA, 373 bp, Arabidopsis thaliana columbia
aacaaaatagaggggaaatgcaggtaatgatcggaaacctaaattcatcaccggatctacggtttttcagatcaaacgagtcttcctttttctcaattttgactgattctgtttactagagttcgagattcgcttgattttaagattgtagattcagttaacgaaacatcgttatagtatcttgaaacgagcaatcagtattcgcctggatttaatatccgatctgtattaggatacttgtagtattgattcaggatcgatctttatctatttgatgctttgtgtccaccaagtgtttgattgtattacttagagagtcattggctctcttcgttgtctgatgcagaggtacattcagcaacacaacgaggtc

SEQ ID NO: 34499 - DNA, 531 bp, Arabidopsis thaliana columbia
ttgtctttgtaattttctactttatggtattgtaagaaacggctttggtggtatctgatcttctatatgttgggttgaaaatgcattcagatttttcttcctagtcaaatctcaacttgtcataagaggatgtttcaattgtagagccaaatggaagttcttcttcttctaaatcacagtatgaaattctccaactcgtgttttatttcattctccccaaagtttcttgctccgctcacacgtcaatcttgctgtccctgagtataccaaattcgatttggagattcaagataaaaaataaatatgatttggaccagtgcgggggttgttatgcatctatgcaattgtttttgccattttgatatgggtaatgtgttgtttcggtgaattttacatactaggagcttaagatctactttcataactgatgttgcctgtaatatatttctgtgccattaggaaagtcacaaatttatgttttacttctaaatgtatccataaactgcctgagtttttcatggcttgagtgtg

SEQ ID NO: 34500 - DNA, 355 bp, Arabidopsis thaliana columbia
ctagtgattaaatgtttgttgcttttctgctttttgacattttacaccggcaacctttgtcggagaacggttaagtagctgggataactcaggcggcgtcgcggttaggtagagtagaagaaactacaagcaagagagagcgattcactgaaggtaaccacgtcttaaacaaaatgaaccgaactataaccgtttggttagaagatttaaaacggaatgatccggtttgattttttggtttcagattctgcgggtactggcgccaaatcataattcgtggttccggtcaaagtcacggcgaaacagccatggctgattctcaatccggttccaatgttttcagtttacggatagt

SEQ ID NO: 34501 - DNA, 530 bp, Arabidopsis thaliana columbia
tttccaatgcctattctaagtcatcggagaaattataagttcgttgttatacaaatcacttatcgaacgaaatggatctaagtagtataaatggatgttcttcttctgaacttttttttaccccgctgatattgtttactttggagtttggaacatagaaaaagtaacaaaacaatacgagtaccttttttaactccttttcattgctagaataatcatacactgtgagcaaaggcattcaccaaaatttaaacaaaataaaaaaagaagacatatttgagtaatagagctacaaaatgattagcaagcatcaaaagatatgcgcagagagaagatattgttcattgttggaacttggatcatccaagattgaaacaaaacagaacaaacacaagctctctcgatcaggacatgctaatcagactctgaatctgaatcacttgccgttgtaacctgagaaatcacaaaaataacaaattcatatccaaaagcaaaaaagaaccaatttgttgataaccaattttgacatg

SEQ ID NO: 34502 - DNA, 453 bp, Arabidopsis thaliana columbia
taagttatatttttttgttgagtcaaatatgtataatgtaagatgttaaaaagataattaagaaaaaagtaaaaaactgtaaacgggcctaaatgggccaatctaagctgaatttttttggggatccgactatgagatggatcaaaataaacgggtctggataccttcataacgggtcgggtctgatgaggaaagagagtgattttttcgatcgccgagagatgaaaggtcagtgctttgtcgtcttctaccgtctccggaccaaagagctcaagtcacgcagctaacaaagtacagatttttcccttgtttcgattgcaaaagcgcataagcttcgtacttgccaaatctgaagtcaaaccaaatacactggtcaaacaaaaagtcgacgagccccagattccgatagcaaaaccagtcggacccaggatttcgatgagccacactggttag

SEQ ID NO: 34503 - DNA, 545 bp, Arabidopsis thaliana columbia
cgacacacgtattataatattagtctatgcgcatacatatactaatatataatgtcactggatagggacggtcgagttataaatggtgtaaggtttggtattgaataattttgctttatcgacattacgacatatataattatgtgattataattagcacttgaagccgtctcttatctcgctctttttgacggtccaatgtaaatacgtatataagattcatatcttttttagttttgatgatgtactaacgtaaaacgatcgtatatgaatggatagaactttatccttcttgtttcggggataaatggatagaacaatccatatttcagggataaatcttatttacttttgatcgtgtaaatacttgtttcgagattagttgctttttatttcgtaatcgtggtgacctaacaaatcaccgagttttttaaatggatgattgcatgcatggctcaataagggtttgacaattactaacacacggtgacaaaagatcttctttcaaaaaagattcgattgggaacttttctatgtcaaaatga

SEQ ID NO: 34504 - DNA, 569 bp, Arabidopsis thaliana columbia
tattctagaaaaaaaaaatcatcatctttaccgttaatctaatcatttttaatattaataatttattccattcaaaagtgattcagctatagtgttgtcgccatttgaacgaagactaacatatgatttaatgattcagtttcgtgtttattgatattgatgcttatttaatttaagctatagagtatagacgatggttaagtcgcaagatatataagcaccataaaattatgattgaagaaggcagacaagtagaagtctcctcgtccaaagatcaaagatttatttatttatgctaggtttgggccatttggggttcgattttttaaatttgcaattcttacaaattattgataaaatgtttatcggatattttagaataatttcacaagcagaagttcatttctctcacttctactttttagagaaaagactattttcgctattccgaaattaaaatatgattgctaaaaaatgattgttcctttcttatctatctatattttttagaaaggagaagctaatgcccatcgagttttgattttttggatcggtctggagttgtatat

SEQ ID NO: 34505 - DNA, 649 bp, Arabidopsis thaliana columbia
aaatctctctctaaggttcaaagcaaaacctttgagggatcaccatcgcattttcctctgtttcaatggcttcttccactacgatccttcttggtccaccttccgtcgccggaaattcaccgatcatcaaaccaatccattcaccggaaacccatatttccgatgaaaacactctaatctcccaaaccgctacactaaacctcgaagaaccaccaccaatgggtctaacggagaatttctcgccgacatttctctcctccgggaacccatgtctcgatttcttcttccacatcgtccccgacacatctcccgatgatctgatccaaaggctagcaatttcttggtctcacgatccgttgactacgttgaagcttatctgcaatctcagaggtgttagaggaactgggaaatcagacaaagaagggttttacacagctgctttttggctttacaagaatcatccaaaaaccctagctttgaatgtccctgctctcgttgattttgggtatttcaaagatctgcctgagattctgtttcggatcttggaaggtcagaatatggagagagggaagaatcgggtttggaggaagagggttcaaaggaaattcaacagggaagagagagaaaaagtctgagatttccggtgaaa

SEQ ID NO: 34506 - DNA, 521 bp, Arabidopsis thaliana columbia
  unsure (1)..(521): unsure at all n locations
ggcttcccaaaagagctgccacgcctcaggaccatcagtgtacttgaccagcctccaaacccgtactttgcggtttgcgttcccaccaaactcgttgaaatacacaatagacccttccgaggtagtgattgttctccgaaaacgcggtaactcgtaatcttttccattatcggggaaataaatgatactacacgcatcatgatgacctccatagaaatcgtaagctaaaaaagaaccggtgaggttggaaagccaatgaagaatcccatttaaagcaatggacttgtgatgactaaaccaataggcagaatgaagacaagtcacatttttaatttcccattcccctgtgttagatgagtaaatcgcaaaatcgacttgagcaaaagtgtgagcgatcaaccacacaaccttgtaactcacaacaataccactttgcatctttgtaacaatccactgtcgctgaaacgctcgtggttcttaattcncaacattttgagaagtgtatttaggacggagaggga

SEQ ID NO: 34507 - DNA, 474 bp, Arabidopsis thaliana columbia
aaatattaaatcttataaaataataaaatttacaaacttttatatataatacataatcatttaattttaaaactagattgataacccgtgcttcacccggatcttatattcctaatttgttaggatatataaatatattaaatgatgaatttcactttttgcaaagatcaaatgatggttattttgtagtatttgataggcatgtcaattatgaccaaagcccgtgaattaatccgctgtagtcctcaaaaacaacggacacaagctttaggagaaaccgggtctttagggctaaaggattcatagggtttcgcccaaaacgggttcatatcggcccaaaaaaacttaaatatattttgattttttgtctttgccaattttatgtttaattgagagatttgtttaaagattttgttatagggttgaaactctaaacttagtcttctaattgtgtttactacaaatactagattt

SEQ ID NO: 34508 - DNA, 1112 bp, Arabidopsis thaliana columbia
taaaaggtacaattcttaaaacatcgaaagtatgagtcttgagactcttgaaaaacatacattcataaagttcaaccgcgatgatatttccagaacaattgatcttttccagaacatgaaatctcctcaacgatcagcttgctatgatgagccatagttttacaaacatccttgattttctctgttagttctattactttctccttgattgaggagaggacgagtttcatgttcacctcttttccttcattctcaatatcatcatccacatatatcaaaagatatgagatcaaaaatctttacttatgtacgcttaaacttatatacacataaaaagtggtcggaaaaatacaaaggaaaactctcccaggcactattaccaagacaccaaaattcattatttttttcaacgctggtgaagcttcggcttgccgacgttggaaccgttcttctcctctcagttacctcaacaatttgtatttcatcccaaacttttttcccatttacaagctttgacaacctcgtgaacgtttatgagagaaagcatggaagatgtctggagaccttcttccgatttcaccctcaaacctccctgtcgaagctaataccattggaaccgcctcaattcttccaatttaggcttacccagaaatctctctcgaaagaaatcacaatggacaaaatccgacgcagtaaggccacctcctcttcgctatggatttagagtgcactctaaccaaggcgaagtcatcccgtccggtgaagagatcaactttgatttgtcatttgtgtagttcctttgcacactcactgctacaagaaaactaacaacacatacacaggaaaattagggtttcacctaatgggcctatttgtcattttggtccatcaccactaaggctttattcattaatagagggaatggctctaatctccaatctgttaggcccaggttcatttgctcctttactttgctcaatccaattcaatcgatttctcgagttcctgatctgtgtggtcgaggacaccgccagaggtggaatttaatttctttgcattggtatagctatctttgtctaagaaaccttgtctaattccaattaatggccatg

SEQ ID NO: 34509 - DNA, 589 bp, Arabidopsis thaliana columbia
gagtatagatcaaatcatttttaaatggaaaaaaatattaataatggtttcgagtattgtttttatttgtttagtatgtattgttgttttcggaatatttttgttactgaaaaaaaaacagagagaatgagctgggaagcacgtgtgggagaagagagaagcacgtgcaacaacgacagtgcagggttgactggagacagtagggtacgtcgtggagagtcgcactgtttcatacacacgcgtgacgcgttaactcacttcatctccactaatatacgacgtcgttttgttttgttcagaatggaaaaaataattcattttaaggatcatttttagtgataatgggaccttcttattttgttattttcaactgctaatccagaattgacattgtgattggtagcatgtaaaacgttaaatctctttttcttatatgaaatatatatatatcatagtctaccttttcatctttctaaaaagtgtattaaaattcttgttacactcatttcttcactacaagaggatagaggatacgtgtcgagcaaatgaacaaattctccatgactttacttggaataaaagattttat

SEQ ID NO: 34510 - DNA, 507 bp, Arabidopsis thaliana columbia
ggaactcgaatggtttaaattttgcaacaaggtttattagtgttatgagttttttttttttttttttacgacaattatggggttagtgcgttaaatgggggtttgcataattttaagaatgtttattgactaaaagttttacattatgaattttattgacgcactcgaaaattctgaaattattaagagtagcctcatatagatttacgtaattaattggatgcatttagaatttgttttgaaaactttttgaatttacgatcttagaacgaactttatatatacctcgcttcaaacgctggttcaattgccagctaaggcaccgtctcaaatcaatgctgcagtcaccgtctgaccgtatcgggctcactctggcgaatcaaaagcttcagcgtcgtcaaagctgttaacatttccttttctcaggcctaaatggttaattcaaatcaattttaatgaattcaaagtcttatttggaaagtatcaaaatattggattttggttgac

SEQ ID NO: 34511 - DNA, 570 bp, Arabidopsis thaliana columbia
  unsure (1)..(570): unsure at all n locations
tgagaacaagtatgtaggatagatttagtagctgaaacangaggaatcaatccgcttcacctgtggatctatcccgacggttgtctggccgcttgctgatttaacagctctctctttctgcacttttgcattaaagactatgtcactgtaatttgacatagccttcgatacatagtgcaattttctcatcaatctcttaaccccaatcacacaaagctcaacaccataaatttgaacaaataaaacaaaaagcatcaaactttgctaccgattcaggatatactgtaaattagagcaacacccatctaagaaagaaactatgacgcaggatttgacatttaacggcggctgatacaagagtggagaattagggttttaagagaagagaagagaagagggttccattaaatacagaaatgtattcatcaatctattgggctgacccaataaagcccatagtgttttaatttatccgggtcgagttgcgataaaccgggtccttaaacggcggctactacgtgattagtaaaattagggtttacgattaaggacgtcgcttcaactatataa

SEQ ID NO: 34512 - DNA, 557 bp, Arabidopsis thaliana columbia
tcggaaaaaggcaacaaaaccgatcgccgattacgacggtccaataataatcaccaaatgagtaaagctaagttggtttagaagaagaaccggtgatcaaaacataaaagaaagaaaccgggattggatttgagagaaccggaaaaattggcacgtatatatgatcgccatgtgtcgaatgtgacttttatgaagaacgtaaccgttctgacgcaaccaatggctcgtttgcgagtgcatatggtatacaagtaacgctcccatttcatttcttatgttattattacttgattaattatgaacagtgaaaactaattaattacattacttaggagattaacaaatagattagaagaaacggtaacagttgttgacagaggtcaccgtgccgtccggctcttgtccaatctttgtttgtactaacatgagacacgtgtcctcgtatcacgccctcttctgctcctttcctcaccgcttgcgtacgctaatgtacactgtttgtagttaatacatcactaggcctatagtcaagagaacagaagaaaaactatcttttt

SEQ ID NO: 34513 - DNA, 598 bp, Arabidopsis thaliana columbia
catatctttctccaatagacgcaatcggacggtgaccatctctgtgccgctttgttcctaaacgattttctgtctgttctctctttgctctctcgccctctcttgctcttctgggttcgtcttcctcggctagggtttatcagtggtttgtcaatggaggcttcatcatctcaaccatccgattcttctgatcaaactgcttccaagttcctttctgacctcccgtctcgaggtttcttgtcttctaccgtcgtctcttccaatccggtaacttttctaacccattcccgccttttttgttttctaaggtctattatggattccgaattttgaaattttgggtttttcaaagtgattagctttttgtatgcgtcttcaattcttcaaagtgatcttgattgtagtccagatcgttgaaatttgggtagaattaaatcagagaaaatcttgtctgaattgtaattttgattttaggtttaggtccacactttgtgcctataggtcaaagtttctgctttttactttgaattttacatttactataaatgcttgaagctttgagatttgtgatcacattgtgtaatgataatacaagagt

SEQ ID NO: 34514 - DNA, 526 bp, Arabidopsis thaliana columbia
tttttcttgcacactattaaagataaagaaagttcaaatatattcatcttctaaattattttgttagcttcacagtttaaaatcgtatgacaatattctagagtgctaactgcggctccttaccagctctataatacatatactaaccgaaaaccctggacctagaatctccaaaaatcaaattctagagaaattatttgctcgtcaagcctatatttttccttagttgttgtgaaaactattcactaaaccgtcacaacttcttttgcttttatctcaccgcccattcaataacaatccttggctcatcaccccttcaactccaactctaccacttcagctcacgcgtccttgttagcagctaagtcgtctaatgatgcaacttcatgatcccaacatccacctgttccagaatctacatctacagtctcatttgttttttacttagtttgtctctcaagcactgtaactgtcaaacctgaaagtcaaccaaagagaaacctagttacatcaacaaaacaatatc

SEQ ID NO: 34515 - DNA, 335 bp, Arabidopsis thaliana columbia
tgcagaggtctattaaaggaaccaaaaagcggacatatataagtgtatctgatgtcattatgaagaaatgccgtgctgtattgcgtggtgttgcacctgcagacgatgatgaagtcctttgcactttactgccgaagaaagtcactgtttgacatctgatgatgatgaacacgggttcctggaatcacctgagatgctttcgcgtcgctcagagtacagagctaatgatttggggttggctggtagttagtattaccggtcaaccgcagcctgtctcgaagatgtccctgatgttggatgttcgcctgtgacgtcagatatcaccttgtgcaatt

SEQ ID NO: 34516 - DNA, 115 bp, Arabidopsis thaliana columbia
  unsure (1)..(115): unsure at all n locations
tcgactcttnncccaagaaccccaatcactactcaagcaacattcgcaggagggcggcgagtacaacgtcagccgcggcttgtcccgcgtcttcggcaaacacgccgccgtcatt

SEQ ID NO: 34517 - DNA, 661 bp, Arabidopsis thaliana columbia
  unsure (1)..(661): unsure at all n locations
agccgcgttcgttgtattagtgatagaatcacacttatctccccaaccaaaccgattcttagaaaacgccgctgcggatcgatacttatcaggcgtccgtaaaggcaatgctggatctgggttctttgctctaggcttagacggagttctatcaatcttacttccacactcgtgtttaggattcttcaatgaatcgttgctggttagagacaaaagcgaacgtcggagattttcaggaacattctcgatttcgtcatcgtgattgtctgaatctctacgggaaagcttggtctcctttgacattgtattaccctaatctgaaacaaaacccagttcaaaatttatgaaatcgacacacgagaaatgataagtttagaaacttggaatccatagctaaagctaagaagctcgttgggtttaaaggctgaaatagatctcacctgtgtagtaaattgagcaacaaaatccaaaatttgtcgagcttctaaagagttcgctctctctctttctctctcactccctctctctttctagattcgcatgatttgagcagtgaagcaggacggagaaaggaatgtataagacagaagatgaaatggacggctgagattgcactttatngtttgtactttgaggcgcgtgttgaatttgaatttggaaa

SEQ ID NO: 34518 - DNA, 576 bp, Arabidopsis thaliana columbia
tattgtttagaactgagacattataatatacatgcatactcgcataatgcgttatgcagtgtttttatgtcttatgcccatcgttttccaaaaacaatcatacatatcttctttttctgtcctagttttatcgaaccaatttgttagtccacgaaccaaccacatgaaatttgttaacatattttaatatgcctagttacatgaactgtgatgattatagaaaaaaaagttacgttaaccagtgggatagtagtaatactatggttttatgacactattcaattaactaaccaatactttctaatacatgacccacctgagttttcttgaaccaatgtgttcatttttttgttgacctcaaatcaatgagttcaattgctttacgatactactcatttggactttctattttgtcctaacaaattgatacgtcaatttaagggaataatacttattttccggggcttgcacatgcaacaacttatacccaacatagtgttgtcactctttcaaacaacaatggaattattatgtgagattttattattattaaatctgggacaagtttattttgga

SEQ ID NO: 34519 - DNA, 303 bp, Arabidopsis thaliana columbia
gtatactataatgttctgccataacatttatagcaacgttaattaattccttttatgtatgattagacgtttcaagacccatcattaacaatttataggtagaaatagtcctttacctccatagttttagtataatggcagttttctcaactattgttgttaagatacataaatcagcattctatacttgtatgtaatcaactctgtacctaatgttttagaagaaagatctaagtactgtgtgtaaaaagatttatacttctaagtaagagagtactaattctattattgaactcattaaag

SEQ ID NO: 34520 - DNA, 535 bp, Arabidopsis thaliana columbia
  unsure (1)..(535): unsure at all n locations
gatatcaaaacacaacaaccaccacagaataaaaaacgagatgtcaaaaacattatacccgatgaacgatttacgattaacccttgaacagaaatgatgatcggagtatgataacgatgaaatcgatccaaaaaattaaaactttcagatctccttggaaatttcaaaatgagaaaccgacggctttctccaactagggcgatttaaatgtaagaactttctagctgtgataagcacacctagaaaatggagataaagagagagatagattcagtcgttttaggttataaataatgaagattgaaggagatgaagaagatgagaggaggtgcagatttggggatgaattctttttttttttatcggtccaaaatattctttttttctttggatggattgatcaactttagcaaaatttctggcaaatatttggtagatttttattttattttcattgctttaatttatgaataaatctatatttggaaaaaataaaaagcttgtagacttntcgaatgtttatggtcttaatatt

SEQ ID NO: 34521 - DNA, 479 bp, Arabidopsis thaliana columbia
catatgacatgtaaaactcgagttttcttgttcgattattttcacttcgattagttggccatataacattgctatatactataaacacataaaaaaaatatcaaaaacactctattcctccacaaaactcacatagttttgtaactcttaatagtgcaattaatttgtgtagttcttaataacaatttgtataaatataagtgagtttacactaactctattcatccgtgtagtataagtttttgaacatttcaatagctcagtaggtgcaaagttttaactctcttcttcttataggtgaaagtggatgatgaattaaaaaataaataaagaagagagaagtgaataaggtcgagtcggtcactcacggtgcatggtcactctctctgcacgttctcttgccctctctctctctcgttatctccctattaaagagtctaaccagtcacacagagagtgagacagagagagagacagag

SEQ ID NO: 34522 - DNA, 538 bp, Arabidopsis thaliana columbia
caatgtaaatttattaaaacattttcatttagagtttacggtaaactttcgaatggtaaagttgtagaattcgtactcgtccacttgatattctttttcgaatatgttagtgatgttgatcatatccaatcctagcagagtaaaatgcgatatgattactacatatcatgatatcaacatcaaacaataataagtctaactctccggcgtgtctttgtcctattttacgtacctgattacgttgtcaagtaaccaggcttacggagaacaccgaattgatcatggtcttatcatttgagacattctttaaaacgtttataatttccatatctttgaacgtttacattgccattatcactaaactcttagatacacatgagtttattatttgaaccatggtcaaataataatttactaaaaacagcaagataattaaacttcagataagaagaaactaatattagaaggaaaaaagctatttgcatttaaagaaaccgcgtccttaacaaaaaaaatctcgtgcgtgtcctcccgtgtg

SEQ ID NO: 34523 - DNA, 570 bp, Arabidopsis thaliana columbia
gaactcgttgacacatattccactgatattaataactgtttaatctatgactttggaagagcaatgattcttttttcctatagaagtgagagaatgttcatattagagagaaaaaaaatctttgataacaaaacaaaatcccttgtctagttgtggtctcaagtagaaatttttgtttcactcacttccaacttgtctaagacattatatgttcccaagcgtttaaaccactgaaaaacttccattcattaaataaagcttataggaaaagatgcaacaagtgtatgacgttaatgtctacacacccaccttacctagactgttgttagaacactagtttaatatttttccttggctaggttattttactcaaacttacctttaataaaaaaaatttaattattggatagttccgcttaagggtttgaaccaaatacttatcggaaaaccgatcgaatggattcaatttttctatatccgatgaaccaattccgaatccaaaccgaaaaagagaaaaaattgatgtagaaagtttctttgtaaattaagaatatatttgccaaaacctga

SEQ ID NO: 34524 - DNA, 472 bp, Arabidopsis thaliana columbia
gatgaaaaattaagagaaatgaacttatgggttcagatcacagtccctacttcgttattgtaacgtccattgtatccaccaaaagcgactagtacatcttcaccattgtatgaactcaccactaaacttaatccctgtcagtagcaaaggaaaggacgatggaaatgaaataagcatgacttgactttttttcgaagtcttgaaaaggcttctaccgtgtttatttgtatagctatctgggaattaatatggataaagtctgtttatttaagtacctcgctagcaagaggtacacgtccttgaactgaagcaacgaccgaccatgcaagagttgacatgtttagtacaacactctccgatgcccctgcagtaatttgtcacaaaattagtcacccacacacacaaaaaaaaaaacccaagcaaatatcttttgttctagggggtgataaacagaacggttgggaagagaaaa

SEQ ID NO: 34525 - DNA, 378 bp, Arabidopsis thaliana columbia
tgcatggtaaggtaggttatagcaccaccaatgatatgcatggtcaggtaggttgtatgtctgacaatgaaactcttattctagattttgctcatatcagccccaatagtattcttactccagatttttgctaatatcagaaaaaaagaagcgaaactgacatgtttgtaacaacagctacaaaatgaaaattttgcctttctgggtctaatgttgcttaccgggtgaaaattctatccctctgagtaacatcagtaaaactactctacgaatacctgaacatacatatataagtcagagaatatctgcactagaaacaggtctattctaaaatttaggctcactcatcccgttaggaggaaaagaaaattgtcagcg

SEQ ID NO: 34526 - DNA, 513 bp, Arabidopsis thaliana columbia
tgaagaatagcatgattgacatagtttaggttcaagaagatcaaacgagaagagattttgtgaaatgtgaagaagtttgtgagaggatcaaagcttcttaacacaaagcttcttaacttggggaagatgataaagttgtgtagaaaatggcaaatgctctagtatatctactctaaatctctcattctagacttagtaagctatgatcacaacaattacaaacattatttctttgacaatgaccctataccaagttcatttgatctttttgactctcatccaattaattctctctttattttttgttttactcttttaattcatatgaaacctttctatttaagtattttcaataatagatggttttgtagtttaggcatttaagaaaatttgagactcttaaacatcctaatgagttggtgtcttgcatagctttttgcacatgatgcttttaacattactcatcttatttcggcatctatttttatcaactaagacacataacaacattta

SEQ ID NO: 34527 - DNA, 317 bp, Arabidopsis thaliana columbia
attcactcactacacactacaagtatctcagcaagagttttaagaatctcaattgacagtggcattaaagaaaaagtgaagctattaactggaaaaattgaaacttgagaacaaacacagaatgtagaagaaacctgttcggccttgtgaatcacgagagtgaagagagagaccatcagaggccaaggttctgagatcatcaatatcattgtatctagcagcctgtcaattcaaagaagtaaactttagctcacccaattaaaagtggtgggcatgaatcgattggaagagaacaacatggacttagtgatgacgag

SEQ ID NO: 34528 - DNA, 485 bp, Arabidopsis thaliana columbia
atcactgaaaccaaaccagttcgagtccaactaattgagtgatagcttcatttgtttgtttgtttttcgttttttctttcttttggatccaagaactaataagagtaaaagtagtattaagttatttgcagaggaagaaaatgacttggactttgtgtggtcagatttttctcatcaagagctatagagaatcattcattattacctttagttttgtttgacttcttctagttcttgggttgaaaattataagaaagtctcaatattttcatctatgtactataacaaatgggtccaactaataaaaatagaaagattttgcaaaatgaccccatcattatgttgacaattacaaatcatcatccataattaataacttgagcctctccaaagtcaaaaacaaacgttacaaacctaacaagaagactctctgtgttgtggctcatccccattttaaaagtaagaaatgatgggagacatataga

SEQ ID NO: 34529 - DNA, 362 bp, Arabidopsis thaliana columbia
gtttttggtgaaactcatagtatcgaagtcagctctctcctcccttcatcatcatcatcttgtgttctttctcccagaggtgatgatttcttagccaattcattttctgatatgattcattgtcttttagctttatagacaaggtagatgaatagagactctcaattaggaaacttaggttataaatcttgcttccaagtagttgatactattaccatcacagattcacaggactaagaaagcgatagtaaatatgtcattagtagtatatgtttaatgggggaaacgacaataattagtagttgtaatcaaaattttgttagctagttgagtgagttaacaaaaattgcaacaatttatac

SEQ ID NO: 34530 - DNA, 503 bp, Arabidopsis thaliana columbia
taatgaacattcaaatcacaaatgaccttttttactacaatcctaaaaaaatcttaaggtattcaattatttaaatgaacaataagaaaaagacacaaacacggtgggacccaaaaaggtctctcaaggtaggtcccacgagaataccctccattgctgagtgctttaaaaacagctgcaaacatctacgttttagcatccgaacaaaaaaaaaaacaagttttcttctttttacactcaagaatataaattccctgttctccagatcttttctcaagaaaatttaaagctttaacttaagaaagcttgaacctttctcttccaaccacatcttccttctttttatcctctagctcaacttagaaagaatagaataaagtggcaaaaccgaaagtgaaccaacttgtagtaaattaatagttatgggttcgaaacctaatgccatgaagaatgtggtggctatggcggcagtttctgctctgttccttctagggtttcttgtt

SEQ ID NO: 34531 - DNA, 448 bp, Arabidopsis thaliana columbia
catattctcaacaccgaacatatgtgatagatgaaatatctcaattgctctggaagttaccttcctcgaaacgagcattgagagcgtatcttctccctgatgaagaacagaggcagattcaaatggtcactgctttgctcattcagttggttcacaacagcacaagccttcctgaaacctcgagacaggctgccagtggaaactctatactagagacctcagttgatgttggctaccttactaagtgtcatgaagcggctacagaaacatgttgcctcttctggactcgtgtccttgaacgatttaccagttttaagggtcaggacgcttctgagataaaattgattattgagaatcttgttatggacttactgacagcattaaatcttcctgaatatccgtctgtgtctcctattcttgaggtaaatgtattgtgttactgtgtttt

SEQ ID NO: 34532 - DNA, 570 bp, Arabidopsis thaliana columbia
caagtccaataaaatcaaatagcttcctcaactacaaaaatcaggttttgtgatttctaaaggatcgtgtatctatgtatatgcatatgtatcgctgcctccataaaatctgaaaagaaaggaagagaatacaagcaagtctcgaaccttatccctttacatgtcaccactgtcgagatcacgacttcatcatcgtcttcgttagtgtctcggtccaccatcatgttatgttgatgtggagaagaagagaaaggagaaagagcagaataaacagacatgattgtgatccatgtaggaagataaaagaagaaagagacaaagagagagaatagatgacgagagagaagagtaacgtcacagaggagaagttatcatcacggtcaagtgttaggagaggaagagttaggttgtgggagtaagaaataggtgataggattaagatatgagcatatcgaatatgtgcagagaaaattagaaacaaagaaggaacaagatgaaagaaacaaaacaatttcaagttggggtttcttagactaatccatgtcgaaccagagagaaggataagacaag

SEQ ID NO: 34533 - DNA, 497 bp, Arabidopsis thaliana columbia
tcaatgttttcattttgatttgcagagtcttcagcggagtcgaaggagtggagatggaaaccgagccgttgtgcgtgagtcccgccattggcatgatgtattctggtcagccatctttgtgatccacttgatttgtttgggatttgtgctcgcggtgcttggactcaataggtttagaatatcagataggttaaacatcgataggtacactcaagggttcttggagaatcataaaggtctaacagaggattactggcctctctatgctgttgctggtggcattggagtctttatcagttgggtttggtcattgctgcttggctcttacgccaatgagatgatgaaagtttcggttcacatcttaacaacctatctagctgtagttagtgtactatgtttctggtgcagactgttcttttggggcggtgcattcgctgttggatctctgttgcagttcttggatgttatttcagttatagacaggtgcgtccgaggtt

SEQ ID NO: 34534 - DNA, 320 bp, Arabidopsis thaliana columbia
tatctatgaaaaaatcacactttacgttctgtactcttataatcattaagcttgctactatttatgtaagatgattccatttactcattagtcatttaccaacactttttgttttctcttttctgatccttcccatattctatcttatatcttaactcagccataaagccttttagaaaggtgctcgttgacgtataccctttcttctacgcctcaacgggtaactccggtggctttctatcgaaggtgtccctggagataacacatccgcggtttcgctgcgttggtcgtcaagcgcaatcgagatcccgtcgatcaaa

SEQ ID NO: 34535 - DNA, 510 bp, Arabidopsis thaliana columbia
ggatccccgaaagcaaaagagtactgaactagagagaaaaggaaaagactatcagaagagtgaaatgatgatgacgttggtatcagcaagcaccacatggcatggcacaactcttcacacgagtcacgtagctctttccttttccagacatattcgaccttccttgtccaagttgtcctctctttcaaatttgtgttcttaataagaaattggaccactattgtgtaccttttgggtagaaggatcgttaataacgaaaaaattcagatgaatgggaccagccggattaaataattaacattttctcgttttattaaattttagtgtattcattcattgtcgataggatcgtgaagtggtcccccttcattattaaatcagaagtttgcctaatacatatctacaagtgacctaacgattatgtaactctagagcgatgaaaaaaaagtcacctaacgtaacttctactaccttaaagataagctctagagacgagcaataaatatatac

SEQ ID NO: 34536 - DNA, 527 bp, Arabidopsis thaliana
tgaactccttgattctgctctctcgttatcattaaactttcgagggtttgaaacctcatcaatagctctaccatgtccctcaaatgaatctaaatctcttgcaaccgaaagcctatcacccttacccctggagttagcagcataaccaccttttgaatatgaactccgcgaccctgctctctgattatcagtaaacctgtcaggatttgaaacctcatcaacatcttcatcatctccttccaatctatctaaatctcttcttgactctctagattcccgcactttgctagctctttttacctcgttcctctctgcagattttcctgatctaggaatagccttcatagccagcttcttcctcatcaaatccagaattgatgatgaaccaaacccttcatccgcagaataattctcatcagaggcgtcatcctcgtcttcttcctcattgtgactcatatgctgcttcttctgcgttaccttcccaacaagagctttcactttctgggcctttaccttcaaaactcgca

SEQ ID NO: 34537 - DNA, 153 bp, Arabidopsis thaliana columbia
tccccaaactataattattcctgattatttaaataccagaactaagaaatattaaacttctccaacttacttgaataacatatccccacttaatctttaacaattcgaacgtacaaaacttaaacctatacccatttataatattcaaaccct

SEQ ID NO: 34538 - DNA, 514 bp, Arabidopsis thaliana columbia
gtcagagcagaatcaaaatcagacggagttgccaacgattgattgattagaaagagaagcaagagcttaggtaaaacaaaggaagatgagttttatcatctaccttatcggatattattctcaattgtttttttttttggctctataaagctactccaaaactttcacttgtattgactttcatgcttcttcaatcgtttggttattaatgaaaaaagaaagacaaaaaatattgtatttcaagctctcatggtgataacaagaggaacaagttaccgaaacacaaggcaacaacgcacaagatggaaacaacacgagctctaacgaacaacagattgagattcttagcaacttgaagtgtcaaagtaagaatctgcagcctacctaactcttccatcttcttgaagaagtacattggcttcaacgatcttctcaccatcaacgccatcgcaaacgggaatccgaagctatacagctctgaattgtcatttccttcatcggatctgctcgagtg

SEQ ID NO: 34539 - DNA, 422 bp, Arabidopsis thaliana columbia
ttggtttcttgtcagggaagcaaagatatagtgaatgtttcataaagccatactttagcatattctggaaaaacatctttggcattgttttgttttgtaaaaacatattctatttttaagaaagacattgaatttgggagcgtacctgcttgagtgcaggtactacccaaaatagtcttgcctttttaaaacatagatctcaatgtttatgttagtaaaggttgtttttctctttagtagcaatgaataaatcagactttgggtacagaaaacaacaagaatcagcaacatttgcatatccgctgattcaatagccaaaaggcagaagcgtttttggcctaacgtcggccatagatgtaaccagcataaggaacaatccttcgggtgaaggaaagagcttttaaactttctacaggagacat

SEQ ID NO: 34540 - DNA, 705 bp, Arabidopsis thaliana columbia
ttctgctttctctctcaatcagattttcatatcatctcttcgagaaacataaattataaatatttagttatgacttatgaaggttacaagattaaaattagaaattaatgattaaatcatccaaaaagtcaactaatgcccttatccatgcttctctgacaccaacatttgactaatctaattaaattaggaacaaaattattatcattaacaaatacacctccaacattaagtaaaatttctatatacacaaattttcaaacactaatggtttacttttcaactcaaaattcgaaataaattttccaagaaatataattcttatatcattgaacaagcctccaagttttcttaataagtttttcctctgtaatcatcatttgcttgttaagataagcaggtttcagttctattattcctcttttctaatttttttggattatattttccatcttcttgatatgtttttggttgtaactgattactaattcttgatcgctctaaaagttcacttttctttcttacagatcaaccaatcgaaagaaaccaaaatgggcttcaacgttgttgtgttcttgagttgtctgcttctacttcctcctgttacttttggtagcacatggaacgaaccacctgggttatagacggctcacgtcgaatcgctgagaccgatgagaactttatctgcgcaacgcttgattggtg

SEQ ID NO: 34541 - DNA, 521 bp, Arabidopsis thaliana columbia
tgctataacctaattctgaaaggttggtattttctgctgtaaaggtctcggacagcatcagaccagctcctgcagagttaacattcgggtaaatgtaactaaccctgtctcgagccgttgtcatgaacaagaacgctgcgtggcctaaccctgctagcttcgtggacagaaccatgtcatagtaccttccctgaaacatgacttaaaagaaaagttaactaagcagtctgataaaggaaagatagaaaaaacgttgaaatatttgaaagttacaaactttgaggagtccgatcatgtctgtgtattcagctggttcaggccaatgatcatccggatcatacacattggcccatctcacgtttttgtttagctcgtatgtttgtttcctctttcagtcgttaatatatctacctgaacaccaggatacctttcaaaacaacagaaacgtacggacaatgttctgcattttcagtttaaggttttaaaaaaatgtcgaatcggagacagagtcttatactttt

SEQ ID NO: 34542 - DNA, 568 bp, Arabidopsis thaliana columbia
tgaaaccgtatatacatatattgattgaagtgacaaatttgtacgtaccaatttgatcctgagcatgaacgatatgaagcatcagcaaaaaagtggcaactaacacacaatgtctctccattgttctccttactgtccacaggagagcttttttttaagatagcaagttatgcatatgagaatatgactatatgagctatactactcaaaagtccaagtcaactgcttataacataattgaaattgaataaattaattgattgagaatatgttttcacgatgcaaaatgattcgatagagcaagttgagtgaaaatgatataagaagtagtatttgtttttcgtcaacaatgacaagagttattattgttatgttctttagaacaaaaaacaccgttgactataagtaaactcaaaacaacggtgtattatcaatccacataatgtaatttcggtgtattattactattaatccacaaatgttctcatgaatttgttgactttgaattttgtatggcaattcgttggttgatttgtacgtttgtttgtgtctttggcgtcatggatga

SEQ ID NO: 34543 - DNA, 480 bp, Arabidopsis thaliana columbia
  unsure (1)..(480): unsure at all n locations
ttttggtcagatgtcttgtgaattttaaaagacaataatcaacatgtagatgattattccattatatgtgttgttgatgtattaagtcatttatcgatgagaaaactaactggattttgatttagtctgtttatcgttacaaagttcggtttattatacagatttaacattgttatgtaaaatttaacattgttatgtaaaatttaacatttaaaaccttcaagatgcaaaaatctagtaaatgcaactatattaaacaagactttattaattaaaaaaataatgaagaaaattacaatcagaacttcttccctcaggtttaatcccatggtccaatcaaagttatacaaatatcaaaaagatcccaaaaagaaaacaacaacaaagaggacgaaatgtattagggaaaaacagagagatctctcaaacaaatcatgataagaanaaacaaaggagagtgagagagagagaatgatagag

SEQ ID NO: 34544 - DNA, 559 bp, Arabidopsis thaliana columbia
gctaaaagttaaacatcagctttgctccacttgtcatctttattgaaaggtacaaagcacacgaatcttttcatcgagattaaacaaattttacaacagattagatgctttaattttgttccttaatcccatgcatgtgcatactaaatcactaaatgaaaaaaaaaaaaaaaagtaattttcatatcttatgagttatgggagatgaaatttgcaaggcaaatgcgtcaatacatgggaatagaaggagttagacatgtaaatttgaattttttggtatttagacatgtgtggatgcaaaaaagcttgcatggtttacaacttcaaagcctaaaccctactgcatatatagatatgtctcccattattttccatatattaaaaattatttatgtcaatgtctcttaataatttatacttgtaatttgcaagacgtcgtgtgttcctttttccatctttcataaatactaatattctcttgttgattagagcatcatcaatcggcatttagtactttgttagttaaatgatgcagtcgagagaggagatcagagatgat

SEQ ID NO: 34545 - DNA, 536 bp, Arabidopsis thaliana columbia
cacaaataaaacacaagcaccgcatcaataaggaagagaaactctattaagcgagataactctcagaggctttataaacttaaaccgaacacacagttgagcaaaagaagcaacctttagtttatctgattataacacttttcccaaaagagtaatcagagtctagggttgcatactttgatagtattaaattaacctcttttaaggttccaaggtggaatcttctgcaatatgcacacatgggtaacataggactaagcattaaaagagacaaaccaaatcacgcagctctagaacaatttaatcagcaatcaaagcaaaaccaatacacaacaagctaagaatctcaaagttactcacagagaaagcttagtaaaccaatactcaacaacaagccaacaatctcaaagttactcacagacaatagtttgaacatgccaaatgttccaattaagagactaaagttacaattgtgggtccaaagagtaagaaacacaacctctccaggagtagccagagaatcgcttgggctcgga

SEQ ID NO: 34546 - DNA, 320 bp, Arabidopsis thaliana columbia
gcaggtcgattggagctttctttggaatttgactaaacttatggtttctctactgttggactaggttggatttcttcatatccaatattatgtgtccgttgttgacttttctgatataatcaactttcttcaattgaggttttgcaacttcgccttcatagtcaacttattgcatggcggtgagaaaaagtctgcgaattatcgttacctattagcagtactgcgtatgagtagtttagtagaaaggaatcatcctgatagttgtagatggttttctgctcattgtatatgaattcagattaagaatcatacgcgagtga

SEQ ID NO: 34547 - DNA, 423 bp, Arabidopsis thaliana columbia
aaaatacacaataatttctctacaaacaaacaaaaattctctacatacacacagacaaaatcaatatgtttaatattcttccattaatggtgagttgaccaaaattaacaccacaattaaactcaaagtgactaaaaagattactaacaaaattgtcccgtacgataagacactgacgagagaagtcgtcgccttcctctaattagtctctgaataatccgatccagatcccaaatcctctcttcttcatcttcaccgatctggatctcccaaaaacctccaccaaaaaccaaaacaatgtcgtcctctcgattcgattcaaacaaacaattaacaacaagcagtctcgtaatcggctacgcactctgctcaagcctcctcgccgtaatcaacaaattagcaatcacatacttcaactaccca

SEQ ID NO: 34548 - DNA, 584 bp, Arabidopsis thaliana columbia
cgaaccatttcaccgaaccgaaagagaaagacggaaacttgagctgtgtgcagaagatgagctgaggtttggattgcagcctaatccggtttaaatcagaaccggtttaaatttgaccatagtgattgggtcctggtttagaggttttaagcaagtagaaaaataatgagctttaccatttccgttcacttcctagaaaagtaagtatatacctttctctgtatttccttcacctccggctaaatctccggcgaccgcgtaacttgttctccggtctgaatagtgaataaacacacacacggagccaaatccaggtgatctctttagttttcgatctctttctctagattcagattaaattataacagctgattgtctaaccacaaacctaaattgcaaaaagcttgtgaactttatctggaaatgaacactgtcgaaagatctttagggtttgtgaaatttattttttacattttccatagctagatttcatttgaatgataatcacttcgagatctgtaacacaaaatgtttcaattgagcttcttctgttcacaagtttgaatctaagacatttttttgca

SEQ ID NO: 34549 - DNA, 526 bp, Arabidopsis thaliana columbia
accactccaaaagcctcggattgaagaagaccgactttcactggagtttgttcaatccttcatctccattccctctcaatctgaagtttcatcaagtgctaaccaacgactttaaggatcctcttcatgaaaatcgacgatggaagaagagcggcattatgatcccgcctccaaggagcggtgattcccgacacttcttcaaatcgtcatctctgctgcgcctatttatcgaacccttccttttgctattgttttttagcatcttcagagatctccctattgaatttacaagattgcagaagaagggcattatgatcccgcatcaaacgagcggtgattaccaaccttctccaaactctgttcttcgatcctaatggtttttgaactcaagagcatacccgaatttatctatatctatcaggatattcaaccctttgtcccaatgtcctcgctgcgttttgcgtcgacgaacacagaggtacaggactctttctcaacgtcataccatcattgtttgatagtgact

SEQ ID NO: 34550 - DNA, 302 bp, Arabidopsis thaliana columbia
tacacatattgaagcaaaaactaataagttaaacactaccaaatgacatacttaaagacttgtagtggataacttataacgttgaaaaaacagcgcatatatcgatgattatggtccaagctttttctgcctcaattcaaattttatgaataatgaaaactagttttgtatgactttattgtaaaatattttctatcttaaaatatattttacccaaacatgtcttacttatacgacttggttttactcgtcatcataaccacaattctcccctctttaggtaaaaatttcagtgtgatttg

SEQ ID NO: 34551 - DNA, 571 bp, Arabidopsis thaliana columbia
gattatacattttcatctcttaggttgagcagagagactttaaaccaaaaagaagctttttccttcaattaaacgaagtagtttttacaatatgggaagagaacaacactaaggatactccaaaatcagagtttttgctcctgaaaaattcaaagggaacatcaacatcaaggaacagatgatttctcgttcccacaaatcatgatgcaatgggaacatcaacatcaataacgtttactaatcaagattatcatgaaataatcatcactttcagtgtcttcatataaaacaattcatccaagtcagacacatatgtagaataatcctaatgctttcagcttaactaaacttaaataagctaatacacatcacaaaactatacaattcagataaaaagcattgtttaatgtacgagcaaaagcatcaacctttcagataaaaagcgatcaatccgatgaaacccaaaaaccaaaagttgaaggatcatactcatcgatcaatgatcagtaatgaatggtatcaaaatccaatgatcataaaagagaatgtcaaaagaatacaaaaaacagag

SEQ ID NO: 34552 - DNA, 468 bp, Arabidopsis thaliana columbia
acggtgattagttatatttaacgttttacatgtctgtatatatattaaattgtcaatctgatccgattaatgttagcagagtcaactcgtaaaccaataactcattttaatataggagtctcatgtacactctcaactaaaatttaatgtttcgcagcaaaaaagataatgtaattagttgagaaagacattacaactgcattgattaagtttatgtaacatctcctctcccaacttcaaataattgagtctgttcccatctgaccagctcttggtatttaacgtgtacaagacaaaaccgttaactcttaactaaaacactccaattccaaatgccgattatttagtttttcaaccataccgtgaaaaactaaatattcgatgaacttggacatatgtgcaatagacatacatattttctcacgggccacggtgaaagggatatgtaccatggtcatgaaggttgaa

SEQ ID NO: 34553 - DNA, 573 bp, Arabidopsis thaliana columbia
caaataactaataatttctgaatatataattgtatttcggatattttcggttatccaaaatatttcggttcggtactgattcgatttcggctcttcggattatagtgtttagtatccattcaattattttcaattttcaaatttttaattcggttggttttttttgcttcggttcggattcggtacaatcggttcagctttaggcttttcaaaattaatatatttttaaaacattggcccatatgcaaataaatgttgtacatgtggacgtttggactaaggagatggtggtggcaggacgttacctcttgttgaagttattgggctcatttctcatgtgcttttcgaaaatttagttctttagtctagtgcaccttgttttaccgtatcgtatatttcaacttcttgttgattttgatagaatgatccgacacacaaaggttttgttatccacatacgtgtcgcaataccatgcaaaccagttttcgttatgtggtacaagatccagcctacatctaaagtatctaacacacattttctatttgctcacccaagataattacttatggtgga

SEQ ID NO: 34554 - DNA, 481 bp, Arabidopsis thaliana columbia
ataccttcccgtcgatgttagattttgcctatgataaaatcgttatgatatgggctttggataaacaaatgaaagcctgttagcaaccatcctcataatatatgttcattgttatcattatctatatatggaaaaattattagactagtaatatttttatgtagaaatgtttttaaccaaagccagtttatttttcttttatcaggtaacttaataaaatcatttatgtttcaacgaggactagtatgtttatgtagatcttatttggtcataggttcaatttcgtcttctttttttgctgacaaaagacaactaaatatctgatttctatgggtagatacttaattagttagtcttctaagtatatatatttaactcaccctatacaatatacatgtttctgatagttttaacaactcatatgataggtcttaattaggtttgttacttcaatgcatgcagacgttaatagcttagctag

SEQ ID NO: 34555 - DNA, 735 bp, Arabidopsis thaliana columbia
ttatattctgaatattgatataatcggtgagatagagatgagttcagaatttttttctcggtatcttaaatgatattgatttcattttctcaactttcattcaagagtgtttttggttaaaacataaaaacgtccattctaattatagtaatgcttgtgtggttacgacaacatgctcattcattgtaataaactggtgaaatatatagcaccattgacaaatagacagcctcagtaacaaagcaaggaaaaacaaaattaaaatttaataaccggttatattaaatatcgagaaccagtccgtagaatttcatgggaaaccgggccggtccttgatataaagaaagagagagacgtttcttaactgaagcagtacacaaactccaaacaaatcccaagtggacaaccgaagaacccacacaaactaactctctttcctaatccacatacttgcatttttatatataaacactctgtccttatatagttctgtatattacatgtaaatatctctcattaatacaacctcacgaagaaaaccatttgttttcttagagagagccaagaatattaaaagagatatagagaaaagatttgctttaataatgccaacgtcgatacagtttcagagatcctccaccgccgcagaagcagccaacgccaccgtaagacactatccccaccaccatcagaaacaggttcaaaaagtgagcctacgcgcgggatggctgatgt

SEQ ID NO: 34556 - DNA, 467 bp, Arabidopsis thaliana columbia
atatgcattccgatgaacataactaaatccgattatctacaataataaaatatttatcttagttttatgtctatgtcagtaattggcaaacaaaaaaaacatgcctggcaatagttgacattgcaacatgtctgtttcgtttattttcccaagaccatcggagtctgttaacattttgaattcgaaacttacgtagaaaataaagaattaatcataagttacgtttttgggtcatcccaaggcaagttttgagtcaatatttgtgtctttgatatatatacgacaaaaaggcatatcggtttcaggcggattttacgtaaaatattaaaactaattttgtgtaaaaacctaaaacgaagaagagaagaagaagacgaaagagtacacttacttggagtttccagaaagtgacgtcactgtgacataacgcggtgcagatgattcgaatccgaacctcgaaaggctgc

SEQ ID NO: 34557 - DNA, 304 bp, Arabidopsis thaliana columbia
agaggagcccggaacgaagactcagtatgttgtgcacagagttgaaagcatcgaagctccgattaaagtaacaggttaagggagcatggtaagcgacacaagaaaatcctcattccttcaacgggagagtgagatctcttaggaagcgttgtgtaaattcagagtacggaagtagaggatcaggaatatagcttggagagataagtcgataattaggatcggagtgtaacacgtaggacagaggttgagaagagtcaccgtggatatggcagatcaagatacctaatcgtagatccgatgagat

SEQ ID NO: 34558 - DNA, 1409 bp, Arabidopsis thaliana columbia
gtttcactcaagggaggctattttaagtcgagtctgccactgaagctagcaaggtaactttcttattagttacaaaggatcaacttaagtacttaacatttacgacttgtaaattatttatgcagcttttcatggctagcagtttcacagacaattccacaactgaatagatgggcagattttatcctttcacagaagcgaccacaacaaacagttctacctccaccacgctaaagatcttcgataggctttgtctccactctgaaaatattcctaggcaaatccaaggattgtaattggaaattgttcatcattttaacttggttaattggataattttattcctttgttggtcatactagtctgcttttcattttcaattctcttgtattttaaattgtttaggaatacttgtcttcgtttcgactttggccacgcaacaagaaacatcttatgtaataacagtcattaagctactttatgtaaaaacaaccttatactttatgtaagacaaaacatatgggcccaaaaaggcccaataataatcatttacattggttcgtaagtcagtttgatttttgtttcctcacctccccgatcgtcggaggatgtagaaggtggcggcggcggctctcacctgcttcatcgcagtttagaaatgactagaggagatcgacgtagctccccgagtttcttctccggctcgaagcggagttggctagggtttcacggtggctcacggtcgccacttctattgattccgagctgatagatgatggtggctcgaggtcaatcgtgcgtatgggtttgcggctccgatcatccctgtgacggaaatcgagcggcggatcccgcagctgaggggtgatgacggctatcgtcggaggtatttcgtgctcgctttctcttttcgggagtttcagcgacggcggttcatgtgatggggttaggtcctgcggtaagatacggttcctccggcttgcgggattggtggctccggtctcgggttgttggcggtggctgtgctcgcaaccgtcgaataagggatagcctcgttgagagaatatcggttttatttccggtttaaatctcatcaacaaaccatctctaaaccgggttgtacttatgaattgaaaacatcacgtagttttattatctcttctatctgaaaacagcacgcatgttatagcattttgaatgattttttataagggattatttagaggcctaaggcgcgtaaagaagagctaaaagcgtaacagaagaatctctctcagtcgcaacagtttccggttactccaagatcgccgtcgtgcacctttcttctctcgctctctggttctgaggttagctcgtaaatctcatcgaccatcacttcttctactactcgttccaattaccatagtacg

SEQ ID NO: 34559 - DNA, 845 bp, Arabidopsis thaliana columbia
gagctgcaatgataagatagatgatatcaaaaggggaagagagagatgcacattgcagtaccagatgactttgcaagcaaatcagtcgacaagataaatgtcaccttaatctaataccaagaaacaaatagtgctatctaggtataacttacactcagtgcagccaaaaacatagacttgcttcccatagagctctccaccttcctccagagcttcctgtcatacaaagcaaagagtacttcataacatactagttaagcacagaaaaaaaagttatgccacactaaatgaactataaatcattaacaatgggaaatgaaacagtattatagaagccacttacttcaagatttgtaaaatcccagttgaattcattaagtgcatcctgttggtcccactgtattcacaatatacagagcataagccacaaatacaacagtttgatcatgaggataagagagctccaaaagcaatgttgctgccaaacttcttgaaactaaatacctccgttcccactgaaaatgtagccttccacaaatcctcctgttatacaaaacaatcatgaaaaccaaaacaaaggttcataaaactcaaaatgttccaaaatttctgagcaaaacatcatggggacgacaagaaattataattctatgaaagaaacatcacacaaatcttcaagaaaagtttctatccaagacgctataattataacattctgcaagaacaacaaaacgtaagaaaatatctcagatctaacttcgtaatcgttaaacacacacacacaacaagtcagcgaaaggcgagtagaaatccaaaccagaagatgaggaaaataggatccagat

SEQ ID NO: 34560 - DNA, 332 bp, Arabidopsis thaliana columbia
gattcgtctagtgctgctgatattcgtaagtaattttgattcgttgctctgatttttgagttcgatttgaaatcaatcttgatttttttggaattttcgtgattgctctaattgggtaatcgtggtcgtcgcggttttggaattgtgagcttgcttcatctgaatggcctaaaatagttgatgtataagtaacgattggtagagaattacgattttgggaacattctgctgtgcaagtccagatagtggttgtctagttgatcgatatgagttatatgaccaatgggtatgcaataggtataggtgtatggtatatcgtcgtctgcctatgt

SEQ ID NO: 34561 - DNA, 574 bp, Arabidopsis thaliana columbia
tggctgatccataatactttctactcaatattcttgcttgcgagttctggtgatgatgttattttcatcatttcatttttcagaaacacagaatgtcagcagtcttgcaccacggtaactgaacttatgaccaatgaaagatggtggaatttgtatgacaatctgtggaagataatatgtgatattaatggaaggggtccggtaaagatgtctcccaaatcgttagctactggtccctctattggccaaagagcaagaggtttagtagaatcattgaatgttccagctgctgaaatggccgcagttgttgtgtcaggaggaattggcagtgcattgagtggaaaaatgaacaaaaacgttgataaagcaatgctcctaaggggggagaaatgcccacgaatcgtgtttaggcttgtcaccctttatctgtgcatgtcttcactggaaaaagccactagatgtgtacagcaggtgacctcactcttgccttccttcttagctgctgatgatgaacaaagcaagagcagactgcatctctttattgggtgtttgctttatgtgagacccagtatgg

SEQ ID NO: 34562 - DNA, 558 bp, Arabidopsis thaliana columbia
tggagagatagagttgaaaaaagctccgctaacccctactctgtagtgacggggtcataatgccagtctttttcactctattggttgtgatagagaatttcagatagggttcatactaaacttaactgttgatctcgacaaaggtaactattagacaaacctaaagaaacggatactctattagcgtgaagttcacgatcagcaaaatcagagctaaagggtgctaaaggaaaataccttgacagaaaattatcgatacttaacacgggcagcaaaactccaagacactttccaagtgagccttaacccaaagcgattcgagatcaaactttcacaattacttttttctcttaaccattattttttaaacaccaagaacatgtcatcaatcagactcaaaaatgctaaacaagattaggataactatggtggaattgtggaagaaacaaactgaacataaaatagtaatggtggttgatataaacaataggcccgatgaaaactacaatagatggaaaataaagggaatatttcattaataaccggactttcggcaaa

SEQ ID NO: 34563 - DNA, 539 bp, Arabidopsis thaliana columbia
tgtggatctttccctcattatgcagatattcaacagcatgaagcaaatcgcgtgtgatacaagcgattgatgtttcatccaacggattattagattgaagctgcaaaagatatatcagtttaaggattataagttgcatcaaagagaatataagtgcaggacaagatctccaccatgcgtgcatgatcacacacaaagttatacttccaaattccaagagttctgagctacaaagtagtgagttaacatacaagatcagcaacagagccaccggccatatattccatgatgatccacaacttggtctgatgaaggtaagaaccatagtattcggtgatatatgggcaacgacattgtgacaatactgaaatttcctggggtcaacaacaaaaactgagcatgacaatcgccacacaaaaatataaagcacagatataaacgtcaataagaaataccttctgaatatcttcgatctcatcttctctgccagatatcaagtaaaaaggttagttagaaaattactgagcctgatggtattc

SEQ ID NO: 34564 - DNA, 475 bp, Arabidopsis thaliana columbia
aaatggcaagaaaaatgatgctccatgttgattttgtttgtggtcaagcgagctccacataaaataacaatctcagtatgtgtttgtggcaatttgagttgcagaccaagctttggtaaagcggtctttggaatttctctgccgctggttttaggatttttggctataattggaaaacccactcgaaccggaacgtaagccaaactgatgataacatgaaccaaagtaactgaaccgaacaaaggaaatcaccgagtcgaagttaccttcttggtttgatgaactcggatcaaattatcgagttgactcgaaaaagaaaaatacacagaagatgagaagaacgaacggaaggacactaactacagcagaaatatcaggagacgagcagtcacacatagaagcatccgattactaggaggctccttgtgggcttgatagttaaaaggggaaagcaagcgattcgtgatgaaaccta

SEQ ID NO: 34565 - DNA, 536 bp, Arabidopsis thaliana columbia
gttaccatttctgatttattctcttcccagataagctccccggaactctgatcatctatattaaacttaaatcatgatcttatagtgcttgtagcatatttagaacctgccaggctgcgacaagcttttgtgaatgttatgtgttttctggccattcccacatattaggttgtctctccatgaaaattagcatttgtcaaaaagattttctgattatgctagcgtttgcgctcgaacacttcgggcttgggatttgtcctataaagctgaggttccacaacatactaggctgtcaaaaaccagccacaatatagttttttgcggtttgatgatttctctgataagcctgacactcggcgctggctaggttggcaccgtaggattgttgcattagaaccacaatacttacttcttcaaacggttttctgattctgctgtgttttggcttcagcgtttgctctattcccttgagagtggcatttagttgacaaacccaaaatactaggtttttggaaaccacaacatttctatatact

SEQ ID NO: 34566 - DNA, 267 bp, Arabidopsis thaliana columbia
atatataagtgattgagatgtcgttatcatttgatttgtgtggggacttgtccttgcgttgataagtgtgtattttggatgttttgagcatagctttgcgatgagtttaggatcatatgatgactgttctatacgcttcgtcatgctttgtgatgagcttgcacgcttacgctagttttggatggatgctggatacttgtgtcgttttaacgtgatggagaggtgttgaggagttacttggaagaagcggatgcgatgatggaaaag

SEQ ID NO: 34567 - DNA, 504 bp, Arabidopsis thaliana columbia
tgggaaaaagatgaataagactgttagtgtgcaaccatccaagggatccgggaaaggaactaggcttgtgaacatcaatctcgaacgttgctgtgtaaatttctgtgatgatacaggattggataatacagttattgacgatcctaaatctgtcaattatggatcacaaggtggtcgggtttcatttagttcactggctgacggcacaccgtcgcactgcgagcattctgtccactgctcctgaagcttgtaaaagactgaagtactcagtctctcttgaaatatcacagtttagcttttgtctcaacaaggataaactctcaactcaaatggaacttggaagggcaaaatccatctaccaggagtatctggaagaacatacgccttgttcgaatgtcatattgtttgatatgcacaatgctaagcttgtacgtcgatccggtggtcttaatgaaattgatgtctgttctctcttcagtgctactcatatttcgctgggttggg

SEQ ID NO: 34568 - DNA, 625 bp, Arabidopsis thaliana columbia
gttagtatacttggattgataaactatggtgcgagtggttaggagacgagggtccttcagatgaggagaaggctacgatcccggagcatgactttgccattgtcacattctcctacttctacaatttgggtaggctgggtttgcttgatgatccgggccgtcttctcacatctagtcagtcagaatcagggaatggtgaggacagtggcaggaagagaaagaagtctttctcggatccagaggacaccagtgaatctctgtgtaatcagtatgactcttctgaggaggtttcttcaggtcataattcaaactcgtcaagagatctaatagctgattatgatgatagtctcatgagcaaaagagtcgtgaagaacagaacggtaagacgggagctgaggaggcaacaacgaatattttctgaaagaatatgcgaagtctgtaaacaaaagatgcttccagggaaagatgcggcacgatactaaacatgaagacgggaaatcttgcttgtggcagcagaaacctcctgggggcgtttcatctatttcatgtgtcgtgtgtcgtcactggttctcttctgtgagagtgaaatcttgggacaagatggtgagtggaaaggaaaaagaga

SEQ ID NO: 34569 - DNA, 678 bp, Arabidopsis thaliana columbia
tgttttggggctttgttgctactgacattgcaagttggatgagatttcttggtgggttggaggatctctattgtcctttttccatttgggatatttataggtaaagcagagcatccacatgtctgctttgcctccaacactatcgccgcattacgattcatccaaaattatgagatccatagaaagcattcaaataaatatgtctcatttttgtgccaagaacaatttccatcaatctttggtcttcctcgagttgatgtaggtgtaagggatgttttaagtttttgtaccctagaggaggcattgggtcatattcatgtctactcaatagttgctgattacatcgttttccagtgttttagttacctaaaaaaatgaacaactctgaaactatacacctatgaatccacaaccagttagcatgtactttcatttgctaaagcaaacaaatcatgttgattcgacttcacaatatttttggttctatccatacatttcacctgtatctaataacaaaacaatattttttaacttgaatatcaacataatattttcaaagaaatttttttcattttaggaaaaaaatatttacaatattattttattttatccatttccttatagaattataacttaccgtatgttgttttagtttttttaacacgtgtcaaaatccaa

SEQ ID NO: 34570 - DNA, 711 bp, Arabidopsis thaliana columbia
ttcctctttctacaaggctttcaatccattatcctcttgcgatctctggatctcttcctcctaccgtcggcttgcctcctctctttgatcggagtaacatcttcgccgcttcatatgactctgttgtagtcgaggactttcttttggtctcaggcggacttccaatttaggagattgggttaagggataaagatttcttcaagtcttctttgagcttctttcagacggaaccggtgattgttcatcagatctgcaagacgaaaactgtagaaggagtacggtggtggttgcttgaagccaacggaggtgctgagtcaactcgcagatttgcccggcgccgactgcttctccttctccttcttatgtgttaacacgtggtgttacacgtggtgttacacgtggtggctccttattttcttaatcttttactttatttagtttaagattaagcagttgttaacctaatcaaggatgtatatgttggagaatgggcttatgtaattttcacttctttgtactgcccattggcgttccgttttaatggaatttggccgactaaaaacaaaaaaagcttctactttacagatgagaaggagagacagacaagtttcaatgggccgaacctaaaacccatatttagatattttgattcctagtttcacatatctataggctaaacccatattaatactaaattatttgatatttgta

SEQ ID NO: 34571 - DNA, 578 bp, Arabidopsis thaliana columbia
  unsure (1)..(578): unsure at all n locations
tcaacaaaattaattacatctcaaaagagttattactaacatataatataattatatctctttatttaattttcatcagcggtatatatatttcatctttttattaataaaattccagatgacaaaaataaaaccaaaacataataattagacgtaagaaagccaccctagccaaaatatgtttgtggtttaaaaaaattgaaagcataggaacaaaacagattatggacggctaaagcacacgtgcctcccacctgacactcatgccatcatccccatctacacgaaactcgaagattggactcatgatgctaccactctacttttcaaatacattttaaaaaaaaactcataactcactacagtttttttacttttgaatttaattttcttcctacacaattcatagatgaaaaaagaattttacatgtctaatttataaaccaaaccatgaaaccataattcaatataatgaggaaactaatgaaaacgataactacttttttgtgtcatgatcatctgattttcttatttctatttttgggtatctcttatactanattgtttgatgttgacag

SEQ ID NO: 34572 - DNA, 585 bp, Arabidopsis thaliana columbia
gacgcattaaacttatttgtcgattctttttaaacctctatttttcatcttgtttatcgttgaggaatgtttggtttatgtcggtatgtaaatttgaaataaaatgaatgtaatgttattatcaagaagtatacttatcagagtggtacaattagtttacgtacttgcaaagttacaaaagttcagcctaacagtaacagaacaatgaataaaagcagaggaagatgaccaatcgcaacagaaagcgatacagccagccacaaaattcaaacagccacctatccgtttagttgccgctctttcgagaaccagtcctctgttttattacaaccaccataagactactcatttgcagacctttagccgcacttagtattctatttatacaccattacctttaccattttagcttcttcaaaaccgtgtttataagaaactcttgtgacctccaggtttgtaattgaggctgaggtcacgggtagtaatcttgatagtgctactttagatgtctcggtatgaagagatttagagaaatcgagtttagagtattataagttgagtgctaatactttgttgggtgtttag

SEQ ID NO: 34573 - DNA, 586 bp, Arabidopsis thaliana columbia
ggtttttatccaaagcacataatctatttggatgtgtagtttcgggttttggatacgaacataaagatattgtcatatagatctcagcgtacggacagagatcgtcgtttcgtggtaggccgaagaatccgcaataaaacagaattgggaatgttttgcctttttattacagagggaaaacattgtactgtaagaaagtttcattaatgtaatgtagcacctttattacctttactattcaataaatatgtagcaagaaaacaaaaaagaatacaatttgtgggagaaacaacttttgcgtaggctttttattaatcacacgattataccatcatcacaaacctctattagcagagggatcagaagcaccaagctccttgtacatgtttgttattgcttctgcgaaatattcctttgcttgtggtctcttaatctgcaatattcaatcaaatccatttgcctcaatccattttcacaattggttttgctaattacccacatccaatccagatatgctttttttacagattttaaaagagagacagcatgatgtttactaaccacactaattataggagtaggacta

SEQ ID NO: 34574 - DNA, 238 bp, Arabidopsis thaliana columbia
gtgagagatggagcgagtgagacgagagcgagagtgtgtgcgtgcgtgtgagcgtgaggacgagcgcgagagagtgcgtgcgagcgtgagcgagagcgagtgagcgagtgcgtgtgtgtgagcgagagtgcgcgtgcgcgatgtgtgtgagcgagagagcgcgagagagagagcgcgagcgcgagcgagcgtgtgtgtgcgagtgtgagcgtgcgcgagagagagtcggcgtgtgaga

SEQ ID NO: 34575 - DNA, 507 bp, Arabidopsis thaliana columbia
gaatcaaagctgtaaaatttaaatggtatcagattccaaagttattgcttttgaaggttcttaaaaaagtcaagttctttaaaaaccatagactttcttcttcattcttgaaccatttgatagatggcaaatttttctctcttcctcttaaaaatggagttgtttctctgtttcgtcactctgtttttactatcacaatctgttgttgcattgagtataacagagaaacaagagattgaatgtgcaatgtgtttagagtgtgagaatccatgtgatcagccacctcctccgtcgccttcccctccgcctcctccgccaccactagaactcctttgtcctccaccgctaccaccgcctccacccccctgtagagattttctgtccgccaccgccttctccaccacctccttctcctcctcctccttcaccagcaccaccatgtaaccactgcctccttgcgcttccatcagcgttgcagccggcttgcaatgaatgtgttcgaataag

SEQ ID NO: 34576 - DNA, 562 bp, Arabidopsis thaliana columbia
ttgtccattaataaaggataactaaagatataaacgatttgtttagatgcgtctttatctaaatgtgaagagtacgaagtataaactatctacatatcccttataggaaacacatacatatagtttgcgggagtagtaagtcatccttcatggttatcaaacttccactgaaaacactttagagatacaagttaccttagataatgaagtagaaggatttttggactctccaaagttcatgcttgatagattctcataaagcattttagatatatcaacaatctgcgaaagagaggagaaagcaactttaaatgcataggttagttataaaaggcgaaagagaatttacgacctacctcaatccactcagcacagaaatcagaatatggaggtcggtatagcttaacccttccttccgctgtgcaaacagccagtaagcacctgagcagagttatttgaatcacgaatttaggacatagagaaacaagacaaaactgaacatgttacaagacataccgctcccgtggtttggagacattcctatctcagaccatgagagaga

SEQ ID NO: 34577 - DNA, 588 bp, Arabidopsis thaliana columbia
gtccaacacgcaaccggttcatgccaaacaagcaagctgttcgaaccagggacgtacaatgagtgacacatgtcaacatataagtgatgatagttaaggaaagaaacatcagaacaaatgattaacatgaagaagagactgatgtgtctctgcagccaggcggcgaacgacgtgaaatacacttcttcagttctttttttctatctttcaatacgcaaaaattaaaacagagagcaatctcagtagctaacgtggcgatcggagagtcgagtgcacgtgcaaagtgttttgaagacaaagtcacgccaaaggcgagcaccagagagaaataggcgtgaacgctgtcctatttttttaagttcaaactcacggaaaatcacacaaaataagacataaataaatgattttataaagttatgctgattacaaaatactaaaaacttatgtcaatatttgaaactatagagaaaagagaactcatatcaactctgcaaataactcagctcctaaatgcagcactgaaatgtagaaactttaatgtataccattttcatggcactgttaccattgtacatacatccatcattg

SEQ ID NO: 34578 - DNA, 616 bp, Arabidopsis thaliana columbia
cttaactagtctatatcgcatgggatcttagagcacttccaacggagactgtaaatatttcttttataacttaaataataaaaataatttaaaaactagtaagagagcgaatagaaccgaaaagatacgattctaaaacgagaactctagcacctgtgatgagaaacccatatgagatgtgatactgtgtaattagtcagtttttttatttctaattaagaaataataataattacatttaaataattaacataatataggtttgaacctgagagtggatttcagcgttggaggtgctcataggaagtaagacttgatcttcaaagcttgatgatgcttcctccaaggagtaaggactttgtggttattagggttacaaatctgaaaacaatattttccctatatacatactttcattctttagtggtaacatatattgcatatgaacgtttctagacaagtgtatatatattttttcttttccttttcttcatttccattttcctagttttaaattttccataaattttcgtagttactacataatattttgggcaggccctaatatttttgtattgtgcgatgaaaatgtaaactggatgatagaatgatgtat

SEQ ID NO: 34579 - DNA, 611 bp, Arabidopsis thaliana columbia
cagtctggttagccaaaatctggtcatctatgattgaaccatgtttcccgacaggcggaatactaagtgaacgtttcctcatcttggctttatccgaggcggctactcccattctgtttctgtattcactcgtgagctcaagggattcagtcaatggctggttcgttgtcttgaggaaaagatcgaggttttgggagtatttgtcatctttgttggtctttgaagcctcgttgtggttgttttgcgataccatggagattgtgtctcgagactcttcttcttcgttgtctgtccagtaactcttgtcttccattgccagatcatcgtactcttcatctgactttgtcgattcctcatccaccgatccaatctggtttaagattacatgtgagagtcgtaaaactataccgaaagctacactaaaaacatgataaatggcattaacatcctcccaatgactaaagatttggttactcgtcgcggttgcgctcgtcattgttatcgctgagatcttcatcagaatcaggctcatgaaaatcatcgtcgcctgcttcatcatcttcatcgctccattcacagactggccgcgatcagctgcatggaggatatgt

SEQ ID NO: 34580 - DNA, 841 bp, Arabidopsis thaliana columbia
taaaatctataagtataatactaaatatacgcatcttcaaacaaagaaacatctctatcaacacttttgtcaccttcacacttctcatctacatttctatcagttaaaccgtcattatatgagcttagaccgttgatatgctgcgttgggcctgcaaataaagacattaaaatgacaaacattagcccaaagacatgttaagcagccgacaaaattaggcacatcattcactaaatgctggttctaaccgtctgatgataaaatatatctgtcagccctcatggcagcttcactccgatcatctccgtttccaacagaaccaccttgactagatgaggtcagcgggctagagatgtttgttgttgctacgagaaggaacaaataaatagaaatattgatataatgcaaacaacgtgaagaggaaacaacaataaagcaaggtttataaccttcagaagaacgatgtccattttcagatatggcatctacattagatgaggtaagattgggatcaccatcagacggagctgcaagaacacacatcatatataaaacttttcaagcaaattgtgtacataccccaaatttgtcacacctaaccttcagacgacacatcactatcaacacttatctcatgtgaaacagaaacatctctgttgcagttggagttactggaatggatgagggcacaataaaggaaactttagtaacacaagaagaatattttcaatatcacgttagattgtaaagaacaccattacgcataactagttaaattagctgttagaatatgtaggcaaattaaagtggtaagaagtaacacatttgaaggaatggggat

SEQ ID NO: 34581 - DNA, 542 bp, Arabidopsis thaliana columbia
gatacgaatggagtttctttcctcacttatacatttacgagaagcattccactaaagcaatagtcttaaggtctgagaagagctcctcccactaacacacaaacaagtacagattcaattagaacacacaccaaaatttgatatgtacgatgctatataatatacgtatctagcttctaattcccaaacaaacaaatgtcaagctcctgatatgacttcaacagagaaaccctgatttgaaaaaaaaaatccatagcagagcaaaaaaaaaccacacctttccacattcgctaaaatggcaaagagcccagacgatgtttttacctgaaatgtgggatctgggaagctaatcaacgaagagactctttatatatgtgttccccaaatgtgggatctgggaagccaaacttgtattttgtccacatcggttacatacctcaaaatgttttactttatatatgaaattaaatcaatacttgtacgtcgagctcagtaacgtgggcttgtgacccgtgtggggacaataagttggtggacactgg

SEQ ID NO: 34582 - DNA, 673 bp, Arabidopsis thaliana columbia
cgataacattatacgttgttgttatcttaaaacttgtgttcatttaaaaaactttgcaataggctgccttaccctctgatggcggggttgtattacccccgagggtgattctattgatttattaggaacaaatgaactggttactaagtcaacaagtacctgttgattattcccttacttctttcactgttattagatactacgacatttcaacaggctgtcgccggtaatgaggattctcccagggaaggggttgaaaccccctacaagtttaatatgcaggttaacgaataacctcgtttttaattgataaattatatcttttattatttgctaacgactttgtatacctgtataaataggatgttggcagaggcgctccttctgtggtttcaacagtttgcgaggtatgattttttataagttagtgttctagttcctaataatttatttatcctataaacgtcggattacctaataattttggcgtttttgttgcacatgttaattggtgatcataggattctgacgaggtagtcactaacctgttatccatttaatgttggtgttatgttttacaatttatttaacaatgtttacccattttcaggattttacgaccccccccctcccccttcaaaagctgcaaagggctccctccaggtaaatttgt

SEQ ID NO: 34583 - DNA, 452 bp, Arabidopsis thaliana columbia
agttatggaaaagaacaataatcctgtactatacaaacccaacttcagacaacaagaacatttttttttctttttgaaaaaggtataacaaaaacattactcaaattaacctatttgatctataatttttaagtgaaaaatatagtcttgaattatacaaacccaaacttcatacgatcatgataaaaacatgactccaagtccaacatattttgatcatactacatatatattgaaaacatatatagacaccacaataaacatcatgcactatacggtgattaactttcaactatatatatatatagtatatggttacgtggatcgaacgtgagggaaaccgctgcaagcttaatgctgacgatgaccgccgagtcgaagatcaggatcaagatcaccatcttgaggttgagaacctccggtctctggtgggctccggtgagtgtcatcat

SEQ ID NO: 34584 - DNA, 628 bp, Arabidopsis thaliana columbia
gggactatgtatatatacttcagcatatgttgaaaattactgtctaaagaatattatggccacatgataatgacgttacaagattgtgaaatgattcctctatttccttcatttcaactctattccattcataatcatgtgggcataataagagttgaaatggttgtatgaatctaccctgtgaataagtactattgacaatatcttttaggaaaggtatacttatagatttttcagtcctctaacatggttgtatgaagatgtattaaacaaagaccccagcttcgctggaaaagcagctccttaaattcccaagaagaaaccaattaatgaaaacagtaaggcaattgtcaaatgattaacatagtatttgggaagcgtgtagattcaagagaatttaatgaagaaaaggcctcgtaaagtcgaccgataaaacgggatctcttatctgttaaacttaaatattaggtttagaatcttttttgactttcggaaaaaggaagtctcatgtgcctcacatgtgaatgtgatccctctattctaactatgcaagtatttgtatatatatagagcattcgtacatacaaaaagttggacggacgtgaccgagtctttgtgcggaagaaaa

SEQ ID NO: 34585 - DNA, 501 bp, Arabidopsis thaliana columbia
acgtatggctcacaatgcatttgtgttacctttgcatatttgcccttcttctctcttatatttttcagtttttccacattagtttgttttgtcgtgttcaaaataataataatcaaatcactctttttttttaatcagagatcaagactctcttaccactgactaatcttcttaaaaactcttggtgagtgtacccgccgtataacccgcttactaaatttgtttattgacgaagagtgtatttaatctagtattttaagtgatttgtgtaaaatttacaaattttatgttatctaattatggattttaataattttaataataaaatttagtgttattaaactaataatttaaaaatttattgttattgaaaacggtttgtcaatttgattcttattaattttgaaagattggagaagatttgagaaaaacattttagttaaaaatatagaaatccaaattatacggttttagatgaaatttgaaaagattttataaaaa

SEQ ID NO: 34586 - DNA, 869 bp, Arabidopsis thaliana columbia
acagcaatcgccacttctccaatatcatcctaaatgatattaattttatatagtattggaacatgtgtcgtcttctttacgtctcatctctctatagcaaattatagtatatgcttaaaagatacgtgtaaacgttttgaatagcacgatccatcgaccaacacttccataactagatgttttatcacacacacgtcataagatattggttaatggcttatgtggtgtgtacagtgtacttaacgtgacctcctatcttttttgtttcatccaagggagagaaagagagtttaatttgaatatgtgtagttggacttgggacctcccactttttggaattagccctctttacagatacgcgtgaaggaggtccatacttgactttactgacttctattattgggtctatcggttactgttataagaacccccaatagcccgtttataaagttcaggcctgagtcctgcctgactaaaatatttgttctctgctaacaaatatttgcttggaactataaaacactttgatattttggcccaacatgaaaacacaattttagtttagtttagtataatgagtaaagaaagagtgtcaaatgcagcatttgaaatgagtaaagaaagactgtcaattttagtattgtttagtataaatacatttgaaatgcataaccctatagcaattagtttagtgaaaaatgcaagataaaaggaaacagtagcaagatttggtattggttaatccatcactaatctgattcaaggtcaaaccggtttgaccccataccaatctgaaatttgatccaatattggtaaatatactagtgtacatttgttgggattttattgcggttttattggaaattttt

SEQ ID NO: 34587 - DNA, 562 bp, Arabidopsis thaliana columbia
tgaatcagaacaagatagaatttttcaacctagcaaattacaaagcgatgcatctgcgctaagtcaccaaccattgaatcgttttaaaaaaattcagaagatcaaacagagctccaccacaaaccctaattgggcgataacgaaaagactcaacacaaaacaggatcgcttaaaatccccaaaatctcagattcgactttttgtaattcctaaatcagaaacttgacaagaaaaacatcaccaaatccaaaaactttggaatctaagatacattataaggaaagttacgaattgggtttgatcgattctcttacagggaacgtgatctgagtgaaaagatgagagcttccttcgagagaaaggtaagaataagctcacgaaatctgaaatccaaaggaaactgtcgccgccagatttcccagaaattttatctatttcgattaatctctcttatacgttactatttattttatatctcttttgttggtcaacgacccggtttgtcatccggtttctgatgtttggtttaggcatctgacatctaccgatatgggccggtaat

SEQ ID NO: 34588 - DNA, 482 bp, Arabidopsis thaliana columbia
ctgtctgcaaaaaaaaaaaaacgtttacaatttaccttcacaaataacaaaactcgttatctaagatatgagaaagtataatttatttcaaatatattaattaaaatagatgaaaaaattgtattcgttcccttcaaatgtaacccttggcttagatttatttttgtcaattactataaacttactgtaaattacatacaaccttaaaatctccaaaatgaaactattgaccaaaaaaaaaaaaaaaaaattttcataaacctgaaaattaagtaagaaaacgtgtatgttaagtgtatatatatctacagtcaccttccattactctccatcatctctctcacttccacaaaactcaaaaaaatgtctcccattccaaaaccactcttcttcttcttcttcctcaactatgtgtctctctcaacctcactctctcttcacctcccactcacatctctccctatctccaccaccacaaactc

SEQ ID NO: 34589 - DNA, 517 bp, Arabidopsis thaliana columbia
gatacccgagataccgtagccgaggctgagagtgacggtttatgctcgaagattgcggtccgagagtggagagtgagttgtgagcaacaatgactagtaaatcgtgagtatatcgactggatagagagacctagagggggtctggttggagggagtgcggactgtagtgatggttgcacggagttcctcggagtggaagcgtgaagctagattcgaggacgaatctatgttagtgggggcgaaccgtaacacccgtcagccggacctataatgcctggagttctcatggttgaggtaatttgcatttgccctattctctcttcttactccaaaagttcaatctgtttgcatatatttatagttaaaagagaagctttttgagcctagacatttactttttgctctgtttcttgattgcttagttgattagttggttttgaattgtgattttggggaatagagtgagggtgaaatttgtgttcaagttttgagggaagtacaggtgaaggcttttggt

SEQ ID NO: 34590 - DNA, 593 bp, Arabidopsis thaliana columbia
gaaagcataatgacttgtgatttgtcgaacgtttttggataaacataaagttacttctcttccgattaaaaagtggaatgtgccaataaaaaagaagggagttttgacttacgggtgggacaaaagaacgcggttccaactgccattgtctttaattaagtggcgaaaaaagccgaacattggaccaacctttgaagccgtcaaagaaaagatcgtatctcttcctgtctccttggccccgaaaggtttcaacttttctgctctttagaatccttaattctttccatctgttttagatccgatcgtccgatgattggcgcattcccagatccaatcgattcatttatttcgtccccttgttatgtacatatacactttgctttccgtgatattgtctggatatattaatcaatttttcctcatgaagaactcaaatattgtgttatgttcataactcaaatcattgaacaattcaattcatttgtgtcccatttgcacctcttgaagcaattagtaaggaacgagcttttaaacatgggagactctcgagttcaactcttggagcagtaaaaggatcggaagatgacggatga

SEQ ID NO: 34591 - DNA, 562 bp, Arabidopsis thaliana columbia
  unsure (1)..(562): unsure at all n locations
tatttaaataaaaaccctatgttaatttggtttcaatcgagtaagatgagaagtcaatcttttgatggtagctagtgatgttggaaatatagttgtgccagcttaatctgaaatttagaatataattttataagagtatctatcaatatatatattaacgggtcactcacgaacaatgcatgtaagaaatttttatgagggatatatatgttaagaaaataccgaattatatgtgtacgtatacacacataattagaggtgtcaaaatacatcaaaactcgtggttaagggtttaccaaaaaaattataactcaaaccgtgaagtaggagtaaaagaaattaccaaaaccatgttttgacataaaattgaaaacagagcgatgaagagaataagaagatgatacgtacaaaatcttacgagttatgaatatcgagagttttacaccacaaatcaaaaaccaaaatcgagagttcgtacgtctcgactaaatcaaagctagcaattcttagctatgttttcgatttcaaagagttccaatatgaaaaaaaanaaaaaaaaaaa

SEQ ID NO: 34592 - DNA, 797 bp, Arabidopsis thaliana columbia
gtgttgtcgtacgtcaccattagagtttcaatttgcataatacaaggtggttgacccaataaaagaaatttgattcaatttcgatataaacaggtttgttttggttcagttttacctattactttttattttgtccaatcccaaaactattatttcaaagacaaattggagaagaaacaaaaaaaaactaatggttggacaaaagattattatatatcaatttcaccacaaaaaacttagcattaaaatattcgaaatggacagcgacgaattcaaaccttcgtgttaattgtctccggcgactatgaattctaaaatcttccactttgcctaaaatatcaatacatcacattcatcctagccttatccactctttcttggaaattctggtctggtttcccttcagcaattcaattaacttcatcaaaccgaccggttcaaacaatcatctagaaattctattttattgttagactagatcatgaaattttgaccgagtcagcacacataaaatctggtacttgacgtggtttagttaacccaacaaagttgttttggttaaacggatttattgacaaacgtgtttcggttcactcactaaaaaacccggttaggtagatactacttcattgacaacaaacgaagcatcctttaatttcaaaaccgcgttttaatcagacttttccttttttattttcagttctaatgtttaaaactttccttttctttttctccatatttgactcgtcaatataaatacaattgtaacaaacagattttgatcaaaagattttact

SEQ ID NO: 34593 - DNA, 408 bp, Arabidopsis thaliana columbia
tcccctcccgaagtatctcgcgcagaataaacagatcataaatatagcaatttttggcatttaatcatttagagatactggatctagcaatttgtagtgtattccgtctatagctttcaattattcactttacttctctggtttgaaagagacaaaaatcagtttacagaaagtagactttctatatagaaaaaagagaaagaacttatcaaaaatagtgtatacatacactctcagtcaaagtaaaagattaggatagagagtaaattacaaaaagaaattgagcattacaataattagcggatgttgataatataaaggatataattgaactagcaagagacaattttgtgaggtaagagttgcaatttaattggcgatcacttgcagcagctaaagacaaaattt

SEQ ID NO: 34594 - DNA, 535 bp, Arabidopsis thaliana columbia
agacggatcaaccctcagtgacacctacttttaagttttgaatataatccaactctcggtaacttttatcggttttgtgctaaacttagagtggacaaaaggactcatgcatcaacacattattatcttactctagtgatcgtttcaatatcataatctgaacactttgacattctggtctggtaagtgcttacgtatttgttaacaatatgtacagatgacatccatgaaagtatgaaggatgctgctaccgatgctcaagctgtctcaagaagggatatggcaacccagatgagtcccgagggaagcatccggttttcccctgagagacagtgttcgttctctccctcctctccatcaccactacctatttcggaactactgaatgctcattccaaccgagcagaagtcaaggacttacaggttgatgagaaggtaaccgtaactcgctggtcaaagaagcacagaggtctatccatggaaatggctcacaaatgcgagatcacgtcatggaaaagctactaaccatgaagat

SEQ ID NO: 34595 - DNA, 1214 bp, Arabidopsis thaliana columbia
tgtaattggtctgaggattatgttgaaccaaatcttttttttttacttaattacatgttccttataaaagaagcatataagaaacaataaatcaaaacctattacaaaacctgttctctcgtttttgtaaaacttgtatagcaatgaagatatctctagtttttggttcatgaatcagcttcttcgtttcttgtgtgtgaatcataaaccgacggcaggaaattcgggttgaaaatgacggtttagtctcaaaactggttgatcatcactcggacctggtgtttgtgaaagaagagagtaaaccagctgcttgagccggtagtatatcgccaaatgtcgacatagcggctgctgatctgtccttgaatattcccacttgtccatcagttaatattgatcccagtttcaatgtgctttcctgaaaaaacaatttatacatggtctaatatactaaacccgattacaacattgtagccattaattaaccaaagcctaaacctttacctgcatgaaagacttaaaagccacgccgaaattggaattttcttctaaatcacttgtttgagattgctcgccgtttgtaaatgccttccatgagtttcttgccgaagcatcatttgatgtaactggaatagagaccttatttgtacttctagatgacagagctggagcgctgcatttgacccgaaacgaagacttctgatatcagaaactagttcccaaattttaaaaaggtcaaaaagaagacttctgatagcagaaactagtttcccaattttttttaaaagctacaaacatacaaacaatgttagatgtagaagaagaaaatcttaccttatgggacggtatttgaagcggggaactgtggaacatggcatgatatttgattctatattaattgatagtttctgcgcagtatctgtgtacattcggtttagttgcacaaagaaaccaaagagtacagcatggcgtaggtacgactgcttttcgttctcccaaagataaggctcgtaccttttttgatattcaaaatactagaatcagagtgacaacaagacgatagagcagccaaaatagtaaaagataatatatgacgtaggtaaagattagggataagatttcttacgtaagccagtctatgggatccaacttttgggttagttgggaggtcactccatcaatgcgacctctattgactaactttgttttctgtt

SEQ ID NO: 34596 - DNA, 540 bp, Arabidopsis thaliana columbia
tccaaaaaaaatctgtggtccaaaataaatatctcgcaataggagtctcatatttaacaaaatcgagcaaaaagacggagtagcagtatcgtaaataaaatatattttttcaaaatataaattgttttactaatgacaatcctgtattattgtttttcctacaaaagaagataaaagcattttagacattatcattacctatataatctatatatttagcatgtcattctagtaataaatacaaaatatggatgactacaatattatgtattgtacattttaataatcttacaattttgtcctacgtgaagtcatgacatgttcccaatcccagatgggatccaaagacttgctctaatcgagagtgcattttcatattaaactaacctttagaaacaatatctccaatctagttgaaataaaatagaagtcaatatatagtatagattgtattgaaatcaattgaacggctaactttataacaaagaataatataaaggagaccaagcgttacgtgtatcacaagtcttatattaaatg

SEQ ID NO: 34597 - DNA, 511 bp, Arabidopsis thaliana columbia
cccaaatatacaacgttggatcactgatagagaacaaggagatgtaccttgagagatattgatgttgagtttaaatcaaccagagcatgtccctcagacatagattccaatgcctgataaatcaaagtgtctttggaaaaatcagcctccaacgcattatcgatactcttataaaacgtactataaaacacattcctaaaacaaacaaaaaaaaaattatcttttcttttcatatctgccaaatcaagatcatgcaaaaaaaacacaaacgtcaagattaatgcaggacaaattttgagatttttcagtctgcaaacattttgttcgcgtaaatcagcatattccacaaaagcaaaaatctacaaaaaaaaactatacctaactatgatttttgacaaccagatgaaaaggagatacagaagcttcgacataccaagctacaaactagggttgaggaaatgtagtcttacggttcagaggtaatagaagaagtgcctaagaagaattttat

SEQ ID NO: 34598 - DNA, 565 bp, Arabidopsis thaliana columbia
ctaaccttttggaagagaagcgtcttccttggatttgccgactatatccattggatccatagtttaatctacagaattcatcaggttaaaggtgcttgtacacgaagatctgcataaagagcaaatcaaggggagatcggaaaaaaacgagaagatagagataatcgactcaccgtaactgagtcaacacgaaccaaatcggaaagtagacgagtcgcggtgagatctggcgccgggaaatcgatcggattgtacggaatataatcggagggattttctctctccttcgtcttctctagcagagtcgtttagggcaaacggaagaagcaaagcgcgtgaatcacactttcttttacaacgcttagagacggcgcgtgaagataactttcacttccttatagcaattggatttccaaacaagactaatgggccgaaaagagacccgaaccaggcccagatatctcctccataattctatgattctgcttcttcttcttctctctgggactcgttcagaatctcgaattgctgctgctctctcggtctcggtggtgaagaaatgggg

SEQ ID NO: 34599 - DNA, 593 bp, Arabidopsis thaliana columbia
tttaaccaaaaaaaaaaagaaagtaaatttaaaagtgaaagattactttccataagaagcttaaaaaattgcatcttcttatcttcatttgactaatgagagagccactaatgttgatttatagatatccaacaaatctactaatgctctcatgtacacacaaatattatttacatagtcaaaacaatatttatctctcaacaagagtttgtgacaatttgatctctcttcctgtaatccgacgcgacgttttcactccctctgacacaaccactctcaggtttttattctctcatcatgcatatgttccagtttgttcttgttttttgtcttgctttcgtgagttcttctagaagaaaattgtttgctttgatcttctgtgtcatcatagtcaatatgagccatgtttgaagttagggtagattttttttgttttctgataattctcttaaaaaccaaaatttcgataattcttaagatatgggtctgtctaccatttcgtttgactcttttgctgtaggttcatttaagtgaatcttttcaatggctagcatcgtggtgaatgtcatgactatggaacttgggtggaggat

SEQ ID NO: 34600 - DNA, 563 bp, Arabidopsis thaliana columbia
gataatgagtatggataacatattaacgaacacaaattctcctcttagtctagttttctcgtgtattggcatttagttactcgtagtctaatttaattggttgaagaagattcaactgtttgtttgattatcgatcaaacgaatggttagaactaagtcaattgacggacgagaaaggctaattgataaggatgattttaataacaatttcaagttagaacgaataggttattacatcaagtttattcggcttgactcacattttccaatttgggttattggtttggttggcttactcatctttataagatcacagctaactagtggtgtcaatagatgattttgtagtatggaaacataacaaatgtggggatttctcagtgaaattcgggttattgattggctggctactcagttttaaaagagtgatgtgatctatgaagcaaatgtgcaaccttcaaccaacgagttaaaacataaagtttggaagctgtcttgatatcttgataaaccttcaaccaaccaaccttcaaccaatgacagatgtcttgataaacatattt

SEQ ID NO: 34601 - DNA, 510 bp, Arabidopsis thaliana columbia
ctatagacacctacaagaatctttttgtacggttggtagaaattgcctacggtgataaagaagatgaggctgtaactagggttaaagtagatgatgataacccgcaagaaacagagacgaattatatcaagttggagggaaagaggaagagaggaatgttgtgttgtgaagagttaagatatcaagggacataagaacctaaccgatatcgaagaagatatgtacaaatgggaagatgagatgttcgaggtagatatgttgatgagagttctaacaagtgcagtggagagtgcaaaggaagttattaagggagagatggagctgaaagatcttggagcaaagttctacagatgtgtagagatgttatatggtgaagatatgtttgaaacagtgacagaagatcatcaaagagctttacctatgatcttgagccggttgaaacagaaactgcgtcatgtcacgactgcaagagaaagattgaacctctctggaagcaaactattgaaaaac

SEQ ID NO: 34602 - DNA, 758 bp, Arabidopsis thaliana columbia
tgataaaaatgattactgcagtagcttctcgattcgtcttccaaacgtttctaccacaagggcatcagccttcctatcctgaatgacgtacttgagctcatccaactgctcaatcatgaagtccagtgaactgtatccacatacattcacatttgccaccgaacgagcaatatcaagcaacttgtttatctgtcaacacaaagcacaagataaaagtaaaggagaagtggaatactcagctgaaataaagaaagaagtaattgagagtttcagcatgaattattagaatgtaaacatttacctgctgataattctcaagctctgatattgtttttcgaccacttagtagcaaatctacttggctattccttggtgttgctggtgatggcggtgtcaagcttcctgctgacgagtcctttgttccattggtcatagacatttcattcaagatattcagttcatccaaagaaaatgtattctgtgaacgaggaacgcaatcaagcatgtcatctgaacatctctgagagatttcatccagatcttcttgtctactggaatttgataatcttgcgctatcagcaactgctcttggagttacgctgctctttggcgtccatgactccagaattttctcaagactttcagctactctttcaagtcttaagtttacatttattcccttcaagtcacatctatcagcgattgtgcatattcgagagtgctcttctacatgtacaactggtattcaactgcacaga

SEQ ID NO: 34603 - DNA, 1275 bp, Arabidopsis thaliana columbia
tatagtacatccataacatttgtaaaacatacgtcttatacatcaataagctccttaaaacagacccttaacaaagataaataagtgttgaaagcagagccttaacaaagttaagtaagtgtttaaaacagagtcttatacatcaataagctccttccaattcttgcctaaattcattcaacaacaacaacaacgaagaatcatattaaagatacaacaagtaaatgctacaagagaatacgtgaatcatattctttgagacatgattttattgactttgagacatatacgtgaatcatatacattgattagcaatcagtgatatgcaagtaatgattttattgactttgagacatcaatgatatgcaagtaaatgctaaagtaaaccaattctagaccaataaagagaacacaaagattttgttaactctagtttaaagtggacagaataatgattcattgatgttaaaagcaaacacatttcatctatttatgaacaatgaagtaaaccagtccacaagattgatgaaagggtaccttaaaagcaagagaaggataaccaaagaagagagcaacagagacaaatgcaagtagacttctctttgaaaggagggtctttatgctctagtataagccggcaaacaaagcatcaagcatgagaacttccctctgttacacaacaatgagaatgatttagtctttaatatataactctttagaaaccaatccattgcatcaaaatcaaagctaaagacactcattgtacaaaaactctttagaaaccaatccattgcatctaaatcaaagctaaaacaaaaactgagaagagaacaaattctgatttacttaagggcaatgcaaatctaaatcgaaataactccgatggccaatagagaacaaatgaagtttagaaaaaacccaccaagtagagagtagctaaactagctgagagaacacatatcaaaaaaaaattctcaaattctcaagaaatttaagttagtgaataacgaaaagtacctcagagtagagaatcaaattcgtcagaagtaacaactgaagggagttttaattgagctcaagtcactggaaattgaatctggagatcgagacggcgaagagattggtttcaagagcttaggtttgatcaagacgacgaagaaattgaatcgctgaagaagaagaagaaataggttaggtttgttggtagtttctcaaacatagtaagagtatttatgttatttccagatatacgcagatttaatcgtttgcgctgct

SEQ ID NO: 34604 - DNA, 671 bp, Arabidopsis thaliana
atcaagtcatccgtcttggttccattcagttttctgtgatgaaagagtcatttcccctggttgaattggttttttttttgttatatggctctgttgttttgtataggttattgttgttattagcttatagtggcttagtgtgtggagatttgtttctccctgtgtaattgcttctgttctttgtgttggtacatgtttccaatctatcaattcaaatccagttgagaaagattaagaaaaaaaatggaagaaaatctcccaatttttatacataataaaatgagatgaattgataatcaattagatttagttagtaaagtttaattttaccgatgagatctcagacgaccaaaacacgaaaataaaataaaaagaaagatctcagaatcgcgtctttcttcttcttcttcgtcttcttcctccgaaacttttttttgtttttcaaagtggtggagctaaccatgaaatcgactcaccatcacagagctccactaatatctgcttcttcctcatcttcatcttcttctcaaaaccattcattcgtctctaggctcctccttctccttactctacttccagtttcccttgcttgtctcgcctttatcatccaatggcgaggcggtggtctcgccgatcctgcctctgcttctgttcgttcctctacgtcggtt

SEQ ID NO: 34605 - DNA, 438 bp, Arabidopsis thaliana
tatattaggtgcctgtgttattttcgtgttgactgtcatatgctgtatctcccataggaagaaagagcctttgtttcagccgcgggatttggaaaacggtttagcgggaataaaagatggaggacttgttgttttgacaggaacagctgttgttgctgcgggtgtaacacagaacgttctggcggttgcggcggtggaggagatggtggcggttgtgatggtgatgctggtggaggagatggtggcggttgtggaggttgtggcggctgtggaggttaagggtttcgtatagtttgtgggtgtgaaattatctctttattaactttgcatataaactattaacggaaacagatgtaagatttcaactcttgtgaggttggaaattgtatcataacgtgaagaaatgatcgtgtaaatatgattcgatgtgtacaaaat

SEQ ID NO: 34606 - DNA, 643 bp, Arabidopsis thaliana columbia
cgtacatacacttgataagaaatgaactccaatttaaggcaccataaggagtcatttcaagcgacgatggggccaaaaaatgctactacatcatagacatattaatcataggcgcaccagaaactctgaagctttagcacgttgtatagaaccatttcctccataagatatctctccccaccctttccaaccacactcctgcaaagaaaatacgaattatagaaccaaacataggttgctctttagcatcaatcaaataccaccagcattttctatggataacaacctttggaattaaccgcaagagtttctcaggcacagaagtgttagaagatggttttgctccactgcattgtactttgcagtctgacaggggaaggaaagaaacacctcgaatatcgattacctgcaaagaaggttttcaaatcaaatatttccgccgtttttacagttatttcttctagattttgtacagctaacttaccacatcaggtgtaatgtaggcactagggtcagcaatttcatacagaagttgctcggcgcaagtactggtatttaaattccacactaccttcaacctttgatcacatactttacatcatagcgatctctgcataaggaagtgacaatcctggagaagagg

SEQ ID NO: 34607 - DNA, 493 bp, Arabidopsis thaliana
aaaggaaactattctctcccatcatctttttggtatcagttcagtttcaaaaaaaaaaaaagatataatggagcctgttgttaatgtcgttattgcagtatctgcctgtgttattttcgcgttgattgtcataggctgtgtctcctataggaagaaagagcctttgtctcagccacgagatttggaaacgggtgtaacgggaacaaaagatggaggacttgttgttttgacaggaaatgatgccaccacagctgttgtagctgcagctgtaaccactgatgattacaatggttgttgttgtggaggaggtggtgatggtggaggagatggcggcggttgtggaggttgcggcggctgtggaggttaagggtttcgtatattgtgggatttgatagttatctatatatatgcatataatgtaagatttaaactctcgtgaggatggaaatggtatcataaggtaaataatgatcgtgtgaatatgaattgctgg

SEQ ID NO: 34608 - DNA, 648 bp, Arabidopsis thaliana columbia
ggaaatggatcataaggtaaataatgatcgtgtgaatatgcattgctggtttacacaatattaattttcttgtaaactttcatttctctttatataataatttggatgatataaagtatgcatggacacaaacggtgatgcacatatatatagataagtaaatgattaaaattcttgtgaggattttttttttttttactataatttattaattttgaactaagagtaaaataaaatttcataaatccctcgaaaatgaaaatttaactctttttctcatattgtaacttgtaagttatttttcttattggcgtaaacagcttagtaacagcttttgagataatgtttttggtttgaaatttctgaaaatctaagctggtcatctgttactcacctatgtaaatactgtatacatgctttaaattaaaataagaattcaaatatgatagatattcagcattcgaggatgaaagaattgtgtgtgtttgtgtagatattcaaaaataataatttgaggatgatgaaattattattactatcctttcaagataagctaaacaaacatatatataattatgagattattgtagaatatggagtgttagttcaatatgtgcactttggatgttccatgaatatgtcttataa

SEQ ID NO: 34609 - DNA, 581 bp, Arabidopsis thaliana columbia
tgagttctacagattctgaacattacaagcaccagatgactactaacgggatcttccctggtggattgaggaatggcaaagtctctcccggtgtgaacaacagaatgtttgatctatctactgattttgctaatcaaatgagtcgcacagcaacaagttcacagcaaccaatgagacaacagagtcaaagccacgaggaacaagcacagataatgagaaacttcaatgagagggctagaacacagcacaactccacttataatcatcctaaagctgatgctccaccgaagatttcgtcaccacaatccgcaagaagtgaagattcaggcaatgcttctgtagcagcagcacgagcatggatgtcgataggagctggagggaataataaacaaacatttgaaaatgctagtaatccgaagagcagccagatttctgcggagtccttgtataatccatcaagagaacattttcaccaacaagctttcaaaccgagagatgctgaagagacacagttccatcctcaaaggaatggtttcccttccagacatttgtgcacaacctgttccgggatgatgacggag

SEQ ID NO: 34610 - DNA, 474 bp, Arabidopsis thaliana columbia
ttttgttactaatgtatattccgagaaaatataacaaattaggagattcttaattaaaatatatatggtaaattaaaacatgttaactcgatgttaatatatgattcgattgttcataaagctctcattcggtgtcgtaacttgattgtattcatcttataagatgcaattatgtcaacaatgatcgatgaatggtccatactcgatataccaatattaaaatataaaggaaatcaataccaaactatataataactacggactatactctagacacaaaattgtcattttccaatcccaataacataattaaaataaatctcaaagatagtatgggcaatagatttccaccttttacattattttaggtctcgaaaattgttatggtttgacagaccaaatcataaacgtagttcggccaatcatttcaaaccaaatccgaactactaaatgcatcccatgctatgaaatgga

SEQ ID NO: 34611 - DNA, 406 bp, Arabidopsis thaliana columbia
gcaacatctaaatctaagtattgaaggagcattatatattctatgtcgacgacaacgaaacgagccaacatgacatgaagctaggatactttatatgttatataagttataaaatgagcttctagaaaaagaagtaagtgtatatacgtatctacagaaatatccttgtagataggtgttgatgtagtgcaaaaaagtaagtctaaagactaaaagtgaaaaggacaagaaacaaaattttcaaaatataaaactaagaaagaaaaacgaacggcgagacattgcctagaacgcgacattgtcactgcaagaggctgtggctagtacttggctctaatgcaaaagtggggcgaaacgatagaccgtcgtagtgacttttgtccatgtcaattgcatcatcatagtg

SEQ ID NO: 34612 - DNA, 590 bp, Arabidopsis thaliana columbia
ccacattggttagttctaagtaagtttctatatattttttattaattaattttgatatttttgtagtttagagattttgtagagtttttgaaaattttttggtccattagaaaaatccttaagtgagtttctaataaaactaaaaaaaaaatttgaaaaaaatgtgaaagtgtttgggatacatttgactctcaaaacttgacacagactctacactctcaaaacttgatacactcacaaaatttgacacacaaactcaagtgaatcttcacacgaccatagcctatacacttatacacaaaacagaacaatacttgcatgtgcttgctatttatgcttccttgaactcttgcatctcgacagggacatcatccttaaaacgaagttaaaattcatttagaacagaacacaaaccaatctattgaagtttgaacacgaacacaaaccaattagaacagagcacaatgaaaccaatttagaacagaacacaaacaacttaagattcataatcgaacagaacaaaaacaagtgaagaagcattaaccgacacaaaaagactaactttcaagacataaaagacaccattcaag

SEQ ID NO: 34613 - DNA, 449 bp, Arabidopsis thaliana columbia
tctactaggacatatgtgaatgtttgtttattaatatgaacactgccatttactctactccacgataagtggaaataaattagcagaaacatacatcgatcataaccaaaggatcaaaagatgccgaaaaaagaagtacctccacttcctccacttattggatttggacgataccgtaaccggtacggcaaaaagatggacaaagaagaagaagaggaagaagacgttgctccacctcagccacctcttggatataaaggatgccgtaaccaatgcagcgcaaagatgaacaaggaaaaagtatccccacctcctacacctcttggattcagacgacaccataaccaaaacagcgcaaagaaggaccaagaagaagtgtctcaagttcctctgcctcttgaatgtagacgatatcataaccaaaccggcaacaggatggacaaagaaaa

SEQ ID NO: 34614 - DNA, 604 bp, Arabidopsis thaliana columbia
aatttgatgagcaattgtcaattgtttgagatgtattcgagtaccctcgacatcggcaagagccataagacctctctgaaatcgaacataatgattcagttaaccatattaaatataacatccttcaattaagaattaacatggcgttataagaataatgaatcaatattatgttataatccttggaccagaaacgagttggtttggggtcactaatcactcccaaagtcataaaagctcctaatcattggtcaaagaacactaatctgttcccttccttctatgtatagtctatcaggtaatagtaccggagttgaaacaaagagaatatcgcaaaaaattcaaaatgggtatttggccaagaaaagaaaggaatcctattaaaaacctaacgtcaaaaatcctttatgcatttaatataaacaaaaataaaattctgcaatatatctaaggaaagaaaagtgaaggtacatacatggataagggactctcctgaagtaagaatgccgttcctaagcatccagggagcactgcagaagctgtcaatattgtgcacacaaaggaccatgtgaatctcatgtagataggttccaaaagtatagtt

SEQ ID NO: 34615 - DNA, 476 bp, Arabidopsis thaliana columbia
attcaactctatttaaatgatgttagctctagttccgaacattcgaaaatatatactttgcaactgtatcttccaaattccaacaacttcttgatatttaaattatttataattgatgttaaactaaatcaaattaattgctcttaaattactttaaaatgaatgagaaaattaaatttttaacgaggtgattattttcccatcttatttttcttaattctaactaattataaataaacaaattaagccaagctgtaaaaaaaaaaaaaaaaaaaagatctcgtatatagagatcgtaaattcataaactaaaaatctaaccgggatatttaatcacaccgtctcatatttccaagcaacgatcccactacatttcctgccggatccttcgtgaatttaaccggaatatcgggacaagtcgctatcagaaaacgatttctaaagttagcatctgtcttcacagaacacataatctc

SEQ ID NO: 34616 - DNA, 517 bp, Arabidopsis thaliana columbia
ggtaaaaggttaaattagcttatgcatactggtagatagatggttaaagatttccatagccgttatatgaaactaatctagagtatgtgaaatgtaaaaccggattatagatctccatagccgttacatattcaactaaataaacaacgttttaaggacaatggatcctagctgctcaattatcacccccgattagttcttaaagttcaagcgatcttcttatttcattctggctatttataaacgtcaagttgtgataatatgtctacatcaacgacatttgagtgatccagattaaagcatccgattttcaaatctaggtttacttgaaattttagatcgataccggctcaaatttaagtaggaacgatcaaaatcccgatggcacaagatcactcactcacgaaactccactaatagagaaaacgatgaacgaagaaacttaccaacgtgctgttggccgagtggtaaattttccaggtgtaggtgttgagctcgaggcacttgaactttcaga

SEQ ID NO: 34617 - DNA, 610 bp, Arabidopsis thaliana columbia
atcactatcaactaatccaaacaacaaatcctcaggcataaccgcgatttcgctaaattccatcgagccttcttcaatactccaaagattaaacgagaacccacacattccaccaagaacaagcataccattacaagaattcaagtaagcaaacgagagtcctggtggtttaagagtttgaacatcactccatgtatatgaatccaagcaaaacgacgagataaaacacgaatagttatcgaaaacatagaatcttctcttaaacaaagctgaggtcaaagtttgatgatcctgaccagatctgaaatcagcagggagtggtgaacaaagctcccatgaatcgagaacaggatcgtagatttgaacagctaatcgttcttcgatatcgactaatccgccgatacgcgaagatccaccgacgaggattagtttggatgagttagatagagttgtgaaaacggttaagagaggattgattcgaggaaatcgaacaggggaagtgaatcgccaattaggtttaaggattggtgagaaggagaagcgaggagcggtggtgaagaggaagcgattagatccgacgagatgatcggagggagaggaggaaggaggg

SEQ ID NO: 34618 - DNA, 500 bp, Arabidopsis thaliana columbia
tctataaaaataattgcatgatgaatgaagcatcttctctccttttcatggggcaatgtttcaaggagtttcagatcaaggttttgtaccaagtggatgtgtctttcactagttgagatcagatcattgacgtttttaacttactctaactatttttagtaattgtatagagctcaaacgttttgtggtgaaccttatactttaacagaagattgttttttaaaacacattaacgagtctgtgcacacaaaaaaaaaaataaaaaaaaattaacgagtctattatgcaaatggtgcataaaagttttttaacaaaaccatttattaacagatgaacagaaatcagaccggttcgatccggtttactcatggtttgtgtttgtactttctccacttgccgttttcatgtttgagaaacaaaatacgcagcgtctaaaatagaagcaaaaaacgggacgttgtttactaacaacgacaaaacaatggcacacttacccaagt

SEQ ID NO: 34619 - DNA, 518 bp, Arabidopsis thaliana columbia
cattactctagacatttcgatgatatctctaatttcgtttgattcatagcaaaaatattttttttaaacttgcatagcaaaagaagtgaggtaagaaaaaaaatgtttatgccccttcccctgaattttggaatcttcggacaacaaaacttctagattataaagaaacaaaaaaatgtcaagcactcaaatctttcattagatcatcaaccatattatattatttaaaacttatgtttgaataccagaaagtactaatattttaaaggtgaaagtaaaatgtttcagacgaaagtaaatattaaaatacaagccttgtaataattatccgaaaatagcataaaatctcaacggacacaattgctctctagctaaccaaacaataagaagatagtggtttgggttttggtttttttcgtttttgctaatgtagtaaaggattttctacttggccttttccaacaagagctcctcaatgagtgcagctgcttgctcaactgtggcgatagactgtgctt

SEQ ID NO: 34620 - DNA, 321 bp, Arabidopsis thaliana columbia
tttcacaactacgcttgaattggtaaaattgataacttggaggtgtaagatatgaagttcagtgcagtggaggaagatcacatcacaaacacatcgagaaagtaactagacccatgaaagtttcttggaacttgatgcgaagattatcaatatttaaactggcttgttctacatgactggcctaaaagaagatgggaccatatgatacaaccccattgatccgtcgcaacaggatacacaggtatcaacgtatatgctgagggtgccaaatgtgaaaaaggctataaatcagaataatatacatgaacaagcttactgttt

SEQ ID NO: 34621 - DNA, 571 bp, Arabidopsis thaliana columbia
caaaaacaaatattggtgtttataatgtactctctaagaaattgaaatggctatttccaaattatttgtaattagtagtttcagttttatattacttgatatatatctgaatataattcttttcataatatgataacatatttgagatttttagacacatgtcatatctaatctgataaattctaccatcaaatttaatatctaagcaattatagtattatcatataccaaatactgtaatctctcatagtcaaatatattcaaaatgactcatcaattaattccatatattaaaattcatagtaaagacagaattatatgaccgtacatcgtctctatagtctctgccaagtgccaatttaccatttgaagaagacacgtgggtcataatctaggagacgttatatatggttacgttttttaccctaatttgtttcaatattatgatgatctgtattcaaaccccattcttcttgatgtgcatcctttaattaaatagaccaaaatagcaaacaaaatctagcacaaataaatacgatttaccaacggctaacaaatggtgaaaatatat

SEQ ID NO: 34622 - DNA, 643 bp, Arabidopsis thaliana columbia
cttttctgttgtctgtgactagttactgggggtgagaattccgaggaaatgtattgatctaagtatatactacggtacatgaaatgccaaagtccaaagggacctccggttcccacagatatgtcgggaccaggtgagtcttgttcttgattagtagtagatgatcgacgcctgcggtctattggtacatcttcaacacgcattccaccttccgcgattgatctttgaaccacacttagaatatttgacttgagaagaacagcctcaaggcgtaccctaaccatgtacaagtttatggaactcaataacatgcttattttaagcattttctcatgtaaaaaacacgagtaccttcaagtatgatatagcttttattacctgcaatctttgagatgatggaacgcatctgaacgtgtggtaagcaatattacatatgtatcatcctacaccatcgagtaagttaatatttcacattgtgcactgtggatgaatttaagaagctctttacaagtatttgactcacatcaaagaagtggacataggcatgcaaaaaggcctgagcgttgtatcttggtaggcagattggtgagaaagattctgatgtcatgttagcagtgagacaagttacacaacagatgtatgg

SEQ ID NO: 34623 - DNA, 151 bp, Arabidopsis thaliana columbia
agcgagatcatcggactcgacaaggcactatagcaatcagctgaagacattgaagttcagatcgaggattcctcgacccagatagatattccacgggcattactcgaccaggtagcaggatcccgcgccaagctagacgagttatcaacca

SEQ ID NO: 34624 - DNA, 736 bp, Arabidopsis thaliana columbia
ggagacccgagagagtcgaagagaaagaagaaccatcgattaatttctccagagactttaccttccaagagactggtgattcgtcgacgtccatgttaccgtcgctcattatctccgctggagaaaagatcaaatcagagaattgtgattttagggtatctctgggcttggctagggttttaggaacattattcaatgagaaactactgtggagctgttttagtatatacacttaagggcaagaacgtaatatccggtatttaattaattctaggatatatcgaaatatataaatatttattttaaagatttttaaggatatttcctactcgtttgggataaattagctactccaaaaccaaaaattagcaaatcagatctttgttcattgcatatatgaaatctcaatatttatgcaatgacaaattccaaatggttgggggattcaaaaaactcaactagttagacgaattcaaacaattcaactaattagacgaaattcatactcacactatataaaaggttttgaaaatggatatatatctaaactctttgttctctcgacaaaaaaacaaaacaaaaactaaaatctttgttcgaaaaaacgttatgtgttagtcgggggcttggtatgggcataaagtttaatcaggaactctcaatctaaatgtatgcataataaaaataaaaattgttttatatttcgaatctaaaaataatctgggtatgcaattta

SEQ ID NO: 34625 - DNA, 657 bp, Arabidopsis thaliana columbia
ctttttttgagtttcttggaactgatgataataatagctgttgtcgtctcaataatcctattatcagttttcgttacaacaaattcgttaagaaatttgtacataactttcaatcttgagtcatttcatcaaccaacaaaaataagataacaaatctaacgttctcaatgaagccagcaacctgcagcagactctagtctatacatgatcgcattgcctatacaagaagttagttcccgaagcgcacccactttccaaaacgctcttggtttggcggttttgtaccgcctttttatggggttttattgatgattctgttcctcattggtgtttgctatgccttactctgtcaaaaaaaatacacacaggttcttcatttttggtcaatctggtgaaaacttggtctctcattcagctgtgaaatagctgtcgtagcgcatagattatcaaacgcttcaaagtttgttttcacccgagaaattggttcccgattcgagcacaacccgcatcaggccatctacacgttccttctcttgtacgcaacggacacactgcttcacacacattttgttcagtaaccgatgagatagattctgagacatctgtggtgttgtctcagattgtttttggggaattgagtgtgaacatttctgaggc

SEQ ID NO: 34626 - DNA, 775 bp, Arabidopsis thaliana columbia
atccccactctgcttcgccttgtaagcacagtaatcaaggaaaagctctgtccccgttaagtagcagccaaagtggctcttcttgagtgccatgagcgagtagaccttctttaggttcttcgcaccatcaaactggtcacctttctccaccataaccatgtagaagccgaaatacaaagctatattgcatgcgttacgcatacaatactctttgatcgaggccacgaccttctccctagtatctaagctcctaagatgagtaggcgcgttgttgacagtgactatctcttttgacatccaaattgggaagttctctagataggccatcatctcgaaaagagtctcccatttgtatctacctcctcctactttgttaatcattggagaaacagtttccaaatgggatatgtaggttttagccttccttacttctggctcaaggtacgggagcattgccgcggcgctcccaagacctgacttgacaagaagctgcttaacagtgttgctgcaggcagtctccttcttaaaggatatcttcaccggatgtccagcgttaaaccacatggcgtcccttagagcgttcaggtcttccttccaccaccgggacaattgatcacaaccagtccatactcgttcctccatagccatgaatacctcctcggactggaaattgtactggtataaagacgtgatcagagagtatccttgtaaaggaatcattccagtggcaagaaggtggagctttggaatcaccttcttttcagtttcagatagg

SEQ ID NO: 34627 - DNA, 1175 bp, Arabidopsis thaliana columbia
tatctggtgcattgatatacggtaaaacagcaggagaagctaagattgtggattcactgcaaaccagagtccattgaaccgatacaacgatcaagagaaacgcggaaactgagacgctagaaaacagagccatgggtgtttctttatcttctgttctgcacaagaaagatattttaccaagtaagtataaataatagctcagagtagaagacagattcttttgttcccatgtgtgagtgtgcgtgtcttactaagatacaaagaattgcaatgaatatgttcacggaccagagtatgtgtccttaattgtttcacatgcttatttttggtttcttcctcttaagtcatgtgatttcatttacctctttttcacttccaccactaagggggtaacaagtagaaaccttaatgatcttgaagcataattctgaagtaaatgagaagcggtggagacttcggcaactagcaagattgatgatatggcaatgagctttttttttttttgtgatttcaagcataagaattacataagaggaagcttgcaaatagaaagaatcaaacagaacaaggtagtgaaacatcagcattaacaaatctttagcttttctttctcaaaacaaacgtacaagaggctcgtggcgggacatgtaatctgcaagcttgttgatcttcttctgcagactcaaatgacttgtgaaggtcttgcaataatttaccagctcgctgtgttttcgagctttcagagagtaaaagaatttgatgatgatgaggctacaacagtctaagatgagcggtgtcatttaaccgctttacctgccacccggttttccacgaatgctgtaatacggtcacagaggaatcctccacacagatcttatgtgtcattaccgggctgcatccaaggataccggtaagaagacactttataggtaaagagtgagtgaaaactccaatgcaggttgagagttgagaagaagaactcttgatgtttatatcacctaggtgttgttcatcattgtgattactaaatatctcttcactaccctcgtgatcaccagttgcattcatcacctgaaaccggctcttcccagatttcttccttgtaagaattgggcgatgaatagaagtagctaacgagaccctctggaatttgtgtgctgtgtagatggaagaag

SEQ ID NO: 34628 - DNA, 605 bp, Arabidopsis thaliana columbia
  unsure (1)..(605): unsure at all n locations
gtattatttttcagagacacacaaaatctccaatggactaatatcaaaatatcataaaatttatcagctacatacaattaattttattcccctacctagtttttgcagtgctacaatttggagtcgaaaacaaaaatgaaaaacagatagctagggatagttaatgaacctgccaggcttgatgattccactaacatcgttaagaatggagattctctttttccgatccggaagaactctgattttagttccaatacccttttttaaatagaaaaatagacgattaggtgagattggaaaaaagtgactctgaaaatagatttcttccacgggaagaaacataatgaagacacaaaaattgattccttgtggtacaagaaatcgaatgagaaacgagacgttacttttaaaaggttgacgtatgagttcaggactgtgggacaggttttgcttgcggcataagnttcnggagtcacgtttaaatcgttaaatgggagttgtatggtcggcagatgcagagagactctgaagttttttgtgacggaagataagtttaaagtgtaacagatttacagttaagtagtttaaatatttaacggattttt

SEQ ID NO: 34629 - DNA, 885 bp, Arabidopsis thaliana columbia
ccccagctagaatataatcaaaacttgatataagtatcaaaataattaaatacaattgctatcgataataatcagaaacaatcgttatgaatggttaagtttgtttccttaaaatggttacgaatgattaattttgttccttaggtaaactaaaagttcaaaaacaaatccaacctactacaatctaagaccactggaaaaagttatggttgattacagaataggtcgcttgagcgtcaaattaagataaagaaggagacttatgtagagccggcccttgggcaaccaggcgacgataggtttgcagctgctaataatataatttgagtttggcttttttctagaaaactttctttaagtctagtggttcaattatggtgggtacatcatcagttcatgggtttgacttttgagacaagtgagaccgaatttttttgttttttcaacaaaattctaaaatagataaaacttatgcggcccatttcattgttcacttgtaggcttgtaaaactcaaggccgggtctggagtgtgatgtcaagactcaatattataacactctacttcatatttcactattttgtgcattatctagcttccaattttctttgcatttcacagtgtatcaatagttactttagtgatgtcaagattacacttttaacacattttaagtgtagttttacaacataaacttgtgtctctaattggcaaagtgaattgctaacgagatcatgaattctgactgttgagtctgagcgaatgaaacaaatggaccaacatatgattaaggcctggagtgacatataagccaaaaaataatgctctatattgtacacttaaaagatcttacacagtacggtctcaaggaggaagaaaccatatt

SEQ ID NO: 34630 - DNA, 860 bp, Arabidopsis thaliana columbia
caaccaacttgtaagaaaagctgttttaagcacaattttcacttaaaactccccacaaatcaaaacgagcaatgataagagtgatgcaaacctgtccccaatgtcaattgtaggtgaagtttcccacaacacctcttccatggttttccctgttatatcgtccaaaggcattactttatttgcctgcatcgagagcttctcaattccagcagtggctagtttttgaagtatctccatgataccagagcccatctcagcaggcaccaccactggagttgacacttgcatgatcaagctgcctccagctttagagttcctgaacagtaagggattcattgatcgcaagaaccctccattctttgtctgcacaactggacccaagccatctccaagaggaggcaaatcaaatggctccttcactggaaaatcagctggatgaaacgcatcacgaccattgtgaggcggagagttttgaaatgtgttttcattcataccccactcacgcatcagagattctgtttccaagccttctaacattttggccctgggatggctaactcttgcttgagcttccaactggtactcttcttctatgtcatgaacaagggatgccagatcaaaaccttcttcaaaatccgactcatactcgttcggaaagttttcatcacattccaattggggatcatccacctttcaatactaaagtcaaacaaagaacctgccgctagagtttccatttcaaactctcttaacaggcgctcccttggggattcaggttcactctcagaacttagaccaaaagggctgtgttcaatacctagcatgtctaagaactcacatgccacagattcagccacatc

SEQ ID NO: 34631 - DNA, 509 bp, Arabidopsis thaliana columbia
ctcaatggttatgatgtacaatggttatgatgtagacttagattcactctgttttattagtacacatacttggagccttggaggtaataaacaactacataagtttgtactacatcttcgaccatttgaaaatgttttgccgaagtaatttggaatgtatgcatttaaaatgcagatttgatcgcaatcaattcaatagtacaagacaaatgatatggccccaaattttttggtttttgattggttaaatccttgaggtcctgatactgccaaatttgattggttaaatccttaaggtcccgatactgccaagttagacggtttcactgccacagtgaggcttatgaagcaacacgtgtcaatctctagtcggccaaaaaaatggtcaaccagtatctatgattttgcttccttccatcaatttcggccgcagcagttgaacacgcgttccattatcgaacggcacgtggcagtcaggaagaatccaacggctggaaggagaggacaag

SEQ ID NO: 34632 - DNA, 926 bp, Arabidopsis thaliana columbia
attataaaatattctaaaatttctattagtattaaatttattaaataaattttaactaattaacccgtggtccaacccggttgacccgatgacccagtaacccagaagatagtccggttcatcgtccgggtcgggtttcaaaacattggcctcaatcaatttaagtataagtctataactaatgcatttaatatatatttctatgtaagcgtacccatcatataatatttcagtatgctcaattaagaaaataaatgcattgataactgataatatatagtgtgggtctgaatggtaatcttatatagttttaatatgaggtgtacgctttgataattacaatcacagaattgatattaaaaacgttattttcaaaaaacaattgtacaatttttatgtattattattttgtacagttttgcactatattaaaaaagtttacctttttagctaaaaactaaaaatttatatagtttgtgttaccaattaatacatacatatcgaatcagattaaaattaactttaggcaaaacatacatataattacctattcgggataaatgacacatatcttttccggttaaaatggtagagagaaacagtatatactctatatggagttgaatcatataacaaacaagtattatatatatataaatgttacattgtaagtgatgagatagtttttgttaaggtaaaaatgtatttctttaattgttttatagatattataccgatgctccaaaactactacatttcttttccgctaccacataatgtttctcatttgcaaaatatttggcctctaatggaagaattacaacctcaaagagattttcaataagaatataattacctctatgtatatatgatgtttaaaatctcaatgtagggtgttaattagaatactgaaaattgcttatata

SEQ ID NO: 34633 - DNA, 1335 bp, Arabidopsis thaliana columbia
acatcaaaatggagaatgctggtaaatggtattccaaaatatgctttgctttgtctttgggagatcaccagagtcacatcagtagcaaagataaatttacaaaaaacttttgttggtcaagagatttacagatttcttttcggttctaattttttaatttctaatggtttttaattattagttaaagtgtaatataatccgcggtgatatctacactacgagtctataagccaataatacttggtttccttcttatatctcgataggaatatctttgaatggaagaaaagaactatgcaagtttcttgctcacactggaaacaaaaatcataatagagagatatcttaaagaacgagtcgtgtgcataagcataacctaaatactctgttctaaaaaatattatattaaaaaataattgataacgccacatactatgactatttacacaatgatttaaggttttgtaacaccagtattatgtaccaaaaatatagtattggagagaaaaccatggtatatacacgaaaaaacacaggcctcagttacatttccctatatattattacttacaaaaagaaggaaaaaaaaaaaactgacaagtataatactaataatttttacgattaaaaaaggcaaaaatctgagtcaccccttcttcttttcgtttccctacccatgaagcaattccgaaccttcagctcaggctagctccgatattggtgacactcagcgtcgacccaccgggccaccgtgttaggcccaaacttaggcccgtataaactccaaaaactatggcttctaacttcaccgcttttcgaaacagaagagtttatacgtcgacgtttgagaaggagcgtttcgtagcctcgttggatttcaaacgggaacaggcaaaccatagttgtgaaacaatttgatccgtccatcccaaccaccggtgactataaccaatccccagagatgagatgactccgacgttctccggcacgaagaccggaggaatttgtaatgctatctacggatcgctttcaccggagaaaacgagctcgctagcttctcttcctgccaagtggcagatcccttgggagaatcgagaacgtactcgcgccctaatgagaagagcgatggcgatacgtcggatccgccggagagtacaggcgtaaatccgcaccacgggatagctactgaaacatccgcagagaatttttcgaatgatcggattttaagtcgtttggtgtgagagaaaaaaccaggagacgactgttcagtgtcgtgtccaacgcagttccagacgtagaccgatgaatcgtccacgcagagactatatgcttccc

SEQ ID NO: 34634 - DNA, 970 bp, Arabidopsis thaliana columbia
taatgtaagaccataagagagtgtatatttctaaaaagttttttaaggaaaaaataaaataaattaaactactaatttcctaatctgatctaattaattggttgggataagaataatatacgtgtaaataaattgtaagtgaattcattctcatcgacccccatctctttctcctctttcttctcttcaattacccaggaaaattgagctgtttactgcatatcaaagcttcaatacctcctgctcagttctcgcttggcaacagaactataaatctcggcttctgaaaggcaatttgactcattcgaaagctgcccctgaagcagccaccgatccattgaatcatggaggtggattcataccggaaacgcaacaaagaggtaattcattgagtcttaacgatgttgcaattatgatttgggtttatctctgaatagtggtaaatctctgaatagacactcctgcatctataaatgtggagaaagctgaaactgcaactaagaagagaaccaaaattcctaccatatactatgcttcgtaagctttaacatgagcatttttggaaatgttgtgaatataaattaatgggtttcttcttactgattgattgtttgttttggttcatttaagacgaactcattctcagattactcaagtgattcgtgagtataggaaaactggttacagagtccccatggctgtattggtatgtttaattgactttgctctcttgtgtggacttgcttattttatggttaatcaagatcagatttcatatctcacgggtccgtcttcattgtgcaaggcttcaagaaaacattactgcacgaatcgtcatgtacttgggaaagacaatgtagatgatgaatggtatgtttcaaccacattcttaccatcttactattcttttcagtacgccttatcctctatactaacttgtattctttttctagtcggttactcttaaaag

SEQ ID NO: 34635 - DNA, 2116 bp, Arabidopsis thaliana
tctttcgcatatggattcaatatgacgagatcggttgactgcactattcgattagagataatatattattttattgttatctcttctatgcatcaccgtttgattatcgtcacacatcagaactacatatttattattaggatattttgttgacttagttctttggtttatgttccccgtttaaaaacttttggcaaaattaattagatatcattgttctcgttgtttctggtttgttatgttaatatatgattcgctaattcatgcttagttgtgaaatgtatgttgctgtttttatttaattctttgtagctaatcatatgttgatgttattttaagtaccgattattacttttgtttaatcacatatagtatattgatttatttttgcgaaatcatcgattatttaatcacacttctatatattcaacaaaatgccaaatctcacgagagttgcgtttgaggcccttgatatttctgggaagaattatttatcttgggtattggatgttgagatgcacctaatttttgaggaacttggggatacaattatcgaaggaagtgaagcaagcagccaaatcaaagcaaaggctatgattttccttcgccattagcttcatgaagaccttaagaatgaatacttaaccgtgaaagatcctgagattctttggaaagatttcaaggacatgtttgatcaccaaaaaacgggggtattaccaaagctcgttttgattggctgcatttgagactagagaactttaagtttgtagctgaatacaactcagcgatgtttaagatcacttctaagctgaagttgtatggggaaaaggtcattgatgcataaatgttcggaaagacaaacaccacctttcacgcgaataatattgtcttacaaacacaatatcgtgaaaaatgatacaagaagtattatgagctcatatcctcccttcttctagcggagaagaataataagttgctaatgcagaaccatgtatcaagtcaaaccggttccactccattcctggaaggaaatgtgacatcccaccatgacaaaaaaaagttaccatagtggttgtggtcatggacgtggacgtggacgtggacgtggagatggacatggacatggatatgtacgtggctttggtcgaggtcgaggtcgaagtgtttcttttaagaacacaaattctcaccgaaagtaggaaaggaaggatgataacaaacatgaaaaaacccaatggaaatgtgaccaatgtatgtgaccgttgtggaggaaatggtcattggtttcacacatgtcgtataccaaagtatcttgttgagctttacaaacaatcattgaaacaagatggaaagaacacagagacaaatcttgtgtacgaaaaaggcgaagatgataccactcatatggaactcgatgattttctaacccatgatggaaacattgattcttagattttaattatgttttttagcatttacgttatttaatttttattttaatgttgttttggttttatgattttatttatttccttaaacatggtcgaatttttaattatttttgagaaattgcctcaaatggcattaaatgatgtttttgggacataatgagcatctaaatatttttgtgacatatgtatagcattctcatttattttcaatttttaaacaacgaataatataattaaaagaaaataaattgaaaatagatctccagctcacgcttccaacgcgatgaccattgacgagcccgacgaccatcgacgaaggcttcgtgctcgagctcgaggacatttccgacaaagctttgagctccgatctgcatttccgacgaggcttcataggtttgatcttcagtcagttattaaatcgatatatttctccagaaatttccaatttcttcatcttcttcttcactaattttgttgacgaaattagacgagtactgttgcttaatggtgttcttcttcaccgttgttgtttactgttgtctaatggcgttcaatttttgaattgattcgtgaatttgtgattttaattgattttgaacacctatgacatatttgcctcttttgaatcgatattgaacagctactcttgttgtctcatgaatata

SEQ ID NO: 34636 - DNA, 803 bp, Arabidopsis thaliana columbia
aaatcacctgaacattctttgctctgacataaggactgtctccgacaggaactttgtgaatagcatgaaatgattcagattgagtgcgagagataccaagtggctttgcaggagaacaaggggctgatttagtcggcctgaaaacatctctcatcatctttgtaattgaaatggagaagatgaagaagaagaagacaaaaggaatctcggcggaggattaatgtgagaacaaggttaggattttaacaaaagagagaggtctgtcaattattataaaaaagtttaaattttcgaccgttgagatcactagccgttgcgttccattattttctatttccgctaattactgggggagcgtttcgcatctactcctttgactttcatgtgttttcagtttagccccgctaaaactacatcaaacaaaatttggacaaaataacatttgagatttgatttattaagaaacatatccgttataatttaatttctctgtctcagtacattggttggtgttcaatttggaaaactcaacgattcgagaaaaagtcactagaaaaagattatgggcccgtttacatcattatacggcccattcaagcccacagttggagtatcaaaagccgctcatgttgctgtggatcttggagttttgggatccgcgtcctttgtccttgtatgtgtttcttgaagactgtgactttctacgtcccctggctgctgccatggctctgcgtcttaccttgcccaaatttttctccatgctctgcctctttctcttcctcctcctgtacaaaggaagtagc

SEQ ID NO: 34637 - DNA, 539 bp, Arabidopsis thaliana columbia
taacgtcaacaacaatcacaccaccctatttggacaaaagttcaccaactccaacccaacccaacaacaacccaatgctttggcgttgtcctcaccaccatcacctcgtagtacatctgattcggttcataatctatggaagttacaagaagaggaatgtgcacaccagtggttactcaatgaatatatgaacaataacaaaaacatattccataagggaatattcaagaatcaagaagatgagataaagaagggaaatatctacagcggctcaaacccaaccgatggaaacatagcatccttgttctcgtataatcaagaagcagtgaatatggcttcattttcggcaacaacattgcttcaaaaggtagctcaaacgggaacaccatcaagctccgaaactagcaccaccatgtttgggcaaatgacttcctccatcttcaacaatacgatgctaaactcctattgtttaacggcgaagaataatgaagaagagttgaccagagactttcttggtgtgggaagtagtgaggccaaca

SEQ ID NO: 34638 - DNA, 1427 bp, Arabidopsis thaliana columbia
aatactactaatctttctctattttaaaataagtcttttcatgatcttgagggaatgtttctgttttaaaaagggtttttaatgatttaaatgtaacgtttgtcaagaaatgatctcattgtctctttaaaattacttaaatagaaatttaatataaaatataatttaaaagttaacatcctttgtaagaatacaataggatattaaacttttcttatatgcatgatcagtgtcaaaaccatgtctaatttcaaatggacgcgatattatttttatttgtataactaaatcaatcataacttgtaaggtaacatggtcgaagaaaattaatgatcataaggagtttacctttcatgtaagcttacgtatatataaggcatccttgcatgagatgtatttttacaccctacacgatgatatacacacacatatatattaatagatagagattttgcagattctcatagtggatatatcatatatgtgaaacctatatatattacatactaagaaatatataaatatggaatgcaatgccatcaatttcagacgagtatgtttggctacagaaagctatttactcctccttcctctctttttcatcaatcatttcgggtttgctcatttaaatacaaacaacccttaaaccaaaaaaaaaaaactaaatacaaacaaccccatcttcgtcttctcttctttcatactctcacatttaattttggtttagctttcttaaagtatgtaatatatcatacaaaaatatgtaatatatgatgtgaaagaggatatataagaaacaataatacaatgggaaaaacaaaactggatcccttatacaattgagatatattgcgtgacaacattacataatcggtaaatttggtacattcaaatagtgctgcggtccaatcggccgactcgttccgacttttactctctgccgtatcccacagcttgtcatatcccacaaaatttattcatttctaatctttatatgatgtttcttactagatccaccagtatagtgtcgtatcccttttgttgtgtgttctcatatagtttctatgtaaatttgatgtctcttatttggataatttaatattctgagaagaaagccaaaagagataaaatcataaaaatgctggctaaaatttccaagactaaaaatctaaaatttgtcattgtccgacatttataaatccaaagcttcaggttccactcaaagaaaataattatactatttggatgtcttttggaccttttggtgcattgatgacaataagcaaataatactatacacattttgcaaatttgcaggatgaatgtacacctggatatatagtagaccaataaagagaagacatgtgtgatgtttataccaatgattgacatttgagttatgtgagttttaattagggaaagacctg

SEQ ID NO: 34639 - DNA, 598 bp, Arabidopsis thaliana
ctgccttcaccataaccatgagaacttctcctatgaatcttctcactgccatgacgacgaagctctctcttctcgggacttttggcaacatgatctcccgaccttgtaaaacattttgttaactttccatgttttggcaaagaaaggatttcatgaatcatgatttgtttggtctatataggaaaatgggcttttacctttaccatgttgagagtctttcctccagacctgacgccaaattttgaaagaactctgattaaaacctacatgtatttttctatcatcaataaaagtaccgtccatctgcgtaagaacaacaacttgttaaagctccaaacaacacatgtatatatacattgaatgttttaagacgggatggttctcatcgcttaaaaaaagaacatgatcaccgtgaaggaatctgtatattgaatctccactagttcctgtgccggttggatcacctgtctgtgctatgaacccttttgcacattttgaaagacacaccccttatagtaattgactaattgacctaacaaaattttgagtgatcagttacaaaccaacctcatggaatcatatatatagtgagagatgt

SEQ ID NO: 34640 - DNA, 770 bp, Arabidopsis thaliana columbia
tagtaacggaagtcactaagtttaaaggttgtttgatcaattgttatctcaaaggtgttgtggtttggaactgatgcctcttcctcgagctttgtctcatcggactctagtcttgatgcttcgtcatggtcttgcacaaccgcatctggactgagagatttacctgattcacttagcaaatcggtagtctcagaggataagttaggaagaataatcttactgtcacctgtttcatgcatctggtcttccattgtgacctccatgtactcgtcgtgatttgcttccgaagaacaatcaattttcatctcatcagcaatggatgtgaggtgttcaggctcagggatatgcttctcatcatcaatggatgcgtggtgtccagactcagtgatatgcatctcatcattactagcatgaccagtagtagctctttctttgctgttttcgtccactgaggcttcttcttcaaaagcagcatttcccatgttattcacttcaacaggactttgtgggatcccatgatcgctttttgacggtgacattgatccaccttcggaagtcgactcaatattcatgctaacatccgacgctgcttctgactttgtacatcttgtcagtgtaaagggagtagccgtctgattttgcaccaaaatcccctggccatggctggcactgcatttccttagggcaaatgcttcttctttgaggacatttgtagtaggttccacttattgtcatcttcagacatcagcatgtcaatttggcttatggtt

SEQ ID NO: 34641 - DNA, 668 bp, Arabidopsis thaliana columbia
tcactcttgatgcgtgtggaatcatcaaagctttgggcagcaaaatcgcaaactgagaaaaaccagggagattcacccgttttactgcacttgtagacttgtagtcctgaagaacaagtcttgttggttcctgtttattaattatcctccatatcctcatcggacattaagctattccataaccactctacagaaacatctctaagaaagcttttccaaaaccagtatggagctggagctcgttgaggatatgctagaagaattctgtatccccaattttttagttcgcacagcgtacgagctaacccttccagttgctcagaaccgattatgagcattatagtagctacgtgtttagtttatatgggccattacgtgtggcccaaataattacttgtgttaggtttaaatcgaagaatatatttgattgggcttataattacttttacaattggcccagtccaagaatcagatggatctgaatccgacccgtaagaagatgtgagtaaaaatttcatccacttgcgtgtctctccctttcaaaggctcaaaatttaaatctctcattcttcttgtgcggcgtttctttttctccttttgtccgtacgcgttttcttaccggtgacctgaaagtctcaaaaaatggcggcgtatagagctgacgatga

SEQ ID NO: 34642 - DNA, 672 bp, Arabidopsis thaliana columbia
ttctctatctttggaatctgattcataggattggggtttaatggttttcgaagaaatctgggttaaagtgtgttcgtgtgttctctaaatttgattcactaaacgtgggtttcgaaaaattgaattctgtgtagctatgatcttgtggcataaggcaaactgattcctgaagttggaacatcgttctctggttcagtagagaaccgacgaacacccttccccatctccgacgatgttgtttttctgcttaggacacaagtttgttttgttttttttctcttaaactttcatactttcacacactcataagtttacacacattacacatatatataggagatttcttctactcaccatacccactctcttagaccttaaacttagtcactatttaaccttacttctagacattagacttagggatacaagcaaccttacacaaccttaccttagccactaacaaccccaactactctacctcaagtacttagctagaataagctacttctacgaatgggtcacaacaaaacatacttcaccactttgggcctaaacaacttcatcagcccaataagataaaacctaaaaacccacttcacttgttgaattttcttcttcttctcacgtctctctcttacgtcgtcttcgtcttctagtttccaatcttcatgt

SEQ ID NO: 34643 - DNA, 973 bp, Arabidopsis thaliana columbia
tcaagaaagtatgcaaggaagcaaaccactagcatatttactaacgaaaacaggtcaaacctccctattcacaagtgatatcatctctaaggtttgtaagtactgataacagaatctataacccagagttggtgtttctccagagttgataaacatacactctctaagctgtattccttgacgggtttcatcatacaattcaaaatggacacaacccaaaagaaaacaactaggtttctatatttgcagcttctgaggcaagaaggcaaagaactctaccaggagacgacttgagctaaaggctaaccaaatcaaaccataacactgaaacaagaggaagggaaagacctcagcatcagtgccgtagagagtcacacgataagccacagtaacagtgttgccatcaggagagtaagtgacacttcgaacttctcctgaccattctgaaaacagagaataatacaccaaaatgtcaaaaccaaaacccaacaacgaaccccagaagaacaagagagggtttagcaaacctggagcatgcatattcatgatccgattcacaatgtgcctgagaatcaacacaagaaaagagtataagtattgacccaaaaaccccaattaaagaaccctaaaccctgaggaaagagattaccaagggatgtatttgatggagcacccatcttcaactcgagttcggatgactgaatctggaacctttttgttaagctccttgagaatctcagcgagtggtctactgattcctgaagttggaacatcgttctctgtttcagtagagaatcgacgaacacctttccccatctccgacgaccattctctcgatacagcacctgatccgctcctcaacgtccattttgccgcctttagccgtaaccctaaccccgccatttctgtcgccggacaaaattctcaaaggtcgcgtttttatgtagcgtgtagggtttagttgtcgctgata

SEQ ID NO: 34644 - DNA, 529 bp, Arabidopsis thaliana columbia
cagaggaagaggatcccccttcctcttcggttacgcctttgttaaacatcgattgtgtgatcttatctgtctccgtcttcagatccgacataagcttcaccctgaactcttcgatcccttcttcgcttcccgatttaaacggtcggcgatgatcggagttaccgaatcgaaacggcatcgaaacgggagaatcagcgaattccagaggcggagatcggcgtcgtagtcggtgatcgccgccgggacctcctccgttgttgttgttgttgctgatagagtcgatcttcgtgcacttgagttgtctctgattcccccataagttcgggagagggaaattgtgaagagtcttcgatcgttgctcaggtctcgttgtcgtcgtcgtcatctcaccgggaaataccattgattctgttgcacttactctttcttcttctctattcgatccacgaaccaggaacgaatcaatctctttctctttctctaccaaactcgagaaaaatcgttagttttcagattcgcaggaaaattg

SEQ ID NO: 34645 - DNA, 446 bp, Arabidopsis thaliana columbia
tggcatatttgtctagctcaacataacacgtagtgtttgcgagaatttcaggattgcttattgggataagcagtctgtctcttgagtaaataccatggtcgctcatcatgttgtttagccgctttatgtccataacctacattgttcaaaaacaaggtgtaatattaaaatccagttactaaaagtccattttcggtaaataccatggtcgatcatcatgttgtttagactaaaagtccattttcggtaaaactctatctttcgtctgatagtagtctctatctaggtgcaaccaaaaaacttactaatacgcggagttcgagttactaaacaaacaatctgttcctagcatactcgtcagcgaatcaaaagcaacgagatcagataccaaaaaacagagcccaaaagttggtagtgtggtgttactttcacagttccaatagcta

SEQ ID NO: 34646 - DNA, 564 bp, Arabidopsis thaliana columbia
tgaaattctcgcaaacactacgtgttatgttgagctagacaaatatgccaaacgagaagtagccgttctttacctcgaaggtgcaccgaagagagaacaacctgtacctggtacgaatcaacaatccaacttatcagccgatggaaagcgtaggctaattgaatctctaaggagaagcatgcaagttgatgatggaactgctctatactacttggctatcgctgaaggtgatcctagatccgcattgtctgagttctcggctgatctcaggtgggagaggcaggctggtcttaactaggctttaagcaaagtatgatcctggatttctaatccaaaggtaaatgagtgtttatatgtatgtaattagcctctagtatataacagttatggggtgtgattcaggctcaaaacatcggtgcccagagttgaaccagattgatacatgtccattcttgcttcttgttgttcatttggtggttttggtgccatatagctgttatgtcctatgaaatattgttgtcttccggtaagaaatatacattaaaccctgttaagtatataagt

SEQ ID NO: 34647 - DNA, 904 bp, Arabidopsis thaliana columbia
ggatcacaatacaacaagctttagaccacaggtatactcttgaaaaagaaacccacgggacaaaaattctgtttcatcactctgattatcattggttttttcatcaggtatttctcgtcttctccatcaccaactgagccagggaagcttcagattccagcttccaaaggagacgcactcgaaccaaaggcctccgagcaaaaccaacatggaaatagcccagcggtactgtctcctcctggtaaaatgaggagagtgatgggtcctgaaggattcacttgagaagatgatgtttcatttcttttggaaaatatcaatggatatgcccagaagatttcaaaattagatttttaccattgataattcaatattagttaactatcaaagagaaaaaatttaaagccataaatgtccttcttagttcttactttgtttaatttaccaaatatgtcatgtatcaactattgttataatttcactatatatcaaatatcttaccatattaatataaatattatttagatatttaatatgttagcacgatatattcagtataacatgttattataattttaaattgatgatttcatattaatttgtatgatatggtaaatggtttaatatgatatatataaatttatcgtgatactatactagttaacatgttaatcaaatagttatctgtatttagcgcgatattatatacttgttaacattttaatcaaatagttatctacataaatcataaatgttttatgcaatccaatgataaatagtgttgtaaattttggatgaatagtgtcgtcaggtgtaagatgaacaatatcatgcttacagtatccggtaataaataatgttgtgagacaatggcatattaggtaaattaaatagaatataaaagata

SEQ ID NO: 34648 - DNA, 890 bp, Arabidopsis thaliana columbia
tgaataatatttatataaatatggtaagatagttgatatatagagaaattataacaatagttgatacataatatatttggtaaattaaacaaagtaacaatgaccgttatctttctttgtaacacctcggtttcaggaatatggtggtccatgcgaagagatttaaaaagaataaatttacccacctatgtcagcaaactgcaaatatcttttccgtcaaacgtcctgaaagaactccaggattaagcgtgcttaagccggagcaatttcaggatgggtgattgttggacagaggtgggcccacatgtccaagagtgaacatgggtgctcattggtaggggcggtccggtcgttacaaattgtatcagagctgaacccatgcaagtatagagataagaggactcacaccatcgggggtgacaattttggtgtgaaacgaggacattgcgatttgttagtggggatgaatgataacacttcggttttagaaatatggtaatacatacggagaagtttaacagaattgatttggtcacctatatcactaaaatgcacttatgttttgtatggtgttacaatattatgtatataaagtgaaacaagaatcggtaaagaaaacagaaagggtaagacaacttcttgaggagtgagagacaacttttgagcattgacttcaattgataattataagttatagccatcataacggggtgtgatttgtgtgattgcgaatggctaatgatatggaaagatttttaaaatttataactattccattattcatataacttttgaatcgaattgtgaattggggcttagaatatttccatcattccatgcatagcgagagatcttcatgaagcttcatcctttcaatgtaatatattata

SEQ ID NO: 34649 - DNA, 779 bp, Arabidopsis thaliana columbia
taaaataaaagtatcttttacacataactccaaaacttctttttcaatctttaaaaccagaaaaacagaggaccatttcttatcataagatttagtctaaataattatattactatacaaaaaataatgcaataaactaggtgataaaagaagacaatagaggatgctgcatcatataaacaaatcataatataatgcatagaagtggtccaagtgggagtggcagaagaagttgcatgtggttaagggcacatcaacaacacttgtttctgtctttaaaacttgtccaaaaggcatattcttttctttgaatcagagaatccacatagagttttaatatcaaagtttcagtgatgatcgaaacaaagataataactttgccgtaacccacaaggaactgagaattgcaaaaggtcaacttttggtcattcgaacaagacagaggcatggggagaggctttaggaaaagccaagattcttgctttctcttcttctgtgattggattgggcgaggaaaggatgactgatccaagaatctcagcattgtccaacacgtacctcaacactgatatctgtagcctgtttggcttaaagttcctgatctgcaggactttgagcattgttgtaacgcaatccggagattctactgaacgtagttccttcaaggactttgcagtaggtgttgaacgaggagatgtcaggtcctggttgttcaccggaaaagggcaagatcagccaaagagaaaagatattggtactgcacaacattcgatatagtt

SEQ ID NO: 34650 - DNA, 513 bp, Arabidopsis thaliana
accttcttcttctttttctcaccctaaatttcaaaaaacccagaaaaaatggtataagaggaaacccctttggaaaaatctttcctttttctaaatattcgaataacaaaatcgatccattgctaattgaaacaagattgtatctatacgaagccgatctagatagaatgagatcgtaaaccttgagaaagtttatcacaaagtacggatctaatacctctccttgagctaaaccctgtcacgatctgatcctcaaaagaaactgcaaaaatacacgaatacagattaaccagagaaagatttgagagatgtaaggatgcaaaagtcaacttctttgtagagagaagagctgttacgtatatctctccccaattaacgaaaaaggaggatctatgtgacgatgatgaggacgaagtagaagaagaagatgatacagcaaaggaataagaatatcggagattttgggtaaaatccttttcttttttttaatctttgagaagacagtgggtgggg

SEQ ID NO: 34651 - DNA, 253 bp, Arabidopsis thaliana columbia
gaaaaaggtttggactttggagtaaataagaataattaaacaaagtttattacagcatcacatataatttgtcaatagtgttatgacgacatcaattcttagattggtcttgcttttagcaaataattatcggataggtcaatttgacggatacaaaaaggtgcttgctttagctctagcttctctcatcttctctctctgtatctagctatctagctatcgtctacgctgacatccctaattaatctggttc

SEQ ID NO: 34652 - DNA, 576 bp, Arabidopsis thaliana columbia
tgaaaaaggtttggactttggagtaaataagaataattaaacaaagtttattacagcatcaaatataatttgtcaataatgttatgacgacatcaatttttagattggtcttgcttttaaaaaaaaaataaaaaagaggtcaatttgacggataaaaaaaggtgcttgctttgctttagcttcttcttcttctctctctgtatctatctatctatctatcgtcttcgctgaaatccctaattaatttggttcctaccaccctcaatttcccgcgcaaagagaatgtggaaggtcatgaaatgaatccttttagtaaattccaatcgacgacatctagctgaaagtttcaagctttctcgcaatctccgtcctttacggattcgtttggcctttgggggtggctccaacgagaatgaaaaggaagtttccggattcttgtttctatttatttccctgaatttcatatctccgttcttgtgttcgttggcttcaattagataagtgtacttagatttcgaatctccttgtaaagcttcaagttttgaaaattgttatgtttctaattgcagtgtagat

SEQ ID NO: 34653 - DNA, 1127 bp, Arabidopsis thaliana columbia
ttacacaaaattggtgttaataaagaagaagaaagaatataaaatatactactaactcagtaatttttttcttcttatgaagacgcatgggtctggattgttttattcgattcggcgccattataactaagaagcacttttatttgattagtgatgaaatttgaattactaatcaaccagattttcctacaaaaatcattgaatagtgtatatattctattatcattgttgctatttttctggtttggtcgataggctttccttgtgctgaaaggctttcccacagccatgctgagcttggagtggttagtagcaaccctgatgcgtgttgaggctgtgctaagaggacactgtaagtctgtgttctcaaaaacttaatggactccacaatggccgctgagagacgttttgatgaaaggttggtcaaatattgtggcggatgacgtacaatgaggtagggttggacctccgatacgatcgattgggcctcctatgagctcaatcttgtttaactgagattaaattttatataataacggtgtgaattctctgttatatgatgttgggcctcctatggattctgatatcatgttgagtgatgacaaatatagaaaaacctcgccttgatatatttattaattatggtcctaaagcccgaaaatgggcccattaaaccagcaacgatcgtaaacacgaataaaggaatttcggaatcggaattttgacccatttcaccaaatcggagaaaagacggcgaaaatggaggaacagaacgctggaaccggtgccggcgaaacgagtttgttggatggatcaggtcactggtggtgggcattgggaagtggagcccaaatcatgtggggaatacgattgattcggagaggttacgccggcgacgttcgattaatgccgctcaaagccttcggtgtcgcatcactcttcgtcgggtcgttagccaccagctccgtcgcattagtccgcgccacggggatccacacggtcagattctcgtattgaaatcagattgatctctatctaacttatgtgtgtgtgtgtgtgtgtgtgagagagagagagattgatcggatccatttggtggtggaaattgaacaggatcaagatgcgat

SEQ ID NO: 34654 - DNA, 617 bp, Arabidopsis thaliana columbia
aatttttttataagccgaattaccaggaagtcctaatacttatatccacctctatcatccaacacccagtcctacttcaatattaaagtcaaagtaattaagtgaacccaagacatctgtcattagatagggagaacgctgcaagaaataacacatgtatttccagacaaacaaagtgaagagggcagacctcattttctaacttctttctgtcaagcttcatgtcactaatcttctgcagacacttttcctgctctgcaatagaaccactaatctgtgtatcacattccttcatctttgcatgtatcaacttgagctcagagagagactgatcatgatccttctgtatggcatccacctgcagaagggtcacatccacatgttactcgtatattctttatagttaaaagacacagatagaaataattgcagtaccttggctcgttgattgcccacatctgaagccagagtgctaatttgcgtcctcaatgaagttagctggctctttaaatatgactgttcctgcgtcactgcttcttgctccatcacaagcctctcccttacgttttcatgaccctatgagcaagaagaaacatagaccaaaagctatgaagcca

SEQ ID NO: 34655 - DNA, 582 bp, Arabidopsis thaliana columbia
tcgaaaattaaatatttaaattttcaaaatatatatgtatggtaagtgtatttaatatttgtatatatttgtttttttgtagttttctaatttttaatttattgcatatattttcaattaatggtgtagttttatttgttagtatatatatccatttatccggttccagaatatcttcgctttaggaaatatttcttattcttcggggacttcgagaatttttcctgatttcagattatcctcaaagatccttccttatcatttatgagaatctcggaaatgatcccgtttttctggaagtgatcctttgagcgtgattagattttaaaaggctttgtctcgcgtattcttgaggttccccacggagtacttcttcgcagttcagtgattgttcatgaggtggcttcagggtaaccggtacactttggcttggggcacggtgatgactatccctcgtgctcaagtgactatctcccgaggcgatataggcggtcctcgaagcgttctcacaatcggcttggtttgtgttctaagattaccccgagccgttttacggcttactcccgaggtgctttgtgattg

SEQ ID NO: 34656 - DNA, 1362 bp, Arabidopsis thaliana columbia
gtagctaccgcttggttcattttccacatcgccttgaaattcaccttaaacagcaggttccattcaagcacattgcctaccttttcaagcttccatacctccattaccgacttattgctccatccgtattgtaaagacccatcatcggtttctcccagaacctgttcatcatagtcatatgttttcggaagctttatcacatcaatccgtttctcctcactgtttgagtcatatatggcaattttacctcctctagcatgccaataaacaacgcctttaatcactctccctggagtccacgggctgagagatagaggctcgagacaaataagctctgagtagctccacgtagaagtttttgaggaaaaagtctctaccttcacctttgtactgttaacaggaaaggctacacactctgcccggaccaccttgtagctaaacccttgatcaggactatcctcagaaatcaaagacatacaaagttcttcgaaatgaactctgggacgtggaagttgctgctgcttctgtgtactcggatcccacaagtagtaagcttttggatggcggccgcagagtagaagaccatctgcagagtcgatgtagtatccaagctttttcagaataccagaggattcaatttcatcaccaatactgctggttgagagcaaaggaagagatggctcagcgcgagggcgacgagttccatctatgcgtcttccaaggtacattgagctgcagacgaagaagccaatgagttcaaaattaggtttccacttggctaagtaagtgtgacggaagcaagggctggctataatctcaagccatctcttggacaccaaaatcagcttgtatatcgtttctggtggaagcaggataagaatctcacacatagtatcattactgttaagaacctcatgagtactcagagcagaagtcatccccaaattggtttttaacctggcagaacaagacattgcagacactgtttctttgttcatcagtaatagaaatccaacacaatcaaaacaaccacacagaatcaaaagacccacaagctacaaagaaacacaaatcaatttcaagtatctagtggattgagaaaactcaataacctaaaatctccaaagagaatctaccaaaacgcatgcaaaatcacaaaagatgttattttgttacacccatgaggaacaagaacaaaagtcggagaatttcgcagaaatttttctgaaaccctaagcttcaaagttacgatttttaagaacaggaaacgattacagagcgagactcatcactaaggtagaaaaaaagacttagcattacgtcaagaaattatatgttaattattttccatggggatagtcg

SEQ ID NO: 34657 - DNA, 644 bp, Arabidopsis thaliana columbia
gtctttactctttggagctaacacgtactcaattttttctcagtggagacaaaacgagcaaagcagaattgagatttggttttggatgatcataatctttagagttaacacttggaaaatttgtcaagaagataggaaaaagttgggtatagtacctgagcaaaggagtacatgaggctggtgctgagagatcttggtgcagaccatgagtgaatcacctccggttctgccattgatgacggtgtcaaactctcaactctggcctctgtgatcacttttgttataagtgttgtgacttgtgaagtgtaaagtggagtgtcgataaaacaacaccacacctccaaaaaagacaagaatttggacagaaacttgcacgcatatcaattctttctctattttgcttggaatttagtaagcaaaaaaaagatgccaactttgtgttacctatttaaaaaaaaaataactttcattaaaataagaagccttcaaaataatgtaagagaaatatcaatttactagtatcgaatcgtggttaaataaccggaaatcaccatctctgccgttcgtggtttcctcattgtaatgttactttagcttcaaattcccgacaatagattaggacacgacacggtgaagctatagcc

SEQ ID NO: 34658 - DNA, 1106 bp, Arabidopsis thaliana columbia
tggatgaattgaaaactcaagaaagtcaccaatagtgcattgaaaagttttggaaatctgagaatagtgaagaaatattcaaaagcttattactactattaattttgaccgaccgacaactaatactaaggtttagaggtagacatggagtatttctcgtgacaatgttttaaaaaaaggacattcgaagacatttgagacagaagtatcatctcactactcaaatacaaatctaatatatcatccgagttccgacaattagagtggatctaaatggatgaagagagacgagacgaagaagaagtttctcatatttgtatcccttttcaattcttgaacgaagctctcaagaccttcctaaagtgtcttggtctccatatttctccttctccttcaatttcctcggcatcttcggtaagcatttgttagaaagccatcgagaaagaaagttaaatagaagatcgatattatgcatatcatacaaatttaattgtagctcatgtatatgcatgtcttttcatatggacgttaatacccatttgagaaataatatatatgaggagttttttttaactataagtttacaaatgtaggaggaggctacacaagacgttgtgtcaacaaggggcggcgtgatagtcaaatcgaagaaagccgcgagagagctacctagctccggaaagccaggccgccgcaactaggagtttgattggttttcttgcagccgccaataaaccctttattaagagatgattgcggttgcaagtacttgactcataagtcctaggctcatagcatctcatattgatctaaattaaaaaaagttttgtttttttaagtgtttgcagtaacgaacattagtgacactttttttttagtgataggttacaataataagtttttctaaatttatgccaaatttgtcaaaaattcccatctttcaagtttcaacatgatctatttatcttctatcaacaaatttcatataaaaaatttctatacttttttttgctggtatcaaacttttctatacttgatacgtacgtacacatataatagttgaatttttgactaactgtaattacggtaaatattaattagtttca

SEQ ID NO: 34659 - DNA, 607 bp, Arabidopsis thaliana columbia
atgaaaaaggagcaaaagagaatttgatgtctagtgtcaaataactgtctactttaaacaagagtgtaggagatccaccgaacttgagtgtgatgtagtctttaataagtaaaaaagaataggacattagattagtagatgaagacactcttgttggtctaaatgaaggaagttgaaagcagagcaagtctctttcttttcagatcaatagtgtgaaggtatgaatttttgtccataatttgtcgatttttggctataatatctttcggaaagaaaactttggtttcttatggagaagttatataaagaagcaacactttacatgagatgggataagatgagattggaagtagtggctagacatccgaaagtaaattgcagcataaaaaagaaaaagacagcctgaatcatatccattctacattttaaaattgtgttatcttttcttcttcttttgttccttccttgtaaccttcttgttcaaatgtatatgattgatgtacatacaataaatgtagctcatgatgaatctggttatgtgaaaagatcaatgaggtaaaagaaacccgtatgattctggggggcatgacagagaaaaggggatgtt

SEQ ID NO: 34660 - DNA, 519 bp, Arabidopsis thaliana columbia
ctggttatgtgaaaagatcaatgaggtaaaagaaacctctatgattttgggggcatgacagaagaaaaagggaatgttgaagaagacatgaatgataataataaaaaaggatagcaaagtgtaagaaaaggatggaaaccaaaatgggaaaaaaggttgtcacctttaaagaatggtcccctctctctatttctttctatctcttgtcagatctcaaggttacatacagctgtcttacttttctttgatttttcttcattctattccatagccaatgataattttccaaaaaaagaagaaaagagtcgcaaaatggctcaaaacttgattgttggatagtggtctaaaaccattattgttagtttgcatctctcttcagaggatgaggttacaacaaaaagttttaaaaccggctcttttggttattaagtaatgaggttactacgtttgatgttgtttgagttaccggtttcatttactgaatgataagaagccaccaaatttgatcaatttccttat

SEQ ID NO: 34661 - DNA, 923 bp, Arabidopsis thaliana columbia
actttaaaataaaacatatagttttgtgaaagatgcaaaaattgagaaggtactaaactattattacttatattagtgaatcaaaactttttcttaatccatttggagttgtttagttcaaatgaacggaacatatgtaatccaatacaaacacaaatataaaaaaatacaagagaacaaacagagaattccagtcaaacatgtttttataaataataccataacaaccaaaaaatacactcaaattgaaatcaacatacttaatcaatcaaaattcaaattaaacagtcttcgaatacattataccaaaaaagcacaagcttgccatgtttaatatatccttgactaggcgttacaagttaacattggattacatggcactaatttttcatggacaacaaaatatgaaacacagagaccataactaaatttagagacacgaaattgaaagtcccatatccgactctataggatctttgatccagtcttgtctcttcacaacctctctttctcttctttttcttctatttttacttccttcaactcccattttactccttcatttttctacttcttctttctccataactagtactatacgcaagaccgtaaagatggccttcgggaggggacgtggcaacaaacgcacttcgacgtcgtcctatgcgtcgaccattacaatggtcatctttgtggctctgtgtgtcttcggcgtgtggatgctttcttccaattccgttattccaccgcagatcacacaaggctccaactcgagcggctgtcgcagagacagagaggagtgatgtgtctgcctcttcaaacggtaatgttgagcctgaacccacgtaacaagagtctgatgagcaacaggcatttgaagacaatccgggaaagcttccagacgatgccgtaaagtctgacga

SEQ ID NO: 34662 - DNA, 398 bp, Arabidopsis thaliana columbia
cgtctcagtatttcatttacgaaaaaaacgtgaggaacatttatcagttacttaatctgttgagaataaaaggaaaagtttttgaattttctccaatacatacataggacccatgcctatataactgaatttatctttgtatattacacagatgagttataaaagttccaataattacaaggacccagcagaataattaaaaacacacagaaaaaatccaaatttaagaaattagaaaacaaatggtatcacaagtctcacgcgtgtaaaactgcatgagccacacgtgggccaagctaaccggttacctgctgcgtcttaaacagttacacacagaacaaacgaccgctacgaacataagtgacaactcatctccaggtaagcggtacaaatgggaa

SEQ ID NO: 34663 - DNA, 593 bp, Arabidopsis thaliana columbia
agatccccccgtcatttaaactcattttatcataaaaaaactaaaccctaatcatattttttaaacccaaaccgatatttaacctcgtttaattgtaaaatttaaatctgtttataaacttaaaccaatatttaacccgtttaatcataaattctaaacccaaaccgatatttaacctcgtttaattataaaatctaaaccctgaccttttctaataaacccaaaccgatacataatttcgttttagtagcaaattagattttataattaaattaaattctttttattattattaggtgtcggattttaattggctaatataaaagaggtgaatataagggttcacccctagaggtgaacccaagtatttttctcatttaaaagcattcaaattttctaagatctataaaaaaagtttttattaaattttctaagaagttttatgttaaactatgtgtaaacaataaataatatcaccctagtttatcaaacataattaggtaagaaggattctctttagcttctgtgactataatctgaaagaaatagtaaattgcaagattgttttgcctttttacagttggatgttatat

SEQ ID NO: 34664 - DNA, 867 bp, Arabidopsis thaliana columbia
agagcactctctttattataatagcaaaaaggtgtaaagcctaaacctaaaagttaggttaatgacatagattatgtgttcattttctggttccgtaaaaaagaattcatcatttacaaagtttaataatttgtataggcatgtttgatttggaatttttgttgttttctgagtggatttaaaattacaatgaaacaggcctgttaagtgttaactccacctaaaatggcccaaagtatatctcccattttagataaccggccaatttctctgtgttacagagtgacgacaatgatcgagatgggaatgctcgacaaagcctacgatatctcacggctggctgtcttggacgaatatcgagtcgatagagacatcgtattcatctgcaattccgatatataatctcgtttaattataaaatctaaaccctaattctcttttgtaaacccaaaccaccatttaaactcatttaatcgtaaaaaaaactaaactctaatcgtattttctaaatccaaaccgacatttaacctcgtttaattgtcaaatctaaatctgtttataaacctaaaccaatatttaattcgtttaattataaaatctaaaccctaatcgtactttctaaacccaaaccgatatttaacctcgtttaatcataaaattttaaccctaaccttttctaataaacacaaaccgatacatattttcgttttaatggcaaattattaggttttataattaaattaaattctttttattattattaggtgtcagattttaattgcttaaaataaaagaagtgaatataagagtttacccatagggataaacccaagtatttttcaagattattttgattgaaaaccttta

SEQ ID NO: 34665 - DNA, 849 bp, Arabidopsis thaliana columbia
catatctataagcatctcttctgtttctgttgcaaaatttgatcaattttttttgaaaaatctttttttttccttttggaaaaataaataaaataaaaacaaagtgatctcagccgttgggtcgagtactttggctaaaaataaagtgatctcagccgttggatcgtgtacttttggcttcaccgcaactagaagaagcgtcatcatatagatcaatcgcaccgtctgtgtcgaaacaaggcgtacccaaaagaggtttcttcttctgtcaaatctttctctcctctctctctctgatattcttcgtcgtcccatctgcgaattgtttacacagagatatagagaggaagagaaccgcctaaggaaaatggcgaacagtcacaccgatgacttggacgagcttctcgatagtaagtcttctctacaatttgatcggcgttttctcgaattctatctaaattgtgttcctgcccatttatcatgtttgtttaaaggttttgtcttttagggtttttattgattctctgagaattttggggtttatcttctgtggttttgtctgtctcaggtgcattggatgatttcaaagatctcaatctttctcatcaaaggttactcctttttcctatgtgtttacctccatagtctcaaacttttttggatttgagtttagagactttcaattcccaagttagagatttctgtgttttagctctgaatcgtttttgggatgtgttgttgtagaaatcaaagggaagctcaagaggaggaggaaaagaagaggaaagaagagacggttttattaccgagtggagttcaaggtcttggaatgggattaccagatatgag

SEQ ID NO: 34666 - DNA, 515 bp, Arabidopsis thaliana columbia
aataaatacaatgcatatattgtttgcgggtttgtgaatatttcaattttcagtcgttatgagtagaaacaatattaacttagatttattgtagagcatgtcacaacatggtaaaagaaacaacattatatataaaaactcatgtatatgacatatatactattgataaaacacaagaataaaagagatgatttttttttgtagtccaaaatagatgaaatttaatttgctttttgttattgacaaaaacaatatgaaaagaggttatttaatcatattaagttttcgcaagaagttatctcattgtaaaaagctgaaatgttaatgaaaaaaagaagttgattatgctcaaagttcacttgctgtgtttctttgattagccaaagattgcagtccaaactctcatctctttagaaaacacatggtacaataattcatatccctacttgtaaatattatcagtgtattaaatagcagaaataatacaagataaatatgcctatatgagttattga

SEQ ID NO: 34667 - DNA, 528 bp, Arabidopsis thaliana columbia
ggttaagtgagaaagttaattaagtgtcccaaaagcattatgatctttagaaccttttcactctgggtcaaggataaaatctacatcgtacatttttctttggtgtaattaaaagtttcagaaaatattatatttacaattaaaatccaatctgtacaactaactataagaagaaaatctaatgaaacgcagatcacacaaaactcataaaacttaggtttgatctgttgccactaatttattctttctcatctttgcattctcacgagaaagacttcacacaatctctcggaggtttggttaggacgaccaactaatctggctgagttttgcttcttcttcctctccccctgatttcgagaatcatgtcaagactcaagatgtcaccggattgttgttctaccaaaagataatgccccgatttcgctctccctgctctgagaatagaaaaaaaataaaaagaaaaagagaatgttgtgtgttatacattgtcatttcaaagaatttgaggattagaaatggcgaata

SEQ ID NO: 34668 - DNA, 225 bp, Arabidopsis thaliana columbia
ttatctcaactaatctaattatctaagccttttttttatggcttatcaactaatctaagcataatgtaaatattaaaaaaactatttattttttacatctgccctatttaggctagttatgaaataattaatggcatgacatgtaaataataacaacattaagggtgcttggttttccaatgtttgtcgattaggctgatagcgacgacgtccaagtgaaagcag

SEQ ID NO: 34669 - DNA, 392 bp, Arabidopsis thaliana columbia
ggcctggtcaaccagcacaatcagcgttttagaatactgattgagataaattccatctgtattgatttactgtctacccctaatataaagtagactgaatcgcggattgattagtattaaccgcaacatccattcagaacctcggtcgctaactcatcacttcgaccgcgttcacgttatccttacccaaattttaaatgacagtttcatgctggagtgaaacccctggatttaaccccaacgtcgcaactccagttagatctaaccccagtttgaccttcatagccctcgatagcccgaacgtgtctccgtcttcgtcttcctcctctcagctccactctcacatgacgcaccaccgcgatcacacctagttccatggcggctccgctcca

SEQ ID NO: 34670 - DNA, 619 bp, Arabidopsis thaliana columbia
  unsure (1)..(619): unsure at all n locations
ctgtaacctatccccaggattagaaagaccaaaaatttctaaaaaagacaaaacaaaaattaggattcaacgagaacgaaagaggaaagatttcagaagccaaatctcaaagcaagagacgacggcattttttgcgtctgtggaaccacgtcttcgatccaaaacgatcaccaaaaccatgcggatctaactctaacaacaacatcttcgaaaacagaaccgattaatcgaccttaccgaagaaacgatcatcctcgccggtaagcgataaagaaaaatctaaccgcgaaactcgtttccttcgccggagatatccaataagcaccaatacaagaccgatgttagaagagagagagagagctcaaagagagtaatcgcgacgagagcacacgaaaatgagaccttatacagttatactgttacgagcgagtctagggttcaggttttttccccctgtaaatataccaaattgagatccggtatagattataaacggcttgcattttccggttcgattagctgatttctctatgtaacaaaatgccatttacagttttcaaatttacgggttanaattgacctaacggaaacaaataaagtggaaatgttttagtttttg

SEQ ID NO: 34671 - DNA, 504 bp, Arabidopsis thaliana columbia
cggattctgaggatgctgttattaaggaagactatgatgttcgaaatgaagagaagcttccctgtcatacatcagataagctgcaaaaaggcaatttcctgcaatttttcagtttgtaccgtccatgggtttatattgttttgctataaatcatttacctcaaatgacatgtatttggttggtttctgtagtaggtccaaataaattgatacgtagaaggaagccattagcaaaacatacaacagaacgttctccaattaaggatttgtcagtggatgatggcaggcctaagccgattgcattaaaaccattggaaaaactgagttcgaaaccaagcaagaaaaagctgtttttgtcaatcccaaagtctgatggatgtgcacgcacatctattaatggttggcattggcatgcatggtcattaaaggccagtgctgaagagagagccgtgttaggggaagttcttgcgtacacatgcaacattttggtccaaaagtagtttga

SEQ ID NO: 34672 - DNA, 590 bp, Arabidopsis thaliana columbia
attctaaaccaaccgcaaaaacaaaatgatttttcttaggccattattgtatatcttcgaaacaagagaaaagaaatatgggaagagttagaaaaccttgggaccacgatcaaccagacgagcccattcattatgataaagaatcatcttggaaactaaccaaatagatactaaatgagagtattggctaaaactaaaagacgatgataaaaaattatatcatatattaccgcattacgtgatccttgctactggaactagaagtgcgcttaagactagtagcgattggagacaggggcaagctaccaggttgtctcatgcgtgggacacgaggagaactattcgagttgatggtgcagtcttaaagcaagctggttaattattaaatggtaaaaaataaggaaggcgaacgaaaaacaagagaaagaattctatctcagattggagcaagggaaattatagtcttcgcagagttcttagttaattaatgactggaatactgattgtgccaggcttttcatttttctggaatgttcctaggagctcagaagaacaccattaagccgactccgaagatcctttgaggaaga

SEQ ID NO: 34673 - DNA, 656 bp, Arabidopsis thaliana columbia
acatcacctgcgtcattttcctttgttcagtattctattccccttttcttttgaatcaaaggtcatatactcgtgtggctcatatatttgataaaagtttaagaagaaagaaagggagtattttgatgataaaaatacatgaattttggttcaaataagagctacaaagtttgataatatacatgaacactgattaaatttgattaatgaattcatgtgtctatgttaatttgaattttgcttcacatacattaacaaaagtagtaacagaagatctacatatctgttggatgtgagaaaacagtaaaagaaaaggcaggaatgaacaacttgattgaaataattggatggtaccaactttgtatcaaaacttaaagtaatcataatgcgaaactaaaaatagtgaaacataaacaattctaataagttaccaccacaaacctcatcaatactttacaaatgcatcatcaccttgaaatgatcatcatattcacagtaacaaatatataagccaaattttttaaacaggatctatctgtatattaaaaaaaaagcttagttcaacatcgaggtaaacacatatagagaaaaagtaaggttgtttgtattattagaaaaacatatagtaatgtagttttattagtatcaataataat

SEQ ID NO: 34674 - DNA, 538 bp, Arabidopsis thaliana columbia
ttttttaaaactctttactatttcatgcacttttcaactaatgacatattttactaaaagaagacatgatatggaatcaacttataatgaccaaaaccttgttacttttttttttatcatccattaggaagaagaatcaagaaacaagaaggagaattaccaagatagaatagagactgagagaaaaaaaaaaacatcctataatacactcagcaaacctgtctaagtagaaaatacaaagctctgcaaaggttttgtccagagagtttgataaagatacatataaattattctatagcaccagagataacatacaagaaagaaccacagcccaaaacatatcagctccattcttcttcttttttttttttttgcgcttgcaggaggtaaaaaccaataacttaggaggcaaaccaagttagaaaactatacctgttcctataacggtctagagagcatgcatttgtaattcggccagagttcaaaggagggactcatcatcatcggcaaatggtatgcttggtaggtgttcctacat

SEQ ID NO: 34675 - DNA, 587 bp, Arabidopsis thaliana columbia
aatgctttattaagaatgtctaattatgttcgattattgtattatcttttttttgttccctatgtataactgagtaattctattttgaaaaatactttcttgcacttttttggccatcgatgaccattagaaccgtcagagttgcttgaagctgaaaccgtagttccctaaacaaaaactgttgatactcaaatcatacaattcatgtaaaggtttaaggagaaggacggataatctcttataagacgaattaggtttggcgaatacaagattatacaaggtgaaggtacgagtttacaaggacaatccgagaagacaatgtatccaactcgtttgaataaaggtgcaagaatgacggacaaggcgtttggttcgaaagatgttcgtacgtactaacgattaagaaaaggcttcctaggaactcaatggggaaacttgtacgaaggagattacatgtactctctacatatgtgtcagcgtgacattcgggatcctttctcgacagtgttttccgcttttatagggaagatatatgcggtcatgaactcgggatgattttcttttctgctccagcaaattgacgatac

SEQ ID NO: 34676 - DNA, 462 bp, Arabidopsis thaliana columbia
cttagcacagacatctcgactagttgattaagcagccaccacggaaccagaattcttcttgcattcactcagcatgtccatgtagaactggcacttactgatgtcgcttccaaaatggttgacgcactacacatgaacatagtaacatccaatgtcaaaccagataatctcggatacacatagtaacaccaaacagccgcgcaaaataacgttcaagaaatccatagtcttttgactgcaagcacatcaacacaatcatgttctattgtcatcattctatcaatgtgcctgcatgtccgtcaacgtcgatgtattttgagaatgcttacctaaccaaaacaaggtcaatcacgatccagctactgattcacattcaaatgttaacaatcgcttagctagattttgaacaactgctctgcaaagattggcatgacctataatgctcaaggagaatcccgaaag

SEQ ID NO: 34677 - DNA, 1066 bp, Arabidopsis thaliana columbia
cgcttttgttgtgtgattattatgctgaataaaaaaatgttaattttgtgcccaccagaaaaacaaagaacatgattttttataagaggatttgcttctatatcattcagctaaatgtgattttaccacgaacataaactattttctataatttttttggtgtaaaaccaaacacttttctacaacatacatgatacatgtaaatatacaaacaaacgtaactaattacacattgctctgttctctgttttttttcgtactctcgtgggacgaaaaccgacgtagtttttttcagatgtttttaattggttttcttgttatcgtctttgctctgttcaagaaggaccggagcagccggaatgctaaaccaccactctttaagccgccgcatcaaccgttccgtgcttgctcttcgtggtggtgagtatcttgtgaacagttcaagaaacaccaccagaatcagattgttccaaggcaccaatgccatcatcgttgcagcgatcacaatcgcaaccgcaaacttctcactcgcctgtttttcgataacatttaagtggctgcagaaactaaaaaccacgtctggaaacgcttaaaaagttggaattgaaggtagagagagacctgtgggaaaagcgaaagtaataaagctcggaacttgaggagaacaatgtttgcgtcttggattaactgttcgagctgtgaaatggcgttttggaccgctaaaagctgttccattgtgttcatatggaggcggtgccatgactttcagctcgatcattactttctctctattgctgaaatatctcgttagaaccatgaaacccgctataaagagagttgcaatcgcgaaaacatagccaatccaccccctaaaccccggaagaaaaacaaaagatttcagagaattgtagctaacaaacaaaatgaatgcataataaaagatgttacctgtaaattatgaaagtggacaagagacagaaaacaaaagacttcaatggatcttcccaatatactaatgacaaaagccaattccctatttctgtagccggaagtagtagttcctgca

SEQ ID NO: 34678 - DNA, 585 bp, Arabidopsis thaliana columbia
gtaggaccatccaaaataaagagggaggagctgaaagtcaagagtttataggcctacgaaactgaccggaagttgaagaaacttctcaagtcaagagtcaagacatatcagctcaccaaaaacatgcactcgtcgcttataaagctttctcctttgattatactccaccaaaatagtggcacaattataaacctaaaacctcacaaaaatattttacatttgtcaaaaaataaaataaatttgatattacattattgctagaattgtttatattagaaaaatattgaggctatattacgagttttatatcaaaataactagaaaagagagaatattttatcaaaatacaataatctccatttttctcacaatcatttctaattatatattacatcttttgttaatatatgtgatattagacaaatgtaatgtataactagcaatgtataaatatcaaaaataattagaaaaagaaacaaaaaattcaaattttatctttattttcatgtttaaaactgtttatcctgaaacaattgttaaaccacaccaaaatcataattagtaatttagcctaactctatgaat

SEQ ID NO: 34679 - DNA, 528 bp, Arabidopsis thaliana columbia
tagaggaacaggatccccatccaactcttctctcatgtcatcattaattatcttcagccaataataccacattaactctttctcttcgaagcacacaacacgttctttttcaacttcacattaattaaaaattactcattaattggtagtctatttacttttatttttttgtcaaccacacatctatgaaaaatcaactccatagttggttacaaaattaatttcaaaagataacaatttagaggatctaactaaactattcgctttagaattacataaacgaagaatagcatcgaaagtctaattaggagaggtagaagttaacacatttgggaagactactgaactaaacaaccaagacagcgagacagacgagacataagacaattaagcacaaaatcttatcacaaaaattggagaaaactaacaattcttaaaggtattgcaccattgagacaagctctatacaatctgtttcaaatacctaataatttattatgagagatatgaattatggcccatattatt

SEQ ID NO: 34680 - DNA, 882 bp, Arabidopsis thaliana columbia
taagtcttttatggcctacgagtagttgaggaactaacctcgttcacagcaagagtgatattcttggctgcttgtcgaaagaatgttgatttcctagctagattgagcatctacaatttcaaacaaaactcattataaaccaaattatatagaaaaaatgaagaacatgatcatgcaaactccaacctctaaaaataaaaagtctcacctttttggtgaaaacaattattgataatttgttaaaattagttgtttggtttggtcatttaataccgacatatataaattgacttgaattttaagactatgttaaaaagaagtaggataaaaatgtgttatttggattggtcatataataaaaacatttgataaataaagatgattatttattattaggatgctaattacatggtttttcaagcactatctcaaccagaaaatgagaagaaaataaaaagaagaagcttagatgctcaactatcccgtctttatgtcaaacgattctgatggacccaaatccatcatttatgcgcaattttcataatacgtacgcgtctcccagcatgtcgaaccgggcttccatcaaagtgatagaatcacagacgactagttgtttttgttaaaagctgaaaacaaaaacttatatagttaatgcattgtagtggaaatgggagatttcatgactagtcttattatttcagaaaaataatctgatacaaagctagaactttttttgtttctatcttgattgttgaagcgttaattctcagaagacttgtaagttaaagatggattttatttattttattcatttaaaattgttagattaatcaatgataaatcaaacgtttatttatggaataaaatatgacaaaaaacatc

SEQ ID NO: 34681 - DNA, 590 bp, Arabidopsis thaliana columbia
aggagggcatatgaacatccacagaagagacagggctaaactcagacaaaagcttatggaagataataaggatgatgtcgtcgccgagagtgatgcatccgaagttgtgtctctagaccttaatgaacaacaacaacaacaaggagaagctttgacatgtgatgatcacgatcaatatgttgataacgatataagtcctaaacagaaattagagttttgggttcaagaaagcaagcttgatactaatgatcatggaaaggtcacggaggctagcatagatggttcgagttcgagtcatcatcgtgatattgaagtattggatctcgagcttcggttaggccaaagcgtcgtaaagaagaagacaacatagtctctgaacgatgaatcatatattgattgcattgtatcaatgggaaaatccctatgaaacaccaaactctctaatccgtctattacaaatggattcgtggctcaaattgtattgtaaggtatgcatttgtatcttattgctaccattatcgttgttgtcccttgtattgatatctgtttccttgcttgggttaatttcaccacaacttttgtaaatgaca

SEQ ID NO: 34682 - DNA, 526 bp, Arabidopsis thaliana columbia
tactgaaattcatcaggtacttgagagagaagcgcctctcaccagctgatttcatcactgctgtcaaaaatggtccttggctgaagactatttctggttaccgatctccagatggagctgttttgttcagcgaggaatggaaagctgcgtcgttgatcagtgacatcccattcattgacagaggtttctatggtgtagttagcctcaatggttataaggaagagcttgagttgcttggcgttgtagttaagtttcctgataactacagcctcatcgtttcacatttgaatactgcaaagctgacttacttgacacctgatgcaatgttcctagtacttgactgcatgcgtcaactgagtccacataggctgatcaatgccctgtggaattcttctcagtgcttcaagacaaagaagaatggctataaatctcctgctgaatgtttcatacctgatccagagtggacttgtcttctttctgtttttgattgcttccctttgatcgatgatgatttctatggcagcag

SEQ ID NO: 34683 - DNA, 1231 bp, Arabidopsis thaliana columbia
gaagcttcaaagaaagctcaagaagcaatgcagactctggttttgattctgagcctgtctttaatgctgcaaaggtcagatttcttacattcaaatatgtatgagaacataacaatttaggttttggggtttagggtttgaagtggtttgtctgtgttttggttgggatgtagacagtaacagatgtagcacaacagacgtcaaaagcgatagaagatgctaaaccgattgcctcatcgaccatggatacgatttcttcagctgaccctagtgtcattgttgttgctgctggtgctgcgtttcttgcttaccttcttctccctcctgttttctctgccatctcttttaacttccgtggttacaaaggtacctcaagactccatatagatcatcttgagaacatatataagtttttgatttggttattagtgatctattttgtatctagagtctaattcaccatagcaaaatgctgacaattactctgtgtttctggtttgtgtttttttaataaaggtgatcttacgccggctcaaacgcttgaccttctttgcaccaagaactacttgatggtggatataagatcagagaaagacaaggagaaagccgggattccacggctcccttcgaatgctaagaaccgcgtgatctccattccgtatgtgtctatctaactttgataattcttttcattattattatactcaaaacattgaacctgttcttgtgattatcagattagaagaactaccaaacaaagtaaaaggaatcgtgaggaactctaaacgagttgaagcagagatagcagcattaaagatttcttacctcaagaaaatcaacaaaggctccaatatcatcatcttggactcgtgagttttgattattactcttttacaagaccttttttgtgaatcttgcttaatctttattggtctttttggctcgtaggtacacggattcggctaagatagtggcgaaaacgttaaaggttctcgggtacaagaattgctatattgtgacagatggattctctggtggcagaggatggttgcagagccgtttaggcactgattcttacaacttctcgtttgcacaagtcttgtctccatcgcggattatcccggcagcttcgagaagctttggcactaggtccggaaccaagttccttcctagctccgactgaaaacagaggatatatatagaaaaaaaagtattgtttagtattccttta

SEQ ID NO: 34684 - DNA, 525 bp, Arabidopsis thaliana columbia
aagttcactctctgtataggattatgcagccaatagattgatttttttctccaaaacaaaccgggttactgagatgcattttcaatgcttctattagaattcattgaaaatagagaactgactcatgcggcatcgcttggatgcctgaccagcgctgcagatgctccacgacaaagaatctgctggcactcgaatgtcttcgcccaccactcccactctgacaagtacaacaaaggatcaaacgacgagtttggaccctcggcgccggcggaagactgtttctattgtccagccaagcacccatgcatcgcagagccattcgatcgtcgaatcagcccatttttcgcgtcgctcgacgatggatttgccgtcgcgaacgaggtacccggcatgggtacaccagatcgagcctgcgagtccagccgtgggttccgacgaccctgaagggcactatctgatcaagagcaaatcatcaggccggctgcggtctgctgcgcttgaaagaagattgaccatttcgggaga

SEQ ID NO: 34685 - DNA, 796 bp, Arabidopsis thaliana columbia
acagaatgcgtattttggatcaatcttatcccttatcgttaaatgtggtctaaaaatggttcacagagccgagcattactgcactaaggttaacaaacatgcctgagctagcacaagagactggatcaacctgtcatacaagataaacatattacagaatgctgatttgagcaaaaaagacaaataccaacttgataaaaccgagaggagacaatagcaattcatgaataaagatccgaagtatatatgcatcttataaacggatgattacctgtatatgggctctagacgcatttgcattgatcacctctgcaagaaactgtagaacacgctcacgggtatcagtacttttaagtaaaatcatcaatacatcatgcagcccgctgtacaaaatgttcatgaaatttttaatcgtggagaaggatgataataaatctgcgggacgacgttccgatgcttcagagaaacactgctgcctgatattcacaaaaacaatagacatatatcagcattttcataacaggtaaagtatatcctctgaggtggatcaggaaaactcttatgttcgcacaattaagccttgtcaaatactaaatggacaatcaagattcttcagtacagaccagaaaaaatgctcaaaataatggatttcatccacaatattctaacttaacatagtgcttactaatatttctgttggtttcgctctactgatcatctactatgctaaatttatataatcatgcttaaaatatgtatacaacctaacagtggcatcatatataagccaaatata

SEQ ID NO: 34686 - DNA, 713 bp, Arabidopsis thaliana columbia
  unsure (1)..(713): unsure at all n locations
cttcgtcgcttcatcttccttattcttgtctctactttcactttctttctatataatttgagtgctatttttgttcaaaaaacttttgagtgttattttcgttcaataaacttgcatcctggctttattcaccgctgttgtctccgtcgcttcatcttctttattcttgtctctacattcactttccttctatgtaatttgagtgctatttttgttcaaaaaacttttgagtgttatttttgtccaaaaaacttgatacgatattatttatgagaattctcaataatttttatatatacaaaatttatgctatttttggaactttgcagatgatgtgctaaatatgagaacaaaacttaatttactcgttctgtttagcatcctcctatctccatttttattttttatttttttaatttggtgcgaaaaagaaaaattaaaaaatgcggtgagcgtggatcgaacacgcgaccttcagatcttcagtgtcacgctctcccaactgagctatccccgcttcttgtttagtgtcttattgtgtttaatatatttcatgaacatgatcacagccactcccggtccaacaatgtttcgtgtccgtgactccgtgtcttttgtttcacataagtattcatacaaatatgtttgaatattntactgtttctaatgaatcctttaaactcaagtttgtgatcttcagacagtattcttgg

SEQ ID NO: 34687 - DNA, 601 bp, Arabidopsis thaliana columbia
  unsure (1)..(601): unsure at all n locations
gcaaacgacctgataaagtgataattctactcgagcagtatttttcttgaaacactgttcaaaatcagtctcgaaatatgtatttccgaaagtagactaatattgtagtaattgttacaagaggaatcgtcgaatggaggagaggaattctaggcgaaagagccaaagtttattaaatactctacgatagatatagggagagagattgaaaatgagacgcattaattgccgaagcgtctctccataattacttttcaaacctcccttacgactttaattagtgattaatgtctatattctctttttggcttccgtgattgattctgccatcaaaaatcgattcaattagttcaaaatgtttactcaataatttcactaaatatattcttgttctttgctgtttcgagttttaatattgtttgaaatttccagttgctgtttcgagtttcttgccgtgttgacttcatattagtaacactttctagattgtttattacaatctctagcaaaactgtaccgacattatgttttcgttatttcttttggctgtcaacatttgaaaacctatttanaataatagcagacaaaatgtggtgagata

SEQ ID NO: 34688 - DNA, 715 bp, Arabidopsis thaliana columbia
caaattggaaatgtcgctaaccttttagctttctctaagaaaataaaccattttctaagaaaactacagcataaaccagaatatacaaacttttactcgtaaagtcatcaaacctagtaggctagtacacttttacattgacactcgtattcaatgtaatccactatttcttgaaattaagcttttcttaacaagactgtatatatttttagaaatcaaacctatagtaacaacaggtccggctcttgggaggtgttgagtgtgctagtgcaccgggtcccacttctttattcagttttttctttatattttagggtccaaattttcaaataattataaaatagggtctagtttttaaatatttagagttttaggtaaagaaatttggagcataacacaaggtccaataatttattgggccggccctgagtaacaatatatagttatgttattaagtatatataggaccaccatgataaattaattttgtttatcaaatgtagtatagtagttttgtgcatatgtttaaatgttatccacaagtttcttgaaatgaagtttaacgacaaaatatattttttcttaaacaaattattatctgtaaatccatatagaacgaaacagaaaatgattgtggtggctttaagaccacgttagtgtacattctcatcactcctcgtattagatgtaacaatcaatatcctacccgtgggat

SEQ ID NO: 34689 - DNA, 373 bp, Arabidopsis thaliana columbia
  unsure (1)..(373): unsure at all n locations
tattctcgccaaaaccgtaaacaacattatctcgtaaaaacgtaaaaacaagttttcccgccaaaatcacaaaaaattatttttggcccaatttgaaaatattattataataatctgtccttgccctctctgttttcgtcacttctgactctctcccctttcgctantgtgtctggactgttgttctttctctcttccgtttctgccttccttcctacacggccatctctcacttccttggtttccctgggttcacctggctttcctaaatttccctgggccgggtttcctgggtttcccacatcactgggtttctctgggtttcccgttcggtggagtgggtttccctgggntgggtttccttggggtgggt

SEQ ID NO: 34690 - DNA, 576 bp, Arabidopsis thaliana columbia
gctccaaactttctcttattgggtttttgatcagctccggagataaaaaaaaaaagtattttcttgaaatcgaaatctgatctccattgagagtcttgctacttgatttggattccgatttaaggttttctcgagaattcttttgctgcagttattagattttgacgagccgttgatctggacggagttccagatctccgggtcgtggtaccaaggaattagggttttagcacaaagttctcgtttttctgtgtattcgagggatgaaggagttttcgggtcgatgttcgctgctctaacatttggagtatgaagatgaacatgaagaaatttctcaaaaagcttcgtatcacgcccaatcaacgagacgatggtgaaggttcagtctctaacagaagcaataagtctagtgatgcagaaccatctccttctgattcattgaggtctcaagataactctgaattcaaaccctttttgggtttatcaaattggttaagctctgtgactcacaggaaaagcccttcttcttccaatgccaccaatagcaaagaggatgcactaccatggaacatggtg

SEQ ID NO: 34691 - DNA, 559 bp, Arabidopsis thaliana columbia
ctgaattttatttgaaagattggttaaatcaattacaaatgatagataagaaatttgtgacatttgaatatagaatgcatagattgacaatatttcaaatttttttaatccaatttgtccttaaaacaatggtctacatgcaccatcacatattgtcattggattgtgaagatgcaagattttatcaagctacttcctctacaaccaacgttttactcataaagcttggcaaaatcatcaaatataatcagcctgaattgtagctgaagcaatatcaagggcggcttgattgacacagacactaggagcctcctgcttcgactgcttgtacaaatacgacaaagtgacaacatagagagagaaccgaaggactctcttcagtttcatagatctagttcataagagcacgtccaatgggaggatgtaatccaaattttgagaggttctcttgaattgttggtaaaacaataaatcagaagtgattaacattgagagagccagctctctgaagagtgattattgagattgagagaggcgacacatgtcatattgtgattgg

SEQ ID NO: 34692 - DNA, 935 bp, Arabidopsis thaliana columbia
taggtgtagaacttaaagcctgaaaaggggctattgcatgaataaaaggagatagactaattgggtaatttattgaggaactcagatttcccaaagccgagactcactcctcattgattcgttaaaaattgaatctttttagcccttctttctctgtataatctctgttgtaaaagctaccaatcaacagaaatggctacgttctcgttgtcattatcttctctttccctttgtattatttatctggcaaagaaatgaatggttgagctttagttataagtgttccctcttgctccctcaagttgctatggctatgtgggattagtaagaagacgacggaggatgattttgatgataacagctcccgtttgtcctcctcaccttctcctacgccattcttctttgcttcgccatgaatcatcgatcggaaactttcatcggaagaaaaatccacgtttcagaaccgtatcatgttcttctttgttgccgcaaccgtcggttcgtccggataaggcatcggagttgaagactctgtggaagaaattctacaaagtcgcgtcgccttattggttttccgaggacaaagaccaagccaggcttcgtctcgccgccgtcttcgcccttactctcgccaccaccggcattagcgtcggcttcaatttcctcggccgtgatttctacaattctctcgccagtacgaattcttcaactctctctctcatttctcacttttcaaaaacaacttgctctgttgatcctcttttctctgtgttcaatagacaaagaccaagagcaattcaccaagcagttgttctattacctctgtgtttcccggcggcattccggtgagttttcctcacgctcctccctctgtatccaatctcaatgaatgatgttgttcactttccctggattttgcagttctttgtgctacg

SEQ ID NO: 34693 - DNA, 328 bp, Arabidopsis thaliana columbia
tgactagcgatctctggatcccaaaaaccaaaattacacttagaattcttatccttacaacactatttgaccggagcatatggtaagctggggtccttagccgacctcaatgtctaacttgttaattgacttagactttctgaacaacttctataaactcaagcatcttctctcctcagcttatatcaggtccttgtataggtatagtttttttttttttttgcacttcgattagaagaagaaaggatcatctgatttacaaatctgatacgtttcccatattttgtgatttcctttggtatacctggttataccatgcaatgagtaa

SEQ ID NO: 34694 - DNA, 598 bp, Arabidopsis thaliana columbia
ctcttcaataaaagttacatcattaacttccgtttatactgtggaacttaccattccatttcccgcaaggacttcatagtttgatgaaacaaaaagaccatatcaagtatggtttattggcaaatgcaagagtagtttatctgattgaccgttaagattgattttatttactttgcgactcaaattgagagtctgaaacccaacggtcttatattttggtatagtaacattcaagcctcaattggtttgtaaacctgttctgtttccttttgtgttagtgaaactgatagttcaaagttctaattacgttttataggggttgataatgattcgtacgtaactctacattaggttttcatacgagttagttcagatttgtgtggtctaaatacatattagccttgggcagaagaacctggaccgaagacacgacctatacctggcccaaaaattagaaaccaaacccgaactggaattggcaaagtaccagaaccgaccaacacctcaagacatgaaaacctgaattcgaatggacccgcccaaaaactgaacgggtcgcacgtcgaaattaatttcaccccatattgagaaatttaag

SEQ ID NO: 34695 - DNA, 537 bp, Arabidopsis thaliana columbia
tgaattcatgtatataccagagatcatcttcatctgcagaacccacattagttgtttcgctctgtttcatccgtcaagatctggacaccacattcaacaatgtcgaaatgtttgtgtatgctgctgaattcgagcactatctctctgctagaggggtagaaaaaggacaccgggttcaccatatgaaatataaatagatgttccattcgatatttatagacatccgttagtacaaactccttgtcagtggagtttactgagttgctgatgactatgcaacgacacagtagtcttgaaactatggtagaatctctgtctttatgatcaaactctgtagaaatcacaacgcaaaccttataggaagcagaattaggaattgtgaatgaatttcctctggctcgatgatcgaacagtgcaggtacttttcattcctggtaagagagctcgcccatcaacaaaccgttgtcgaaaaatcgcttgtcgcgcttgtcgatccaatttgaaacagttgctgaaacaaggtctgcatttggagtg

SEQ ID NO: 34696 - DNA, 638 bp, Arabidopsis thaliana columbia
ttctttttgaaacattaataagctttatcatgaaccaaagaacaatagctttgttctcgaaatggggtccttggtagaacgcgttttgttatttttctgaatctcaacttttttttggttctgttagttttattgatatatacggtgatgacattccttgatgttcttagatctgttcagatggaaagggatgagtgaatttaattactttaatgtagcaaatcgactgctatttctatgcctctttgagatctatgaatggtaaaagaacaaaagcttaggttttcttaatatagttaattagtcgttgtaatttttgtttacttcgtttaaatcgtaattaaaaataacattactcaatagatgtgtgtgttagtgtaatgactaatatacatgatatgctctatcgaattatttgacataatcaaaacagtttcctttcttcttttttagtccgtaatagatactcaattactcattaattacttttttggttaagcttactttacagatgtgacttttttcaggattttcgaacatggactgaacattagggaaattaacttcaaggattagaaatttctgacaagttgactattttaaactctctgacatgttatatgtttgagaaatgaatg

SEQ ID NO: 34697 - DNA, 566 bp, Arabidopsis thaliana columbia
caaaatctaaatctcctagtttcaactttttaagtgaaatttgaggagattttacaacaaatcataataacttcccaaaattcacctaaaatcatctaaaacttaaaatcatttaataggattgaataaggttcattttactacttggcagttggcacataatataaaaagatggttagttaagttattgtcttaagttatatgattgtgcattgctgttgaaagatttgctgatctacgttgttgtcatcgattcgtcaagattatacgaaccagctacatcctacatgtctggtttttataatcacattgaataaaatgaataaatatattttattgaaaacgtcacgtttaaattcatatacatttgattgattatataatgtagtccaattaattaatctctcctctatacagctgtttctatagattattaattaatggacttcctcgtttcacatggtagacatttcagatttagctttgtgtttcccagatctggatcaggtactcggtttaggattgtaagttcgtgtgtttatggggtgggtacggtaaattggtta

SEQ ID NO: 34698 - DNA, 337 bp, Arabidopsis thaliana columbia
gaagaggccgagtaagtcatgcagtgactgaaaatgatcaactaatcatccatatataagtaacagaaacttatcattttcctcattgtgtacatagtgtctgaagatcagaggaagagaaggacacatggggactgctgacaattatgcctgaagaagatgggaacgcaaagacgcatttgcgtaggatcttggcattagtttaccatctgaggcaaatgatcaaactgctaatgagcctcatggtacatgttcttctacaaacctgggagatactcagaaagtgccagacccagaaggagaagaagacgagagctctgcatctacatttgatgat

SEQ ID NO: 34699 - DNA, 562 bp, Arabidopsis thaliana columbia
tcgtaagtaatctttttcattaccaaaaatggaaacctgaagagagagaagaacaggtttgagatgaaagagaataactcgaaatagaaagaaaccccacgcatacatctttcatggttgctctgttaagaaacagtttcagttctctgacatcattttttttttctttaacaaagtttgaattttttgtcacaccttatattcttctccccacgctttaccattttctaaattatactatttccttgtatatgtaaaaatgtaggtatataagaacaaaaatatgtatacctattattggatgaaatttcttatagaagatagatatatattcctatgtacaactaagttctatgtattatttaagaaaaaaaaacacaagattaagacttaagtttcatagtggcataaccaacatattcaacatgaagaaagcataatgttgtttaaagttttttggcccagttgttttagataggcagggccggttgatggcacggtctggagcccaacccaataattaaagggccagattttaaaaaagtgattgcatatgaaaaaa

SEQ ID NO: 34700 - DNA, 336 bp, Arabidopsis thaliana columbia
tgcttataaatatgttaggtctaatttcacattttctcgttcagcttgtgtgttgttacttgctgatagtttggcttggtatatctatcaatggaaatcaaagttttgtcttagttttaggtcatttcgatttatgctttactttctaatttttgcagtggaggttttacgaattattggggagtaattgatggaacactaaatggcattacaatgttcatccatgtgacgtctcacatactggagggggatggatacatctaaccgctcctgcaggatccgaagacatcatcgacctgcaactgcgccgtacacgtatgccatatcacgagcatg

SEQ ID NO: 34701 - DNA, 146 bp, Arabidopsis thaliana columbia
acgaggaatcgctcgtgccaagtcaatttgcggcgtttaacgacgtgaggaggatcgggaagtgatgaaggtaagacgatttctttcagatcgtaacagatgtaatcggagaccttacgatacacaaccttcagcttcatctttca

SEQ ID NO: 34702 - DNA, 543 bp, Arabidopsis thaliana columbia
caaaaatcaaaaatcggagatttaataaaaatgaaaagcaaaaaatcgaggtaaaggaatctcctttatcctaaaaaatcaaaaactccccggaagaggggagagaaatagagaagagagccttctttcaaaagaacataaagaagatgctcctttgacgaaaacccagaaaggaagaaaattcgaaaactttgaatttccccgagaaaataaaggaaaatgcgtcgtctctctctgtctcttttatcatccaacaaaaaactttgttatccacttgtatctgcccacctctcaccaaaactagaaaacaaaatgagttttcaaaaattgacaatctttgaagctgaatcatgccatgtgtaacggtggtgacctctccctcaaaactccgagtttccgcaataataataatattgtaatgtctccactaaatttttgggggaatattttgttaataaaataatgaataccttagagatgattattattaaaataattgagggaaactgtgtgattggttgagagaacggtgaagtgggctgg

SEQ ID NO: 34703 - DNA, 492 bp, Arabidopsis thaliana columbia
caacttcttcttctttcttctgctagaggagtgaaattttgattttggaaacataatgatttagggttcacacttgaaatacaaagtgaaattgcattagaactgcatagatatttagagagtttgtgcttaatcttttatccaatgtacctgcttacgatcaatttccaccttgatcatggctctggatcaatttttctagtttccttttgttttcacgtgaaacttaacacacttgttttttttttttttggtaggcaacttaacacacttgttgatagatacattcaagtataataggacttagttatgtagctagtacgaagtaaaatgtatttattttagactatataaacgtatatgatttgcttacaataatttcccataaagaaaataaaaaggtttgcaaaaaaatagaaaaagaaaagaacccggtaaaattactaattggagtatattgctttttctttcttttttttgtcggctggagta

SEQ ID NO: 34704 - DNA, 358 bp, Arabidopsis thaliana columbia
tggtggcggtgttatgatttggtggtggttgatcgtgataatgatgaggagaaaattgtaaataatatatattagagagaaaatataatgaaagttttttttttaggttagtttgttaatttataaatttttgttggttatagagggatatttgggtaagtaaatagtgttttaaaggggggatttaggattgtattgatgaatggattgaggtgaaattttgaataaattgtacggaaatgttgttgaatattgaaggtggttttgaaaatttaagatttgtggtttagaagataatgaaagaaagggaagatatatgatttgtgtttttaagggaggaagattgagatgggggttt

SEQ ID NO: 34705 - DNA, 398 bp, Arabidopsis thaliana columbia
gggtagtaatcgatgacgataatatttgttgcttcttcttcgaaatatcaatggcatataacacaacgccgttagattatggactaatattaaagttgaatatcaaactcataaatgggaaaagctttaaagagtttgccgtgggcaacggaatgttgtgaagagctcctaggctgtctacttagcgctatcacttggatgaagaagatgacgatgatgatgatgagagagaacacatacttttagcttatgttcttttaaaacgaatgttttctacattcggttgtgcagataagattcccgttatgttgactcgtggtgtgtgttgcagactctagatcgtagtcatgatgaatatactataggtctggtggttatatagagaggatttgtgtgtg

SEQ ID NO: 34706 - DNA, 605 bp, Arabidopsis thaliana columbia
cctaatgctcatgaaaacgtattgaattcgtggcttatgttttttcttgagttcctgatttgccttgttcttgactgataggtccgttcactctgctcaaaggctcacttgctctctaagaaatggggtgacattcccattgttctatgcggagatttcaatagcactcccaaggtacgtatcttttcaaataaactcttccactttggtttgtgtatttgtttattcattgtttgagtttatcttattacgtgtagagtccattgtacaacttcttggcgtcctctgaggtatgactattcatagttttgcttcagtcaaactacactgtgtcctcttgtagtttctttaaataggattatgcttctatcttacagctgaatgtcatggaacatgacaaaaaagagctgtccggccagaaaaattgtcgtcctaccaaagttcttgaaactggtagcaaatccagtaatacaataactttcaggtaagattgttttttgaagatttaatcagttctgtgaatggttgtcttgtgactgcctgctggaatagccattgtgttccacactagtagaagtttttgtagctcttggacaaaagaagag

SEQ ID NO: 34707 - DNA, 307 bp, Arabidopsis thaliana columbia
gctttgtagtctgcaatcagagatagtaaacaaaactaatcacatacatgagagacaaaagccacttatcctaatcagatcagaattgtagcccgcctagaggagtcccaacaactagtatgtgtgtgcctaagaagccccaagacagagacttctctactagacacagtcagttacatgggaatgccctccgaattgcgatccaatagcctatatcatccagaactaccaagatacgggccaggatatactctctagtctaagtaaatgctctacattgagctgtaacttctgtatatcgggaaag

SEQ ID NO: 34708 - DNA, 569 bp, Arabidopsis thaliana columbia
cacaataatatcaaaccttatgacacatatcttaaacgtacacagaagaaactaaccgattatacaaagcagacttcccaacatttggcctgcccataagcatcaccgtaggagtaaattggcatctattttggtgaaatcaattggtttcttgtaaaaaatctttggcttcttatccacaagtttctcaccattgtcaacatttgattcatcagaaaccgtggcaaacccatttgtggatcgaactagattcaagtctgagatcaaattactacaaaacctattctgatgacttctatgtctaacagttgaattgaatcctgaaggagaaagaagtaaaacgtaaggaacaaatttggattcatataagcagacattgaaagacatgagatttatatacctaaagatgaaaaattggagcaattggaagcaataatctgatcttgggaatgcaatagcttagaataccgacatctatagtcaacacaagactgaattgattcttccgagctgagattgatcgaaccagtgactgacacattgcagacgacaaactcacctttatgggt

SEQ ID NO: 34709 - DNA, 990 bp, Arabidopsis thaliana columbia
tcatgataaattacttcttcatttcagcaaaaatataaaaactataatcactttggcttattctttcgttagatttagttattatagtattgtttgattcaattcaagtaaaaactatttgagttataggcaaacttagtcacaccaaccgcaaccttcacaatttgtcttaacaagttagatcatatttcgtggaaataatgtctagcttaacatctaatttgtcgaatatatcttaatgtcactgttatgttaattcatcctccatctttatactttgtcaccaaaacgaatcgtcttgtcacatatgacatatgacagtaaaaacaatgtaataatttcctacacatcacgtttttgaaaaaaaacatccttcatcaaccgctggtcaatcttgaaagcatggtaaattcattcaaattacgtcaaatgattcgttctacaaaactctcagccgtcggatcatacgacttttgactaaaccacttaaacgacgacgcttcgacgggattggaaaacatcggcgccacatgatgatgatacgaacaaccgcgttattttatatgtgccgtaggtacaacgctgagttaggcccacccaaaaaaaagtttgacattatttaaaacgaacgaatctgaaagaataaagcagcagagtccactaatcaaacgaaccagaatttacccgcaccctatttattgtggtcgcgaccacacaacattttcaacttcttcttctcttccgtttcaccaccctttcttctcctaaattcgaagaaccaaaaccaaaaacgtgaattcggagttatgattttggatcttcttcccgtctttatatataattttgtgggttatgtttttcttcttcttaattcatctgaccattggattggttttcgattgcagagtcttcaattggaatttggatcgtgggattttggaaatggcatcgaaacggattttgaaggaattgaaggatctgcagaaggat

SEQ ID NO: 34710 - DNA, 503 bp, Arabidopsis thaliana columbia
agtttgggctacaaatcagaaagcccattgataacatacgaataaaaatcccagtttttcaaaattgtgatagaagcaacatacatagatgaaaaacgtctcttatgagacaacaaaagactttcataaatcatatgtgaaaatcacttttccagagattattagcctctggtgtctatcgtatcgttgtgcataaagattattcatatctgatatctctaagaattgacaatttgatcctataaactccctaatatagcaaacttctacaatatcttactaaagattatcacatgaccaaccctaatttactctttctctctcatttttttcacaaaatagcccaaatatggaacctaagattgactggttttatctctctctctctcctctctctgcttcaaaggttaataaaaacatggaaaactgagataggaagcaatggccaattacttatccctaccattcggagatttgccacaaacgaattacaatcttaatga

SEQ ID NO: 34711 - DNA, 429 bp, Arabidopsis thaliana columbia
ttcgtaatcatgcttcagaaaaaagatttcaaaattcaagttttaaatgaaaaataaacgtagaaaagactctaaaagagaagttaagaagacggttggaaatgtatactaatgcaacaaaagaactccaatatgaaacatttaagttacttaaagtggaattgaatattattagaagaagagtgaaattgatgtgaaataaagtcaaatgaattagatgcagtatcctttgtagttgcgacctaaatcataaccgtttctaattttaggtccaagtcaaaacctaaactacgaacaaaattttcattaatgacaatatataaacagataatacgattagataagagacagagaatgcaatgcgaaattagcttgagaacacatagtctggacgtacgtaaccagaactatgccgaatagatagacgta

SEQ ID NO: 34712 - DNA, 585 bp, Arabidopsis thaliana columbia
ttcaacgaacacgtaaggtcaattttatcgattggcacacgtgacgctcccgagacgactaggctcatacgtccacgtcagctaatcaccgagccatttcaaattccaatcgtataccaaccgttcgaatgttcgatggaactagagccgtttgatccgaggaattcgaaaattctcgcgatacgataaaaatcgtgcgttacggctctgtcggaacaaatctaaagctgactaaacgactctgacacagctaacttctctttgtgaaagagagtgtcttctgcttttgttttttgattcaatttcgaaattcaaagttctgcaactaattctttagagggattctatcgtccagacagcgaacccagaagctgaagcatagatctttgtttccaggtaattattaaatcgtttaatgtgacagagctctgggtttcaattgtttcttcatgttctcttttgaatctcttgcatgttacacaagctctaaggaaaaaggttttttttaaaagcattttttgttcgttttcttatagtaaagacaagttgtggatttgtcacgaacttgtgtgtagtgtgtttagt

SEQ ID NO: 34713 - DNA, 722 bp, Arabidopsis thaliana columbia
taattttctccttgtcatttgttattcatcctaatgaagagtttcaaacattagataaatagttttttcatttaatatattatttagaactaaatattaattttatattgttctaaaattatcaaaaattgacaaatataaatattagaaaggttaaaattttaaagcatatatatgtattcttttttttgccatcgcaaatatatgtattcataaaagaaaaaaacagtctaaattgataagttcaaagttcaaaccaaattactaaacattaattttttaaaaatgcatatcaagactcctcattctttgtgataaatatatattctaaattactttaatctgaaaaaatatgaacggttatcattttatattactcacgatgaaaatccgacttttgtgtctcttgcgaaacatctaaaaaaattgaaaaaatatatataggcataattaaaatctttataaaatatttaaatgggaaagttctaaaaatgaggggtatgcaaacaaacttttcggataaagaagaaagatgttgtgaatgacatacatctcaagaaatggaggttctcctctcggaaaacgtgggttataaaagaatgaaagcttagcgatgcagaaaaaattgtagctaaaggtagtgaaccttggtgtgactgttgacccctctgatatctacgtactacaacacaacagctccagacgacacagttttggaattg

SEQ ID NO: 34714 - DNA, 544 bp, Arabidopsis thaliana columbia
ctcaaacatgagtttggtcccataaagagttcattctcgttctcaccacacaaattcttcgaggaagacgtcaagaaacaagaactttattttttcctgatagcagttggaatcgaagaggatgacgcaaaacttatgatgaccgacatgattttttacgtcttgggaaatattgatgagttacgaggagttttgacattgttgttgaaagtgcagttcccttcattcgagccgatagaagaacactagtacgtagagttacttgggcatgaagcaaaaagattattagggttctctgtttctctctttgtggttttctgactctgtttctctttttgtgattactatatagtcggaaataatatttcgtattcttggattatgtcttgtctttaattatcggatcataatattagttgcatcaatgatcgtcatatattcttgtactaatctcctcagctaatggcgtaaacataattaccatctaaacgataagagagacaattcccaaatctaaattaacaataaaacccaaatattagat

SEQ ID NO: 34715 - DNA, 431 bp, Arabidopsis thaliana columbia
atcatttgctatgggttacatgactggattctcaaatctcacgaaagtcaagagaaatgaatggaggatctcactacatagaaactagaggacttcaaaatctatctagtcaagatgagtgactatatggttttggtattagaaaatcattatctattgtgatactagaggctagtgctgtaaagacggtatgaccaagatttagaacatacagaagaaatctctggtactgaaagagaatgtgaaacgaactataaagaatctatgccaaatgaagtccaaggaagagattttactccgtagagatcagtgaaatatcattgcttttttcatacaaacaaagaaagagatattattgcgtttgactttagtttacggaagatcataagttggccgggtcgatcaagtcgatggagctcaatacaaaagtc

SEQ ID NO: 34716 - DNA, 504 bp, Arabidopsis thaliana columbia
tcagtcgtacgcggtagtttgtttagttttgtcttctgcaattgcagatcttaaatttcttctatcgaaggggaagtagaagccgagagtttattcagattttctggaagcatcagctgctcgattctagtcaaaatgggaatgaatccttcataccccctactgggaccgtaatcggctaaggatgaaggtatctctttatgatcgtgaattgtgttgagtgggattcggtggttctggcgccggttctggcgcttcattaatctaatgctttagatctgacctctcgccatatcgcgggttatggcgctacattaatctgatagttcagatttctgtttgtttactctcagatggttgaacaaaaggtgatgaaatggtgataggaaatagtaactgaattctagcaaaatctttgggcaaaaaaaaactgatccgcttggcggtacaacggtggatttggtcggcattcctgatcggtggagatggcggcgtgatgaatga

SEQ ID NO: 34717 - DNA, 520 bp, Arabidopsis thaliana columbia
tcaacatgtgagataatatgtcgtgctcctctaatgctttcccggctttgagctcttctttcctctgccttacgatagcggaaacctcttttctgagtaacctcgacgccttgatggctcggttaaaccgtgttcctggcaagtctattgggattgagaagatccctaccgctaccgtattgaattgctcttctagttgccttactcttgcgggatcttccatgctcaggaacgaacggcatgctattgaaaacgtgaacctgattgagatttttatatgtatatcttagtcataaaatagtttggtgaaattctaatattttcttcccattttcttgcatttacaaaaaaaattaaatttgctttaaaaagatgagaagcaaagtacatactttttggtaagagggaagacaatgacttgatcttgattggcccattccgtctcaaaatgtctttgagcaatctcatccataacaccaacatacctcctcaaagcctcgggcttcatgaactgcgaaag

SEQ ID NO: 34718 - DNA, 332 bp, Arabidopsis thaliana columbia
  unsure (1)..(332): unsure at all n locations
tagagtatcgcgttactattcgatatcattgttacagaagtttttttaaaattatgttaaagttgtttcgcaatcgcaagtcacctatcaattccttgcaattctcttcttgaaaatagatatactattacccccgtgaaaatcagatcgtcttgagattgccgaaacttagttcgactaatgggacgaccaccactttccaaaagatgctctgtcgaacgtttatatttatacaattcaccactcttaattattgtacgtaatctatatttatagtaattcgataaactcgaaacataaaacagtgattangccgagacacaaagcgttac

SEQ ID NO: 34719 - DNA, 564 bp, Arabidopsis thaliana columbia
tgagaagcctttcaattcaatcaaaccttcagaaatcgattcaactctctctttatccgattctcttctcctcaagatcatcgagaagcttcctgaatcacagagcaacgacgtctcactcgtctgcaaacgctggttgaatcttcagggacaacgtttacggagtctaaagcttcttgattttgattttctcttgtctgagagactcaccacgagattccctaatctcacgcatgtcgatttggtgaacgcgtgtatgaatccgcgggtcaattccggtattttgttctgtcacaagtcgatttcttttcatttatcttcagactcgtcgaattgggagtttcttgaggagaatctattgcacagtgacgtaattgatagagggcttaggatattaagcagagagagttttgatttgcttaaccttaaagtgattaacgcttctgaattgggattattgagtttagctggagactgctctgatttgcaagagttagaattgcataagtgtaatgataatctcttgcatggcattgctgcgtgtaagaatctgaagggattgag

SEQ ID NO: 34720 - DNA, 445 bp, Arabidopsis thaliana columbia
ttttgaattaatctaagtaagattgtaataaaaacaaaatgaaaactttgcccaaaaaaaaaaggtagaaaattaggatttggatcttctcagacacgcaattcgttcagctgtcggattcgttcatgatttgtctgtcgtgagcaggaagacgtgcaaatggaggttaagtcttgtctgatgatcgtattcgagagatgtctctgaaactctaatctgattttggtatctacttttggaaacagagagcttaaatgtaaagaaactcacaataaagcattaaaccctagttaggacatttgtatctgttggctcgtttgtaactgacggtcttaatacgttttattacaatttagacaaaacgtattacggttttgattacgatgtagtgtagtagttaaataaactattcggaaacactcgcttcatgtaagtaatgtgggtt

SEQ ID NO: 34721 - DNA, 393 bp, Arabidopsis thaliana columbia
tgcccgccaagttctgataaggaaggaacaaccccggaaaggcgtcttgcaaagaacgttgggccaggtgcaatttgccggtcacccaatccaaattattcaccgggtggacctgcagcatgcagagttcggtgattagtgtcaagtgtatataatccgtttcgctgtgtctccttttccgtaatttctctcagagccaaacatctggttgctaaaaatcgtggatgcacgttgtttttgttgttgttgatgctgctgtttattgccactttactgtgttgatctgtctatagtcttgtatgattatgaatgagtgtggttcttgtttaatccgcactctgatgcagtatgcttgtagtagtcgacacttattcactccaaggggaatttttt

SEQ ID NO: 34722 - DNA, 559 bp, Arabidopsis thaliana columbia
ctctagaggatccctaaacaagtgttaccttgaaggccttcaaagatttccctccatctaagaagagcttctaaaagaggaacaggtgtatgacgggcaatcatagccaatgaatccaacacctgctcataagcaggatctgatggacgaaggtactgtccatcctgcaaacatcataccaagaaccacatcactaccaaagagctatttaagaacaaatacgtatactagtcagtaagctacagtcggaacagcggcatttccaattcaatgtaatacttccagtaaaccgtactcaagactaagtttcaactactgagaatgaaactatctaatttgcagataccaactccttagagcactgaaaacttaaactacctgactctatatggattcaaatgtgtgttaaaaaaaaaaaaaaaggcttattgagaaggagaggaacctgagcctgagctgtctcgattcgtcgtcttgcgagaggcaggaaacgctgaagaagcgcttctactatcaatttcgcagcactcccagacttcatcacgttcagcaagaatag

SEQ ID NO: 34723 - DNA, 237 bp, Arabidopsis thaliana columbia
caaagaaaaaggagatatatcagtcttagggatttgcaaaatcatgaatagttgttgtgttgtaggattaggttccgctttgttctatccgcacagcctacacctgcagccttgtatctcatgaaacgttgcacatgggctaccactgaggaaagggagaaaatggaacatgtcgagatcagcccaatatcaatggacttgacccaagagatggccaagagaataggttctgatgga

SEQ ID NO: 34724 - DNA, 630 bp, Arabidopsis thaliana columbia
tgaatagagtacatacagttttgatcgttttgatgtgattgtataattatgtccattaatattcgagtagtgaattagttatgagttctgacatgaagttagagacgacgttttaatcacaacatgcttcttgcttcattatttgattctgtgtcaaaaacattcttcttgcttatgattagttagttttatttatcaatttatcaaaaaaaaaaagactataactcgctaaaacttatcagatacactattttctgataataatgattttttttagggagataacaaaagaaaaatacatatacatgcgttcacatacgttcatatgtaaatatagttataaaaaaaaaagttaaataaggctatagacatgtatatgtaaatgtagttgtaaagggttatctaattatatgaattaaagtggagggcaaaagaattgagaagatcacatgaaatgagcagagaaaccagctttaacatagtcccccgcacgcatgcagccacccaataacgaccatccccgtctttttatctaatgaaaacattaaccccaccatcatcatctatttcactcccatatgcctttaacatttcagcaatatcggtgtagttgacaaaaaaagtgattag

SEQ ID NO: 34725 - DNA, 517 bp, Arabidopsis thaliana columbia
  unsure (1)..(517): unsure at all n locations
aggtcgactatcccctctgtaacatcgagcctcgacagatcaaagtttggttccagaatcgcaggttattatttctttattaattgtctttaatggaatgttttttgtgttctttgattgtttctgtaattataaaattgaatttcttttgtttgtatttggagacaaaaatgttcttgtctgacaatngtttttggtaatcttcttgtttttggtctaattggtgattgttaagcttttgaaactttcagatctatgtctataaatttgtttttctctttttgcttattaggcttttgttgacacagttgaaagttaaaatcacaaggaaaagtgacagctaatcaaactgtctttgatgagctttaaaacgcctctctctttttttccttctgcagagaatatgttggaaattacattatcttttgttctttatgtcattctggtatcattctaaagcaaaaaagtgtgtgtttcttctgttcatttttctattatttcaacacatttatcatac

SEQ ID NO: 34726 - DNA, 461 bp, Arabidopsis thaliana columbia
atctgatttgtatattacgcgatgcccataaactatatgataaaaaaacatacatttagttagttaaatatgcacatcaccgtttaattatttgcgaggaagcagacaaaattatcccgacttatgctgactcactccacatactcgacacaattctttaagtccatataagaattacttcaacgtgtatatatgtattgatttttatttaatatatatgaaaatggttcataataagaaccagatatcgaagagatttcaccatcaaggtatcgtcagaccaaacatatgatataagcattatttagttttatactagtatttcttgcacttgaacctggacacgaaatcaatttacttggcacacgttaaaagatacagataaatgaataattaataattgtaacaataaatgttgagaaataagtaaatagcgaacgagaggaatggatcggagaata

SEQ ID NO: 34727 - DNA, 639 bp, Arabidopsis thaliana columbia
gtacaacttgcctttttgaatgatctcatctgttttttttttctttggttgtgtgctttatttaaccatctttttctttcacctgaatgaaatcataaactaataaagaaaaaagaagcttacaattgttagacaatattcacatgggatgcgatgttatctactagtttctcagttcaatcacatgcttggtttctttcatgttgatctgatttagtaatacaagttgatcacatagacttttgatttctcacttcttggttgttgtgatacggtaatgcaacttagcgaaacgccttctttggactagctaaaaaagcaacacattcttttcttctaatgcgtggttatcttgctacttagagtggatggtctcttattgacttttatagtcaacatttgtcttgttgcatgcaatatcatcaatgttacatgtttgcatatttgatctagaagataagaatactgcaacgagaagaataggaacatagtgcatgattagcttgaattagaggttcttttggtttttgttataaagtaaaaggtggaaaagtcacatggactcccgtggattccgctaatgacccaccaactttcctcctaagattttatttttgatttggttataaaaaaaaaagg

SEQ ID NO: 34728 - DNA, 529 bp, Arabidopsis thaliana columbia
gtcgtcttcttcgtctactttgtgtttgtgttgtgggtctctctctcttctctctgggctttttctttctctcacacaacttccacgaacggtcaatagagaatgatacaagccttatgacggctctttatttcatctaatcgacggctacgatttgttcctttggtgggcgcttctaatccaataccgaaccaacacgtgttataatagaccagctggacgactcacccacataatttgacgcgtgttgaagcccctcgcttttttgaaattattttaaaattttagatttttttcgagatttggagcaaaacagaaaacagaaacttaaaataatcacgaaaatacaccaaatacttttaattgctactgttccgtcctttataaaatcgcaaccggaaaaataaaaccaaacgaaaccgttaaaccaaaatcgaattgattttttttttacaccatatcagttgatttcttcaattacaatcgataaccaaaactcatttagtgccacaaaccaaattgaaccaga

SEQ ID NO: 34729 - DNA, 634 bp, Arabidopsis thaliana columbia
taaatataatgtattataggtgaaaatataatttcaaactcgatttgatccgcacatacatacgagatttcttattttagaaagtacgttttaattaaatttaatttaatatagattatttttgtagttttggtcatatatatttaaactcagaatcacatgtacagagtaatatttgtaaaataaaaaattggtataagattcataatttgaactcatattagtttggtatccatttgtagacaaaatgagtaaatggatttgtttttttatcagacaactacgtaaaaaaagacaatgagaaaaactagtctttaaaatagttgaatgtttataaaaacaaaattttgactagtttggtattttgttgtaagataaaatgagtgaatggatttgtttttgtaatcagacattttgtagtctttaaaatagttgaatgtctaaagtaacaaatttttgactagtaatttaaaatttggactgatctacgggaaatgaccgtgaaacggattggtgatacatatttgactttaggcattaaaagaaaaagacaatttccgaaaaattcgacacatgttttttttacactgaaaattcacacatgttattttttaaataagtcacataaaatgta

SEQ ID NO: 34730 - DNA, 562 bp, Arabidopsis thaliana columbia
ctcactttagtctcttagagctgttgttataaaagtctcctaatcaaagatctagtgtatttcaacatttcaaaaaacataatctatatataatctttatcttgttacactttagactgtaggaaactacaaaaagagccacaacaaatgactataagagaggaggcagaacaaggagaagatggacacaaagagacctcaagaaagtaagttgatggataagttgatagatggaaagtcaaatgattttgatgtgtaggtttttttttgttttgtttatcatgttcttataaaagttagagcaaaaaaaaaaatgaaagatgtgttttgttgtatatagaagttgtagtagaaaggataaggagacacaataaaacttaggtgatgttgatgctctcaatactttgcctttgtgtattgaccttgagggttatattaggaataagaagagtgattatgtacccccaaacaaacttaatttagaaatagtagccattatcttaagcatgttatctcaaaacagccatatagtaccatgtttggccgaatcctgaatgattgc

SEQ ID NO: 34731 - DNA, 574 bp, Arabidopsis thaliana columbia
cccctccaaaaatccccataagttttaatttttacagttataatttaatacctaatttttttattttatttttgtaatcataaacataattgagagaaaattgtttttcttgaatccaaatctttagttagtgaagattatctagccaaatttaatgagcaataaaaatcgacatttcacaataatagtgaaattaataatagtagtgaacaaatagtaatggatgaaaaaaacatgacccatattatttttatgattgttttatataaataaaaataaactcaataaaaattttatgtaatgaataaatattaaatattttatctatactttttgtttatctaccgaacgatcaaccataattcgaaagatgcagcttgatgtccataattttgttaccacactaaatctctaaaaacaacaatgtcaatcttcaacctatttttacaaataatttgacacggcaaatttggagaaatatttagggtttgagatcattacaatgaatttcatgttttgttgcaaattacttgtgtccaaacgggttattttcaaagtttagtttctttgaggg

SEQ ID NO: 34732 - DNA, 454 bp, Arabidopsis thaliana columbia
tcacgacattgtcaaattaccttcttcgaccttcttcttcacgtgattttcacgagcttgctccacatagctacccattgacgacggaccttcgagcttttccggccttctccgatcaattcgatcaaaagggcaaaggggactagaaatgggttcagggcaaagggtaaatccgtcatttaccccaaggaaacttaacttatattgccattttgcccccttaatatttttgtattatatgaatgaccttattaacttatgattcgtcacatttcacccacttcaatttaaaattatggacgagaattaagtcctttgacggtcaacagattagcacgtgtcgtattttaattgggtcgttgcccctctctctctctttactctgttcccatttaatggtcacgagaccgtctcccccaaatttctcacttcccctaatttcgcttcgaattca

SEQ ID NO: 34733 - DNA, 558 bp, Arabidopsis thaliana columbia
gtataatgcatattagagaaagaacaaagataaatttttgtatcaaatatttaaactgagttaatggtggtttatgaagggtgttatagtgcattcactcccttatataatcgatatctctaatcccttggtaaaattaaattgttgtattgaatttttttatgaaagagtaaggtgagttgcaaattttgcttggcctcaaaaattcttctctctattttttcatttacatgtttgaagtgttactttttactttgctaagatatttcagtgttactttttaatctacatatttcattgttattttttaatttacatatatcaatgttatttttccactcagataaggtgaaatatttcagctaacttaaagtgattatgatcatcaacacctatttcatgtcaattttttgctaaaaaataaacaaattggtcataatgttcaaaaacttgacctcaccatccataatacttagtacttactgggtcaacaacatatggtcagacttttgtattgatggggaaggtactttttgtcgtaatgtacaaaaaaaaaat

SEQ ID NO: 34734 - DNA, 354 bp, Arabidopsis thaliana columbia
tacactacaaaaaaacgacattaattaattcatatagttgtacaactaatactataatccatcggttcttttttgtttgatttttaggaaaaaaacgatattaagaaaacatattaaatgtattattctttgtgatttacaattttcaataattctaaacgaatgatattcaataatttttattaatatttacaatttatcaattataattaacaagtattgcattaataacttaaaaaatcaattttttataaaaacaattattctagaaaatccaaaaaaaaaacatatggagtatatattagagaaacatcccatggctgataactaaataattgtatatatatatatata

SEQ ID NO: 34735 - DNA, 415 bp, Arabidopsis thaliana columbia
gaaacacgagcgagacacttttgtttctttaaccttatcaaaagccacttccgtttgaaacttggttaaagacacctctttgcctcccatttcctccaatcccaatttttctcttcttttcaagtttcaaaaaatatgaatgaatcacttatatatcaagtatatgaaaaattccaacggtcaggatggggcgccgctcatgaccaaagaagctgccgtgaaatgggaacatctcatccacccatcattcaagattccattctctttcttatttcttctatgaatcttcttcatagagatctacagccaaaaatgaattatttcagacgtgaacttattaaaccagactacagtttcttggaaactgttgtaacgttttgagttcagaagttctcagacatctatacctagttaa

SEQ ID NO: 34736 - DNA, 586 bp, Arabidopsis thaliana columbia
tctagatggaagagatcttttgcaactttggaaactctcgtcacaaactactttcgagtattcgagcagttaatgctccggtttcaagaatctaaattacaatttgagtagatgcattatcccttaaggtttaggaagaatacacaaatctcaactagtgagactgtgtggatctctttaacgtattagaaactctacttatgatgttctaaatggcataatatttttcatgaagatgattcttgctccttcaagtgagagtctcatagtgaaggtcgcattactagaaagtccctattgtgcaccgcaaggatttgttcacgaagttatagattagctggactattactctttcccgatttacaatgatacccatatacgtacacattcctcgtgttagagaccatatcttgccccatcaccacccgagccaatcatcccttctagagattatcgatcttaaaacgcagatggtaaacgtgctctaaatattggggaagcgtagagacgaatgaattttaacctcatacttttttgtcttcattctcgaacgaaataacattagatccgtaatagtgcttgagat

SEQ ID NO: 34737 - DNA, 633 bp, Arabidopsis thaliana columbia
cacaaaacgcatgtacccattgcccatttgtggttttcctaaaagccccagttgtgccaccacacagagtacattctgtagaagaattcggtttttccccaaaattgaaagaaggttctgaagatgactccgcacatagctcacagtaccagggaccagtagattctttagcacatttgtagcaatcaatgtgaacagcaacctgtaattggagccatattatataccgtacagtgcataaaagtggtccctaaaagagatgatcatgccttgatcaaacattagaaataaatcacaggaaatgtctttcaccttgcaactagagcacactacaatcaggttccatatagtttcggagcgcctgcagatgtcacaagttcgtggattttctactaaaaagtctggtgtgtgatgatcagaccgcttctcggatggtggcccagaaacagccatctttaaaagtgattcctttgtctgtggaactaggtgagagctgccaacaactttacgtctagaagtgctcatctgtccgatttataccagtaagaataatggataagaaatatggcacaactaaaataaatacatggaggcaaaaaatcaaaatgtagcaacacaacctcttgttgtgca

SEQ ID NO: 34738 - DNA, 578 bp, Arabidopsis thaliana columbia
ttagatcatatctccatacatattgtatacactattattttcacaatacattgtgattcacaatacattgtgatattaacttgttatcacaaaaaataaaataaaatacatagtgatattgcgttgttaccagctgcaagagattcttgtcgagtgaattttctttttcttttgcctttatgtctaaacgagtaacgactttttttctaatattacaacaatctttggaaaacgataggtgaagtacacgcaaaatctatggccaaagctcaaggagggtggtaccttgtggaaggtctatgctcaaaatttccggactgcaataagcactgcaaagaacaaggtttcttaggtggacaatgcctcaaacttggtgttaatatgctgtgtttttgtattcatacatgatctcgtttataatatatcctaaatatttcatgagtgttacaatactaagtaaaaaaatgtagcagtgacatttgtgcttattatttttaactctgtttcatgttaagcaactacgagtgatttgcctcatttaggcatttcaacaaacatgttatgtgcagctaccaaaa

SEQ ID NO: 34739 - DNA, 603 bp, Arabidopsis thaliana columbia
cctgttttagtgaagatgctaacaaggttagttagtatttgccatgagtggattagctacttgaaactattcaaaaatacttctcttcagcttatacatattgctgaatttgcttagttgatgtttccaggttggcagaatccaagttatcgctttccagtcttctgatggaaagccgaatagtattcctaaatcaatgagcctggttcttgcaaataaagattctgttatcgatttagaatcttcatttagttcttcggactcgatataccagagatcgtcttctgctcggggagacaatcctgagctcgacacaagtgatacagctacaacttccggatctaaggtctctttttccaaaagctatagcattttactcgagcttagttcaaagttgtcaaattacaattcgtgcataatacaactcatttttcgaattcttaagacaatgatggcatttctgactgaaccgttggctgatatgtatatacacattgatgtctgagccttgtatgtgtgtgtgcctgagtagggtggaggacgcgtttcagattttgaggctttctttgtgaacaatactgaggcaacaacaccagaagagat

SEQ ID NO: 34740 - DNA, 348 bp, Arabidopsis thaliana columbia
  unsure (1)..(348): unsure at all n locations
tgagaaaatgaactaacaagagagaggttggagagttgatcatgctcgtttgactgagtctatacagttgcggccattcaagaactggtcaatgggtgaaacgacacaaagttgagcacattttttgatgtgcgagtcaattaccaggcacataggatggatagatagataaacatgatatagtacgaggttangtccatgaggatttgggcancgtatatgctnataagactgcaaccgtcccgactgatgtngagaccttggcgtgtcatcagctgttgtgaaggccggatgctcgggctgaccggaggcaactgtcgttgttggaggttgctttagtttggactg

SEQ ID NO: 34741 - DNA, 556 bp, Arabidopsis thaliana columbia
gatcccctgcgcaatttcattaaaccaacccggtcaagatcttcttttgtaaccaaactcaggaccgggaagtcgtaggtgacatagcggctaactagaggatggttctttgccatgtgaattcttgggaaccgtatatgaaagaaacgaatccggttctatgctcgtacagagtgtgttatttgtatagtggataccggttagcctatgaaaccggattctggagtccaaattgttgtttgtaacgacttagtagtttttggaagtgatctgtttcgttggtttgcgtcttgtaacgaacgcttaagcaagtgtgggttttttcttgtaaagtgtcaatatgttcgtttgtaatgaatgtatcaagcaatatttatcataattaaactagcttgaaatgtagtattacgatgttgttgtgttcgtctgatttctctcaccggttgatgcatggttacgttcggctcggtttttatatggttcaatttttaatatatcgataattttaaatgatttcacttgtattattaacaaagcccattggtatttggccaaa

SEQ ID NO: 34742 - DNA, 595 bp, Arabidopsis thaliana columbia
caagtctcactccctcacaatcaattcaagcgattgccgcccgtcgtcgctttcaaatttgttcttccgccggtaactaattctctttcgctttgactacgcttttgcttcactgcttcgatctcgttcggtttccttctgtttgcttcttcagaaattcctcgaattgcttttgatcaatctcaactcaatctgtggattactatttcatcgtgttttcacttgttggtgctcgggaaaattatgcaatttttcgagttgttaatggctttagttcttcgtgtttgctctttaatgaattacgaactttttccaaagagaaataaggtctattttttttggtgaaagtaggagattttttatggcggagggacaattgacgaacatatcggagatgatactgaagaagaggaagaaagggatgagcttgaattgagtaattacggcaacaattacagtagcagagtgttacattagttgaaagttgaaagatagttgtgctcttcatatttttttatggtcaatatgattttgtggatagaaactttatcttatagtttcttaatgtttgatggtgaatgtcattttgtggata

SEQ ID NO: 34743 - DNA, 583 bp, Arabidopsis thaliana columbia
ccttatattggttttcacaagaaacagatagcatagaagaagcatatgcaaacagagttgctttaaaaaataattaacaacttcatttagcatgcataagtaactgcgacggtttaagagatcataccttgcctcctctaggaaagggtttatcatttccagtgcaggtatgagcatcacagaattggcgcaaaaagtgttcttcgatcatgaaaaataaaaatcaaagacagtgatttgagcacacttcaaggaactatttaagaatcatctcaatgagcaactattcacttggaaggtttcttagtaaggaatcataccatgaagacgactagctgagggaccttgactcactgggaaacaactattggcaacgctctaagtgaataaacaagtaaaattagtatcgaaagataataataacaagtcatggaaccagagctggaaaaagcaaataataatgaaaagagaatcaaagaaagaaacctcgcagagatgacggtttttggcaacagcaggagggttgccttgctcttgggtttcttagagctcaatacaaagtcacaatgcaatgcccacacag

SEQ ID NO: 34744 - DNA, 635 bp, Arabidopsis thaliana columbia
tctatttttcattttttgttaagagagcgaaacaagaggatacagagaaaagagagtttctataaaaataaattttctcttgtttcgtctctatctctctatgaacgcttctccttcttctccgcctctccttcctcttgatttctctttcctattaactgaaactttcttcgacgatttacaataccaatttgtgtatagattaatttccacgcaagtaacatataaggtatgtccaaacttccaaaaaagaaaagaaaaaacttccaaaaaaagtaaatgaaaaagaacacagaaggagaaaccagaaattccaaagcacgtgactggtttcttatggaacaataaaaacatggttatatactgttaatacataccacttgcaagaaagactctgtggcccaatggataaggcgctggtctacgaaaccagagattctgggatcgatcccagcagagtcgatttctttgtgctaattttttattgcgaattatttgaaggctcgaagcttaaaaaggcccaaagaatctcatgaagattctgtatttggtctcttcactcacaagtctcacataatcgaaagctcgcagaagtctagaggaagaagatgagtggtacagtgcaatgcacagtg

SEQ ID NO: 34745 - DNA, 470 bp, Arabidopsis thaliana columbia
tcgactctagacccttgtcatatttatttaaaccgtgtcagtggtcaataattttattaattgtaagacacttaaataatcttaaacacaaaaaaaaactgtgaaaaaaaaaatctcaacactttttattttgttgacaaatgtaaaataatagtataaaaaaatctgtgacaaatgtaatacataagaattaatttttgtcacttagattggtatattatatatgctggtcataatttagttgatagaatcatcaatccaagagacaagcaattcattctatatcaacactttttagttttactttttgtgattaatctaattgaattaaaagataaacaaataataaatttattacttgtatatactttatttataataccccccacaatgatttattatactattatccccgctacttattgtggaggagggtgattaggcttaggcatggctattattataaaagg

SEQ ID NO: 34746 - DNA, 661 bp, Arabidopsis thaliana columbia
gttagtggttaaagatgaatgtatagatagaagtgataagagatggctttgaatctttctttttgtttctgctaatttgatggatattcaagcggtatattttgtatcgatcaaattctttatgctattgagatatctttaacttggagcgcattattgaaactttcttgtatataatgatttttttaccttgttgtataatatatgttcattatatagtatgagtaaagttgaaggagggagattttatttaacatgtctattaagaaaacaacatttggtggttggggaagaaaccaaatctaattttctaattgtagtgctacttgaagagggtcccaagtcccaactttactaatcaaattgcacctcttcattggtccaagtgtggagcctctagtgatgtcacgcgtcgagaaaataattgcatagttttcaagttataataacatgtactaatactatagtctaaaaataaataatatgtgggtagaaagagaccattatatgtggtccattgatgctcttctcttggctcgtattagtcgcactcctgtcgaccaccaagtggacatctcgcttctgtttgatttgtgcggttgtgtgtataccgaacagaaatttgaagcaagtcttattcaataagccgtataattgatat

SEQ ID NO: 34747 - DNA, 585 bp, Arabidopsis thaliana columbia
ttctctgagttttctttttttcactcaagttacaagttgtacaactagaaattatcacccaatccaccttacaagttctaccactatcacccaattcaccttacaagttctaccactaagccaggcatggtatggtaaaataagccaagtatggagatcccctcaattgaccagattggacaagacaaccctccacggccaggtaaggtaacatgagcttcagatcaagcaccagcaagattacaatgacctcaacgttcaggcgatctcctaaaccttgttctatttttcttactaaaccccaatatactaaaaagcccataatatttattcttacagggccgcaattgatccagatcttctcaatctcagttggttaacgttattcatcaatatgtaataaatcatcaaaaaaatttggtcaaaaattaaatcgacagctaaaagtttgaacataaaattcggtaacagaaaacagtaaagccaccgacgatgtaaagttattatagaaacgaaattcaatgtgttgttgactttcgtttctatgataactttggcagcttttgaagttaatgcattttgata

SEQ ID NO: 34748 - DNA, 485 bp, Arabidopsis thaliana columbia
atcgaaactcgttgttcgatcctaatcacagtttaaatatctatattccaaaatatattgatatctaattgtagaattaatttcttaattatagatagttgcataactggtaattatttaagaactttaagattatatttttctacagtacttcatgttaacaattttagtagtcttgaggtccgcgtagtgacacatcttaaaccagtctggttctatacttaaaccaattggctagttttaattgtaatccaaaatacacatcttggccaattcaaaagttaattactaacctaagaacaaaccgagatcctcaatccataaatgcttctatacttaaaccagtgtggttcatgattagagataggttcggatgatacacaaaacatttccataaaccacacaaaaaggaaaaaaaaaattacatcttacaaacattagaatcaaagaccctaaagaacgatttctaaaccattttgaaacag

SEQ ID NO: 34749 - DNA, 341 bp, Arabidopsis thaliana columbia
cttggagctcataaggagagacaggaaaagctcatcaacttgacttgggttgaaactcaaaggatgagagagcatattacacgacttatactagtaatctgattcttggttactgataaactcaaagataaactcacttgtagatttgtgctaggcacggtgagttaggattagaatttgttccactatacttgttgattcgtttgtcctgagattgaaatttaagatttgggagttatgagttcaagtttagtcatactactcgaaatttcataaattatataaactggggggggcgcatttgcaaaatagctgagtaataatcgcctatctcactgact

SEQ ID NO: 34750 - DNA, 585 bp, Arabidopsis thaliana columbia
gatgatactcaaatttaaaaaaccaataacactttatttcaacatttctatgaagaaatcaattattaacacttaaagttattaattgaataacaacgaacaacatttaatttagtcaaaattagattttttttttcttttttttggttttattgttaagattttataccagataaaattttacacacgaatctaaaagaaagaacaaatttaaacttacctatcagaattgttgtaagatatttgggttttcttcgtattaggtttcatcagatccagactcaaaaaatggagtcaccgcactcgaatttgctccctgaagtcgattctttacccgatggattcgtcgacggcgcaacagagccgcctctcaattctcccaagacccaggaagaaacagacaaaccatgaaactgttgcgatcgagaaaacagagaagccaagaacttttccggttccgttgtgtgaactgatggtaatgaagatgacgaagtagctgacctaattcaagaatcaatcaagcttgagttagagttcgagcagaaagacaaagaagcttctctcctatttctcaacatgtgagtg

SEQ ID NO: 34751 - DNA, 539 bp, Arabidopsis thaliana columbia
ttttacaaacaaatcaaaatcaccaacacaccaaaaaaagccacaaaaacccaaatcaacaatcaaatccaagaattgtttctcatcaatcaaaatcccacaaaaaactaataaaatcgtgtaaaaatcaaagcttttgataaacgaaatcagtaaatttgtctgtaaccaagaatagtccgacgaccaccaccacagtcaccaacttttctccctcctcctcctccaccgccaccgccattaatagcagaagcagccgccattgaaatcttcttaagatcttcaacattagcgtaactcttacgtgccattcccatcatcatcatccctttactcttcttctctccagcactcgccgacttgctccctcttgaagccgatcccgtcaaaacgccgccgtttctactcttcgaagtcggtggtggcggagtaatagtgttgatattaaccggacgacgattctctttacgtatcacagcagagaaatcaggaactgattgtgccacgaagacggaacagcttttttcagcggagaaaac

SEQ ID NO: 34752 - DNA, 523 bp, Arabidopsis thaliana columbia
tttatttatgatattcagtggagaaccaatttagtatactttcatacagtaggccctttgaggcccatcttacacataaacagaatatcataaattagctgtgtattctcattacagcatttggcaataagctggcttttggaatgcttttgaagacaatgacaacacactacagtcttgttcatattcttgtgtctgcaaattaattgagaaagtgtataactttcctatgtttctgaatcttgttcgaggctcctttcagcttatggttgtagcctcatatagcaattatgctctcacatactagtcatattgttgaaaaaatgaaacaggaacgcttggttcatactcttcatagacagatttttatgtgtttaaaagacgagatttcatatacgaatcagagaaccaaatacaataatttaggctcaagaagcggtacacaacagaaactgattttcaaattcacaagaggtcaacagaaataactcacatgacttttttatttgggcgtgtttttaaa

SEQ ID NO: 34753 - DNA, 591 bp, Arabidopsis thaliana columbia
tccccttttgtcgaccccaaattttgacctttaagtactttttcgggcattttcgtgatttgggctatattacggacccaaaattacttgttcaagcattgttttcgaattttttcatgcatcaaagctcgttaagactagatggggtatccctacatagcgggtgggacccacggcaaatggttcatcaagtcttcaaaaaagaatatatacgattgcattgcatatactaacggatgcgatcataccagcactaatgcaccggatcccattagaactccgcagttaagcgtgcttgggcgagagtagtactaggatgggtgggtgacctcccgggaagtcctcgtgttgcatccctcttttatgtttacctttttttttttggttaaaactttatgactccataacttttagaccgtgagccaaacttggcatgtgatacattttcggaaagccaaagacagcctccgacgaaagaagcaggacaatggaattttccattgactttttgtcgacccaaattttgcctttaagtcttttcgggcatttcgtgatttgggtatatacggcccaaaattcttgtcaagattg

SEQ ID NO: 34754 - DNA, 533 bp, Arabidopsis thaliana columbia
tttaatcatcattcataagcttaaagttctagaacaagtatgacacaatgattcaaataaatatatgcatattgaataatttgagcctaaaaaattctaatttttctttccaactccagtctaatttttttttgtcgacttctagcaaaatacattaggtgttatatctataattggttattcagataataaaaaaattgtaatgagaccgtccgtggtagatggatttcttatctcttgtatacaaaacacgcaccattttcttcaagtaggtccactaaaacaccgtaaagcagccactatatctgctgacgtgtcggccaatcaaagtctgtcacgtaaacgtggctgtgacaagcccgtgaggttagcactcaaaggagtcccagtgtttttcacgcgtttgaaggtgagtaaattctgattggtaatcacaccgtcccaaatcgtacgacttcgttttgtcacgtattaacataaaatcagattataatatttttaggggtcgattttgttgaccacatttaatacat

SEQ ID NO: 34755 - DNA, 594 bp, Arabidopsis thaliana columbia
tggaattctccattgacgttttgtcgaccccaaattttgacctttaagtactttttcgggcattttcgtgatttgggctatattacggacccaaaattacttgttcaagcattgttttcaaattttttcatgcatcaaagctcgttaagactagatggggtatccctacatagcgggtgggacccacggcgaatggttcatcaagtcttcaaaaaagaatatatacgattgcattgcatatactaacggatgcgatcataccagcactaatgcaccggatcccatcagaactccgcagttaagcgtgcttgggcgagagtagtactaggatgggtgacctcccggaaagtcctcgtgttgcatcctcttttatgtttaactttttttttttggttaaaactttatgactccataatttttagaccgtgaggccaaacttggcatgtgataccttttcggaaagcccaaagacagccctccgacgaaagaagcaggacaatggaatttctccattgacgttttgtcgccccaaattttgcctttaagtcttttcgggcatttcgtgatttgggtatatacggcccaaaattcttg

SEQ ID NO: 34756 - DNA, 256 bp, Arabidopsis thaliana columbia
cttactgaattaattactaatctttgtcgatttagaactagcccctggttggaagttaataccacgtattttacccaaaaacagacaattaacaccacgtcaattccgtggctactcatatatgcatggacttgacccagagactaatgggccgcacaatgttgaaaccataaccaggccttgcagatggttagccggtgacactttctcatgcctccacgatcattcggttctcatcagacccaatttcggtaca

SEQ ID NO: 34757 - DNA, 172 bp, Arabidopsis thaliana columbia
cgcttgctctatagtacataatccctatgttgagccagtagttaagaagcattttgctgaatttactaaaacaaagatcaaggattttattgcgttttaaagataaactcgtgttatgcatacaagtgatttgcggacgaaaaattatgtgatatatactcgtcctatggga

SEQ ID NO: 34758 - DNA, 521 bp, Arabidopsis thaliana columbia
tatttgcaaattatgatgtttaacatgtttattacagatcaaagatgtttaacatggatattggtaaacgagaacctatataaacacaaattaagatggtctatcaccgcttaaccggttacgtattgtaatggtattttaaacgtgtcagtgtcaccaacctggcctaaatcctaatggaattgagacacagccaccaaaaaccatcagaaaaatggttccatttgtcaaatacttttcaacaaagcacgaagattccttgaccgatagaaaaaagtaaactgtataagaaaagcagttaaaaatttactagaaacaggtgtaagaagttgactgtaagtttgatcattccacgaggtcgactaaaactctgacaagaacacttcacttaccacaaatccacaattacttttctcacatagttccaacaagcagcttgtattattatattcttaacaccaatggtaatggatgatgatgcaatgtatttgtctcgttttctcatccatctatatgattgc

SEQ ID NO: 34759 - DNA, 461 bp, Arabidopsis thaliana columbia
tacatatagtcaaatcttcaaaagtctatgcaaaagtaatattagttgttgatcctaggaggtggcttataagactactcttgcggggagttaatctctttaaagtcaagacaaaagcttacactccttttgaccaaaaaaaacaaaaaagcttacactccttcgtgatttacggttgaagttcgagatccaaacttaaaggaccaataggaagcttatgtaccgggcggagtctccaaaacacgaagtagcaactcacacatgtgtcaggcgtgtaaacttgtcttgtagtttaggttcttgtttaaaagagatcgatggagggaagtgggaatacacttgtcatttggaaataagggaaaagagaaagtttgtattttgttagcgagaatgagctagaactataatctttgagaagatttggtaaaacctctcacgagatgtggttatctccctaagtt

SEQ ID NO: 34760 - DNA, 431 bp, Arabidopsis thaliana columbia
ttttgatattttctccaattttttaagtggatttgcgattaaacgtggtttgatgcagccttctgcagtgaacttccgagctaaaatctcgttaacggtgtcgaagcgagttttctcctgattgtctctgttgggtttgtctgctgttgtctgaatcctctacctctgtgtttgttgtccggtagagtcacattactggccttgttctgttccaggataaagaacagtccagggttgatcgggaggcgcgtttggtgcagctgaaagcttatcatgctgtattcaagatctcttagaatccctgaggccaacaatatctctaagatgtacttgtggttgccgcttttgaagtctgcaccttcttcaggtgagcattcaaaatgatcagaacttggcttcattggtccccggttactctgaggaaatggtac

SEQ ID NO: 34761 - DNA, 566 bp, Arabidopsis thaliana columbia
ctgcttatgatttgttcaatttgcccaatcagcatgagacgtgtactacaagaaagctctgacgcacgttaaacgactctgacaaaagtgtttcctaagcattgtaccgctatttttttttttaaatattatttttgaaatttcggtacgtaaataacattagcatctttctatatattctgaaatatctaaatggatattagccaggagataaacatgaatctttgtagctccttatctctctcaatatatatcacaagacgtatataatctgttgtaatcgttcctcgtaattcaatacagtacgtagaaactttctgatccaaaggtattttattcacaagaccaactttatatgtctgtcgggtatttgagatatagtgagattaatattttataatttagatggtatttggtataatctggtctatgatcttgggaagaagagacagattgaccatcgatttgtgcatgtggtccaaatcaggaaataaatatgcagtgattctgatattgtcctctgtttaattgtttgaggcaatactaagttgttgaaataatgtcca

SEQ ID NO: 34762 - DNA, 569 bp, Arabidopsis thaliana columbia
tttcaatttctcttgtttacctccaccactcttagatattgttgccgaagaagtcgtcttcctcctctctaatgttcctggagtaaacgaatccgcctgaaacgacgcgaacaagcttctcccagaagtcaacaacatcctctccgctttagaaacttctcgtcgatctaaagactcacgacgtggtgttgattgcggccgattagtagcaacagacgacggagtcaccggtcgagtaacgatcggagattgacatctcttcggtgatgattggtggaagaaagaagaagtaccgccaaggtatcgtgatgctacatctcgtgtttttgggcggcgatttgatgattccgatggaaacgacggtggtttgttctgtttaacgtttgcgttgaaagaaggtgaaattgttgcagctgtcatctccgacattgagaaatcaacattgcctcgttattgaatgtgagcaaggagagattgaatagagaagatttttacggatttgagagattcccgcgagactagggttttgattttagtagaaatgtgagtgaatttgcagtgttagtata

SEQ ID NO: 34763 - DNA, 530 bp, Arabidopsis thaliana columbia
tctcatgtagtttactctctagatgttagaatcgtatttaccgaaatggcaatatgtcaatcggatataattgtgtatctgtgaatgactcagatactatattaagggggattcccttaatagtaattatgttccaacatggaaacacaaactttttgaattttgaaattattgaattcatcttttcgtaaaatatctttgctttttactgtcttcatgacttaataattgaaatcagatgcacccaatattgatcaattttcggaagaaacttgaatcctggattccatcacgaattcaaatcaattgttaggtaacaacaaaatagttcaaaagacagattttctttctcatagactgggttcattgatttggacacaaatacagagttgcccattttagatgtcatgcacaatagagaatattttgagttttcgacgaagtttcctaacatttgtaatgtagtatttcttaaatgaaaaacaaaagacaaaaaattataggagaaaagtatttcttaaatgtttttt

SEQ ID NO: 34764 - DNA, 575 bp, Arabidopsis thaliana columbia
gttaacacataaacacaaacacataagagaggtttaacaaacaatgaaattaatttggggattcaccaactacttaaaaagctataaacattctaggaaacaaaaaaaatcacccaaaaatgaaaaagggttaaaacaaaatgaaaatttgaatagtacccaaaagagagaatgtcatttgaagaaatcagaagcaagaaatagttctataaacagaaaaaagacaaagaggaaggaactattcctattgatagcgaaaggcgaaacttgaattaaaactgttctatgaaaacatcgaactaaaacccagaacaagtaagtgatagaagaagcagagtagtacaaaagattcgaacttgatgtaaaaaaattaaaactttcgtgaaaatcgaagaacccatcatcgggaaaagataaaataaagtgaggaagaaagaagaagaaggatttacccaaggtggaagaagaaggaaggaggcgtaatcgctagggtttttcgctccatgtctgaaaagaacatcgaatcatctgaaatttaggacttttttttttaaaaagattatgtgaagatttag

SEQ ID NO: 34765 - DNA, 578 bp, Arabidopsis thaliana columbia
ataccataacttcttacaaaaatatgtaaatagaccagaaaaacttttgcttggggcttccaagttcttcaggccggctcatcttacaattttctcttgaaaatggttcattctgtttttgcctattttcagacagatgtctgaatggattgagttttataataagtcaaagttaagactctcgcagtatttaattaactagtaaaacacttaaaacttcttataaaagaaagtcggaccaacatgggtccaacatcttgttatcaatagttgaaaaaggtatacatacataaagatattaggtatttagaggaagcatttcttacaacaacacacaaaagcaaaagataaagaagcattgtaaaggtagattagccttccttttcatcgttagtatacttaaacttgtgatggcttagtctcggcttctgcggcttttggttcaacatcagcttttgcatcaaccttagcgctcagtcttagtctcagcctcggttttagtctcagtcacggtttcgaccttaggatcagcctcggcttttggctcagcttcagcctccaccgggccagtaagaagt

SEQ ID NO: 34766 - DNA, 590 bp, Arabidopsis thaliana columbia
tgcttcttgcctattcctttcagtcattttacctgcctggttctgtcaatgaagaagacaagcaattggaagactggaaccttgttcctccgccactttctctctggagtcggtccgactttgcagccaagcacaagaaaatagcggagaagcattgccatttgtctagggatgtggggagctcaaagttaaagatagtggaagaagaagcaaacgcatctttgcatccacttggagcttctgatggcatgtgtgatgatattcctatggaaaaggatgaacttgaggtagctgaatgcgttaataaaatcttagtctctgagaaaatcgacacagtagaaactgtagcacgtgtacatcagtcagatcacttgtcacggagaagtcagctgaaaaaggagggaaagaccaaagactactctggtaggaagcttgggaaatctatggattctaataatgtggattggaagagcaatgacatggaagaggatcaaggagagttgagtagagcaccagagagcatcaaagtaaaaatcccgaaatgacatctgattggcagagtcctgttaggcgtccccagatgatatata

SEQ ID NO: 34767 - DNA, 257 bp, Arabidopsis thaliana columbia
aacgacatgaaaacgatgcttcgtaaattagacccacttggagtttgaaaccaaaatggaaaatctgataaggtcaatagaaacagagagagaaacaaaatcgatcggccgacatattgggactacaacttctgatcaggattgttgatgttggaattcgtactcataccggccaatgataaagcccttgaagtaagcgagcccacacgcaatgtacaccttcggctcaaatatccaggcccgggccttgaaaacgc

SEQ ID NO: 34768 - DNA, 613 bp, Arabidopsis thaliana columbia
  unsure (1)..(613): unsure at all n locations
gtacagtgaacctcgtcatcatcatcaatatatgatacctctggtactacaactccaaccaacacaacagaagatatctgtgagaaaccaaaaacagatttggattctgaggccaaacttaagacagtggagactgaactagacccacgtctgggacggagcaagggtgtgttaaaattgggattgagtgtcttctctattgcagttgcagggtttgcttctttcatgtggatgtatctccaggatgatatgatgcctcctcatcttgttccgacttaaaaagtctaagggatgaacattaaaaagcttagaacttacataggttcaaattctagcttagttctcttgttcttttgtcaatgtgtggatcatgttcaaatactagtttgtttgttttctttttcctaatgaatttgtcacttgttcaaaagtcgaaacaactgttaaccagacatatttacataggttcaatttctagttaggttctcttgttcttttgtcaatgtgtggatcattttctttccccgaatgattttgtcacttgttcaaaagtcgattcaaatagaaaccanattgacattaatacagagttaagcgaaaaatcctagtaata

SEQ ID NO: 34769 - DNA, 606 bp, Arabidopsis thaliana columbia
tattcgtacttaatgaaaagaacattctccatatcgttcaagctccttctccaatagctctcaagacattgtccctaaaaggtctcaagatgcttaaaagaatcgactgattttaaataatttaatttgcatgcaaaaaacaaaaactgttttaaagaaagacacggtattgaatgcgataaataggtttattagtcatacaccaaatgaccgaagcagtagagaaattaaagtagctttattaagcatcaaggaaacaaaaaaaccacatatcactcaaaattttaaactcttaattaactttacatcaaaatttaaagtaacttgtattattttagattcaagaaaataacaaaccaggtaagcaacataattaggcctccacaatacaaacaatgcgtgtgcatatatgaaagacatgttaaaaagtagattttcaaaagattgtctccagtaaaaacaagtaacagcgttatggaatcaaatattatttttattgggaacaatttctcaatgattctagtgacatctctccatagtaaccattaccaatctacagtgatcgcggtgctctaataacattatctcatctgacaatgtgaagat

SEQ ID NO: 34770 - DNA, 587 bp, Arabidopsis thaliana columbia
ggatcaatactctctcgcatgggatacttaatcaattgttggattaaatattctttcgcatctttgtgaacgcaattagtgggtggtttgggttccacctttggatcctgcctttattccacataaagtagatcactggtcatactcatatccttacggacaataaactattgttattggtattgccgtattattgtaattctattcataggtctacttccaaatctttgagatttttttttcattggggaagtaagatagatctcgcaatttatgctcgtaagctaacattatttgggccttatatgggctttatgttaaactgatagttaataatggacctccaatagttattctgttaaccgttacttcccgttagattatgacatcctcactcaaccaatacttaaacgccacatgtcgtcacatcagccacgaccttaaaaaaaaatcaattcctctctcttaaaacaaagaagataaaaacagagaagaagaagaaaaaatctatctccgccatgaacgcgagactcttctttgctcttcaaatattcactctctctacacttcaaatcgtccactgaaaa

SEQ ID NO: 34771 - DNA, 530 bp, Arabidopsis thaliana columbia
cgttggtagttttagatttgaagaaagtataatgtcaaaaatgaaaaactattaaatgtttttttcttttattaattacaaacaataaacaataatgttagaaattgaaaatatgaaatagtttttttttattatcaattacaaacaatcagtaattacatttaaaatttttaaatcggaacagattgaaagattatgggtatcataaaagtaggagttcgtctgatgacacacttgacgttaatcttttgatccctcaaattttgcactgatctctaagatatgaatcttcccattgttaagacttggttcaatattctcacaaatattttgttcgctatacagataggatcaaaatgtttgttggtgtgttgacatctatccacatatacaatcatctttcgaataaaagacagtttgaaagatcattcatacgattataccaatttttattttttttgtcatgtgtgatatttgcacacgtccacaaaaattatctcatttagaacattctcagagattgtgtggtg

SEQ ID NO: 34772 - DNA, 609 bp, Arabidopsis thaliana columbia
cttgatttttccggcggaaaatactgtgcttccttgagattgtctttagggaaaagaggcatactggaggtcgtgattttatcttatcatctgtttccttcttggttgctttctcttaacaaatatctttctggttggtacaggcagctgttttcacatcgtacattcttaaaaacgactcagactgcaccttgtttttctttccccctgatcagaagcctctatccaggtatttgacaagaaatcaaaatatcctttaaattggtgatggctatttacatttacagtaaacaatgtagagaggatatggaaaaacttgatcacattgtcccacctgagtttggattgtatttaccccaaagacagaggggtcgtggtttttaaggtatgctatccgtgctcagtacatagttatttcacccaatatcttttcagaaattattcagcatctctgtttggccagatctcgcaaggttggtgtcatattggctgatggtcatggggctactgaagcagtgctggatttggatgctttatcaggacttaccgaaattagtttggggacaaaagatgagtctgggtttcggtatgtacaagggttggtttgca

SEQ ID NO: 34773 - DNA, 873 bp, Arabidopsis thaliana columbia
taatctctttattaaaacattctttatgattattaaggatgtggaagttgtgaagaacaatcttattagcgcacgagacccaagttcaagataccccaagaaacatcaggccaagattgatcctgtgacttcatgagaagaaccctaacccaagcaatccaacccttcccatgacattctcttgtcccaaggacttccccattgcaagagcagaagaagccctttctctgcctctctctctgcttctttgaatctcttctttcccaagtacacttgactcaacaacacatgtggctctcccacaaatgggttcttctcaatacaacccaacaatctctcctctgctctctccaagtacccttctttgcttgtgtcactgctcacaacttcccagtacatctcccttgcttctatctgctcttttgcatccaatacctggtccattacatatgaagctatcaagacactatagttacctaccactaccaataagtgtgaaagctactaaattaaagaagatacaatcctagacaccggaacaccaatgatcatgacatgagacagaaccaatttagctaactaagaataccttggtgcagaagctgaaaactggaggcacgacaagatctatatcctcatctctttccttcctcacttcaaacccagaaccaaaagcccttctcctctcttccatcaaaatctcctcttctctcacaatcaaactataaatcgctcccattctcgaattagaattcatccacagtccaggcttcccattcccaggccacaacgcagtcacgttcgttcctctaaactcaagtctcccatcatgattacagaacactcatcttggaacccaaaagctgatcacta

SEQ ID NO: 34774 - DNA, 709 bp, Arabidopsis thaliana columbia
catatccatctcaaaaccatgataaaacgcgtacaatggaagggatcaagctaatttgacaaatctctattcacacctcaaccattcatatatataccctcgatatatgtcacatcattggttttagcttttaattgattctcataaaatataaaacccaattacgagaaaagacttgttcgatggttctcatagaccctgaccaaataagacttgttcctaaacaaatcgaattaaatagagttgtggtttactcatactttaaatcgttttaagaaaaaataatgactactgttacgttgctactacgtcataactaccgaaaatgattgcgttttcaattgctttgaaaggaagccaaaaaggcaaaaacggcaaaaagggagagaaaacgcgtttgggaatctcaacggcgtttgtgtaagaaaataaaagcgaaactccgtaacggcgccgttatataccataacctccgtccgctcaccaaggaaaataaaatctcaaccgttgaaataatcaacggctcatgattcattctctctccttccccaccaaaatctcctctgctttgttaagaagcgaaccagaaatagaaagaaaaaaaagcagagagagagagcacacaaaaatccaagagagaaaaaaatgagcgagagaaagcgagacgttgcagaagaagcttcaagcacaagcttctcaccactgaaga

SEQ ID NO: 34775 - DNA, 562 bp, Arabidopsis thaliana columbia
tcttatgtttctttatcttctagcttgtgttgaacagcttccacaagttggagtaacattgctccaatgaagtaccatgtaactcctgctaacaatatctgctgccatggactgttaactatggataaagccagcgagccgccgatatggtcgttgagctcagaggcggctctgtaacttgcttggtactgaaccaagaatactgctactatggctgtcccaattggaaatttctttatcctgaactgtcttctattttctcttctactagttggtttctcttctgaaggaaatgtcttacgagtcacttgcggattcgagctagctttggaaccgttgttgtttccagatgagggaagagcagcgtttgatggactccagtaatcttctccaagcaagtaagctgatcctttctctttggttcttccgctttggtctgcttgtttcattgctgccacaacatcttgaagctttctgatatctggatcaacagctttctttcttttggtaaaagttagactcatgtttgattctggactcaatggtttcgtgtacggtgatg

SEQ ID NO: 34776 - DNA, 545 bp, Arabidopsis thaliana columbia
tggagaaaactactctttccacaaagtgtgcctgatttaaaatatatatttaaaactaaagaaagggacaaagggaccttgaaactgcaaaactagtagtgtgttggttactaaaaatagaaagttacatagaattttgatgttgacacatatttctattaaggatcatttggagtcatggaaaaaaaagtacagatcgtaatgagtacctactagttacctacatagtttcaattatttatttatactccagtttttcatcaaatctaacctttctttaacttaagtgattgaaacccatgaatttaactaaaaaaagatttactgactcaaatctaacaagggaaattacctagtgacaaaactaaacaatgttgttacactatataccaatttgtatatttgtataatatcatgtactatatatatatttcgagagagaaaagactcaaagagtaagcaaaaataggaaaaaagtgaggagaaagaaaaggtcttaactgatgaaaagtaaaagcattgagatagacagatccattagatac

SEQ ID NO: 34777 - DNA, 240 bp, Arabidopsis thaliana columbia
ccgtgtttcaagacgtattgtcacggctaaacactgcggcttgatgaaccttgaattggagagggattggcaattagcagatgcggcattgaatgcatatgatatgagacttgttagaagtgcgtttaggtttcttaatgagagaggtcttttggccaacttcggcaaattcaccagtattgttactctgtcttctcgccttggcgccttcaaaatcaacttctgtttagatacatgtac

SEQ ID NO: 34778 - DNA, 546 bp, Arabidopsis thaliana columbia
catatatggaaaagacaactctaaaaataaatataatgaagttaaataactcatttgcaatatttaaatagctaaatgggctttactcggcccaatgaatttctgtcctttcgaatataaacgtcgtttattttattttggaaatcccggcgagaagcacctctaatggctttatctccgtcgtctcctccatgtctcagatctctttcgccttctttttctcgccaaattggcttccttgttccacgcgtacagtctctagtctttggtagcgtccggaagcatgagttgcggaggccgagcgcactcagggaatggcgggagtacgaagatgctgtgaagagaaaagatctcgccggggctcttagattcctcaaatctattgaaaatgatgaacagcgtgattcggttgaatctattgtcacggctaagttaagcggcttgggagctcttgaattggagagggattggcaagttttagatgcgtgtttgaatgcagatgatatgagacttgttggaagtgcgtttaggtttcttaaggagaga

SEQ ID NO: 34779 - DNA, 597 bp, Arabidopsis thaliana columbia
ggacgttgatatgggtgataaatagttttaccgcaccattttcaagatagccgcaccctaggcacctctatgatgagagaagatatatggatccctttttaatgtaacgcaataagaagatttcttctagatctttttctattgtttgtgtttctagggttgtactctctgtttggtgtttcaagtgttctactctactgttggtactttgtaaattgtaatggttttatatttttttttatagctgtgcctttttgtgttaaagcgcgtttatatataaataattgttagggtttgacaaactatatcaccctatgaagtatgaactgtgcaaaaaactgactagttaaagcagccaaaagacatgtcttgaaaccttgacaataaaatactgtacgagcttctttatttttttgtcggatttatatatttttcatatagaagaacctttatttctgtccaaaagaaaatctttccaattaaattaatcagtaaccaagcaaaggatatattctcatatgtaaaatcaatcaaagaataagatagaaaaacaccaaagattgtatgataccgttatgactctatataaatatatat

SEQ ID NO: 34780 - DNA, 281 bp, Arabidopsis thaliana columbia
tagacaatgtaaactagtaaaactacaagcatactttttcgtaaatgggggttaacctttttaataaatgctaccgagttcatcatcactatcaatcaaattgtggtttacataactagcttttgtacttgatatttacagatatgctgggatgccatatacagaatcagtgaccaaccccacagacagaactgtggctcatttgctctttcataggccctttgatatgttggcggcaaacgaatggaaggaccagaatcacccgcttcttcgaagatggg

SEQ ID NO: 34781 - DNA, 502 bp, Arabidopsis thaliana columbia
ggaaaacttttccggcgacattcatctacatttaccagatcatattcgtattcagtcgtctctaaattctcactaaatcaatccttcctttggataattccggtgtttgcgaggaatctgataaaatgattggttagttcagttaaactctacttctaaaactaaatctgcattcaaatgtagtctctagttctcgtacttgaagtagacttgattcgatttgatttactgattcgtggcttttgatttcacaggtcaattggaaatctgagaatccgtgtgactattattgcagctggatcgagatggaagagtatgtttctttcttcttcttcttttgattttgtttttgggctactgtacaatcttcttcgttttattgctattgcattttgatcgatgtgctgttgtattttcttgcgtgtatagagaaaatgctgtcgagattcttcagagatatcgccgggataggcggaacgtattggattttatgttggctggt

SEQ ID NO: 34782 - DNA, 374 bp, Arabidopsis thaliana columbia
caaacaataatttttataaaaaagatttatataacttttaaataaacatatttatccgcggtgtaccgcgtcaatatctagttggaagtaaaagaggttacttaaaaataattactatatatgcattctatgtaaactgtcatcaatacccttttttgaatgacctcgaaggcctggatcctattctggtatgttttaattcttcatatgtcaaacctaaaacaagctttgtgtgggatgcctaatctccatgtacgaggtaatcatgtgagagaggattcactaattcggtccagttttacaaccaatcaaaatcggaattttggcttctgcttcacctgctcccatcatatggatcttatgcttcaaagtat

SEQ ID NO: 34783 - DNA, 856 bp, Arabidopsis thaliana columbia
tctggttccacaaattggtttagatcttgcagaagcttcttctgtagtcacttgtagacttatttgtctttaaagtctctatcttccgttttgtgagactcccaacacttttaacggaattctccaatagtccatgtactatgtaacaatgattttttggatacagttgaagtgtaccttgatgtttattcagctatattggtgacacaaacttgtttgaatatggaatatggagaaagttagtacctgactccaccagcattggtattggggaatgtagtttgttgattgaagcttgcaaaggcattcggaggtccagatgaactatgtcgaggaaaaatggaaaccgagagttagtttgaaggcaacacaaactttttgggatatgaaaattggagaaatcccacaaaagttgatacctgagtccacccgcattggtattggagaatgcagtttgttgattaaagccagagaatgctggagaaggggaattgatctgactggactgagggaagatactaggagtggttgcagcaaacgggctttgattggcggtaacagagcctttgtatggattccgtagaaagttttcaaactcggctattttggaattttgcagattcctctccctttcaacctatataatgcaccataataagccaggaaaagaggaaatcaacttatgtcttatcagtatgaaatgaaaaccagtgtaaagtataacaaacacaagaaaggttaatctcacaatcgactgtagaggtattcctcgtttagcttcttcatatgccactgcacgtagttcttcatagctgatatcccggtaacacacatggaaaactagaagaaaaaaaga

SEQ ID NO: 34784 - DNA, 611 bp, Arabidopsis thaliana columbia
aagtgttaaaactactatggtgtgttatcgaacaaatctggtgtcttatgtcgagtagggaccgtgggattagatggacgattctcaagatcgacggctgtaggcaacaaatgggagaatgcgaaattccctcatggtcaggattttttagaaatatatacattaacgttttaaaactttgataaagagacacgataatggataaaagtagcatagggggattctacacataaacttgcatgttctaaacagagaaaaaaaacaacattcgaagttatccttctatgatagaagttctatcatcaaaaatttatgaattaaatgacatttttctagtgttggttcaagtatctcgctctggttgcgcttcccaattgtacacatgaaaaagtgttatgattacgatgttattatatgattacgatgttattattctgcatttgttcccataggaaataacccgactctagagtataaacgctaaagtactaaaccgaacccaacccaaagttttaaaatattcgaatggggtttagaaactagagtccacacaaacacaaactgaatatttgaccctcatgcttaattttgattgcaggatatatatatgt

SEQ ID NO: 34785 - DNA, 533 bp, Arabidopsis thaliana columbia
ccgagtatatttttcatcttttgtcaggccattcttggaggaaccattcaagttccaaccctcactggtgatgttgtcgtgaaggtatatcaatttttttcacatttaaaaaaatgctttaagattttaactctagttctatcaacaatgaaacatgcttgccagcaaactgaacgagctcgacaatgtgaaatagaattcgccatccagtgattcgtaaatgctttgattctaaactttagattgtctttttctttgatgaaaaagaagatcagattttgcttgctagctaacggatagttaattccagctttgggtttctgctcccacttgttgtcgtttaggacctggtcttggaacttctccagcattctaacttggaaactcttttgttgcaggtccgtcctggaacccaaccgggtcacaaagtagtgctaagaaataaaggtgagctcttttgtttatgtcgataagttcagtcgtagaatacctgtaagatgaaagacacttttgagtatgattgtcttggattg

SEQ ID NO: 34786 - DNA, 813 bp, Arabidopsis thaliana columbia
cgatctgtagagtctctgtttagtctctcccatatcaatgcctgaatcttagcagccaacaattcgctttttcttttttcttttgaggacgctcttcttcggcaacaatggcgtccagaaccaagtgaggataattaaccaaactttagtttttaactcagaagacaatttgaaatctctgtcttctgttttctttgtcggaaatgtagttatgttttgttggatttttatgtgggtcactttctccttcccttgttttttcttctggaattattcagtcatctgttttttgttttggttgcattaattttgttacttttaatctgattttccctgcttctggttccacaaattggtttagatcttgcagaagcttcttctgtagtcacttgtagacttatttgtctttaaagtctctatcttccgttttgtgagactcccaacacttttaacggaattctccaatagtccatgtactatgtaacaatgattttttggatacagttgaagtgtacctaaatgtttattcatcttaattattgataatttgatagatctctagactgagatgggatcctgttcctagcttacttaatcatgaatccaaagattctaagaagaatggagatgatggatggtctgttttgttttctttattgttaaatggtgagattgtgacattgtggtttatctttctgatgatgtagaactggtttaatggagactcctcgtagcaaaccgtcaccaccaacaccaagagtgagtaaaccaacagtgactaaatccgatggcaattcgccatctccggtgcag

SEQ ID NO: 34787 - DNA, 592 bp, Arabidopsis thaliana columbia
tatagttgatggataaacaaaagcctagtctctagaaggaactaactggttaattagttcgttcgtgcaatcacataccaaaaggcttttccttttatacggattgatatggcttttaatgattcaccgatagatttttgggagccaggtgtggcaaaagatctggcccagacctgactaatgactatctttccttccttctccagctttgaagtagtaaaggcaaatgtaaggatcacccattagtgtggcaggccgttatttatccaccacgagaacagttataagcattggctaaattcatgtttcgcaaatcattgaaaagaacgaaaaatggatatcggaagaaaagggataacaaaatagatttacaatttttttttctcatttcattctatttacatttttatttgattttttttaaaaggtttttactaattatcctaagggtaaatcatattacttcttatatcataaataatatttatttgatattccttgaagttttaaatattttggctttgaaataatatatagtactggaaattagaaaataaatagaaagtggcaagtagaaagcagataaaagagg

SEQ ID NO: 34788 - DNA, 530 bp, Arabidopsis thaliana columbia
tgttaagtactacgcatataaatcagctaaataaaccttcttctattgtgaggcagtttgtcaaggtttcatgagctctgtctatcccatgagtaatatatctggaccaaaggtaaatcagttgcaaatatggattcaaaagaactgttatatgaaaattgtcatatgcttatggtttagcaaaatgttgtgatccttagtttgtgggttgcggtaattaggaagtcagattcaacaaattatacttctctgttagctgctagataagtctctaacctctcaatttggtgcttctcaggtgagattctctgagacagaacagaaggatcagatgccaacacaaagaagtctcctttccagatcaaatttcaaactaatcggctcaccagtagaagtgtatgtaagtttgagaatctcatgtctaatcgaattttcttggggtacttctgacacaagtgtagctgacatgagctgtgtttctgcagagagatccacattcttttggttggtgaagctgctatgaaacagag

SEQ ID NO: 34789 - DNA, 394 bp, Arabidopsis thaliana columbia
cgaagcaatgcaaaaagagccggtgtagagaacgattggcaagaagagatgaaacaagcaagtagaaggagtagaagtttccaaaatgatttcatgtgttacacacgtggaaaacaaaggaaggagtagaagttttcacaagttcccacactaacaagtttaattcaactacttcagcacaccataatgatcaagagcattttcctgcagaaaaagagaaggaaaacttttagtaatatgaagattttaaagattatagtttcaatgaatgtacactgtttataaacatatatgtataagcaagttttttcagtgcatgattgttagaccaagtagggactagtgcaaggagacgaacttagcttaccccaatagtttgcgccacttcatagct

SEQ ID NO: 34790 - DNA, 480 bp, Arabidopsis thaliana columbia
gaggctggccatcgttctgtgaagcccaccagcctgatgcattttggagatttggtatgccaagctttccctgaccagacgccatggactcgagggatggggtgaggtttcagtgaacattgagcggttaggttgtttttattgttatatagtggtggcggtcttaacttgttatatgctgattttatctatgcctgaatcattcattgtttttattttttatatcttgtcttttctactagtgtgaaatttttacccttttctagtactctggaatctttaaaatatttttctcattgaacacataatagatttcaacatgcaacttatccaagtactctttatttcataatcttgaatacatcaacaagcaaagtactcaatgtgagatacagaaactttgttcacatccgtcagactgtcactcccaaacatagtcgtcatgtcaactagtttccactcaccatttgcataaccttc

SEQ ID NO: 34791 - DNA, 326 bp, Arabidopsis thaliana columbia
tctctatcttttatagctaaaaatcatatttaagaaacactatcttatcaaagtacaatttagtaatcaaattacttaattttatatttttatagtgctatactgctatagtttatttttaattaatgattttttttttgttattctacagtgggcaacaacaagaatcttctcacaccacccacgtttcctttatggaccgctatttcttctcttggccaagagcaaattcttataaattggtaaaatatttttttagataaatccatatacttatataatcacgtgcattaattacataaatacacttgtttacaacaaactat

SEQ ID NO: 34792 - DNA, 519 bp, Arabidopsis thaliana columbia
cctcgtgccatgcaaacagagcagtatatagaattttcatagaagcatagaagataccaataaaatatcttcggtgaactagcacaaagccacaaacttcaaatcagtacttcacatttctgacatgaaattttgttttaacatatatcgttaaaattgaaattgctcatgaaaaggggtatgatttaacttctcaaaaacatggtcttcacttatatatgaagtcaccaatccattatgctaatttcttacatattagcaattattttgggtctttatttattgaactcttatttatacccgttttaattattagaagagtctagatctttcacacgtatttaaaaataatatttagaatttattctatatcctttactaatctatatagagctgaactaaattatagagttatatgattatatcttaaacctgaattcaaaactaaccccgtaccatacaaaagaaattttgttatacaagttggcatgtacactcaattctggaccgcatattgac

SEQ ID NO: 34793 - DNA, 584 bp, Arabidopsis thaliana columbia
agattattaacggccgccagtgtgctctaaagtggagtctgcaactcgactccatgaagtcggaatcgctagtaatcgtggatcagaatgccacggtgaatacgttcccgggccttgtacacaccgcccgtcacaccatgggagtgggttgcaaaagaagtaggtagcttaaccttcgggagggcgcttaccactttgtgattcatgactggggtgaagtcgtaacaaggtaaccgtaggggaacctgcggttggatcacctccttaccttaaagaagcgtactttgtagtgctcacacagattgtctgatagaaagtgaaaagcaaggcgtttacgcgttgggagtgaggctgaagagaataaggccgttcgctttctattaatgaaagctcaccctacacgaaaatatcacgcaacgcgtgataagcaattttcgtgtccccttcgtctagaggcccaggacaccgccctttcacggcggtaacaggggttcgaatcccctaggggacgccacttgctggtttgtgagtgaaagtcgccgacttaatatctcaaaactcatcttcgggtgatgtttgagata

SEQ ID NO: 34794 - DNA, 540 bp, Arabidopsis thaliana columbia
gcactctagatccctagtgatatgatttggtttgataacattaacaatatgcaaagtcaagaattacacgcacattctatacgtttatatgaaagaaaaagacagttaaaaagcgaatcatatctgcataattgcatctgatctcatgtcggtgtctccttaatccttaagtatttcttatcaaaaaatttgtggctattaatagaagagaactagagaggacaaacaaaatatcccaaaattgcagaaccagcttctttcttccgaagagaaaccaaaaacaaaagaaaatggaaatggtgacaagttttgtatatccaccacctccatcaatattgctcaattgtatgagcgtcgttggtgtagctgctctggccaatatcggttggtctgaaatcagaggaaatcatctcaaatactccaaattcggcgtatcatcatcatcaccacaaccacagaaggagcgattcggcagcatctcaagccgaaatggaatgcttttgctatacacacctgcgtttctagcagctgcgtcttctt

SEQ ID NO: 34795 - DNA, 535 bp, Arabidopsis thaliana columbia
caaatcgcattacacatggaaatgcataaaactataaacttcaacaaaatgcaaatgaagaaaatgattgctctctcttagttctgaaagcaagcaatttggcgcctcaaggcgtatcaaagacgaagagtcttgccaaggaagggaacttgttgggttaaggcaagagaacctctatatatatggtcgatgaaagactacaaatttcgaccacattttaagcgagacgagtgttagggtctgcgaaactaccagccatacttcttgaagaagtccctggttctctttctagctcgagtgaaaactataactatgcatgcgagcacccatggaggaaaggtcccaatggagatgttgttcttgatccaagctggagggtctttcaatagaaatgttattaagagcgtaacaatcacaactccgagaatgattctggtgatgggtttgagcagggaatcctgaaaacaaaaggtgtcaaattaatagtgttatcagatgaatcaccaattaaagctgcatgttttaatgctttttt

SEQ ID NO: 34796 - DNA, 631 bp, Arabidopsis thaliana columbia
  unsure (1)..(631): unsure at all n locations
nnnnnnnnnnnnnnnnnnnnnnctaaagcagctcatttggggaaactcataatctttgatgtgaccggtaaagcaaaagttttgggctttttaccagatgtctgatctcgcatttggcccgaccccgcaattttgggcttctaagataaggtcaggcccggctttaaggcacaatgtaagcccagcagttcaaaggttgatccgacattaatttggtaacggaggaatctcaacttaaatgataagcatttacgatccgagctgacgactcgtaacgtgcgaagttaatgaggcgagatccgcggcgtgaagtcagcgaatcatttaactcgtttgattcgatgtatttgtataaataagagtcaattgacattgtaaaaggggatacacattgtactgaaactatactgaaatacataaatacttttcacttgatcactgttcgtctaacaagatttaagaccttcacgaaacaaccacaaaattctaattgcggattacgacatccacacaaatcaaataaagataatctgagatatgatggaatagtactagtacttgatagtgattttgattgcaaattttgtaacgacaaaaaaattgaagtctagaatgaaagatgccctatatg

SEQ ID NO: 34797 - DNA, 527 bp, Arabidopsis thaliana columbia
cccatcaccttcctatttgatatcacttttaattcaccaattgtatgtatcaaaatattcaaagccattgactgaattaatggcaacaaaaattatcaaagattttctgtaattcctacattgactacatgcaattttcaagacattgactattttcaatagttttcactctttttaatcttgatatctggtcaacttttaccacctacctatttgtctatcctactacatatcattaatcacaccattaaaccacacaaatctatacttaccattaatatttttcttttgaataccaaaaaaacaatcaaaaagtaaagtgtcattaccaaaaaaataaaaaagcaacatccacctactgacctacatattttttttaataaaattataatgaatcattttgttagtaaaaaataaaaatgataaaacaatgggcgcgtaaacgattccagctttccccaccatccattatttcccaaaaaatcaaaataaattaaaaagacacaagtggatgcttgagatttggt

SEQ ID NO: 34798 - DNA, 516 bp, Arabidopsis thaliana columbia
ggaagtttgataaagtgattctccattgttggttgatagagatgagttcttcttgttgttgttttggggagaagttgcagagttgcctccatttccgtcgtctgcaccaactcttgattaggttttggatcgagaattcgacattatcaactgttccggtgttgatgatgttcatcaaaagatgaaaaagttttggaagttgttgatagatgatgatatgagctttaaaggaaggcaaccattttaaacagttttaggaaattaattatttttggaaagatggcttgaaaggcaagtaaggttgagatatgatacaagctttatttatttcttaagtgaagaaacacacttgccaaatctgaaagacaatcctattaacacaatttgaagataaaaattcaaactacaaatgaccaacagattttcaattaaaagttacatatatcaaaaatactgcaaataacgtaaagtttatgtcaagactattccgtctttgacgccatgaatgcagagaga

SEQ ID NO: 34799 - DNA, 562 bp, Arabidopsis thaliana columbia
gctatcattggaaaggcggaaaaaaggccactgcggaataaaccaaaggtctgtatggcctaatctatgccaaaactatcaattattggaatgtagagataaaacaatttcaatggtactccacagaaacagatgcgtttgagcagaggattctctaaaaggatagcatctaggctgatggtattacacaagaatgtactaaaatgttagaagttcagtagaatttctctaagtaaattattgaaattatcgccagcaaccagcttaaagtaagaaacattgaattaactttatataccagcgtaatcttttcaatattgcagactcacagaacgcacttgaaatctttgggaaacaaatagttacaagttaacgcaaagaaagagccaaggcatgttacattaagccaactgaccttttcaggaaaagacgaagaatactttgcaagtgctgccaccagctgatgctctttatggggttcttcgcagatgacgcagcagtagctgatgttctacttcgtctgaccgaagtgaagctgatgattgtttgctcttgggaaatg

SEQ ID NO: 34800 - DNA, 481 bp, Arabidopsis thaliana columbia
taggagcaacaatagcaatggaatgaaagcagaagggttcccgcctaaaatggtggcgatgcatcgtgtgcggtggaacatgaataaaggaagtgagagatggttatgttatggtggagccgccgggattgttcggtgtcaagagattgctccaacctcagattggaaacctcggagataacaattaagtcccttgtaacaatacacttatataacatcttcaagtgtttattccaaaaagaaaattaacgtaggattttgtattaaaagaagattatttgcaagaaactgattcaattgaagaactttttgattctgcggtcaaaaaagggaacaaaccctgaaaatatgttatagaactgatcaagaccggaacggaacttcaagcgagaagcaaacagattccggatgatcttacaaaatggcacttttaactttgtgccaaataaccctaaatcttacaatggtacacatttgctat

SEQ ID NO: 34801 - DNA, 301 bp, Arabidopsis thaliana columbia
caatattaatgttggtatatttttgtgtcagcctcaaaatttaaattagaaacttcaaacttcgaatcacatcgggactgtaagatatatttctcttatccccacaacaaaagataggactttctatctcaaactacttttacaactactcaaatacataacaaatatcattatatgtaactatataccattttataaatcttcaaatcaaaataacattacaaagtttgctaagaaggaaacattacaaatactaaatttgatagcaagtttgaataaacaaaatataacaaattacaat

SEQ ID NO: 34802 - DNA, 551 bp, Arabidopsis thaliana columbia
tagctgtagatttgtaatgggccacgtaattgggccatgctaagacccggcaaacccatgtgagatatatgatctcccgcactatagtccacgttatctcactgatatctcattattttaacaataagaccgtctcttaattttattacaagttttcttttactcttgtagccttaaattttaggctgaaaattaaagttttgaaaaaagctatagggagggactatgtaaaataaaaaaatgtacgttaccatcagattttaccataaagagccaaaaataaaatatgcaaaactccactaaaaataatattaattcccctagccaacaaaaaagattcagattcatatcccacgcgctcgttcaaatcctctcattcgccacctgatcaaaccaatctcaatttgaaaattgaaatagacaaaatcgtgacattgggacataaaaaagcactaggacaaaattctagtcgacgcaaaaaaaattcgaaaaacgtgagtcagcgtatgtggtttcacgcgccaaagtgggagcgtgagtggggtttgaat

SEQ ID NO: 34803 - DNA, 457 bp, Arabidopsis thaliana columbia
cagagatagccaaaacgaggatgaaaaagatggcgaaggtagaaactgacttcgttgccatggccaacttctttgtctctgtctttttctctgtctctactctctaatatttatatttcactcggagttaatatgtatgcgtaaatggatttgcatgcttaacacttgttgaggtgcaatactattttatatttatcgcttggacaaactattatcacgacttcacgagaaccacaaattcattacttagttttcatcactctatgaaaaaaaaaaagtatatttacaaagcaaaccaaaaatgaagtgggaaaaatggtaagacttcaagaggttatttaatactttatttttctgatttcgggatcgacatttaaattgaggttcaaccagtttcatcttatgctatgtgtttcaagctaccatagtaccatccactctctttgacgagcacgac

SEQ ID NO: 34804 - DNA, 552 bp, Arabidopsis thaliana columbia
gaatgatttgtgttttttgccttctttctgtttagggaagatttctttctcctctcagcactcaatccccagcgcttaatgtcgtttctcgaaggtctgtataccgaactgtcttttctttctattatgtttcttgatttcatctaggagaaaattcgattctggtactctagattattattgcttacatttgagcactattttctttccagcaacctccatggattagttgcttgtggtggtgaggatggtgctgtggaattttttgatatgagaatgaaatcatctgctgctagaattaacgcggtcacacatggtggtgatgctgctgcggtaattttttctaacttgtgttccaaataaacagactttcttagcttagacgtcatgtgattggtgaaaattgcattgatttctgatgatcttgtgctttaaattggctaataggaggttactgctatagagtttgatgacagtgaaggtcttcaagtagctgtcgggagtagcgcgggaaaggtttgatgctatattcattttgttacctgaaaggtt

SEQ ID NO: 34805 - DNA, 494 bp, Arabidopsis thaliana columbia
tgtcgaaattcaactagtatttttcgtttcttctgaaattctactagtatttagattaacaactgattttgttccaaaaaaaatatgttaaaatgaatgatccaacaatacatgattttggttgtatttccaaagtatttattaaccacttattctctaaagttactatcctaaagtatataactgaatgtccaatttaaatggtctataccttatggttggttataaatgaatttagctaggtaatgaaaaataaaccgaataaatccccagttattttaataaatcggtttatttcaaatgcctcttattttttaattgtgatcttatttgcctaaaaccattttgatttttgagaaagttaaaacggccagttgtattgtatcgattgtaattaggtacgaatcttgtcattaagcattaagcagttggaaaaagaaaaggagaatggaatggggcacatgtacacgaattgtaatgatggttacacgaga

SEQ ID NO: 34806 - DNA, 552 bp, Arabidopsis thaliana columbia
tgcttatcgagcttaccatgagcaaagttatcgagaaatcatcgactccacctagtaaaactggaagagaatggcgcaggaagagcagaaggacgaactgcacacgaaagatgaacaaatcattgtgttcaaagcagaattttcgatatacatgttctcaagaacacagatgagaagaaacatactagcaaggcaattagacggcaacaaatcaagcttgtggggctatgaaatgagtaaagatcatgatcatcatccgcatccccccaggttaggaaataaggattacgaagatctagtccctcgattccccaatcactactgggatgtttcaacaaagataatgattctcagtaagatttctacattgtgcagaggaagaaaggaggatacaaagcaagacgaacaaaagtacccgaagttcatagaaatgcctgtgtagtgaaacaattgtcgtggagctgtgtaaccaggtttatattgctgcaatttgaacaaggtttggtgagcaatttcacaaaacagagactatatgattacattgtgctatag

SEQ ID NO: 34807 - DNA, 559 bp, Arabidopsis thaliana columbia
tgcaaacctgcaaggaatatgcagattacgatgatgacttcttcaaactctcctgctaaaacagagagctgcgcacgccgagagcaagtcctccagctaacattgtgcctaatgctctattgaatcctttaaccaaagttgctcctgaaaattgaacataagagtgactcaataagtatgagaataattgatctgaaaatgtaaataaaacagtaaaatgcaaagtcaataagtaaatctgaacagagaaaatagaaaaaatctttgaatccacttatacaaaaagatggattatacaatcaaccaattgatgtctttagttccatcaaatggattccataaacagaaaactcgaaaacagtgaaaaatattcaatccaagtaacaaacaagcaaagaaagtataagagttggtctgaaaatgtgaataatacagtaaaatgtaactcaataagtaaatccgaacccatcaaaatgaaagatggaatccaaaaaaaggaacagtcttaggattaaaagaatctttactagatttgcttcacatgcgcaagtgtcttgag

SEQ ID NO: 34808 - DNA, 400 bp, Arabidopsis thaliana columbia
  unsure (1)..(400): unsure at all n locations
cgtcaataaaatatagcccctcaacacacacacatagattgtcccacctgaccatcttagtccaaaaatgatttaatcacatgcctgacagtgccccatacgcctaatggaaggttngaacacagacaagaagnctaatttgatctcatccactaagtttggcgattagtgaaacgaaggaatgattgcttacaaaacaagacataccttgaatttagattgtttgcgtctcggagtaccancactagtcagcagacgaacaacaactgcgccgaaattaaggaaaagacaacgatagccangctcagattagacccgtccaagagagaaatcatcaacaatcgtgatcagatttccaangatcttaagcgaataataggttgatngaggttatcgtata

SEQ ID NO: 34809 - DNA, 497 bp, Arabidopsis thaliana columbia
tatcccgtggtttttaatggcaatgccggcgagagtatcgaacttggagacccggtgttcgatataaccagcgcatgtagaagccgaagacggtggagacgaggttggtggcgtgatacgaaggattttcgaaacagaacatgatcttgaaggactcctttcatggaaaccttgagatcgatctacgaatccataaccacggaattttctattgctaaattcgaaactcccattgaaaccagaaattcgccttcctcgttccgtcaacattgttggaactaacctatttctgaaactagatctgatcaaaaattctcggattccggtaaaatagaagaggaaaaggggaaaaagcgaaaacgagaaacgagggagagacgttgagagattgaacaagagaggtgaaaactcgtggagtgaaatggaaggaaattttctcgtagattcaatgtgaactttttctcgctggatttaccgggaaaaaaacgaacgagaga

SEQ ID NO: 34810 - DNA, 479 bp, Arabidopsis thaliana columbia
ttttattaaacaaattttcgaatacattaactaataaacataattatcatattttaatactataagcctatgcagggaatcatttgaccattcacttttcacgatgcagcccaataatgtggattttgcagcctgtcagggatcacttgaccaccgcaacaaccaaattcattattaattagaacttttagaaatgattaaacatgtgtgctaaataggatataactattaatttaaaatgtgtcattaaaaacttgattgattctcttgcaaacacgattgccgttattatcgtttgataataactacaaaaattgttttatatttttttggaccgtttaaaattactaatatatttatttatttttaaacaattttcagctagcatttttgatgtagttgcatctctattaattaaacgatttgagtttttttttgtcatcgtctatttcatcataattagaaataatatatatata

SEQ ID NO: 34811 - DNA, 752 bp, Arabidopsis thaliana columbia
cataatcaattggcattaaacatacgtatatcataattcataaggttaactaggtttagcaaatgttattctctttggataaacgtttagcaattgtttatctcaaatttaattgaaaatacttgtaagacacagttacaattagttctcaatttccaatctacacaagatttaaatctttctttagttcattctgatctatttttctctcaaagaaaatgtagtgctccaacttttctcccaagactaataaaaattttcttaattgcatgcaaaaatattttttccaactttaatcttatcaaacttagatctcattttatcttccgaataagatttttgttttggtcctttgcctaatcaaactaactaattagattagaagaaaaatacaattagacaaaataatatcgatgaaaaaataaaatccacaaggaaggacctaagaaatttcacgtccgaatcacaaccacagaaaaaaagagagagatattagtatataattaaaattttgtcgtctgtcttctctggttcactcatctcctatctatttaaagcccattcgatatcctaaaacactgtatcatcagaaaacacctcagagaattattcattcaggcatcttctcaaatgttggtttgtgaaaaaaacccacaatcaaaagatctctcatgtatgcgattcgtttctgctgttttgagtgtcgggttcgttttagctgtaatcgttttttccggcgttcgatttgaaaa

SEQ ID NO: 34812 - DNA, 824 bp, Arabidopsis thaliana columbia
taccaaatagtgaaaacatcgataaagtaaatgccctggatggagatctatcgtcatcgtccaaggtagatttcttaatctaacatttagaagtttcatatatatatattctgatttgacctgtaagcaagtatacatgactttaaataggtttgttgctttaactgaaaattgatacactcattgacttctcaggatcattgcatcaactctgaaattccttccactccacttagttttccattatgcgacgctggcgatgtattgaaaagattaggccttcctccgtcgaaagatttagactctctgctccaagatgcatcaaaaccttctcataactctaagaacaatttggaccagcagcgttcagctaaacctcctcatagtggattgcctcatttcccttggtcgcagccctttaatgggagctctagaaccaactcagaagcagcaaagcttgtgacctgcaagacactttgtcaaggacgatggctaagaatagccgacacttctatgagttctccagagggtataaccgataatttcgcaaatctggaatcactcactttcaaccaaaacttagtccctccactactgaaacagactattactggagttaagacctctcaaacaaaattcgctaacaccatttcatgccagtgcgcagaagcatctgtttctacccttcaaaattctttctttgttccaaaggtaaggatccgttccctctttatactactcctacgaaaactatataacagcaatttatctctcatcaaatgcagaaccagagggatcccagatgttgaagatgatggtatgtt

SEQ ID NO: 34813 - DNA, 370 bp, Arabidopsis thaliana columbia
  unsure (1)..(370): unsure at all n locations
tatgagttgaaagttgtggtgaagatatgagtttcacagagattcagactttgcaaacttgtttacgtttgagttatctgctaagtttactaagagagtaattcttatatatgtttgagttgttaatgttgtttgaaagtagctttggtcttagagtatcaaggtctttgattaaagcaaaggattgacaagatgactgacatccctgcagtcaataatccctgacaagacgcaggaggctaatcgtgtattccatgtgagacgttgactaacagaaactatatggtacggcgtatgaggatcgcggctgcantatgagggcataaagtncgcggaacaattgattctggactcgaggacgacgagaaaa

SEQ ID NO: 34814 - DNA, 505 bp, Arabidopsis thaliana columbia
  unsure (1)..(505): unsure at all n locations
tnnnnnnnnnnnnnnnnnnnnnnnctaaaggcgaccagaataatcgttatacgcatattgccactcttcttgatcaaataaccgcgaaccgggtgatcactgtcaacttattacgcggtgcaagtttacaaattcttaacgtaagtcgcagaaaaagccctttacttagcttaaaaaaggctaaactatttcctgactgtactaacggttgagttgttaaaaaatgctacatatccttctgtttacttaggataattttataaaaaataaatctcgacaattggattcaccacgtttattagttgtatgatgcaactagttggattattaaaataatgtgacgaaagctagcatttagatacgatgatttcatcaaactgttaacgtgctacaattgaacttgatatatgtcaacgaagcgtagttttattgggtgtccggccctcttagcctgttatgttgctgttaaaatggttaggatgacagccgtttttgacactgtcgg

SEQ ID NO: 34815 - DNA, 523 bp, Arabidopsis thaliana columbia
tgtcgtgttaatcaactcaagaagattatagtggaaaggagatggttttcactaatatcacatatttggtgcaggaaaatattcggacactcctaaatgttgcagctgagcagccagatacggagatgctcctacaaaaacatttttcttgcttgctgtcatcaatttggaggacgtctacccgcactgggaatgatcaaatgctctccttaaacagtcctattttcaacagacagtttatgggttccgtgaatcacacccaagatttagctagaaagccttggcaggggatgaaggtcaccagcttaagtagaaagttgttagaatccgctctccaggattctggcccgagtcagccagacaatactatttcccgttctaggttgcaggagactcaacctatcaataaattgggattagagttaacttggaattccacgtggcaatgatgattcctgaatcagtttcaccgatgattagtctgtcattgatgggtcagatcgattaatatgtgacgagcccc

SEQ ID NO: 34816 - DNA, 611 bp, Arabidopsis thaliana columbia
tatagacttactaatctaaaaaggatattgatataaccgtttacatatagttgaaagaaagactactttataaatagccataaatttaaataaattacgtaaataactatgatttttgttttgtgtgtataaaatatacgcctaataagactacctcaccagtcaccataccaaattaaataatcaaatggatctctaatcaaatggaaagattcgtacggagtatccagaaaacaaagaccaatcggtttatttttgttgttacatgacttatatctcacttctatacgacattgtaaattatactaatttaaaacgatccaaaaatataattataatagtattaagcttttatagtttctggcaacattcgagtaataaaaagtttagttagaaatattcgatatatgtagtgttggatacaaaccaaaggttccacatcgaaagtatgaataaagagtttttgatatatacactaaattcaactccaactagtcctaagtcattggatgattgtatcgttaactatttctttattttggtgtgaggacttatcatgaatccactggtttctgctgcttcggttattgctgctgggttggctgttgggc

SEQ ID NO: 34817 - DNA, 617 bp, Arabidopsis thaliana columbia
gccattctttaagaaaaaagaaatgaaaaaaaatgagggaattggctaccctttattgaaaatgaaacatgcatgatttgttttcgttagagatgagaaatataatgacataataaataagaatccaaagtgaagaagaagttggaaaacaaaaaaaaaaaaaaaagagagaaaaagattcttttgtccattaaaagagaatgaatgataacgatgtccattattattctccgtcctcgtgcttaatttaattatcttcccctctttaattaaaactaattaactattagagaacaataaataattaaatagtatagtaagaatcggatcgtaaggtaaatcaacggctgagattcattcaaaccagaggacacaaaacatctcttctcatctctcccactttttctcccggagacagttaacgtgattcgcccttttctctttgcccaagagctatacgacaataccgtcagcacaccccacacacacacacgagagacagagagagagagagaggaaatttgctactgagagatcgattcagtgagtgtgtgtctgcaccgtggaggagaaacggaaggaggatagatgaaactgactggagaaggaggagggga

SEQ ID NO: 34818 - DNA, 445 bp, Arabidopsis thaliana columbia
aaaaaaaatgtataaaaaaaataaaaagtgactatataaaaattccagtgacattatagccatggatgaatccccattaacggcatgcctcgaatatcctcttcttgtcgtcatcattgccagcgaatggactgtctgggtctatgatcggtctatttaagtctgctgcttccggttggtggtcgatgatggtggtttgagggcgttgagacggcggcttgatgtaacggtcagggagactggtgcggttgctctcggctcgagattggcctcgggcgctgggttctggccgcttttcgccgaggccactcttgttcttgatttcgatcttgttcttgtcttggtcgctcatgtgcctgttgtctattttggcttcttgttcttgatcgttgaggctggtcttgctctcgatcttggtctcgtctaggttgttcatgttgtctct

SEQ ID NO: 34819 - DNA, 277 bp, Arabidopsis thaliana columbia
cagagcaatagcagggcctaatagggtacatctctgactgctcatagatagattctgcagttccatatgatccatggtctggcttttctccaaagattctgtgacacggactttgctttttccttgtcagctcttactttcacttttgccaacatattttgctgagccaattaaatccaacaaggatatctactacactaaacatcaaacatgatccgttgaatatgtgcacaagttactaaaaatgagtgttgaaagttgagaggcagacccataa

SEQ ID NO: 34820 - DNA, 363 bp, Arabidopsis thaliana columbia
cgtcaaagatttaaacatctttaagaaatcaaatctttaagatttaaatcagctaaaacactcatgtctccttctctcaacactgaagatttaaacatctttaagaaatcaaatattttctgtacaatttgtgcttgttcgtagcttgggattgagattgatgtctcatcgatgtcttagttgtatcaaattcatgtttttcaagaagaagcagagcaagaaaggaaacaaacccctgaaagcagagagattgctagagccggttaaaaaaagagacgatggaaaagacaagaagaggcctcctttgcaagaaagcaagtcctattcatattggagctcatcacatgtaggcagccacgatgt

SEQ ID NO: 34821 - DNA, 546 bp, Arabidopsis thaliana columbia
caaactggttgaaatttacctctcaagcaagattaggtcattggattgtgggtttgagttttgaatatcctgcatacgcgtcaccgtttaggtgaacgttggaccaatatctgcttggagaaccccttacaaaggaggaaccgaagagacaagaagagcaagccattcatgtccctctaccaaatccattgtctaagaaatgagaagtatgagcctgtaaatgtgaacgatcaagatcttgtgagtgagattttaggagatgtcttggctggaatttagtctgtacaagagaaaatttaaacatgatctaatacaaagaaacccgaaccagatgatgcaataaaactttacgattgatttataaacctctttttgtgataactttatttcttatgcagataatatgagtctatacttacaaaatttataattaatcattcaacactgatgattttaagtctcagtaagaatttataatttttttgaaatttaacttgattttttttctatttcacagttttcatatggacaagcaattaaattaca

SEQ ID NO: 34822 - DNA, 578 bp, Arabidopsis thaliana columbia
atagatttggaatttaatttagtatctatataatttgtggatttacttactttttagttttatttttatttcttaacttatacagtttcatatttacttatttttagttttcatttaaaagaaatttacagctgtttgcttttcttttttccaaatttttttaaaacaaatctaaccggaagatccatagatttttgttatttagcaaacaaaaatgtccctagattctatgtacagttagttaacgaagattatatgatgggtgatgtaagtgagagaagtcacaggccgtgacactaataacaactcaattttggtttcacaatttcccgattcagacgcgaaatagggtcaacaaaagaaacgcaaattaaaagcgttgatagcgatggacggttgggatttaaacaaacactcaacatgctacggagcccacttgttaggtatcatctgacggtgaccgttggccggtggactcgggactcgcttctaacgcgtaccaaataataataaaacacactcgtgcgcattcattttttactatctcatagtattttcttaatttacgtgacttttga

SEQ ID NO: 34823 - DNA, 581 bp, Arabidopsis thaliana columbia
ggtggccacaccgtggtttttttactggttcttctccttctcctgcaccatctccagctttgttaggagctcccactgtggctccagccagtggtggctctgcttcttctttaactcgccaagttggggttttgggatttgttggattattagcgattgttttgctttgatttaacctgctttgttcaacttctatctctgctttttgattctttgatccacaagatttgttgaattcttttgccttttaaatattaatgttatttccgaatacaaaatgcaccaacttcaagagctttccgaaaacagtaactaacacaatgcaatgtacaaacagcatacaccacaacactaactaggtccaaaaattttaaaacttgacaaaaccaacttctctgcaatgtcgacgatgacgaatgccacaactacgttccagaaaatgtagcagcagctgcaaaatatgaagaagagaaagagttgaaggactgagaatttacaaagtaacggatgcaatgcttcacaaagagaagagaactgagaagttgatactatcctggcatgtagagacagaaatggtgctg

SEQ ID NO: 34824 - DNA, 551 bp, Arabidopsis thaliana columbia
gccagtgtgtcttcacctcctcggcttattggcttcagtaatgttgtctcttattaaaatgtttttgagggtaaaaatttaataaagcagaaaattgttagattaatctattgaattaattctttctcgtgtacaaagttacgttacggaagcattgccataatttcgggtggattttgtttgtttttttccaatttaaacctttgtatacacatgctatttgaaacgacactgtactcgcctttttattaattacgaaacgttgaatggagacattttcaaactatacatgcataaaaaaggttttaattgtatcaacaaattcaaaatttgagacagatagttaatgataattgtctaaggaaacatcccctctagactctagataaacttttcagaatccttaaaaattaaaattaaaagattttcctatgtttgataaaatttagttccacagtagtcaataacagtttaagttgcaaataattcagagattcgcatcgtgcgtgtcatactgtcatgtgacgtatggagtcaccacgtgtctaatg

SEQ ID NO: 34825 - DNA, 550 bp, Arabidopsis thaliana columbia
tatttttttttttaatcacatgaaaaatgataacaaaccgtgaaccaagtcactaaacataaatggttaaatggagttttttttattatacaaaacacaacattgctgtttagaaaaaaattactctactttctcattaacattgaattctcaaaggttacgtactactattatttaagctaaccaaaaaatcgaggttaaggttggaaaacttattccggtttagtttatagttccggttcagatctaaaccaacttgaaactagacaaagacagcgtcgttagcgcatgtaacccgacaacatcattctcactctctcctcttctctctctctctctctctctctcttctctcagtcggaagcagaggagccaaaatcaatggcggccaacaattttgcgacgaagctaagcagaaacaccaatagaattaccgtaatcttggtctacgcattccttgaatggcttctcatgttctttatcttcctcaattcctttttcacttactttatcgtcaaattcgcctctttcttcggtcttaagcaagtat

SEQ ID NO: 34826 - DNA, 583 bp, Arabidopsis thaliana columbia
cctgaatgttttgaatctctttttaccatttcgctacaaaaataaaaaaattgcgaatttcgcatccagatatatactagtattaagcatgggagattattcactcctcgaacacatcctatgactatgagttacacaaatcaaaatttttacattccaacgttgatgatcctttggaattgggtatttttccatgtcatactattgtaactttgtttgtaattcctctctggtcaatattactctattgtggatgcaagatcgcataactagtcctccatcgaatcaaacatgatcacaattttaagaatcaaactggacttttatataccgaaataaagttacaaagatttcgctgagatgttcttacttcttagagctagatgagtaagtaatattagggattttctagtgtacaattgatgcctctatacattactctccatcagatttataggacttgacctcgtctgcttctctgatattcccagaaatctcgctccttttagtttctgcttgaatctatcaaatcctagtgattttgcgaccacctacttctttattcgtccgttttgttggttat

SEQ ID NO: 34827 - DNA, 492 bp, Arabidopsis thaliana columbia
caaagttctaaagatcaatatgatctgagagactttgcctaaactaaagccaacaatacttcacaatgaacaaaattacatctatacaatctcaaagagtaagcatgttaagaaaagaaactcttgtcttcaacagtttcttatacacacactccaactctttctctgtttcttcaatctcatgttctgtttctctcaacttcttcagctcatccacatcaacttcttgattcttcttattaaaaatcctcgacacaattcctctccttgatcctttcttttgatctctctgatccttcgtcactacctcaatcaacaaagaaaccaaaacatcaaagctggtcttttcaactcttttcattacattaatgacatctccacaatctctcttcctcttcctcatcttctcctctgttttcttcaattgtttgacgatggttctgctcagtgctcttctcttaaacacgtacgcgtctgtctcacgcgccacga

SEQ ID NO: 34828 - DNA, 551 bp, Arabidopsis thaliana columbia
gattgctgttttgctgttttatgtacataacatttataatctaaaatctttatcaaagcaaaaaaatacaacatttataatctaaatttttttatcgaagaaaaaaaacatttataaatttttatattacattttgtatttatatgtataattgttttatattattctgatttgtatatataattattacaaataaatcaaccgaacatctggactgattaatgagtcgcttaactgttaaatgggcaccaaacattcctttgtcatttgatcaaaaatcatggcatttgaatataaacaactgagtttaaaaatctttctcttttaattggttggaatggaaaaggcaacaagttatataccaagtaatcacactctttctaaacatagcaaccagtttcacaaacgtcaattttatcctactttccatataccggcaataagcatatctatatcccgtttgtttgtttctttttgttaatttaagttgtcgattactcaaatttggttattatcatctttcaaatttcacccaagaaaatatgtattga

SEQ ID NO: 34829 - DNA, 565 bp, Arabidopsis thaliana columbia
tgttggtagcatcttttcctaagcttaaatttaagggtcaggaaatgagaatctactgttgatcggtagatacagatttgttttgaatcaatgctttaaatctagttggttctgatagtttgtgttagtacattgtatggtttctccaattaatgtactacgtttgtttcacctagaatttgttttgctcttttccaattttttaaatagaattattgattgatcttacaaataaatttttaaattgagagattatgtgtcgaattgaacaaataatcaccaaactaattagtaatttgagctggatatgtagtttagtagttcgaattagtgtccttttgtgatcatcccaatttaaatttgagaaaatttatgtggttgaaaagaaaacttgatgttgacccgtttaaacaatgggggtgttggatgtatgttatatactttctacactattaaaaaaaagtcactgagaaactaactattggagctttatttaggagccgagaggttaggttttgggatctggttagagtcgtactgtaaacatgagaacatgaatgggtgt

SEQ ID NO: 34830 - DNA, 376 bp, Arabidopsis thaliana columbia
tagttacagtccagggggacaccggctaaatttgttaccagcgagggagtagtacacaacagatcgcgcacaatgtgatgtatacatgttattcctatccagggccaagagactagctcttgtaagagagagtatggtaaccggcaaatactgtcaagccgccacgtcgcgctcatcgcttgccatacctcgcgtgtaaggtcaagtttatcacactgaagcttcgttgttgtagttactgacagtggagatagcagatacgtctccttgcatgctccagcatcaacactcgcatacccatcaaacttggctgacgataagctaaacaaggtaccagaggaagaatacaaggagcacaggaagaacatccaggctg

SEQ ID NO: 34831 - DNA, 446 bp, Arabidopsis thaliana columbia
tttttcttctttcccaaacaactatacgctttaggttatttgatttggtttggtttatctggttgatcattcatactcccaaaacaaattagatcatgcctatacaattttcatgcctaattaaaaaaactcacattgaaggactaggaaaggtacccacgtctgaattgcgtgttcctcacgaacgaatgaaatttcattttgatatacgtatttattgttatttagtcatacgtatgaacgtaacacgttacaacaatatatatctctactacatagtattatcttctgtttttatattaccaacatatttttgcttaaaatcattgcctaacatatgttcttttttatatggattggtttgttatacatgatattatgtcaaattagtaatattattactgaaaataccaatttacaaacggattgattgatttgtggtaatt

SEQ ID NO: 34832 - DNA, 483 bp, Arabidopsis thaliana columbia
gatatcattaaaacttagaatagtttggaacgcaatatgtgatcgatcgctgataaaggaatgtccaccaatcagcaagaagatgaaaagagcgtcatcagtgtgacccaaagttaaaagtgtttcaattttaaacaaattcacaataaatagagagattcatgtcgtttttatatcagtgttggttctttcatcatattttttatgttggaacctaacaaagacaatgtcctatacaagtattattcaccaaaacatttaaaaattcttctaacatttgcaaaacaaattctcctatttacaggtgaataattgcaaaacaaattctcctatacaagagatgcctagtgacgcggtgacactgctaccctcgacgtgacacacagatcttttaatttatgatgactctttcgctgaattaatcgttacgaatatttttggagagattaacgtttttgttaggaacttagcacattatgtatg

SEQ ID NO: 34833 - DNA, 511 bp, Arabidopsis thaliana columbia
cactaattagatgagcatcaccagtcgcaagatcaaacaccaagactacctaacctttttcgaagcttaacacgcagctaacactaatccgaagcagtgagcagaagcgcagacattaatgcaacaaggttgcaataaacttggatgccaaagcagaaaacaagtgcgacatgtcttggagatgcgaggagttactaaaggcgcaacgtatctgaggcagtccaaacctttgatcaagcgacgcttaaaactccatcctagacgaaactaacaagaaacaattgcagaagcaaaacaagtctcggacaatactcattcttcattgtctcgtccccacctttggcttgggagatgagctgaataaagtggtcaaaaggggactcgcaaaagtcagagaagccggctcgaacaacaagccacaccaacagacacacaatgaactgaacaagaccccagtgaagacaagagctagagaacgacacaaccagaggttgaaacctaagcacagaca

SEQ ID NO: 34834 - DNA, 599 bp, Arabidopsis thaliana columbia
tatttcgtatgagaattctaaatcctcatcaggaccaatactatctagatccgaaccaaaaacttcatgttgagtcatagacgaaaatgtgaagtttggagtcagtggtagaggatattcataatcaactcgtgttgattgcaatgaggaagcaccatgcatttcttgggtcgagccattgaaccaggaagagggaaaaggttcaaaaccattggactgtggcattgattgtgtaggatcttgaggttgcgattgagccatcatatgagaatgatacttatcaaaaggttcttcgaattggtctccattagatcctgatgattcttcgagtaagctttgaagataagccatatacaatgagacatcaggatcctcttgaaccgccatggcactgggaggaatcgaagaggtccaatttatcggctctggtctaatatcttgatgctttggaatgttttgaggtaaacggtcacatggttgaggactcgttagttgttgaacaaggcttttgaagtcgttcttgtctatgatgtagacttgcactcgcggttgtgtttgcgccacgtgaggtacggagttagagtcagcgtttagttggt

SEQ ID NO: 34835 - DNA, 514 bp, Arabidopsis thaliana columbia
gagcagagttggttggatctcgaaatcgactagggtttcgaaatctctgactgaagagaatgaatcaccaacgccgcgttggtgtcgtaaataaatatatacaaggagactggatagggttgacaataagctttactttaatgggcctaaagtttttattaatcggcccttctgcgccaattattatctaagtttttttttctttttttctttagtgggttcgagtcaatttagacaatgacggtcagggctcgtcttggtttagtgggttcgagtcaatacgaacagaacagtagagcacaatagataacaaattggtttagttaagatatttcatttcccttaataacaatgtttttgtttcaaggacccaacaaaattgtaggcccattaattaaaacaaaacccaatttagactgagttcaaccatatctttcactctctttggaatcgtttggacgaagctcagatatttttactcttgcaattcagagatttcgaaaccctaatccga

SEQ ID NO: 34836 - DNA, 483 bp, Arabidopsis thaliana columbia
cacatttgaaaatgtttgcattgaaatgataagaaaaattgatgtgtacaaaatatacacaacataccaccaataattttataatataaaaaaatctcataaacaaaagctatatgcagatacctaaactgccaattgaaagctatatgcatggattttaacgactaaattataacaatctaataaacaaaataacctcccaaaatcttgtgtctggatatatattttcgtttcttttacatctcgtttgtcaaaaatagatataaacatctaatgtcaaagcatacacatctactacaattttaaaataaaacatagaaaaactaaatatccactctatttctcctgaattcgaatctgaacaccctctcacgtcacgttaaccacaagatagtgaggagtcccgtgcacaaacttgtagacttgtccactccggtaaatctcgagatgagtgaaggagatgcggtcagacaatggaagatg

SEQ ID NO: 34837 - DNA, 568 bp, Arabidopsis thaliana columbia
agagattgagaagtttctctagttgggacctaaggtcggctgaagtagataacgatgattggacttcagtttcaaaaatttattagcctttagtgcgttggattatgtaatcttcaagacgattgaagcatatacaagaaaatagttttaaccttttttcctagaaatttgttaagtatgaacgattccaatttcatagaggtcaaatacattacatactagcggtagatcacatactagtgatggcggttaaaaacgaacctttaattcggttaccaatattgaattggatacttggacttgaaataagcggttagaagctcaaacgaatgatttcaaactgatttgtcctaaaaccacaatcaatttcaagtaaaccctgcttatcttttaccactgcaaaccggaccatattctctgatcgctagagaatcttattaagtttggtccacaacctagctgtaccacaatgagtgcaaacggtaccacaatgagtgcaaacggtaaccagagtcaattgaacgctcatgtgcccagtttagaccaaagttggaatcgtgcatatgat

SEQ ID NO: 34838 - DNA, 331 bp, Arabidopsis thaliana columbia
tagagaacagcatcagtgactacgatatctgttgatttttttgtattctcttttgataggtttgtacatggttgacttatccacgtacgcgtcaatattttttcgctatttcttgttaaatcggaagtttcttagctcaatcctaaaaacgacaaacaattgaataaggtgtacaataatttcattggtgaatgatttgtttacgtttataatgaatttctgatgttgttgacccctccaaaatcaaagtcccacacggcttataccctaaagcaatgagtggggaagacaatgaggagtaaaatggtagagaccggacgcgagaaaaaac

SEQ ID NO: 34839 - DNA, 351 bp, Arabidopsis thaliana columbia
attgtattagagcagactttttggatgaatgagacatcagttttggttggagcaatatttgtgggagctggtgtggctagttgagtaagagactaggtgatacgagtgtataaagaaatgtttcgttttaattaaagtaccattcatatttataaacacagttagtattttacatttgataaaacaacataaacgaaatttccttttatccctcccttaacaaagactactagatatttcaaaatgtttggaggagctagtaaggccattcagatagtgagcgctgttttgtttagttagattatgctctgtgctagccgacctcggggaatgagcctggtagagtgagct

SEQ ID NO: 34840 - DNA, 573 bp, Arabidopsis thaliana columbia
cttctctgtttcctcattttctagtttagtgactttgatcagcaacggtttttttaacgaaatgcatccttcaaactctcgtcatgacacttcaacttccttctgcgtgaacgagggaacagtagctggtggatcttcttctctgctgccatttctgttgtagcctgtcataaacaatgatgagagaagcattatcatatcagagtccttatgattttgttttcttgttgaaaaaggtgtatatttgtttgatgttttagtttgagatttctctcaccctggttttgaaagggaaacggtgagtttggacttgtgcacctgcgaaaactctcacatccataccaagactatcaacactgatcaggttagcttcctgcatgagattaccacaaagtagcaaaactgggttacaaaatgtggtaggtatgtaaaccagaactgtacttccagattatattcagagacatggatacaatacctctgcatgaagaccttctttttgcagagagctttaagtgcaatgctggagttaaccccctgttgttgaagcgctcgatgattgcagaagtagag

SEQ ID NO: 34841 - DNA, 505 bp, Arabidopsis thaliana columbia
gtgccaatcataaaacagatccaaaatagtgagatcctcaaaaagagtaatataagtagcacgtccacttattaaaatctcgattgagagtatctaaaagaaaaaaatgcatgatctgaaagaataggaaagacatatgacttttaaaactcgttcctcaatacaatttctgctgcaaatgtcaagtaaaaaggcagatttgggtactacagatatcaatgttttatacgtttaaatgtaattctacaatctagacagctagttttactactgtaataaagggtgagcttacattggttttcacaggcggattaactagagtgtcattctcggctaagaggttatccataaactgactaacagatactggcacatagctttgaggaattacatggccggctgcttctattggggaacaatctaatatagcattacttttcggcataagcgtaaaagctaatgatgccctgcaagtggaaagagtttaagtttaatcaatatgtat

SEQ ID NO: 34842 - DNA, 448 bp, Arabidopsis thaliana columbia
  unsure (1)..(448): unsure at all n locations
ctagatgtacaacagatcggaaagcaaaacaattattgccaaatgctattatggttcttgatataagacattaagtatttgatggaacatccaaagatgactatcttacgtacaaacatccaactaactacacgtagggcaaaaacgatagactaaacactcatcgagcaaagactatagtctctatcaactagtaaattttcaacagttcgtgaagaacacggcgaaaatcgaaaacaaaaaaaactcccctattttcgagaagattcaatggatngtgaaagatgttaaaaatatctgatgaggaaattactctgtgttcattctaatgtgaaggcaatgtggttaccgcgtcttgagaggtttcttagatagtcggaattacggcggngatctacccagcctttttgctggcggtttttttcacccgagctttactccctgtgtt

SEQ ID NO: 34843 - DNA, 105 bp, Arabidopsis thaliana columbia
tatggccatcggctgctggcgcatttccaggaacgcggcgtgtcggtgtccgcgcgaggtgtcggtgctgggctacgacgattcgcccagcgccgccttcgccgc

SEQ ID NO: 34844 - DNA, 552 bp, Arabidopsis thaliana columbia
gaaacaagataatttaatattttgaaagaaaaaaaagtcaaatatattctctttctactcgtgactgaggaagagaaacagagagcataactttatatccagccgattttttttcaaatttcttaccttttgctctcactaaagccatgttcttacctttatagtgagtgttatctaaactcttttgggtcttttgcaaaagaaaccagttttcaaagttcaaaattttgtttttaaaaatggagaatttagtgaagagctgcgcagggatcgagaagaaaagaagcaatttgactccatcgatggaagatatacttacagagtcaaaggagagaagcagcactagcggacgggtctacgaaagctcctccaccaccaccgtcgcttcgtcttctccaccaccaccaccgtcgcagattctgggttggccgattagaaaagcttcatttcggaaaaattcgaaggagagtgttaattttgatcataagaaattacccttcacgatgattctgggttaaagcgaaagagatgaatctgcaggttagtgagaaa

SEQ ID NO: 34845 - DNA, 489 bp, Arabidopsis thaliana columbia
tgtctttctgtactaattatcattttgccattgttatgatttttctctcgtgaattgtatgcttttcgagtgaacaaagttacatgcacctaatcatatgtttgaatggatttgatttattttggtgccatgacttgaagtcttgaggactacttttttttaactccaagagattattactacatatatgcaacaaaactttatagtttaatgagacaaagccataaaggtcgaaagaaggataattaatcgtcacatccatatccactagaggagcttttgttgtggtgcagaaaaaatgtcacgtggaagagaggtcatcatacagtggccgaatggactcatggtttagtactactataatttcaaaatataaatttgtctacaagttgaaagtgacttgaactatatatatatatatatatacatcgtgcttattttattgttaaatacaacatatggttaggtaaaatctcctactgaatatgt

SEQ ID NO: 34846 - DNA, 585 bp, Arabidopsis thaliana columbia
  unsure (1)..(585): unsure at all n locations
tagtatatcggaaatttaaattcactatttatttttaacttaagtttcatttaatgactctcttgttcaattattcttagttgactactcttcttatcgtgcaatggcaaaaaaaaaagatgtaatagatgatatataaagggttagctaattccaatgatccaaaggcaaatttgttctgttttgactatttagttccaagatttctactattgcaaacccatcgaacgttcacacactattagagttagaccatagaataattttatttgataaagcagacaaaagatgtgattgggcaaaacatgaacggcaatatagaagactcgacgtccaccccacctactcacccccaccctactttcatggctcccactagctcggcccattggcgtttctaactaatgagaacatataattaccgtacattctctttaattcggcttctttttatgagtttgtcgataatttttcaaagtttttccatttatcattctaacttttaactanataaattatactcataataataatgcgttgacanagtattcctacttagaatgatgtggttttcagcgtaccatg

SEQ ID NO: 34847 - DNA, 556 bp, Arabidopsis thaliana columbia
cttgttggtacacatgtttgatttgatttacaatgaccatttgtccattatggtagctggctggctagctgcattgtttcagcagcctgtgatcaagtgagttttgttggttctggtggtatcaatctctggctcttcttctatataatcatttttctgtgtaaaaatttctaaagaagaggaatacttttttaaatatcattagaagacaaaatccattgtaatgatttccaccaagctaaaggaatttagctgaaatgtaaaataacacgtggcaagtaggaagttgctgggtggccaccggataagcggatagtgttgttgccttttgaagacttgttggccaaagattgtcggaaggtgttgacctggagtcaactctaataataatggatctttagcagagttcttctgacgaaacactaaaaaaaaaaaacacatcacaaacttctctatacagatcatttggaggaacatcgatttgcagggaaggtgagattattgtattgatcatttttatgttttgtttctttaattggtttctgtggaagtaggt

SEQ ID NO: 34848 - DNA, 476 bp, Arabidopsis thaliana columbia
gtagttaatataattttcaattagtaaaacaaagtaccacgtccgtgcttagcagaacataatgctagtttaaatatatattcaaatatgtttaattaatattgtgttatttttttaaacttgagtgttgtttcattttgcaaactctaacaacaaactttggttaagattaaagtaaatgcatttgttacagtctttcataatttttcaactaaagtgattagtgatgctgttgtttcatttccaaactctaatcacctaagctatggtcaaagctttaaagtgagtgtatctgttacagtgtttggataaatttccaactatatggatattgttgattcacaacttacttttttgagggttattataaatttaggcatattttgggccaaaaattataaaaaatgcatatttcaattgggcttacaatcctaggcatttttggcctattaaaagtctttttgccctgaagttca

SEQ ID NO: 34849 - DNA, 584 bp, Arabidopsis thaliana columbia
atatatatacataaacgcataaccgatacgacatcgttttaaactcaaattaagtcaacaaaactaaaacacgacaagaaagggtttcactgtgttcgataataatgtcgacaggagaagcgataccaagagtcgccgtcgtcgttttcattctcaacggaaactcaatcttattaggtcgccgccggttcctcaatcggcaactccactttcgctcttcccggtggccacctcgaattcggtctctctcctctctctcttctctctttatatcacccaaatcttgatttgatctaatctttgttctttgatcaggagagagctttgaagaatgtgcagcgagagaagtaatggaggaaacaggtctaaagattgaaaagatgaagcttttgactgttacaaacaatgtcttcaaagaagcaccaacgccatcacactacgtctctgtttcgatacgtgcggtgttggtggatcaagtcaagaaccgaagaatatggaaccagagaagtgtgaaggatgggattggtatgattgggagaatctccaaagcctttgttttggcacttgagaaattgtttggaagt

SEQ ID NO: 34850 - DNA, 294 bp, Arabidopsis thaliana columbia
tacgctctgcttagttgctatatcttcaaatgccaagcaacttccactcgtttgtgtatctccgatttaagactcaacacactcctatacaaaatataatatatgcttatatcattcaagtatattataatgaacccactaaaagataaagataaactacatgtaacttaataaacaaggaaaaatatattatacaaataatcattctcctataaattcattaccctcaactcaccacctctcacaaactcaaaaaacaatttgtgccttctttttacattgtctccataacca

SEQ ID NO: 34851 - DNA, 565 bp, Arabidopsis thaliana columbia
tggagctggttcacctctttcgccaataaatccgcctgcagctgatggctctcactctctttctgcaaagtctctagttcctcaacttgtctctgtgcatctgcctgcagtttctcgcacttctctttgctttccatctctaatgatgaaagctttaatgacaattcttgctggaagatatacaagacaaaaaattaacattgcaaaaatgcattagctatagtgcatttatagaaaataattttataccttcttatcctctgatgtcttcacactttccaataaagtttccatttcttctttcagctgcgaaatcgctgattctgcatcagcatgtttcgaaactagtccttttgcttcagactccagtttatcaatggtctggcttgtagagcagcgtacgcccgaaagttgagatattaaagactctttatcattctggagctcaactattttttcatttagttcattgcctgcagattccagagcttcttttgtggcagctactctaaataactcgccctggagattatctaatgatctttgagcacgatccaatgcaaga

SEQ ID NO: 34852 - DNA, 447 bp, Arabidopsis thaliana columbia
gtttataggaactcggtcagcggacctaggatagactttagcaaggtgctctcttctgatgactttcacatttgaagactttacacctgaaataggccgagtaggatcaaccatacagcttttaggcaaaccaacaacttcagttccatctgataaagggatcttatagtttgctatatctgacaataaatttacatttccaataccagccttgaatatctgatcaccaataggtacccccacgtcttctttaataatagcagaagcatgatttacagaatctgctttccctggcaaagcaggagaggaaacatgttgcggaagaagcgatggccgggtgaaatgctcaaccgtctttgggaccaccagcggtttaccagcctctactggtaatatacttccagctagtccagctgctaaattagatgctcttttaccagtctgtac

SEQ ID NO: 34853 - DNA, 372 bp, Arabidopsis thaliana columbia
caaactcaagcattttggtttcttcatcatcacactttaaacatcgatttcggttatgattactttgtgtttccatgattgatacgtgtagttactattcttacaaggtctacctcaaattagctagcattgcatcccatgttcttttgtacgtccaatatgtggctaatataatatactaataatggtcatcaggtcatgtataagtataactatgatatatactagacattgattaatttgaggctaaggagaaattaaggtatgtgttttagaatccattctattaattttagaatcttaaatacatagatgggattcacgaacataccaacacacttcgtcagctcaaaaacaaaacgaccacatgcc

SEQ ID NO: 34854 - DNA, 382 bp, Arabidopsis thaliana columbia
tagatgatacgatcaattgcgagcatcccaagcatagtaatatattcattcctagcgacatattattttaaaacgaacgatggctttcaaatattcccacaagacataaaacgacaccaatgcattgaaaccgacagttccaaatattcaccccttgcaatcgaacatgtgtgttacatcactatatatagacctacacgtgcatttaactagcaactagaacttacagcctgaaacatcattctcaatcaaatggagcgaaatattccgatccatagaggtaactcatatcacagagttttagtacaggttaatctcaagtagtcacctaattcgcagtgtataactactacctaccacataggagatgagcagtccaaag

SEQ ID NO: 34855 - DNA, 574 bp, Arabidopsis thaliana columbia
atccccgggaattaacattcattagactgttaataacataaatatttggcttaatgttttctttgagaagatcctgccacaaaattatgaattaactacaaatctcaaatgcaggatggcagacaaaatcgagcgtaaaggatacttacgcaaaaatacagtataattagggaattacctcatatatgtacctcgatttaacgtaatcaccacacaggccacaaacatctatcatcgttcggcatatatacatgttaggagtatccaaaatctgtttgcaggcttcatatgctgtcataacagagaccatatctcctttctttccgaaaccatgaataattctacaaagcaataactctgtatgcggcaaaagacatgcgtatctgcattcaataatcatcaaatcgttagcagaacacactacatccagcattcttgtaataactttctgaatttgaaaaccattaacctgaatcgttatgtgggaacaaggcttacctaatagctaattgaggattggaaatttcacacaactctttacaacatcaaaaggatcaccaactctttgattttg

SEQ ID NO: 34856 - DNA, 380 bp, Arabidopsis thaliana columbia
gcctgccgtttctatatttcctgttaaagcacgaaaatttatagaaagtggaaaccactgaagacgacctgtagtttatcaattcgagaacaagcaagcaagcgatctcaaacgcaagagtcaaggactcaagaccttgctgctaatggacgcgtaccagccaccacctcaatacctgagaccgccgtctggaccaccgcctccgacggatccttaccaccaatactatcagcatcaggcgagaccaccggtgcctcctcctacgcagcccggtggtcctcctgcatggtactccaaccaatttcatcaccctcactctccatcgccaccgcctccacctccgccgcagtgggggccaccttcaccgcattatcctcaag

SEQ ID NO: 34857 - DNA, 827 bp, Arabidopsis thaliana columbia
tgcagtcatctttcaaccattcttcattctagaaggagttcttggtgacttaataaatggctttttacaaatattttggtgtaggacttatattatacatgtgtgtggcgaaccttctggttctatctattaaatgccttttctttttgtagttttttatgattcagaattcagatatttgattttgtaatattatattttcttataaaagagaataaaatttcaaatttcctgtctacacttgccgaccaacgttcctcaagtgtcacatcttctgtgcaagagagacaaaactacaatctgttcacacaatgtcatgatgtttataattaatcttatcatcttcattcatatcaaactaatatcggccatccatccgtctcaataatgtaattgcatacaatctttgtttaggacttgctagctatttcaacttattattgattacagattagatctacaatttgtaaagaacttctaacttcaaaacaaatacaaaaaaaagaaagtgaatgtaaaatttctagtgtcataatttggaatagttgaagcattgaagttacaatatcgaacgttaaaatattgacactagatagtacattaccaccaaggctttctgattattcttatcatgttatatgaatagtaagaaattacgtagaacgcaatttaagtgtgtgcgagtcaccacaaattaaaggagaacaaattcaatgtttcaatcgctggttccgatatacaacttatgcatgccatggcatgaatgcgagatccaattatatactaatatatacacacaaaaacgtatgtatatattgatggaacta

SEQ ID NO: 34858 - DNA, 436 bp, Arabidopsis thaliana columbia
  unsure (1)..(436): unsure at all n locations
gttggtagagagattcagtgtttagtagttgcagagtcagtattgtaggagtagtagtgacaacgagttcgaatagcatggttttctaaatttggtattccgataagatgttcattatgtcttgaggttttatttgtcgagaatcttcaaaatctgttatagcttgactgactcngacaagattactgaaatgangtatattttgtgtatgtgaatgtcctgaatgttattttttgatgttttctgttttttgctctacggatgagacgaatgtgtatgtttttttttattttattgtaggttcttagatcctgtgggactttttcttctgtacattgtgaatagaaccaatctgtacggtcggagcgaataacacgacattatcacaactcaagtgctactacatactgtatacgtctgataaaattgaatgtat

SEQ ID NO: 34859 - DNA, 355 bp, Arabidopsis thaliana columbia
gtgagaggaggaccagaagaggtgcgatcagaaataagtctctcgggatctcgatctctgtcatccaatcctctagcgtttgcggcatttcgaatcccggcgacctccggtaaggggagaggtaagggtaagggaacggcagaaggagagcgaggaacggcggtgaaagcgctgggagagcgagttaaaccggaatcgaaggtggaggaagaggtagaagcacgacgttctcccaacaaaacatcgtcatccgtcaagtgacgaagcttccgctgacgggtgagcctgccacggttaaaacgaaacaagcggcgatgaaaccgatcccgatcctgattacgatctggatccggag

SEQ ID NO: 34860 - DNA, 520 bp, Arabidopsis thaliana columbia
taatcctatgactaacctagctcaaaaattttaggacaaaaaacggaatccgcgggataaaagggggatggcagtctcatgtcccccttgccggtggggactctgctcccgggttggtgcccatgtttcgagaagtttaaggcaaatggtgtgcccatgttttgagaggtttaaggcaacttgtaactatatgacattttagtttaaacatatatcccaaacctagagtgtgcctataaaagaaggaaaattgaaattaaagctttaattagtcatttttcgtcctttaaaaaagaagaagagtgaaaaagatatatgtttttttgtaatttttttacttaacactcaattttgtggttttaacaaaatatgatttaaaatactagaaaatcattataattagtgtattttacaattttatattttcccaacatgtaacaaggaaaaacgatttttcttatgtgcatattagtatgtatgtaaagtttcgtaatatgggtataccatctggtttaagaga

SEQ ID NO: 34861 - DNA, 565 bp, Arabidopsis thaliana columbia
tctaaagtctaattaaatttatctttctggtatggttattcgattctccaataatctatgtttcaattttcaagttttgaaaaacaaacaaacataacttttagctttttatgcttctttaacatattaatcaaatatgcatgtggaacattaaaatcaaagatgataactccatataacatattcttaagaatctacaatgactttaacctcaccagaattagcacctggtgatttttaactctttttacttttgttttttattggctcttctaaaaagatgttcgtaatgcaaaaaaattagcttccaaaatttataaaagctatatagatcttacttaaaagatttatcaaatgcattgagctcttaatcactttctaatgaattcttttgttttacatatatcatgaatcatgacaaataacattcaatacctacatacaacttaacaaaattacatttaaaaacaaaaaacccgcgacttggccgggtttcgccgctagtatggataaagaccctttggaagttttacgtttagcggaaaaagaggcacttttatggcag

SEQ ID NO: 34862 - DNA, 597 bp, Arabidopsis thaliana columbia
ttacaaacatgtcagaaacaagcacgagaattccgggtatcacgtatatacctgcgtaagttcatccaacctacatactatcgtgtttttcttacaaactcaaaagactagaatctcatgtaaaactgaatgtggtttcagggtgattttgtcgaaactgatgaagatttcacttcaagaccgagaggtggactaaagaggaaacaagttactgcggcaatgctggtacgaaagagagtcatgcctcctcggtttgatgcagaagaacacgaaacttgctagtagtgtccaagccttaattatattttctgtcttaagatacgtgaagtagttttgtgtaaagttctttttgtttgtgtgttggtaggaagaaatatagaactacaatagtaggtagtaatataagtaatgttgtgcttagaatctatgtgcgtttaacgttttatctcccacggctttaatgtattgacccaacgtttgagatataagtaatgttgtgcttataatctatgttcgtttacctttttatctccacggctttgatgtcttgaccaatgcttttaaactgacccaacagtgaaccggctacttttgggt

SEQ ID NO: 34863 - DNA, 608 bp, Arabidopsis thaliana columbia
gccggtcgctacagttatgttggatactaaattataaaataaacttctcgctcgtcacgtgtcattgcatgcatccaaagctcatgcttcaaagcttagccaaacttatttttaaaaaagcctatgttctgtgtaaaagtgtcatttacgagagtttcttgtttaagtttaaccaatttcacttcctcaaacgaaatacggtaattggtaatatcctctaaacatgaattatcattgactataaaaattagtttcgcaaattgcctctaagcaccacaagtgtcacgtaacgtgtcatttattcatgtttattgatttagttaattaaaaacattgtagtttaattattgaagtagtacaaagaatagggactaaattgcaatactctgaatttgtttttctcttttttagaatcatccgactttttgtttcacggtttcctcctccagtaaactgacgacgatacaagctctctcaccaacggcgacagtatctttgccggcggcgggacggcttctgcttaatctgtagctcaaactaaaaattctctgggtattactcatggtgatttggaataacgatgatgatgattttttggagattgatac

SEQ ID NO: 34864 - DNA, 481 bp, Arabidopsis thaliana columbia
taacaagtaattgattatctcttcaatctcgagtactaaaaattatttaattgttgattggagtcaacttagcataatcaacacataagaggagattatgaccggccatataagccgccgcctattgttagattcctaagttatccattcagttgacctatatctacggtaatgccattgccttccctttggcttttatgtctatcattgtcattataaccattatggcattcactacaaaaaagagagaacctctgcttttgtaatcctccaaaaccctcaattcacgatcatgaatcagaaagtcaactaagagtagcaaaactcaggcctcttcaggcactacttatcggtctcacagagactatacaacttttccttctttctttctacactttctaaaactatctagtatttacgatgaattttggatcggtatatatgtatcatggagctattaacaagacctgattttggatga

SEQ ID NO: 34865 - DNA, 353 bp, Arabidopsis thaliana columbia
  unsure (1)..(353): unsure at all n locations
tgtataaacatatagtcataacccacactagctgttaacatctattgaaaaaaagttgtacatgaaatcagtggcaagaaacacctgtatgtcatgattcatgaaaaaaattgaatgtatcatgatgaatctctcaactctacgaggatttaagatgcgatcaaatgagaacggtacntcgccttatctgaaatcttctgnacatagttcnttacaacggcacccgtgctagcaacttgacccggagcaacctgttcatcaagaaccgttcttaatgtgatgggtgtataactcacagtgttcaggattctgatctgctttcagctaactgagtttttggaccttgcgatttg

SEQ ID NO: 34866 - DNA, 771 bp, Arabidopsis thaliana columbia
agaaataaaaagatctcttaattctaaacaatctccttcacagttcacattacatatggttacatatactatagtaccaattttaattcttaatatcttaacatattttattaaaataattattttggtttgattcaatcataatagttagaatttactttgtaattagaattattaaatatgagtcaccatttaattaaccttaactaaatttgaaatcataaatcaagaaacatatatatgaaattagagactatttaaattcaaatcattgataagttaaattatatgaaattagaatctaattaaactattacactatacatggttgatggttttctagttacacatggcgcattgttattcattaatattcaaaaaaagtatatcttactcatttagtataagattgttttgggttaaaatggtaactttttattattttcaataaagtaaagctaatctagtttttataaagatacaatgatacatattatgacatatatagtatatatactatatagggcaaggtcggccaaaacatgcaagcagtagcgctgagttggctcattcatatcattttaattttgttagatttattctttttacatacatgatttataatcaccaataagaaaaaattcaacagattaggaaatattgcacttatttggaagggggaaaaaattgactcctactagtgtgggaccatgtctctttttccatgctctttataaacgacacaaagcgataggatttttgtcagaagga

SEQ ID NO: 34867 - DNA, 427 bp, Arabidopsis thaliana columbia
aggatcccgatggaaatgcgatagcgaatattgattgatggaaaatttcaaagtttaccttctatattgtgcaataccagaaggcaaaaacgtataacttaccatagactcagccttgttaggttttgaggcagctgccttctttccggcagtggaagagcgggcactgcagttgacttactagtagccccacctctgcgaccacgggaagctggaccggtccgtgtagtagggccacgagcccaagccccatcttgaggtgattttctagtaccagtttgaccagccctggcgggtcttcgactagtaacatcacgggtaggaggcctccacacatcaggatcatccataggaccaccaccggatgaagttggatactcatccacgggctgagaaacaaaggatgatttggtattgataggtggag

SEQ ID NO: 34868 - DNA, 521 bp, Arabidopsis thaliana columbia
tgcttggaaaacaacatacttgatctctatagaagtttacttagtgacatttctctgtgtttgcaacaggactagcaatcaaagatttctggcaggtggatgatagcacaattgtgtttgtcgctgacccgacttttggtaacaccccaaacctcattgcttaagttcttgaagtatccaaatgggaaactgattgtgataaccggatttgacacagggaacatattgaatttcaatgttggagctacggttgatttagacatacctcgtagtttctggagtcgactggctgggaaatacggcaatatgttttactggaaagagaaggcaagaaagctacctcgattaaaaaaaccgatgatcgccactttctttgttttttgtttgcatgtctaaactgtttacaatatggcttgaaaccagggagaagatgcatctattgaagctgcagtgatggcgatatcaagttgcttacgagaaccagttggtcgaaacaactgtgcagagaccaatgaagtata

SEQ ID NO: 34869 - DNA, 570 bp, Arabidopsis thaliana columbia
atcttctggtgggtcagaaatggtctcccatactttaactcgacatcaagagatccttcaagatctgacacaggtactgttcctttcctgactcataccatttgaatatttgccttattctatagcttgtgttgattatatactgattagtaatgaaatgagtgttatctttttaaccatctgttcacactctgctcttggactagtttatgactcaaccttcgttgtaaatcagtcttgttcctgtatgtatgactcattcaaaatgcaggagttttatcgacaccgctccagtcttagagcaaaacaagagcatgcttcacttcttgaggactttagagaatttgatcggactagattagatttagaagatggatatgggtctgaacaagccctgatcaaggaacatatgggaatcaaccgcaatacagctcaggtatataaactctcctttgcgattaacctttgttagactctacagctgtagcgtacaataggcctggctttctcaagttaatcgaacacgtcatgacttatgtgagctgactattatataaacggtgcagatgg

SEQ ID NO: 34870 - DNA, 548 bp, Arabidopsis thaliana columbia
ctttgtaacggaaaaagccttagctttctcttcgatctcatcacgagtgatctctttctttaccttaaacggagtttcagataacttagcgtctaatctagcaactagttccgtaagattcctaacgagttcctcaagtctatgcaatgaaacaccttgcctgtcggattcactgctggtcactactccaggagaagcatctgagttctcgtacggaatcggatcggactcggaagcggtgacatccgaataagacggcgaaaggaaaagcaaaataagcgagacaaagaagaagaaaaatgcggacttgccgttttgagaatccgccattcaagatggtaagaaaagaagcagaaaggtctcccttttattttcctgaagtcaatcagtaaccgccatttatgcagatctacaggagatggagaaattcggatctggaaggaagacgatttatccggtcagaatctatctgagattttcttttgtaagtcaaacaacgttgagctaagagtaataaaataaagttgtctgatttgagatctttttgt

SEQ ID NO: 34871 - DNA, 597 bp, Arabidopsis thaliana columbia
gtacaaaaatgtctcaactgcttaggaaaggagtactggtagactccttaggtttatgatttgatcatctttatgcttctgagaactcgaaaacggtttggtttttgtatacagcttttactaatattaaaccctagaataagctcttttattcctttataaatttcctatttttataaaggggacacctaaaatatctcataaatgtttgggaaacgttctccatcacgttttttgcttgccgtccctctgtttcatgaaacgtttagaggatgtttccctgttgtccccgtgaagtaccagcccccatcacgtttcaggtacgtgagacgcgtgcatcataggttaatagtgttgaatggtgtggatttgaggggaatataataaataatcggtcctgctttgtaataaatatggttgtgctgagttcggtaattctgcctatacctctctagctagttagatcggattgctcgatggcctttgacatgaacaacttcagccgtggtaacaaacattgaaaccacaatcacatggttatataagatgaacttgcactactaggatttgatccagaagcaagaaaggggtttataa

SEQ ID NO: 34872 - DNA, 223 bp, Arabidopsis thaliana columbia
  unsure (1)..(223): unsure at all n locations
tnnnnnnnnnnnnnnnnnnnnnnnctaaagtatatcttattatcattaagaggtgtgacttcataattacttatgatttattagcataggtaatcctaactcagttggtgttttccttctagtataatctgtagagcagagttagtaacnngcatattcactttggttttatcatagagtatcttagtttttcaatctatggtagatggagaatttgctggga

SEQ ID NO: 34873 - DNA, 568 bp, Arabidopsis thaliana columbia
tctgctaaaaatagacggacagggtccacgtcaagacgtaatgggaaggggacctcgttacccaaaatagaaagatggagttatcgtcaaacaagtcacgtctgggtttattgagtggggttaagtttttggaccagtctctctactttttttttcacccctcctctaatatatagtaagttactgttgtcatagactcttagtcattatgcattttaaaggttttcacttttcagcgtgcaatgaaaaatttggttcataccttatgccgtaaactactataatggattattatgttatttaaaaactcatgtagatgttatttaagtgttgtatcacttatgtacacactaataaatttcagattcataactaatatataagcactcaaactagttaacattttgtcatttgattaagatagtgactgggagtaaataactttcatccttgtaagttgtaaaacctcatgacaccattaaaaccatagtttagatgcctaatccaagataaggatagcatcagaagagaatatatagtccatcgactagatttggaggagtgttga

SEQ ID NO: 34874 - DNA, 487 bp, Arabidopsis thaliana columbia
cacaactttgtgattaagaaagtcccagtgagtttgacgaaaaagaaaaagcaaagtctcattgttaattaatggcatatatacttactagatagtttagaagctctatgcgtaatccaaatatgcagcttaagattatactattggagaagtttattactcaataaactaaatcagctatattttgctatatataccctctagccttttgtccatttgaagagcttaatatgaaaaatgaccaattttaccatagatttcctatggcgagtagtcctctcccgtaccataggaactacggcacgtcttaacgcaaaaggaagtaaatagactttgccaaagatgtttccttttttaagaaattataccatcttcacttgtctcttttccatcatgatttggagactttcaactattcttttaacgatcatataatctttttctgatggttgtttgcaactcacgcatcaatcttttcaatatttac

SEQ ID NO: 34875 - DNA, 673 bp, Arabidopsis thaliana columbia
ttattttcaactattcgtagaagttagaaatatgcaggttaagagtacaagacatcctcgtttccattcaaccaatcatccgacaagtttgtatagacacgagttaagtcagggtattgaagtatacatatcttacaacatggaataagagaatgtgtgtgtgtgttcacaaggagtcatcacctaacagcctcaggtgcagaattgcagtagggtgtgtgcaagcacacaagtctcgtgaaagtcagacacacaaccgcacacgctagtcccagcaccatccccacactgcctttccttctctctaacctcactgctctcttaatcacctgccagaagctgggtagtaatccaccgcacgccaccaccatcacgtggtccagtccgctgtaatctatccctgctaatatggatcctatggccgatatgggtcccacaaatcctatcaaagctgctgctgcaagagctgcgtgccaactgtctgtagccccaaagacacagcttgcaaccgctgtccctcttgggagcccgtgtagggaaaccgggagaaccatatgtcgccaaggccataagcatttggagcagccaccccgagagcaagcccctcggctaatgcatggaacccaccgctccacacgctaataatgattggagtgttatcaccaggggatcg

SEQ ID NO: 34876 - DNA, 310 bp, Arabidopsis thaliana columbia
agggggggttgtagatataaaaatggagtagtcgatataccatatccttcaaaaaagttatacatcgttgcaaaatgaaacatatgtttttgtttcatattttcaaatttgaactaaaacatactaatcgtatagtgtataaaaaatatatatatatatatgtaaaaagtattcttaactatacaaaattatgccaaacacgtgctaatatagcatcatcaatagatagatatcaccactaagatgatacattatgcatataacttaattattaaatgtagatctaatgcagataatcaacccgcggtgt

SEQ ID NO: 34877 - DNA, 1098 bp, Arabidopsis thaliana columbia
ttacttgtttgtttctcaacttcactaattgttgattaattaaataatcagaaaagagccgtgaacaaaaatataaacttttattacaagttcttcttttggataaaaacttttgttacaagttccttgcaccgatgggagagtgagccttagttcccaagtttgtgcctttcactaatatatgaaaattgaaatacattaatacaagataattaattattaatgaaggggatgcatgaaattttcctataataatatatatttttcttttatttgaactggcgggttgattattaagttacgtatataaatatccaataaaatgttatgaaaattagctgtaagtttcactttattttcctcgtcattagttgctaaaatactaagtagaagttgttgataacatgtatacatcaaataagagctgacacgtagtgtgaacatggagcaacttagcgcacaagtcttgtaattcttgatcaacagtggtcactcttctctatataaacccaatactctctgcttctctgcaaaaattacaaagccacacacacagatatatacatacacacaaacacatacattcttacttatagtctgaagaagatgagctccggagaactgaagccgttcaagaagaaagaagggagtgtgatcccaaaggagagagagttggtgaagactaaagccgccaaagccattttctctttgttccgtccatcctgcgacggtaaacagagttctcagccatcccgtgacggtgacggtgaccatgacggcaagcgcgtgtatcccactcgctactgatcggtctttttcgtggtgtttaaagatattttagccgtcaagatcttaaatgggttcttctcctcctctgtttttctgttgtttataaacttaattaggctaaagattttctgttttttccttgtttgttggtttctctttgcttttttctttttacagtctacgagaaagggagatgatgaatgatgggcttaatatctttaatactcttgctatgtaaaaccaagtagtactatatttgaccatgatgcgttgtgattaattatggtacatactgtttttatcatttta

SEQ ID NO: 34878 - DNA, 524 bp, Arabidopsis thaliana columbia
tagtagtttctatagcatccacaagagaagaaaaaaatggaagataatagaaaaaatgattaaatagagaaaatcggttaataaaacatgctttgattttagcttgatcgtgaaggggttggtaggagcaaattaaggaatataggattttttacactttttttttttgcatatcaatattggcttgaattttattttttagaaagtttttctttccattactaagcccatattttttggttaataattaattttgttttttttaaaaaattttttctgttttgcacgatctcaattttgttttgatttatttttatgaaaattaaattattaaatagaaaatgtatgtggcatgtttttattggtgctttctaatttgttcacatcgcattttcattttcttttaacagtttaacgaaagctgtcttaaaagataaaaactgcgtttaaagaaagggcttttggataggtaacagaaacagcctcattgcactctagaagataagcgcagggtgtttttcgta

SEQ ID NO: 34879 - DNA, 599 bp, Arabidopsis thaliana columbia
acttcttaacttctgagcaggtgttacacgaatttttgcaagtggaagcttttgctaaattgagcaatgcaattggaaaggtgggttccaataaaggaaaatcttttatgaatgcaactttcttttggctgtttgatacttgaatcataatggcctttagaatggtcctatgtaggtcccctataccctgagaagtactcagcttgattttttttgtaatgttattttccaatcttcgctcatcttctcttaatcagctcttttgttaggcatcgtcaaatcagctaccttccttgacatatgatggaaaataagccactgtagtttgaacatgtctgtcctctagttgtaagatttgagacttcagtagctagaagaggagcagatgtaaaattatgtagaacttaaaatgaaagaccattaaaaatcaagctatcaaattgctggatgatcatccaccttagttcatattgtagattctgttcgtcaatagccgcaattctttgagtctttgcttcccagcctcctgcatataatgcaatatttttcttgaaatacatatatttgacttatggacttggtgtggcgacaggtgatag

SEQ ID NO: 34880 - DNA, 498 bp, Arabidopsis thaliana columbia
gagtattcaacaacgagatgctgagatcattctaattaaactaggcgagaattaggttacaagtcgcatagcatatcttgttccacgacatatcaaatgtttatcctctttccactatggttccgtaatttgaagtttagcgataaatgctagcacctggccatgctgttataaactctcaagttatcgaaaagtatattgatggaagacacaggaaaaaccttcttaaagtgatcctgctcacgcttctcatctctattcgaaagaagaaccattgaactcaagttcttgatttttttggcttgctcctgcaaaactctttccctctgagcttgtgccttcttctcctcttctaactcaagtgctattcgctctctctctaattcagactgcagaagtacaggatatatggatatatcagaaacgtatgacagaatatacaactaagtaataaagaaaaaatgacataccttcaacaaggtgttacgcaagttaaga

SEQ ID NO: 34881 - DNA, 606 bp, Arabidopsis thaliana columbia
ttataaatacagtgaaatctatttttattggatttaaatgattacatgaaaaagagtcgcattgagtaataataagtatggcgtagacattgagctaaagttttatagaaatggaagatgttttgtcctaatcgaaaatcaaataaccaagaaagacccattccattcattaatctaaccacatggacatggtgcagttgctgtatattacaaagaaacaacacaacattaaaaagaaaaaaatccgataattaattttaatacagatatgtcgtaaattgtacagtatagtcttgttatatgtagagagcctatgtatggactgtttgttgaccattgcaacaatctcactttccctctctccccacttgcccactcctcgtcctcgatcgagagactcgcgacggttccggttcttctgctagacagttgctccagtccggtttaatccagaaccagttgttctgccatggtggaaggaagaagaagaagaagattctcgctctcctctcaacagctagctctcctcttacttttactctccttcttcctctgcttctccgtcgcgtctcctcgagctatatctgattcggatctactggatga

SEQ ID NO: 34882 - DNA, 551 bp, Arabidopsis thaliana columbia
gttttaagggatagtaggaggacaaaatcttgaaaactgtttttggatcccttcaccaggtcattcttattctgcttctgtagaaagtaataaactaaagtcataatctatcatgaatatgtgaacttttttgaatttgttgtcttagtatcaaaaagctatggttttgaagattacagctaaacttttcaaacagtgtctttaataagcattaggaatttctcgaatgtttacttgccacattgttcgattatctcttgtctctttttgcacattccttcatgtcttctttcttgtgtgtgtggctgtggcttaaaatatgtgcaggtggagcatcatttaagaatcttatgctttggctacaacgcctatggatacgggtcaaagcagcatagaaccttatcaagccaagtcttttagtcgggagagcagtgtagcctcttctttaagcttatcacgtagtttgcctcacctaattgacaatgacgtcgatagtgagagtgtccagaggcaggggatattggggacgcgcacttcggagaaggcatagt

SEQ ID NO: 34883 - DNA, 552 bp, Arabidopsis thaliana columbia
cttctctttatttatagaagcaaaataaggaatgttctaaatccattaacaagcctcatgcaactactgaactacactttgttcacacgaggcctcggaagttcttgcttcggtatgtgggaaatggttcacaagtttaacataatgggctgggcctatattactttgaaatttgtctaatgattaccacacatcattagagatattgtcactaggatcaatagaaaatgcaaagcacaaacgattacgactatatccacttatttgacgatacgttagatgctttagttgatcatttaaacaaaaaaaaagaaagagatgcaatgtttttgttcccttcaaagattttaagattttttagttaccaatcaatcaaatacaattatctacttcgacgtaagttataatatttttcaacgattgacggcatttcacgaacattagattagtatcaagaaataattcaccacgtgtcaaagtaataatacacgtgttcacttatcacgacacgtgtctattcacggacccacctctcatcgttccattgatgtt

SEQ ID NO: 34884 - DNA, 602 bp, Arabidopsis thaliana columbia
tttcgcactttatcatttagaattaaaagctagttataatatagaagaattattatatttttggttatagattcttagcaatatttctactgcaatgtaatattatacctttctttttttgttaatgtaaaattagatttttatcctatatatctttaattcataatttttttcctccagaaattatatttgatatctataactatatacattttatatctatatacatattttaaggatttgtgatagtgtacactatcgaatatgggaaaaggttttgatgtgcaatcatatttcgagcacttaacattagtgcaagagaagatatacacagttaaaaaggctggtttggaactgcaccatacccaccagttccaaaatccactcaggaaatctctttcgtgcattgccattggaagacctttaatcaaatttaaatctcattatcttctttcttcactatgagagattccaatccaagttaagaaaaaaagataccaaattactttcttaattaacaaatatattaccttatatttaaaacagtatattgtcttattttttaattaagcaatttaaataacaaactatcaaatgaaata

SEQ ID NO: 34885 - DNA, 614 bp, Arabidopsis thaliana columbia
caaagcttctcttctcactttcttcgcaactctaacaaaccctttacgcacaacaatctctcttctcttcacattaaccatctcccaaatcgatttcacaatcacgtaaaccaaatcccaaaccaaactcttcttgtccaaattcacaagctgaagtatcaaactaaacccagcttctaaagctaaacaccattcttcttcatcataatattgactcatcaacaacacactaacaatctttaaacctagaccattatccaacaacggcattaagaactcttcatcaaggactgttggcaattcactgaacatcaagagagcttttttattcccatctaatgagagaatataagaacagagctcgtcccaaggtttgtctccaatgaaaacatcaacacagacacgagatacgattcttgagaggagtttaaagtcttcatatgaagtttcttgcgagagaaggcaagtacttacacggttcttgataacatccaaagactctgtttttaaccaccacggaaaacgtcgatatccgtgagaagtgaatcgagaagatagagtgagaaagatcgaatctttggcggtataccggtaccggaactgtagatttggag

SEQ ID NO: 34886 - DNA, 786 bp, Arabidopsis thaliana columbia
tgcttcttcttcttcttatcttttctaattctggcatccaaatccgcggagtagcgaatgacggagggaacagaaacctcttgagctgctgctgctgctgcggcatagcaacccatccctcgaaacgacgacgtttggtacggtttcttcctcgtgctttcgttggaggaggaagtcgggaggggaaagaaggaagacattgcggagttacagaagcgattaggttgtgaaatcggaagaacgacgtggcttagcggcggatcatcgtcggcggcgtggagatgacggattgtttggtttctagctcgtcggagtctgatgtgctcgccgattgttgtagaagacattctcaaagaaagaaagtaaaggagataatggaaatgtgggagagagagagcgagacacagtgcgcggggaaggatgaaagagagtgatttcaagcttgatgatgatgatgatacagtttttgtataatgattatagcttttcctatataatactattaaagattttttagtttttgttttacatgcaaccattagtatgagattccaaacaaaatcagctcatgcatatcttttgtgaatactaccaaatcagaaataatgattttataagagatattgtctaggttaatttgagtatttctctgggtttttaactttttttgggcaatttagtttaatgattttgcttatttttggtttttctattccagaaaagtaaattttaaaatttttaaaatgatgcttgcttgtaaaaataggaaaggtgtcggggatcatc

SEQ ID NO: 34887 - DNA, 491 bp, Arabidopsis thaliana columbia
cccacagtttcaacttcaacattcttctccacaggcggcgacccaattggtttcttgtttagcttggcatagttatctcgtagactgtcattgatcaaatcaaaccttggactcagcttctcgctgtaaacagcgtcctcgtcctcagaagtcgaagaatgagacggcgacgaagacactttcttccttttagcagcagcagcttccccatcgccgttgttgttatcatcatcttcctcctcagctttgttgtttctggcgttaaggacttgtctgacgttgagcagaagcacttgccgagtcaagcgggcaaagttactgtatctggaacgaagatcatcgacgatatcctccgccgttgttaaatccttcccgcatgaatcaataacttgactcagatatctacgatttattcctccgcccattccaccacctccgccgccacgaccacgaccacgagctctcctcaccatcatactgcttagagcagg

SEQ ID NO: 34888 - DNA, 959 bp, Arabidopsis thaliana columbia
attcaattttagatcctaccacttcctttaacaattacagtttctctacaacaaattctttgaagaaataaaccactctccttcttaataatctaagtaccacttggaatctgattgatagtaaaaaggttattagttatacaaaattttaagtgattagtctttttttaatgaaaccttgaaatggtgagataacaagaaggctgataatgctgaattgtaacagttatatttgacatacaactactcatcaaagagacagctaacatggcaatatgtttcagacagacacacatctttgtcattctcattcatacatcacttccttcaaacttatcaacaagaatcacacaaaaactatttttcttcttcttctttcagagctagctactataattattgtaatctaactaatttgtattttacaatgattacattgtgtctattaagtcgagattactatcttcactcaattgtaactctcctttgatctggcttcaccatcttttcccctgtcatatagctaataaaaaccattaaagtattttgcatctctcactagttatgaacttgcaacatttgtttgcgacctcaagcaagtcaacaaatttcacaaagccttatccaacttaaacttgaacaaactttgggaagagatacacaactcttatattgtctatgcttatggaaggcagaggttctgtcttcagaatatatcacattttcagtttcttccattaaatttgctactagacattctaagccaattggtgaaagaccattaaccctaaccccagcctagtcttatatatactacttacatatatgcttatccacatctcactagtggaggattagacttgtgctacctacttagtaatccaatgtttaaagaacttctaagaaattccattttcataccatgattggtgagacaattacaaactgatggagaagaa

SEQ ID NO: 34889 - DNA, 582 bp, Arabidopsis thaliana columbia
ttcttttcttttgtttagaaaatattaccacttccattagttaaacaaatactacgtttgagtttttccatttttgttttatgatgatgaatcttttctctgtacgatgtgatagtcaattacttttacgtattttgtgtatacacaatgacgatagaagataatacaaaaaatctttgcaatagaaaacaattgataacatgatgattaagaaaacgattaaataattaatagtttctataacgaatggattaaaaagaatatttgacgatcttttacctttataaaatgcaaggttttaaataaaatttactctggtcaccaaaaaccttattttctaaactatttttgaaaacttcatcatatcttggaccttggtaaattaaatactttaaactaacgttatctttagtcaatgaatcacttaaaattgacgtatatggtcgttcgttgtggtgaaagggctgcgtagtggataagttggagaaggatctttaaaatataaatcaaatgacatttgaagattaaaataaaaataacttagtccgtgacatccctagaaatcacgtacgcatatacgaa

SEQ ID NO: 34890 - DNA, 589 bp, Arabidopsis thaliana columbia
gctacaatagccaaaaataaaaactttagagagctacaataaccaaaaatcaaaactttaggtagctataataaccaaaatccacaaccaaagctagagacaatgaccgtgtttgagaacattttggatttctccgtaaatcaaacaccttactaaagttttgtttgtgaagctgaaaacgatacaagtgaacctataacgtgaatgtaacagagacaaaacctgaactctcaaacataaatcctagaagaaaatagcaaaagtaaatagagagaagaatccaaaagaagagatttttttgtgaagaatgtaacagagacataaatttgaactgaaaattcaattcggaaacataaaccttagaaaaaaccgcaaaaggtaaaagagagaatccaaaagaagagttttttttttgtttttcttcaccaaatgagagaaatgtagagaatttttaaaactcaccgacgagatcaacggcggcgaaggatgaacaacggcgacgttttggagagtttggagcagttttctttagcattatttattttttttatcagagttttttttagcattattgtgacaactgacaagt

SEQ ID NO: 34891 - DNA, 639 bp, Arabidopsis thaliana columbia
tcatctgattgatttaccattccctgtttttatgtacacatccttcctgcttttgattatctttcttcaatcgctttcaaagtcgtcttcatctccaaatgagaacacagatgcatcagccgccataaccttgaactcactctctgagcttgaagaagcattgaccccagccccagagggtttttctgttgcttcacccttgctcacagttactccttgcaccggctgtgatgatcctttgtttccagaaatagacactttctctgtcgctttagtcagaacagcggtttcatctgcgctctttttggcttctggggtttgagaagaagccgatgatgtggttttggtcgggccagttgagtctccttcgttatcagagaacacatcgtccttatcaggattctctgtttctttatcgggtcctggaaccgatgcagagccgtctacaggggacgaattagctgctgaagtttcttccggtgttttggatgctgtttcagaactagggttcgtagggattgttgcatttatatcagctagaacaacttcaaccataaatccaggcgatggtagctcctctgcagtggacaaaggcaaacacaaatatgtacatttcaacatgaggacggatggagaaag

SEQ ID NO: 34892 - DNA, 723 bp, Arabidopsis thaliana columbia
gggagaaactttctgctccatcgctgttctctgtgtcattctcaggcacgtcaactccgtacagaactctatctttctctgcatcgactccaagttattcaccaatgccgttgataagccccatcaacggaggaagaggaggagaaagagctccgtttctctctgggaggaacattagagaacgttgcgggtttggtccaaagaaagcattggccaattatctccggggttgaatgttaagttaaaaaatttggatttagattctttctgtctgtatcacacaacacgttctttatgttgttgttgttgttgttgtcctgtctcaaggagttaagaaccaagcacaattcgtttttatataatgtatttgttgattgatcgatacacaatctcatatcttattattagatcaaacaagagtcaaaagaccatcttcttttaagataaacaccaggaatggtaaaatgttaataaaattattagtgtctttgggtgttattcgaatttgtaatgaatctgtttaaaattttattatcatgtgaccaaaaacaaataatgaatctgtttaaaactttattatcatgtgaccaaaaacaatggttaaaccaaaaagcttaaccgaaattaaagtttaatgactttattattgactagcgtaaaacttgattactccacggtcactatcttaacaacagaggaaccatcaatcttgtgcacgccaca

SEQ ID NO: 34893 - DNA, 624 bp, Arabidopsis thaliana columbia
tttacaattcttagcgagtcttccattcccagatccgtaatctcgcgacaaccacgaagcttaacacgagtcagattcaaacaacgaacagagatcatagccaaagcttcatcgctcaagctaacagacttccgatcacatcggagagcaagcttcgtcaccgaatcgaatcgattgaacatagaggtaaggaaagaggagatctcatccttagcatctagagataaccgatgacgactctgaccgtcgacgagcaaccaccgtttacaaacaagagagcatcgcttccgatctccagctccaagaaactgaaacacatgagctaaacactcatccggcagatctccggtgaaatcccgatccacaacattccccacagccatcgattcacctccagcaacaatcaccggagaccataacctcaaatctaactctcgtccgttcgattccgccgtagacgacggcgcttggcccatcaccaaccgaatggtttcgatttcctcctttctcttcctctccaatttttttttttccctttattttattttttgttgtttttttggtttgaggaattataaagtacacacagtaacggctcatcccgtcaaataagggaacacgtgt

SEQ ID NO: 34894 - DNA, 280 bp, Arabidopsis thaliana columbia
gaatgcaatgtagagttgaaaatccagatcactccatttagtagaaactacatagagaacaagaattacctgagccaccttcatgaaaccattggtgaagtcttttcccttcagaagagagagctgttgaatgcggaacattgctgcatttcctcttacccccggaacagctaatgcagaagacagtgcaccaggaatggtcaaatccggttctttagtttttactgtttcagtgatattcttctttcctaaaccccttgctttctcgctcgccaaaaca

SEQ ID NO: 34895 - DNA, 510 bp, Arabidopsis thaliana columbia
agtttacgttttcttatgtaaacaaggcggaggttggatatgcatgccaaagaaaacagagttacatcatttcaaattgtcttcctatacaaacgtagcaggttcatggaatgaaacgccaagtttgttatttgcatgacaccaaaaagacatgtttaaaatgaaaatcaaggacgctgatgtcagatagcacataccttcattaatgacatgtcaatgcacacacctccttttggagcaagggtatgaccctcgatcgatgttgccccaccatatggtacaataggaacctaattaaaaagcaaatgatatatcaatccacgaggaagctacatatatgccaagtaacatagcatgttggccaagactagattgaaaaagacttgagcactaaatcttcttacaaaccttatattcattgcaggatttaagaatcttggagacttcatcttcggacctaaacatattttaagagaggctcaagatcaatgcattctttttggcttataa

SEQ ID NO: 34896 - DNA, 545 bp, Arabidopsis thaliana columbia
cgttttaaaagtccatatttcatatgatttaccagtatgcagtatgtaaaagttatatgaaatagaggtcacctaagttctcgttcatatattcttatgaacaaacaaatgaaattgcaggtccacttcacaaccgataacctcttttagccgaagaataaattcgttcaaagaccaatttaatacaattctttatggtccatacgttagacagattagaattaagccacgtctttggagaattctaatctagattattttcgaaaaactagtttttactagtttagcaaagttttactatatcaatataataaaagtaactttgataatgatatatcttcttaggaaacggtgacagagttttagtttaatcctttctgttacaaaactcctatttcttgtttcgttactcaaatgttatttggtttttacgttttttattgctaatcctgacatgcaacagaaacataaaaatggaagaacagaatatcaaccttgaaacctgaacaaacaactcaacggaagcaaacaccaaaaaagaaaga

SEQ ID NO: 34897 - DNA, 582 bp, Arabidopsis thaliana columbia
agagtatcccctacaaataattaatatgcaaaaaactaaaaaatgaagtagtcgtcaaaattccgtgcggcatatggggcgtagtttgattatgcttttgaatgaggtcatgggccacgtgaaggtctatggggttaggtttgggtcgcacatgatacaaccaaggattctacagaatgttatatgtaatttataataaatatatgtaattcttatttcataaaactgagagcgtttagaatggagttcttaattaattagacacgcatcttctaaactaacttgtttctaggtttacgctatataatgcattcggtccagctgtgttcaaaccatttttcaagtaaattaaaaccattcttcatattgtaatcaaattagtcttatcaggggttaagagaactgatgaagaaacccttatatcaattatttcagtgtacatatgtatttatatgtcaatgatgagaagattatctatctgtaattctcaatatgactcactatactgctctgtctcaagtttgtagagtactgaaatcttgtattctactatggataatgacgaatagatctcacaagtag

SEQ ID NO: 34898 - DNA, 820 bp, Arabidopsis thaliana columbia
gggacaatggtaaagcaacagtacgcatcatcatcccaaatgtacaaaacaatgatcaactaaactcctttatacacaattaacctgcacaaaatcgagaattagcttcgcagaacattaaacaatattcaaactaccaaaaaccttccaaaatcatttgcataattacaaaagattagcataatctttctaacttcacgcatgcaacagagatgacaatactgagacaatttcatcaaattatcgaaattcgcactaattaacgccgatctttgtctaatcaagtatgattaaagtacaattcacacaatttccttcaaaatcttctctaatttcacgcaaaattaacccggaaaatgcaagaatttcgcggaagttacctactccgtacgaaattgagaaaatccagagagagatcggaagcaaacgacgagaagcaagacgcaatcggagaagatcagtggttaaaatgagagatagaaacggtgagcttcttcttcctcttcgtctttttgattagtttctttctttgttcaaaaaatcaacaacaacaacaaaaagagtacaagacattcctttagctaacgtgcgcgaggaggagctttgacgtatcaatctaaaatacgccaattcgtggcagcttcattaacccagagacaaacgatcactccgagttttttttttttttggattaaagaggaaaaatggaaatgatgatgaatggatattttcaattttgagtggtccgcaaatttacgattttcccaaacggaatttttgactcttatccgcaatactttccacgtgatctataattgga

SEQ ID NO: 34899 - DNA, 701 bp, Arabidopsis thaliana columbia
tccctcttaacatttgtgccaaaaatatgtaagataaatcatccataattctctgtttttaaaacaaccaataattatatgtgtatatcacgtttatgcgatccataatttttaatatattagagatgatcatgatagtgattctttagctaaaactcgtcatcagaggaagccgactcgtcgtcattaggagttgctggcgtagctggagctagtggttcactagtgatatcatttgtgtcaaggtcatgcaacttgagactagaagcaaggttgagactcgtatcgcttaaatccccgtcagaatggtgttggcgcggattttttccttggttgaatgctagaaaatatgtggaggagcgtacttcttcacggcgcgcgtcagtttagtgatgatcaaaccctgacatgctagtttcctgtcaaggcgtgcttggttgttctccagcctactgatagaagagtagaaccacttgtccgtctcggtgcgcagtggagcatttacaggttggtgaaatggtggatagatagaagggttctcactggagagctacttggtgtcaatttgcattgactttcgcttctttgtgtaatatttgcttagcggtctgttgctagtagcgtcatagaaggaactttctgaaggcggaaatggtgtactgttcgacttaatcgatggaagatgctggctggataacaaa

SEQ ID NO: 34900 - DNA, 608 bp, Arabidopsis thaliana columbia
cctctcttctttgtcttccctctctaaaatccttctcccaaaaatcaaggagttgagagagggaagaactttaacaaaagaatttaagaactgaagaaggaggaataaacatcgaaatgtcgggctcgaggcttttcttcggagtttctacaattgtatcgataattttcgccattttgttgccgatggcacatgctcaatccgcagctcctgctccggctccaacaagcgacggtgagttgatataattatcatcaatggttaactacagaggtttcttgaaaattttcagatgtgtgaatatcttaaatgtctctatacatgcatgctcacaaaattatctagttaatctatgccttttgtcataagatataataaaagagtagttaattagttatctcttaaccaatgaatatgtagttctactctctaatgctttagataaaacaatgccatgtccataagattcggatttctctagtaattaactggaaatgttatatcaaataaccataaagctgtaacgtaaaattgctgatttctttattagatattacaattatatctgttcggatggttaattatggaacaacatattgcaggaacaa

SEQ ID NO: 34901 - DNA, 466 bp, Arabidopsis thaliana columbia
  unsure (1)..(466): unsure at all n locations
tgttgagttgttattgaaagagtaaataaaatgggttggcattggtcattgatgtttacagctacacacaaattgggaatattaattagaaaataattgtatgacaaatatatatataaaaacctatagagtgtaataattgtaaagaaaggaggaatttttagcgcgtggcgggcgtgtcgatgcggttcgtgtcggttgcgacctttggagtccccgtgtggtgtgttgttcttgttcctctggtcccggagtctgagtcgcttaactggcttgtgtagcgctgtgctgtgtggcttggtttccggtgtcagtgcgtgtttcggtttcgtgggcagtgggcttccgggttcgggggtttgtgttgggcggtgcttgcgcgtgggtttgtgtggggacagaaaggtgtttgctcggcccggtgggnaggtgctggttgcgacgaccttggttgtggttggttgtg

SEQ ID NO: 34902 - DNA, 1064 bp, Arabidopsis thaliana columbia
taacaatttgtcaatgaaaaaatccacaaaagcttctctgagtcaattaaaatgtcctaagagacaacactcttctcgacataacagagcgtcagaaccattggttccaaatttctcgctgccttattcttatcgtcatcctccgaccaaagttccatcttctgcacagagatgttgatgaagcactgttttgtgtctcataacgccaatgatctctgtttctctttctccaactccaaattcaatcttgcaagctgcccaaagaagccacctcgtctcacctgcgttgtcaatgttggattccaagatatcgctgaggtcatccacaacaaggtttcgcctttttctcttctttcattcctttttttggagggtcatcgtcacttaggcttttgatttcaccggcgtgaaggtactcatagctgctgggacttctgctgtgattgggcagctctcaaagccattcacttctgtcgttttgtatgggaaaaatctggactttagaagtgtctttcaagctggaggtttcccttcaacacattcttctgtaagcttatcctttttttattcttgtttcctctggtaatattgtttgtctacttctctgacattttggcctaattcttgagaaaccagtctgttgtggctgcagcaactgctattgcttttgaaaggtgattagcctgaacctttctcttctcaattcccctaaatatactcagcttatgcaatttcctgaatatggtttggcttcaggggatttgctgactccatttttggtctaactgtggtttatgctggccttatcatgtatgatgcccaggtaaaatagtctatagagaaaagcttaggctggcttttgttcaataggtctttgttggttattctcaaattctcaatgtctgattctagtgttatcttaatgtctcactgattgtaacattgcagggggtgaggagagaagttggaaaacatgccaaagtgttgaacaaactaacagctaatgctcgtagaagtgaagtaatgagtttaaagggcaacgaatctaacaaagctttgacatc

SEQ ID NO: 34903 - DNA, 562 bp, Arabidopsis thaliana columbia
ccagtcgacacaaccaaaaccaaaatgaacaagtcagagggaatgttgacgctgtagtaatcttctgtgaagctgcagagaacagttccatgaaccaaaatccaaacaagcaatgcatatgtttctggaacaaatatgaacaagttcttggagatctaagcaaaagagtaagatcagtgacttcaagcaatttttcaattgatttttgaacgctgtaatttcgtgttaaatattggtttcaagtttgtgggttactctgcacaaattgggcattgaagttccaacccattattggtttcaagtttgtgggttatcttctgtttgagttaatgtttttttcgtataacttacaaaggaattctaactataacacaaataactgttgtttctttatgaatgaaaacgcattcttataacatgcaagtgttaagcaaaagagctaatacaaacaaacaatcgaaactctgtgacaatttcttgtttgaatggaagtcaataaacctttcttattgccatcgactgtgacgccttcgaacagcccctgtctggattaagagctgac

SEQ ID NO: 34904 - DNA, 469 bp, Arabidopsis thaliana columbia
tcatttttctatgtagagaaccatggaggcgttcttgatcatactctcagtcacccagcttatttacatcgctggagttcatggcatgagggaccttaaggaatcatgggcgtcgggtttctactgtggcaaatggcaatcatccgaaactcgggattgtgtgtgtgagcgtttgtatttgtgtgagtgtgctttattttgttcataggaagcttaagataaattcatgcattctttatgtacaaaaggattagatcttgtcttgtgtgttgtcactttgtgttcatagcataagatcgaactttgaggcttgattcaggtcatgcctctatatataatcgaatgaacgtcagccagatgataatagatatacacaagaagaatgtatttcaaagaataatctcatgttctaaaatccatattgcaaatttagttatttcatggtacttaaacatgtgggatcatcaat

SEQ ID NO: 34905 - DNA, 582 bp, Arabidopsis thaliana columbia
cgcagatcgttacatagtagagaaacgagaggaacttgtaagttgtcacagtatgaatctgagtcggagatgaagtatgtgcctgtgcgctactctgagtgcgatgtccaatacattagcccactgtcaaaaaaattgtggtcagtgaccagacaccagagatatatacaaatagattagtataagatgatatgcagtatacgaaaacaaaaaggttaggatgcttcactgattgcaattcaaatcacatttgctaggtttggaagttactgttaccagtacaaaatctattgtgattatgaaagatgattctaacgaaaagttttagtccagatgcgaaaagaagacagccacattagttaagaatggaagtgttagaatccaaaggactatgactaaaattgtaagaatcactaaatctatttgtacaagtttgggtaattttgtaggagtatttgtgtcaattcccaatctaaaaagcagtgtttagtgttcaagaaatgccaaccagaagagtgcatagaatagctttccttatcaatcaaatcacattgaaagcaccagcacaccagtcgaagttga

SEQ ID NO: 34906 - DNA, 569 bp, Arabidopsis thaliana columbia
  unsure (1)..(569): unsure at all n locations
ggtgagacttttctctatttcgaaccttatagacaaatttggaaatcccaccattgttgccttcatgacacgtccattttctgtcatttttctatgtagagaaccatggaggcgttcttgatcatactctcagtcacccagcttatttacatcgcagcagttcatggcgtgaggagaccttaaggaatcattcatgggcgtcggatttcttttcttcctattgtggcaatcatccgaaactcgggattgtgtgtgtgagcgtttgtatttgtgtgagtgtgctttattttcttcataggaagcttaagataaattcatgcattctttatgtacaaaaggattagatcttgttttgtgtgttgtcactttgtgttcatggaataaaatcgaactttgaggcttggttccggtcatccctctatatataatctaacgaactacagaaagatgataatagatagaaaaactaagaatgtatttcaaagaataatctgatgttctaaaatccatttgatgaccanaagaagattgtattcacagaataaaagaagtttacctgttttgcatat

SEQ ID NO: 34907 - DNA, 413 bp, Arabidopsis thaliana columbia
aattaacttcacgtcagcccatgaaacgtaagtaaaaactaacgcaaacatctaaaagttaccgaaaatctgacgtaaaccataaatgtaacggacgtatttaaatgtagtgtaatgaagaactccataaatatatatatcatttcgcttactagcagtatcatgctgattatattgatgttcggatcgaattaacctgttcctgccatttaatcttgatatatcgttttcaccatttcccgaaccccacttgacctggagctttccaccctgacttgtttcgcatcgtttgcttccctgactcccctttttccttcccctgcctcctatggtcttccgctcactcctcgccccctacctcccccttgctttcgcccttggtatagttcgcccccttggggctcatccccggg
